United States Patent Application Publication US 2021/0260178 A1 - sequence listing, part 15

SEQ ID NO: 24880 - RNA, 1714 nt, Artificial Sequence
  mRNA product Design a-1 (hSL-A64-N5) comprising derived and/or modified sequence from LASV(Lassa virus/H.sapiens-wt/NGA/2016/ISTH_0009;Clade II)__AVO03571__GPCmut3 (opt4)
aggagagucccgcagucggcguccagcggcucugcuuguucgugugugugucguugcaggccuuauucaagcuuaccaugggccagaucaucaccuucuuccaggaggugccccacgugaucgaggaggugaugaacaucgugcugaucgcccugagccugcuggccauccugaagggcaucuacaacguggccaccugcggccugcugggccuggugagcuuccugcugcugugcggcagaagcugcagcaccaccuacaagggcguguacgagcugcagacccuggagcuggacauggccagccugaacaugaccaugccccugagcugcaccaagaacaacagccaccacuacaucauggugggcaacgagaccggccuggagcugacccugaccaacaccagcaucaucaaccacaaguucugcaaccugagcgacgcccacaagaagaaccuguacgaccacgcccugaugagcaucaucagcaccuuccaccugagcauccccaacuucaaccaguacgaggccaugagcugcgacuucaacggcggcagaaucagcgugcaguacaaccugagccacagcuacgccguggacgccgccaaccacugcggcaccaucgccaacggcgugcugcagaccuucaugagaauggccuggggcggcagcuacaucgcccuggacagcggcaagggcagcugggacugcaucaugaccagcuaccaguaccugaucauccagaacaccaccugggaggaccacugccaguucagcagacccagccccaucggcuaccugggccugcugagccagagaaccagagacaucuacaucagcagaagaagaagaggcaccuucaccuggacccugagcgacagcgagggcaacgagacccccggcggcuacugccugaccagauggaugcugaucgaggccgagcugaagugcuucggcaacaccgccguggccaagugcaacgagaagcacgacgaggaguucugcgacaugcugagacuguucgacuucaacaagcaggccaucagaagacugaagacccccgcccagaugagcauccagcugaucaacaaggccgugaacgcccugaucaacgaccagcugaucaugaagaaccaccugagagacaucaugggcauccccuacugcaacuacagcaaguacugcuaccugaaccacaccgugaccggcaagaccagccugcccagaugcugccuggugagcaacggcagcuaccugaacgagacccacuucagcgacgacaucgagcagcaggccgacaacaugaucaccgagcugcugcagaaggaguacaucgacagacagggcaagaccccccugggccugguggaccuguucguguucagcaccagcuucuaccugaucagcaucuuccugcaccuggugaagauccccacccacagacacaucaccggcaagcccugccccaagccccacagacugaaccacaugggcaucugcagcugcggccuguacaaccaccccggcgugcccgugaaguggaagagaugaggacuagucccuguucccagagcccacuuuuuuuucuuuuuuugaaauaaaauagccugucuuucagaucucaaaggcucuuuucagagccaccaaaaaaaaaaaaaaaaaaaaaaaaaaaaaaaaaaaaaaaaaaaaaaaaaaaaaaaaaaaaaaaaagaauu

SEQ ID NO: 24881 - RNA, 1714 nt, Artificial Sequence
  mRNA product Design a-1 (hSL-A64-N5) comprising derived and/or modified sequence from LASV(Lassa virus/H.sapiens-wt/NGA/2016/ISTH_0017;Clade II)__AVO03567__GPCmut3 (opt4)
aggagagucccgcagucggcguccagcggcucugcuuguucgugugugugucguugcaggccuuauucaagcuuaccaugggccagaucaucaccuucuuccaggaggugccccacgugaucgaggaggugaugaacaucgugcugaucgcccugagccugcuggccauccugaagggcaucuacaacguggccaccugcggccuguucggccuggugagcuuccugcugcugugcggcagaagcugcagcaccaccuacaagggcguguacgagcugcagacccuggagcuggacauggccagccugaacaugaccaugccccugagcugcaccaagaacaacagccaccacuacaucauggugggcaacgagaccggccuggagcugacccugaccaacaccagcaucaucaaccacaaguucugcaaccugagcgacgcccacaagaagaaccuguacgaccacgcccugaugagcaucaucagcaccuuccaccugagcauccccaacuucaaccaguacgaggccaugagcugcgacuucaacggcggcaagaucagcgugcaguacaaccugagccacaccuacgccaucgacgccgccaaccacugcggcaccaucgccaacggcgugcugcagaccuucaugagaauggccuggggcggcagcuacaucgcccuggacagcggcaagggcagcugggacugcaucaugaccagcuaccaguaccugaucauccagaacaccaccugggaggaccacugccaguucagcagacccagccccaucggcuaccugggccugcugagccagagaaccagagacaucuacaucagcagaagaagaagaggcaccuucaccuggacccugagcgacagcgagggcaacgagacccccggcggcuacugccugaccagauggaugcugaucgaggccgagcugaagugcuucggcaacaccgccguggccaagugcaacgagaagcacgacgaggaguucugcgacaugcugagacuguucgacuucaacaagcaggccaucagaagacugaagacccccgcccagaugagcauccagcugaucaacaaggccgugaacgcccugaucaacgaccagcugaucaugaagaaccaccugagagacaucaugggcauccccuacugcaacuacagcaaguacugcuaccugaaccacaccgugaccggcaagaccagccugcccagaugcugccuggugagcaacggcagcuaccugaacgagacccacuucagcgacgacaucgagcagcaggccgacaacaugaucaccgagcugcugcagaaggaguacauggacagacagggcaagaccccccugggccugguggaccuguucguguucagcaccagcuucuaccugaucagcaucuuccugcaccuggugagaauccccacccacagacacgugaucggcaagcccugccccaagccccacagacugaaccacaugggcaucugcagcugcggccuguacaagcaccccggcgugcccgugaaguggaagagaugaggacuagucccuguucccagagcccacuuuuuuuucuuuuuuugaaauaaaauagccugucuuucagaucucaaaggcucuuuucagagccaccaaaaaaaaaaaaaaaaaaaaaaaaaaaaaaaaaaaaaaaaaaaaaaaaaaaaaaaaaaaaaaaaagaauu

SEQ ID NO: 24882 - RNA, 1714 nt, Artificial Sequence
  mRNA product Design a-1 (hSL-A64-N5) comprising derived and/or modified sequence from LASV(Lassa virus/H.sapiens-wt/NGA/2018/ISTH_0959;Clade II)__AVV65099__GPCmut3 (opt4)
aggagagucccgcagucggcguccagcggcucugcuuguucgugugugugucguugcaggccuuauucaagcuuaccaugggccagaucaucaccuucuuccaggaggugccccacgugaucgaggaggugaugaacaucgugcugaucgcccugagccugcuggccauccugaagggcaucuacaacguggugaccugcggccuguucggccuggugagcuuccugcugcugugcggcagaagcugcagcaccaccuacaagggcguguacgagcugcagacccuggagcuggacauggccagccugaacaugaccaugccccugagcugcaccaagaacaacagccaccacuacaucauggugggcaacgagaccggccuggagcugacccugaccaacaccagcaucaucaaccacaaguucugcaaccugagcgacgcccacaagaagaaccuguacgaccacgcccugaugagcaucaucagcaccuuccaccugagcauccccaacuucaaccaguacgaggccaugagcugcgacuucaacggcggcaagaucagcgugcaguacaaccugagccacgccuacgccaucgacgccgccaaccacugcggcaccaucgccaacggcgugcugcagaccuucaugagaauggccuggggcggcagcuacaucgcccuggacagcggcaagggcagcugggacugcaucaugaccagcuaccaguaccugaucauccagaacaccaccugggaggaccacugccaguucagcagacccagccccaucggcuaccugggccugcugagccagagaaccagagacaucuacaucagcagaagaagaagaggcaccuucaccuggacccugagcgacagcgagggcaacgagacccccggcggcuacugccugaccagauggaugcugaucgaggccgagcugaagugcuucggcaacaccgccguggccaagugcaacgagaagcacgacgaggaguucugcgacaugcugagacuguucgacuucaacaagcaggccaucagaagacugaagacccccgcccagaugagcauccagcugaucaacaaggccgugaacgcccugaucaacgaccagcugaucaugaagaaccaccugagagacaucaugggcauccccuacugcaacuacagcaaguacugcuaccugaaccacaccgugaccggcaagaccagccugcccagaugcugccuggugagcaacggcagcuaccugaacgagacccacuucagcgacgacaucgagcagcaggccgacaacaugaucaccgagcugcugcagaaggaguacaucgacagacagggcaagaccccccugggccugguggaccuguucguguucagcaccagcuucuaccugaucagcaucuuccugcaccuggugaagauccccacccacagacacgugaucggcaagcccugccccaagccccacagacugaaccacaugggcaucugcagcugcggccuguacaagcaccccggcgugcccgugaaguggaagagaugaggacuagucccuguucccagagcccacuuuuuuuucuuuuuuugaaauaaaauagccugucuuucagaucucaaaggcucuuuucagagccaccaaaaaaaaaaaaaaaaaaaaaaaaaaaaaaaaaaaaaaaaaaaaaaaaaaaaaaaaaaaaaaaaagaauu

SEQ ID NO: 24883 - RNA, 1714 nt, Artificial Sequence
  mRNA product Design a-1 (hSL-A64-N5) comprising derived and/or modified sequence from LASV(LASV003-NIG-2008;Clade II)__AIT17580__GPCmut3 (opt4)
aggagagucccgcagucggcguccagcggcucugcuuguucgugugugugucguugcaggccuuauucaagcuuaccaugggccagaucaucaccuucuuccaggaggugccccacgugaucgaggaggugaugaacaucgugcugaucgcccugagccugcuggccauccugaagggcaucuacaacguggccaccugcggccuguucggccuggugagcuuccugcugcugugcggcagaagcugcagcaccaccuacaagggcguguacgagcugcagacccuggagcuggacauggccagccugaacaugaccaugccccugagcugcaccaagaacaacagccaccacuacaucauggugggcaacgagaccggccuggagcugacccugaccaacaccagcaucaucaaccacaaguucugcaaccugagcgacgcccacaagaagaaccuguacgaccacgcccugaugagcaucaucagcaccuuccaccugagcauccccaacuucaaccaguacgaggccaugagcugcgacuucaacggcggcaagaucagcgugcaguacaaccugagccacaccuacgccguggacgccgccaaccacugcggcaccaucgccaacggcgugcugcagaccuucaugagaauggccuggggcggcagcuacaucgcccuggacagcggcaagggcagcugggacugcaucaugaccagcuaccaguaccugaucauccagaacaccaccugggaggaccacugccaguucagcagacccagccccaucggcuaccugggccugcugagccagagaaccagagacaucuacaucagcagaagaagaagaggcaccuucaccuggacccugagcgacagcgagagcaacgagacccccggcggcuacugccugaccagauggaugcugaucgaggccgagcugaagugcuucggcaacaccgccguggccaagugcaacgagaagcacgacgaggaguucugcgacaugcugagacuguucgacuucaacaagcaggccaucagaagacugaaggcccccgcccagaugagcauccagcugaucaacaaggccgugaacgcccugaucaacgaccagcugaucaugaagaaccaccugagagacaucaugggcauccccuacugcaacuacagcaaguacugcuaccugaaccacaccgugaccggcagaaccagccugcccagaugcugccuggugagcaacggcagcuaccugaacgagacccacuucagcgacgacaucgagcagcaggccgacaacaugaucaccgagcugcugcagaaggaguacauggacagacagggcaagaccccccugggccugguggaccuguucguguucagcaccagcuucuaccugaucagcaucuuccugcaccuggugaagauccccacccacagacacgugaucggcaagcccugccccaagccccacagacugaaccacaugggcaucugcagcugcggccuguacaagcaccccggcgugcccgugaaguggaagagaugaggacuagucccuguucccagagcccacuuuuuuuucuuuuuuugaaauaaaauagccugucuuucagaucucaaaggcucuuuucagagccaccaaaaaaaaaaaaaaaaaaaaaaaaaaaaaaaaaaaaaaaaaaaaaaaaaaaaaaaaaaaaaaaaagaauu

SEQ ID NO: 24884 - RNA, 1714 nt, Artificial Sequence
  mRNA product Design a-1 (hSL-A64-N5) comprising derived and/or modified sequence from LASV(LASV035-NIG-2009;Clade II)__AIT17588__GPCmut3 (opt4)
aggagagucccgcagucggcguccagcggcucugcuuguucgugugugugucguugcaggccuuauucaagcuuaccaugggccagaucaucaccuucuuccaggaggugccccacgugaucgaggaggugaugaacaucgugcugaucgcccugagccugcuggccauccugaagggcaucuacaacguggccaccugcggccuguucggccuggugagcuuccugcugcugugcggcagaagcugcagcaccaccuacaagggcguguacgagcugcagacccuggagcuggacauggccagccugaacaugaccaugccccugagcugcaccaagaacaacagccaccacuacaucauggugggcaacgagaccggccuggagcugacccugaccaacaccagcaucaucaaccacaaguucugcaaccugagcgacgcccacaagaagaaccuguacgaccacgcccugaugagcaucaucagcaccuuccaccugagcauccccaacuucaaccaguacgaggccaugagcugcgacuucaacggcggcaagaucagcgugcaguacaaccugagccacgccuacgccguggacgccgccaaccacugcggcaccaucgccaacggcgugcugcagaccuucaugagaauggccuggggcggcagcuacaucgcccuggacagcggcaagggcagcugggacugcaucaugaccagcuaccaguaccugaucauccagaacaccaccugggaggaccacugccaguucagcagacccagccccaucggcuaccugggccugcugagccagagaaccagagacaucuacaucagcagaagaagaagaggcaccuucaccuggacccugagcgacagcgagggcaacgagacccccggcggcuacugccugaccagauggaugcugaucgaggccgagcugaagugcuucggcaacaccgccguggccaagugcaacgagaagcacgacgaggaguucugcgacaugcugagacuguucgacuucaacaagcaggccaucagaagacugaaggcccccgcccagaugagcauccagcugaucaacaaggccgugaacgcccugaucaacgaccagcugaucaugaagaaccaccugagagacaucaugggcauccccuacugcaacuacagcaaguacugcuaccugaaccacaccgugaccggcaagaccagccugcccagaugcugccuggugagcaacggcagcuaccugaacgagacccacuucagcgacgacaucgagcagcaggccgacaacaugaucaccgagcugcugcagaaggaguacaucgacagacagggcaagaccccccugggccugguggaccuguucguguucagcaccagcuucuaccugaucagcaucuuccugcaccuggugaagauccccacccacagacacgugaucggcaagcccugccccaagccccacagacugaaccacaugggcaucugcagcugcggccuguacaagcaccccggcgugcccgugaaguggaagagaugaggacuagucccuguucccagagcccacuuuuuuuucuuuuuuugaaauaaaauagccugucuuucagaucucaaaggcucuuuucagagccaccaaaaaaaaaaaaaaaaaaaaaaaaaaaaaaaaaaaaaaaaaaaaaaaaaaaaaaaaaaaaaaaaagaauu

SEQ ID NO: 24885 - RNA, 1714 nt, Artificial Sequence
  mRNA product Design a-1 (hSL-A64-N5) comprising derived and/or modified sequence from LASV(LASV1000-NIG-2009;Clade II)__AIT17782__GPCmut3 (opt4)
aggagagucccgcagucggcguccagcggcucugcuuguucgugugugugucguugcaggccuuauucaagcuuaccaugggccagaucaucaccuucuuccaggaggugccccacgugaucgaggaggugaugaacaucgugcugaucgcccugagccugcuggccauccugaagggcaucuacaacguggccaccugcggccuguucggccuggugagcuuccugcugcugugcggcagaagcugcagcaccaccuacaagggcguguacgagcugcagacccuggagcuggacauggccagccugaacaugaccaugccccugagcugcaccaagaacaacagccaccacuacaucauggugggcaacgagaccggccuggagcugacccugaccaacaccagcaucaucaaccacaaguucugcaaccugagcgacgcccacaagaagaaccuguacgaccacgcccugaugagcaucaucagcaccuuccaccugagcauccccaacuucaaccaguacgaggccaugagcugcgacuucaacggcggcaagaucagcgugcaguacaaccugagccacaccuacgccguggacgccgccaaccacugcggcaccaucgccaacggcgugcugcagaccuucaugagaauggccuggggcggcagcuacaucgcccuggacagcggcaagggcagcugggacugcaucaugaccagcuaccaguaccugaucauccagaacaccaccugggaggaccacugccaguucagcagacccagccccaucggcuaccugggccugcugagccagagaaccagagacaucuacaucagcagaagaagaagaggcaccuucaccuggacccugagcgacagcgagggcaacgagacccccggcggcuacugccugaccagauggaugcugaucgaggccgagcugaagugcuucggcaacaccgccguggccaagugcaacgagaagcacgacgaggaguucugcgacaugcugagacuguucgacuucaacaagcaggccaucaagagacugaagacccccgcccagaugagcauccagcugaucaacaaggccgugaacgcccugaucaacgaccagcugaucaugaagaaccaccugagagacaucaugggcauccccuacugcaacuacagcaaguacugcuaccugaaccacaccgugaccggcaagaccagccugcccagaugcugccuggugagcaacggcagcuaccugaacgagacccacuucagcgacgacaucgagcagcaggccgacaacaugaucaccgagcugcugcagaaggaguacaucgacagacagggcaagaccccccugggccugguggaccuguucguguucagcaccagcuucuaccugaucagcaucuuccugcaccuggugaagauccccacccacagacacguggugggcaagcccugccccaagccccacagacugaaccacaugggcaucugcagcugcggccuguacaagcaccccggcgugcccgugaaguggaagagaugaggacuagucccuguucccagagcccacuuuuuuuucuuuuuuugaaauaaaauagccugucuuucagaucucaaaggcucuuuucagagccaccaaaaaaaaaaaaaaaaaaaaaaaaaaaaaaaaaaaaaaaaaaaaaaaaaaaaaaaaaaaaaaaaagaauu

SEQ ID NO: 24886 - RNA, 1714 nt, Artificial Sequence
  mRNA product Design a-1 (hSL-A64-N5) comprising derived and/or modified sequence from LASV(LASV221-NIG-2010;Clade II)__AIT17624__GPCmut3 (opt4)
aggagagucccgcagucggcguccagcggcucugcuuguucgugugugugucguugcaggccuuauucaagcuuaccaugggccagaucaucaccuucuuccaggaggugccccacgugaucgaggaggugaugaacaucgugcugaucgcccugagccugcuggccauccugaagggcaucuacaacguggccaccugcggccuguucggccuggugagcuuccugcugcugugcggcagaagcugcagcaccaccuacaagggcguguacgagcugcagacccuggagcuggacauggccagccugaacaugaccaugccccugagcugcaccaagaacaacagccaccacuacaucauggugggcaacgagaccggccuggagcugacccugaccaacaccagcaucaucaaccacaaguucugcaaccugagcgacgcccacaagaagaaccuguacgaccacgcccugaugagcaucaucagcaccuuccaccugagcauccccaacuucaaccaguacgaggccaugagcugcgacuucaacggcggcaagaucagcgugcaguacaaccugagccacaccuacgccaucgacgccgccaaccacugcggcaccaucgccaacggcgugcugcagaccuucaugagaauggccuggggcggcagcuacaucgcccuggacagcggcaagggcagcugggacugcaucaugaccagcuaccaguaccugaucauccagaacaccaccugggaggaccacugccaguucagcagacccagccccaucggcuaccugggccugcugagccagagaaccagagacaucuacaucagcagaagaagaagaggcaccuucaccuggacccugagcgacagcgagggcaacgagacccccggcggcuacugccugaccagauggaugcugaucgaggccgagcugaagugcuucggcaacaccgccguggccaagugcaacgagaagcacgacgaggaguucugcgacaugcugagacuguucgacuucaacaagcaggccaucagaagacugaagacccccgcccagaugagcauccagcugaucaacaaggccgugaacgcccugaucaacgaccagcugaucaugaagaaccaccugagagacaucaugggcauccccuacugcaacuacagcaaguacugcuaccugaaccacaccgugaccggcaagaccagccugcccagaugcugccuggugagcaacggcagcuaccugaacgagacccacuucagcgacgacaucgagcagcaggccgacaacaugaucaccgagaugcugcagaaggaguacauggacagacagggcaagaccccccugggccugguggaccuguucguguucagcaccagcuucuaccugaucagcaucuuccugcaccuggugaagauccccacccacagacacgugaucggcaagcccugccccaagccccacagacugaaccacaugggcaucugcagcugcggccuguacaagcaccccggcgugcccgugaaguggaagagaugaggacuagucccuguucccagagcccacuuuuuuuucuuuuuuugaaauaaaauagccugucuuucagaucucaaaggcucuuuucagagccaccaaaaaaaaaaaaaaaaaaaaaaaaaaaaaaaaaaaaaaaaaaaaaaaaaaaaaaaaaaaaaaaaagaauu

SEQ ID NO: 24887 - RNA, 1714 nt, Artificial Sequence
  mRNA product Design a-1 (hSL-A64-N5) comprising derived and/or modified sequence from LASV(LASV237-NIG-2010;Clade II)__AIT17638__GPCmut3 (opt4)
aggagagucccgcagucggcguccagcggcucugcuuguucgugugugugucguugcaggccuuauucaagcuuaccaugggccagaucaucaccuucuuccaggaggugccccacgugaucgaggaggugaugaacaucgugcugaucgcccugagccugcuggccauccugaagggcaucuacaacguggccaccugcggccuguucggccuggugagcuuccugcugcugugcggcagaagcugcagcaccaccuacaagggcguguacgagcugcagacccuggagcuggacauggccagccugaacaugaccaugccccugagcugcaccaagaacaacagccaccacuacaucauggugggcaacgagaccggccuggagcugacccugaccaacaccagcaucaucaaccacaaguucugcaaccugagcgacgcccacaagaaggaccuguacgaccacgcccugaugagcaucaucagcaccuuccaccugagcauccccaacuucaaccaguacgaggccaugagcugcgacuucaacggcggcaagaucagcgugcaguacaaccugagccacaccuacgccguggacgccgccaaccacugcggcaccaucgccaacggcgugcugcagaccuucaugagaauggccuggggcggcagcuacaucgcccuggacagcggcaagggcagcugggacugcaucaugaccagcuaccaguaccugaucauccagaacaccaccugggaggaccacugccaguucagcagacccagccccaucggcuaccugggccugcugagccagagaaccagagacaucuacaucagcagaagaagaagaggcaccuucaccuggacccugagcgacagcgagggcaacgagacccccggcggcuacugccugaccagauggaugcugaucgaggccgagcugaagugcuucggcaacaccgccguggccaagugcaacgagaagcacgacgaggaguucugcgacaugcugagacuguucgacuucaacaagcaggccaucagaagacugaagacccccgcccagaugagcauccagcugaucaacaaggccgugaacgcccugaucaacgaccagcugaucaugaagaaccaccugagagacaucaugggcauccccuacugcaacuacagcaaguacugcuaccugaaccacaccgugaccggcaagaccagccugcccagaugcugccuggugagcaacggcagcuaccugaacgagacccacuucagcgacgacaucgagcagcaggccgacaacaugaucaccgagcugcugcagaaggaguacauggacagacagggcaagaccccccugggccugguggaccuguucguguucagcaccagcuucuaccugaucagcaucuuccugcaccugaucaagauccccacccacagacacaucaccggcaagcccugccccaagccccacagacugaaccacaugggcaucugcagcugcggccuguacaagcaccccggcgugcccgugaaguggaagagaugaggacuagucccuguucccagagcccacuuuuuuuucuuuuuuugaaauaaaauagccugucuuucagaucucaaaggcucuuuucagagccaccaaaaaaaaaaaaaaaaaaaaaaaaaaaaaaaaaaaaaaaaaaaaaaaaaaaaaaaaaaaaaaaaagaauu

SEQ ID NO: 24888 - RNA, 1714 nt, Artificial Sequence
  mRNA product Design a-1 (hSL-A64-N5) comprising derived and/or modified sequence from LASV(LASV253-NIG-2011;Clade II)__AIT17670__GPCmut3 (opt4)
aggagagucccgcagucggcguccagcggcucugcuuguucgugugugugucguugcaggccuuauucaagcuuaccaugggccagaucaucaccuucuuccaggaggugccccacgugaucgaggaggugaugaacaucgugcugaucgcccugagccugcuggccauccugaagggcaucuacaacguggccaccugcggccuguucggccuggugagcuuccugcugcugugcggcagaagcugcagcaccaccuacaagggcguguacgagcugcagacccuggagcuggacauggccagccugaacaugaccaugccccugagcugcaccaagaacaacagccaccacuacaucauggugggcaacgagaccggccuggagcugacccugaccaacaccagcaucaucaaccacaaguucugcaaccugagcgacgcccacaagaagaaccuguacgaccacgcccugaugagcaucaucagcaccuuccaccugagcauccccaacuucaaccaguacgaggccaugagcugcgacuucaacggcggcaagaucagcgugcaguacaaccugagccacaccuacgccguggacgccgccaaccacugcggcaccaucgccaacggcgugcugcagaccuucaugagaauggccuggggcggcagcuacaucgcccuggacagcggcaagggcagcugggacugcaucaugaccagcuaccaguaccugaucauccagaacaccaccugggaggaccacugccaguucagcagacccagccccaucggcuaccugggccugcugagccagagaaccagagacaucuacaucagcagaagaagaagaggcaccuucaccuggacccugagcgacagcgagggcaacgagacccccggcggcuacugccugaccagauggaugcugaucgaggccgagcugaagugcuucggcaacaccgccguggccaagugcaacgagaagcacgacgaggaguucugcgacaugcugagacuguucgacuucaacaagcaggccaucagaagacugaaggcccccgcccagaugagcauccagcugaucaacaaggccgugaacgcccugaucaacgaccagcugaucaugaagaaccaccugagagacaucaugggcauccccuacugcaacuacagcaaguacugcuaccugaaccacaccgugaccggcagaaccagccugcccagaugcugccuggugagcaacggcagcuaccugaacgagacccacuucagcgacgacaucgagcagcaggccgacaacaugaucaccgagcugcugcagaaggaguacaucgacagacagggcaagaccccccugggccugguggaccuguucguguucagcaccagcuucuaccugaucagcaucuuccugcaccuggugaagauccccacccacagacacaucaucggcaagcccugccccaagccccacagacugaaccacaugggcaucugcagcugcggccuguacaagcaccccggcgugcccgugaaguggaagagaugaggacuagucccuguucccagagcccacuuuuuuuucuuuuuuugaaauaaaauagccugucuuucagaucucaaaggcucuuuucagagccaccaaaaaaaaaaaaaaaaaaaaaaaaaaaaaaaaaaaaaaaaaaaaaaaaaaaaaaaaaaaaaaaaagaauu

SEQ ID NO: 24889 - RNA, 1714 nt, Artificial Sequence
  mRNA product Design a-1 (hSL-A64-N5) comprising derived and/or modified sequence from LASV(LASV254-NIG-2011;Clade II)__AIT17674__GPCmut3 (opt4)
aggagagucccgcagucggcguccagcggcucugcuuguucgugugugugucguugcaggccuuauucaagcuuaccaugggccagaucaucaccuucuuccaggaggugccccacgugaucgaggaggugaugaacaucgugcugaucgcccugagccugcuggccauccugaagggcaucuacaacguggccaccugcggccuguucggccuggugagcuuccugcugcugugcggcagaagcugcagcaccaccuacaagggcguguacgagcugcagacccuggagcuggacaugaccaaccugaacaugaccaugccccugagcugcaccaagaacaacagccaccacuacaucauggugggcaacgagaccggccuggagcugacccugaccaacaccagcaucaucaaccacaaguucugcaaccugagcgacgcccacaagaagaaccuguacaaccacgcccugaugagcaucaucagcaccuuccaccugagcauccccaacuucaaccaguacgaggccaugagcugcgacuucaacggcggcaagaucagcgugcaguacaaccugagccacagcuacgccguggacgccgccaaccacugcggcaccaucgccaacggcgugcugcagaccuucaugagaauggccuggggcggcagcuacaucgcccuggacagcggcaagggcaacugggacugcaucaugaccagcuaccaguaccugaucauccagaacaccaccugggaggaccacugccaguucagcagacccagccccaucggcuaccugggccugcugagccagagaaccagagacaucuacaucagcagaagaagaagaggcaccuucaccuggacccugagcgacagcgagggcaacgagacccccggcggcuacugccugaccagauggaugcugaucgaggccgagcugaagugcuucggcaacaccgccguggccaagugcaacgagaagcacgacgaggaguucugcgacaugcugagacuguucgacuucaacaagcaggccaucagaagacugaagacccccgcccaggccaacauccagcugaucaacaaggccgugaacgcccugaucaacgaccagcugaucaugaagaaccaccugagagacaucaugggcauccccuacugcaacuacagcaaguacugcuaccugaaccacaccgugaccggcaagaccagccugcccagaugcugccuggugagcaacggcagcuaccugaacgagacccacuucagcgacgacaucgagcagcaggccgacaacaugaucaccgagcugcugcagaaggaguacauggacagacagggcaagaccccccugggccugguggaccuguucguguucagcaccagcuucuaccugaucagcaucuuccugcaccuggugaagauccccacccacagacacgugaucggcaagcccugccccaagccccacagacugaaccacaugggcaucugcagcugcggccuguacaagcaccccggcgugcccgugaaguggaagagaugaggacuagucccuguucccagagcccacuuuuuuuucuuuuuuugaaauaaaauagccugucuuucagaucucaaaggcucuuuucagagccaccaaaaaaaaaaaaaaaaaaaaaaaaaaaaaaaaaaaaaaaaaaaaaaaaaaaaaaaaaaaaaaaaagaauu

SEQ ID NO: 24890 - RNA, 1714 nt, Artificial Sequence
  mRNA product Design a-1 (hSL-A64-N5) comprising derived and/or modified sequence from LASV(Nig08-A19;Clade III)__ADU56618__GPCmut3 (opt4)
aggagagucccgcagucggcguccagcggcucugcuuguucgugugugugucguugcaggccuuauucaagcuuaccaugggccagaucgugaccuucuuccaggaggugccccacgugaucgaggaggugaugaacaucgugcugaucgcccugagcauccuggccauccugaagggccuguacaacaucgccaccugcggccugaucggccuggugaccuuccugcugcugagcggcagaagcugcagcaugaccuacaagggcguguacgagcugcagacccuggagcugaacaugaacacccugaacaugaccaugccccugagcugcaccaagaacaacagccaccacuacaucauggugggcaacgagaccggccuggagcugacccugaccaacaccagccugcugcaccacaaguucugcaaccugagcgacgcccacaagaagaaccuguacgaccacacccugaugagcaucaucagcaccuuccaccugagcauccccaacuucaaccaguacgaggccaugagcugcgacuucaacggcggcaagaucaccgugcaguacaaccugagccacagcuacgccaucgacgccgccaaccacugcggcaccguggccaacggcgugcugcagaccuucaugagaauggccuggggcggcagcuacaucgcccuggacagcggcagaggcaagugggacugcaucaugaccagcuaccaguaccugaucauccagaacaccaccugggaggaccacugccaguucagcagacccagccccaucggcuaccugggccugcugagccagagaaccagagacaucuacaucagcagaagaagaagaggcaccuucaccuggacccugagcgacagcgagggcaacgagacccccggcggcuacugccugaccagauggaugcugaucgaggccgagcugaagugcuucggcaacaccgccguggccaagugcaacgagaagcacgacgaggaguucugcgacaugcugagacuguucgacuucaacaagcaggccaucagaagacugaaggcccccgcccagaugagcauccagcugaucaacaaggccgugaacgcccugaucaacgaccagcugaucaugaagaaccaccugagagacaucaugggcauccccuacugcaacuacagcaaguacugcuaccugaaccacaccagcaccggcagaaccagccugcccagaugcugccuggugagcaacggcagcuaccugaacgagacccacuucagcgacgacaucgagcagcaggccgacaacaugaucaccgagaugcugcagaaggaguaccuggacagacagggcaagaccccccugggccugguggaccuguucguguucagcaccagcuucuaccugaucagcaucuuccugcaccuggugaagauccccacccacagacacaucgugggcaagcccugccccaagccccacagacugaaccacaugggcaucugcagcugcggccuguacaagcagcccggcgugcccgugagauggaagagaugaggacuagucccuguucccagagcccacuuuuuuuucuuuuuuugaaauaaaauagccugucuuucagaucucaaaggcucuuuucagagccaccaaaaaaaaaaaaaaaaaaaaaaaaaaaaaaaaaaaaaaaaaaaaaaaaaaaaaaaaaaaaaaaaagaauu

SEQ ID NO: 24891 - RNA, 1717 nt, Artificial Sequence
  mRNA product Design a-1 (hSL-A64-N5) comprising derived and/or modified sequence from LASV(G1180-SLE-2010;Clade IV)__AIT17168__GPCmut3 (opt4)
aggagagucccgcagucggcguccagcggcucugcuuguucgugugugugucguugcaggccuuauucaagcuuaccaugggccagaucgugaccuucuuccaggaggugccccacgugaucgaggaggugaugaacaucgugcugaucgcccugagcauccuggccgugcugaagggccuguacaacuucgccaccugcggccuggugggccugcugaccuuccugcugcugugcggcagaagcugcaccgccagcagauacaagggcguguacgagcugcagacccuggagcugaacauggagacccugaacaugaccaugccccugagcugcaccaagaacaacagccaccacuacaucauggugggcaacgagaccggccuggagcugacccugaccaacaccagcaucaucaaccacaaguucugcaaccugagcgacgcccacaagaagaaccuguacgaccacgcccugaugagcaucaucagcaccuuccaccugagcauccccaacuucaaccaguacgaggccaugagcugcgacuucaacggcggcaagaucagcgugcaguacaaccugagccacagcuacgccggcgacgccgccaaccacugcggcaccguggccaacggcgugcugcagaccuucaugagaauggccuggggcggcagcuacaucgcccuggacagcggccacggcagcugggacugcaucaugaccagcuaccaguaccugaucauccagaacaccaccugggaggaccacugccaguucagcagacccagccccaucggcuaccugggccugcugagccagagaaccagagacaucuacaucagcagaagaagaagaggcaccuucaccuggacccugagcgacagcgagggcaaggacacccccggcggcuacugccugaccagauggaugcugaucgaggccgagcugaagugcuucggcaacaccgccguggccaagugcaacgagaagcacgacgaggaguucugcgacaugcugagacuguucgacuucaacaagcaggccauccagagacugaaggcccccgcccagaugagcauccagcugaucaacaaggccgugaacgcccugaucaacgaccagcugaucaugaagaaccaccugagagacaucaugggcauccccuacugcaacuacagcaaguacugcuaccugaaccacaccaccaccggcaagaccagccugcccaagugcugccuggugagcaacggcagcuaccugaacgagacccacuucagcgacgacaucgagcagcaggccgacaacaugaucaccgagaugcugcagaaggaguacauggagagacagggcaagaccccccugggccugguggaccuguucguguucagcaccagcuucuaccugaucagcaucuuccugcaccuggugaagauccccacccacagacacaucgugggcaagagcugccccaagccccacagacugaaccacaugggcaucugcagcugcggccuguacaagcagcccggcgugcccgugaaguggaagagaugaggacuagucccuguucccagagcccacuuuuuuuucuuuuuuugaaauaaaauagccugucuuucagaucucaaaggcucuuuucagagccaccaaaaaaaaaaaaaaaaaaaaaaaaaaaaaaaaaaaaaaaaaaaaaaaaaaaaaaaaaaaaaaaaagaauu

SEQ ID NO: 24892 - RNA, 1717 nt, Artificial Sequence
  mRNA product Design a-1 (hSL-A64-N5) comprising derived and/or modified sequence from LASV(G1442-SLE-2011;Clade IV)__AIT17180__GPCmut3 (opt4)
aggagagucccgcagucggcguccagcggcucugcuuguucgugugugugucguugcaggccuuauucaagcuuaccaugggccagaucgugaccuucuuccaggaggugccccacgugaucgaggaggugaugaacaucgugcugaucgcccugagcauccuggccgugcugaagggccuguacaacguggccaccugcggccugaucggccuggugaccuuccugcugcugugcggcagaagcugcaccaccacccuguacaagggcguguacgagcugcagacccuggagcugaacauggagacccugaacaugaccaugccccugagcugcaccaagaacaacagccaccacuacaucagagugggcaacgagaccggccuggagcugacccugaccaacaccagcaucaucaaccacaaguucugcaaccugagcgacgcccacaagaagaaccuguacgaccacgcccugaugagcaucaucagcaccuuccaccugagcauccccaacuucaaccaguacgaggccaugagcugcgacuucaacggcggcaagaucagcgugcaguacaaccugagccacagcuacgccggcgacgccgccaaccacugcggcaccguggccaacggcgugcugcagaccuucaugagaauggccuggggcggcagcuacaucgcccuggacagcggcagaggcaacugggacugcaucaugaccagcuaccaguaccugaucauccagaacaccaccugggacgaccacugccaguucagcagacccagccccaucggcuaccugggccugcugagccagagaaccagagacguguacaucagcagaagaagaagaggcaccuucaccuggacccugagcgacagcgagggcaaggacacccccggcggcuacugccugaccagauggaugcugaucgaggccgagcugaagugcuucggcaacaccgccguggccaagugcaacgagaagcacgacgaggaguucugcgacaugcugagacuguucgacuucaacaagcaggccauccagagacugaaggcccccgcccagaugagcauccagcugaucaacaaggccgugaacgcccugaucaacgaccagcugaucaugaagaaccaccugagagacaucaugggcauccccuacugcaacuacagcaaguacugcuaccugaacaacaccgccaccggcaagaccagccugcccaagugcugccugaucagcaacggcagcuaccugaacgagacccacuucagcgacgacaucgagcaggaggccgacaacaugaucaccgagaugcugcagaaggaguacauggagagacagggcaagaccccccugggccugguggaccuguucguguucagcaccagcuucuaccugaucagcaucuuccugcaccuggugaagauccccacccacagacacaucgugggcaagagcugccccaagccccacagacugaaccacaugggcaucugcagcugcggccuguacaagcagcccggcgugcccgugagauggaagagaugaggacuagucccuguucccagagcccacuuuuuuuucuuuuuuugaaauaaaauagccugucuuucagaucucaaaggcucuuuucagagccaccaaaaaaaaaaaaaaaaaaaaaaaaaaaaaaaaaaaaaaaaaaaaaaaaaaaaaaaaaaaaaaaaagaauu

SEQ ID NO: 24893 - RNA, 1717 nt, Artificial Sequence
  mRNA product Design a-1 (hSL-A64-N5) comprising derived and/or modified sequence from LASV(G3010-SLE-2013;Clade IV)__AIT17344__GPCmut3 (opt4)
aggagagucccgcagucggcguccagcggcucugcuuguucgugugugugucguugcaggccuuauucaagcuuaccaugggccagaucgugaccuucuuccaggaggugccccacgugaucgaggaggugaugaacaucgugcugaucgcccugagcauccuggccgugcugaagggccuguacaacuucgccaccugcggccuggugggccuggugaccuuccugcugcugugcggcagaagcugcaccaccagccuguacaagggcguguacgagcugcagacccuggagcugaacauggagacccugaacaugaccaugccccugagcugcaccaagaacaacagccaccacuacaucauggugggcaacgagaccggccuggagcugacccugaccaacaccagcaucaucaaccacaaguucugcaaccugagcgacgcccacaagaagaaccuguacaaccacgcccugaugagcaucaucagcaccuuccaccugagcauccccaacuucaaccaguacgaggccaugagcugcgacuucaacggcggcaagaucagcgugcaguacaaccugagccacagcuacgccggcgacgccgccagccacugcggcaccguggccaacggcgugcugcagaccuucaugagaauggccuggggcggcagcuacaucgcccuggacagcggcuacggcaagugggacugcaucaugaccagcuaccaguaccugaucauccagaacaccaccugggaggaccacugccaguucagcagacccagccccaucggcuaccugggccugcugagccagagaaccagagacaucuacaucagcagaagaagaagaggcaccuucaccuggacccugagcgacagcgagggcaaggacacccccggcggcuacugccugaccagauggaugcugaucgaggccgagcugaagugcuucggcaacaccgccguggccaagugcaacgagaagcacgacgaggaguucugcgacaugcugagacuguucgacuucaacaagcaggccauccagagacugaagacccccgcccagaugagcauccagcugaucaacaaggccgugaacgcccugaucaacgaccagcugaucaugaagaaccaccugagagacaucaugggcauccccuacugcaacuacagcaaguacugcuaccugaaccacaccaccaccggcaagaccagccugcccaagugcugccuggugagcaacggcagcuaccugaacgagacccacuucagcgacgacaucgagcagcaggccgacaacaugaucaccgagaugcugcagaaggaguacauggagagacagggcaagaccccccugggccugguggaccuguucguguucagcaccagcuucuaccugaucagcaucuuccugcaccuggugaagauccccacccacagacacaucgugggcaagagcugccccaagccccacagacugaaccacaugggcaucugcagcugcggccuguacaagcagcccggcgugcccgugagauggaagagaugaggacuagucccuguucccagagcccacuuuuuuuucuuuuuuugaaauaaaauagccugucuuucagaucucaaaggcucuuuucagagccaccaaaaaaaaaaaaaaaaaaaaaaaaaaaaaaaaaaaaaaaaaaaaaaaaaaaaaaaaaaaaaaaaagaauu

SEQ ID NO: 24894 - RNA, 1717 nt, Artificial Sequence
  mRNA product Design a-1 (hSL-A64-N5) comprising derived and/or modified sequence from LASV(G502-SLE-2009;Clade IV)__AIT17126__GPCmut3 (opt4)
aggagagucccgcagucggcguccagcggcucugcuuguucgugugugugucguugcaggccuuauucaagcuuaccaugggccagaucgugaccuucuuccaggaggugccccacgugaucgaggaggugaugaacaucgugcugaucgcccugagcauccuggccgugcugaagggccuguacaacuucgccaccugcggccuggugggccugcugaccuuccugcugcugugcggcagaagcugcaccaccggccuguacaagggcguguacgagcugcagacccuggagcugaacauggagacccugaacaugaccaugccccugagcugcaccaagaacaacagccaccacuacaucauggugggcaacgagaccggccuggagcugacccugaccaacaccagcaucaucaaccacaaguucugcaaccugagcgacgcccacaagaagaaccuguacgaccacgcccugaugagcaucaucagcaccuuccaccugagcauccccaacuucaaccaguacgaggccaugagcugcgacuucaacggcggcaagaucagcgugcaguacaaccugagccacagcuacgccggcgacgccgccgaccacugcggcaccguggccaacggcgugcugcagaccuucaugagaauggccuggggcggcagcuacaucgcccuggacagcggcagaggcagaugggacugcaucaugaccagcuaccaguaccugaucauccagaacaccaccugggaggaccacugccaguucagcagacccagccccaucggcuaccugggccugcugagccagagaaccagagacaucuacaucagcagaagaagaagaggcaccuucaccuggacccugagcgacagcgagggcaaggacacccccggcggcuacugccugaccagauggaugcugaucgaggccgagcugaagugcuucggcaacaccgccguggccaagugcaacgagaagcacgacgaggaguucugcgacaugcugagacuguucgacuucaacaagcaggccauccagagacugaaggcccccgcccagaugagcauccagcugaucaacaaggccgugaacgcccugaucaacgaccagcuggugaugaagaaccaccugagagacaucaugggcauccccuacugcaacuacagcagauacugcuaccugaaccacaccaccaccggcagaaccagccugcccaagugcugccuggugagcaacggcagcuaccugaacgagacccacuucagcgacgacaucgagcagcaggccgacaacaugaucaccgagaugcugcagaaggaguacauggagagacagggcaagaccccccugggccugguggaccuguucguguucagcaccagcuucuaccugaucagcaucuuccugcaccuggugaagauccccacccacagacacaucgugggcaagagcugccccaagccccacagacugaaccacaugggcaucugcagcugcggccuguacaagcagcccggcgugcccgugaaguggaagagaugaggacuagucccuguucccagagcccacuuuuuuuucuuuuuuugaaauaaaauagccugucuuucagaucucaaaggcucuuuucagagccaccaaaaaaaaaaaaaaaaaaaaaaaaaaaaaaaaaaaaaaaaaaaaaaaaaaaaaaaaaaaaaaaaagaauu

SEQ ID NO: 24895 - RNA, 1717 nt, Artificial Sequence
  mRNA product Design a-1 (hSL-A64-N5) comprising derived and/or modified sequence from LASV(G733-SLE-2010;Clade IV)__AIT17154__GPCmut3 (opt4)
aggagagucccgcagucggcguccagcggcucugcuuguucgugugugugucguugcaggccuuauucaagcuuaccaugggccagaucgugaccuucuuccaggaggugccccacgugaucgaggaggugaugaacaucgugcugaucgcccugagcauccuggccgugcugaagggccuguacaacuucgccaccugcggcaucgugggccuggugagcuuccugcugcugugcggcagaagcugcaccaccagccuguacaagggcguguacgagcugcagacccuggagcugaacauggagacccugaacaugaccaugccccugagcugcaccaagaacaacagccaccacuacaucauggugggcaacgagaccggccuggagcugacccugaccaacaccagcaucaucaaccacaaguucugcaaccugagcgacgcccacaagaagaaccuguacgaccacgcccugaugagcaucaucagcaccuuccaccugagcauccccaacuucaaccaguacgaggccaugagcugcgacuucaacggcggcaagaucagcgugcaguacaaccugagccacagcuacgccggcgacgccgccaaccacugcggcaccaucgccaacggcgugcugcagaccuucaugagaauggccuggggcggcagcuacaucgcccuggacagcggcagagacagaugggacugcaucaugaccagcuaccaguaccugaucauccagaacaccaccugggaggaccacugccaguucagcagacccagccccaucggcuaccugggccugcugagccagagaaccagagacaucuacaucagcagaagaagaagaggcaccuucaccuggacccugagcgacagcgagggcaaggacacccccggcggcuacugccugaccagauggaugcugaucgaggccgagcugaagugcuucggcaacaccgccguggccaagugcaacgagaagcacgacgaggaguucugcgacaugcugagacuguucgacuucaacaagcaggccauccagagacugaaggcccccgcccagaugagcauccagcugaucaacaaggccgugaacgcccugaucaacgaccagcugaucaugaagaaccaccugagagacaucaugggcauccccuacugcaacuacagcaaguacugcuaccugaaccacaccaccaccggcaagaccagccugcccaagugcugccuggugagcaacggcagcuaccugaacgagacccacuucagcgacgacaucgagcagcaggccgacaacaugaucaccgagaugcugcagaaggaguacauggagagacagggcaagaccccccugggccugguggaccuguucguguucagcaccagcuucuaccugaucagcaucuuccugcaccuggugaagauccccacccacagacacguggugggcaagagcugccccaagccccacagacugaaccacaugggcaucugcagcugcggccuguacggccagcccggcgugcccgugaaguggaagagaugaggacuagucccuguucccagagcccacuuuuuuuucuuuuuuugaaauaaaauagccugucuuucagaucucaaaggcucuuuucagagccaccaaaaaaaaaaaaaaaaaaaaaaaaaaaaaaaaaaaaaaaaaaaaaaaaaaaaaaaaaaaaaaaaagaauu

SEQ ID NO: 24896 - RNA, 1717 nt, Artificial Sequence
  mRNA product Design a-1 (hSL-A64-N5) comprising derived and/or modified sequence from MOPV/LASV reassortant(IGS-1;Clade IV)__AFY05576__GPCmut3 (opt4)
aggagagucccgcagucggcguccagcggcucugcuuguucgugugugugucguugcaggccuuauucaagcuuaccaugggccagaucgugaccuucuuccaggaggugccccacgugaucgaggaggugaugaacaucgugcugaucgcccugagcgugcuggccgugcugaagggccuguacaacuucgccaccugcggccuggugggccuggugaccuuccugcugcugugcggcagaagcugcaccaccagccuguacaagggcguguacgagcugcagacccuggagcugaacauggagacccugaacaugaccaugccccugagcugcaccaagaacaacagccaccacuacaucauggugggcaacgagaccggccuggagcugacccugaccaacaccagcaucaucaaccacaaguucugcaaccugagcgacgcccacaagaagaaccuguacgaccacgcccugaugagcaucaucagcaccuuccaccugagcauccccaacuucaaccaguacgaggccaugagcugcgacuucaacggcggcaagaucagcgugcaguacaaccugagccacagcuacgccggcgacgccgccaaccacugcggcaccguggccaacggcgugcugcagaccuucaugagaauggccuggggcggcagcuacaucgcccuggacagcggcagaggcaacugggacugcaucaugaccagcuaccaguaccugaucauccagaacaccaccugggaggaccacugccaguucagcagacccagccccaucggcuaccugggccugcugagccagagaaccagagacaucuacaucagcagaagaagaagaggcaccuucaccuggacccugagcgacagcgagggcgaggacacccccggcggcuacugccugaccagauggaugcugaucgaggccgagcugaagugcuucggcaacaccgccguggccaagugcaacgagaagcacgacgaggaguucugcgacaugcugagacuguucgacuucaacaagcaggccauccagagacugaaggcccccgcccagaugagcauccagcugaucaacaaggccgugaacgcccugaucaacgaccagcugaucaugaagaaccaccugagagacaucaugggcauccccuacugcaacuacagcaaguacugcuaccugaaccacaccaccaccggcagaaccagccugcccaagugcugccuggugagcaacggcagcuaccugaacgagacccacuucagcgacgacaucgagcagcaggccgacaacaugaucaccgagaugcugcagaaggaguacauggagagacagggcaagaccccccugggccugguggaccuguucguguucagcaccagcuucuaccugaucagcaucuuccugcaccuggugaagauccccacccacagacacaucgugggcaagagcugccccaagccccacagacugaaccacaugggcaucugcagcugcggccuguacaagcagcccggcgugcccgugaaguggaagagaugaggacuagucccuguucccagagcccacuuuuuuuucuuuuuuugaaauaaaauagccugucuuucagaucucaaaggcucuuuucagagccaccaaaaaaaaaaaaaaaaaaaaaaaaaaaaaaaaaaaaaaaaaaaaaaaaaaaaaaaaaaaaaaaaagaauu

SEQ ID NO: 24897 - RNA, 1717 nt, Artificial Sequence
  mRNA product Design a-1 (hSL-A64-N5) comprising derived and/or modified sequence from LASV(LM765-SLE-2012;Clade IV)__AIT17814__GPCmut3 (opt4)
aggagagucccgcagucggcguccagcggcucugcuuguucgugugugugucguugcaggccuuauucaagcuuaccaugggccagaucgugaccuucuuccaggaggugccccacgugaucgaggaggugaugaacaucgugcugaucgcccugagcauccuggccgugcugaagggccuguacaacuucgccaccugcggccuggugggccuggugaccuuccugcugcugugcggcagaagcugcaccaccagccuguacaagggcguguacgagcugcagacccuggagcugaacauggagacccugaacaugaccaugccccugagcugcaccaagaacaacagccaccacuacaucauggugggcaacgagaccggccuggagcugacccugaccaacaccagcaucaucgaccacaaguucugcaaccugagcgacgcccacagaaagaaccuguacgaccacgcccugaugagcaucaucagcaccuuccaccugagcauccccaacuucaaccaguacgaggccaugagcugcgacuucaacggcggcaagaucagcgugcaguacaaccugagccacagcuacgccaaggacgccgccgaccacugcggcaccguggccaacggcgugcugcagaccuucaugagaauggccuggggcggcagcuacaucgcccuggacagcggcagaggcagaugggacugcaucaugaccagcuaccaguaccugaucauccagaacaccaccugggaggaccacugccaguucagcagacccagccccaucggcuaccugggccugcugagccagagaaccagagacaucuacaucagcagaagaagaagaggcaccuucaccuggacccugagcgacagcgagggcaaggacacccccggcggcuacugccugaccagauggaugcugaucgaggccgagcugaagugcuucggcaacaccgccguggccaagugcaacgagaagcacgacgaggaguucugcgacaugcugagacuguucgacuucaacaagcaggccauccagagacugaaggcccccgcccagaugagcauccagcugaucaacaaggccgugaacgcccugaucaacgaccagcugaucaugaagaaccaccugagagacaucaugggcauccccuacugcaacuacagcaaguacugcuaccugaaccacaccaccaccggcaagaccagccugcccaagugcugccuggugagcaacggcagcuaccugaacgagacccacuucagcgacgacaucgagcagcaggccgacaacaugaucaccgagaugcugcagaaggaguacauggagagacagggcaagaccccccugggccugguggaccuguucguguucagcaccagcuucuaccugaucagcaucuuccugcaccuggugaagauccccacccacagacacaucgugggcaagcccugccccaagccccacagacugaaccacaugggcaucugcagcugcggccuguacaagcagcccggcgugcccgugaaguggaagagaugaggacuagucccuguucccagagcccacuuuuuuuucuuuuuuugaaauaaaauagccugucuuucagaucucaaaggcucuuuucagagccaccaaaaaaaaaaaaaaaaaaaaaaaaaaaaaaaaaaaaaaaaaaaaaaaaaaaaaaaaaaaaaaaaagaauu

SEQ ID NO: 24898 - RNA, 1717 nt, Artificial Sequence
  mRNA product Design a-1 (hSL-A64-N5) comprising derived and/or modified sequence from LASV(LM776-SLE-2012;Clade IV)__AIT17824__GPCmut3 (opt4)
aggagagucccgcagucggcguccagcggcucugcuuguucgugugugugucguugcaggccuuauucaagcuuaccaugggccagaucgugaccuucuuccaggaggugccccacgugaucgaggaggugaugaacaucgugcugaucgcccugagcauccuggccgugcugaagggccuguacaacuucgccaccugcggccuggugggccuggugaccuuccugcugcugugcggcagaagcugcaccaccagcguguacaagggcguguacgagcugcagacccuggagcugaacauggagacccugaacaugaccaugccccugagcugcaccaagaacaacagccaccacuacaucauggugggcaacgagaccggccuggagcugacccugaccaacaccagcaucaucaaccacaaguucugcaaccugagcgacgcccacaagaagaaccuguacgaccacgcccugaugagcaucaucagcaccuuccaccugagcauccccaacuucaaccaguacgaggccaugagcugcgacuucaacggcggcaagaucagcgugcaguacaaccugagccacagcuacgccggcgacgccgccaaccacugcggcaccguggccaacggcgugcugcagaccuucaugagaauggccuggggcggcagcuacaucgcccuggacagcggccacggcaagugggacugcaucaugaccagcuaccaguaccugaucauccagaacaccaccugggaggaccacugccaguucagcagacccagccccaucggcuaccugggccugcugagccagagaaccagagacaucuacaucagcagaagaagaagaggcaccuucaccuggacccugagcgacagcgagggcaaggacacccccggcggcuacugccugaccagauggaugcugaucgaggccgagcugaagugcuucggcaacaccgccguggccaagugcaacgagaagcacgacgaggaguucugcgacaugcugagacuguucgacuucaacaagcaggccauccagagacugaaggcccccgcccagaugagcauccagcugaucaacaaggccgugaacgcccugaucaacgaccagcugaucaugaagaaccaccugagagacaucaugggcauccccuacugcaacuacagcaaguacugcuaccugaaccacaccaccaccggcaagaccagccugcccaagugcugccuggugagcaacggcagcuaccugaacgagacccacuucagcgacgacaucgagcagcaggccgacaacaugaucaccgagaugcugcagaaggaguacauggagagacagggcaagaccccccugggccugguggaccuguucguguucagcaccagcuucuaccugaucagcaucuuccugcaccuggugaagauccccacccacagacacaucgugggcaagagcugccccaagccccacagacugaaccacaugggcaucugcagcugcggccuguacaagcagcccggcgugcccgugagauggaagagaugaggacuagucccuguucccagagcccacuuuuuuuucuuuuuuugaaauaaaauagccugucuuucagaucucaaaggcucuuuucagagccaccaaaaaaaaaaaaaaaaaaaaaaaaaaaaaaaaaaaaaaaaaaaaaaaaaaaaaaaaaaaaaaaaagaauu

SEQ ID NO: 24899 - RNA, 1717 nt, Artificial Sequence
  mRNA product Design a-1 (hSL-A64-N5) comprising derived and/or modified sequence from LASV(Mad39;Clade IV)__ANH09722__GPCmut3 (opt4)
aggagagucccgcagucggcguccagcggcucugcuuguucgugugugugucguugcaggccuuauucaagcuuaccaugggccagaucgugaccuucuuccaggaggugccccacgugaucgaggaggugaugaacaucgugcugaucgcccugagcauccuggccgugcugaagggccuguacaacguggccaccugcggccugaucggccuggugaccuuccugcugcugugcggcagaagcugcaccaccacccuguacaagggcguguacgagcugcaggcccuggagcugaacauggagacccugaacaugaccaugccccugagcugcaccaagaacaacagccaccacuacaucagagugggcaacgagaccggccuggagcugacccugaccaacaccagccugaucaaccacaaguucugcaaccugagcgacgcccacaagaagaaccuguacgaccacgcccugaugagcaucaucagcaccuuccaccugagcauccccaacuucaaccaguacgaggccaugagcugcgacuucaacgacggcaagaucagcgugcaguacaaccugagccacaccuacgccggcgacaccgccaaccacugcggcaccguggccaacggcgugcugcagaccuucaugagaauggccuggggcggcagcuacaucgcccuggacagcggcagaggcggcugggacugcaucaugaccagcuaccaguaccugaucauccagaacaccaccugggaggaccacugccaguucagcagacccagccccaucggcuaccugggccugcugagccagagaaccagagacaucuacaucagcagaagaagaagaggcaccuucaccuggacccugagcgacagcgagggcaaggacacccccggcggcuacugccugaccagauggaugcugaucgaggccgagcugaagugcuucggcaacaccgccguggccaagugcaacgagaagcacgacgaggaguucugcgacaugcugagacuguucgacuucaacaagcaggccauccagagacugaaggcccccgcccagaugagcauccagcugaucaacaaggccgugaacgcccugaucaacgaccagcugaucaugaagaaccaccugagagacaucaugggcauccccuacugcaacuacagcaaguacugcuaccugaaccacaccgugaccggcaagaccagccugcccaagugcugccuggugagcaacggcagcuaccugaacgagacccacuucagcgacgacaucgagcagcaggccgacaacaugaucaccgagaugcugcagaaggaguacauggagagacagggcaagaccccccugggccugguggaccuguucguguucagcaccagcuucuaccugaucagcaucuuccugcaccuggugaagauccccacccacagacacguggugggcaagcccugccccaagccccacagacugaaccacaugggcaucugcagcugcggcuucuacaagcagcccggcgugcccgugagauggaagagaugaggacuagucccuguucccagagcccacuuuuuuuucuuuuuuugaaauaaaauagccugucuuucagaucucaaaggcucuuuucagagccaccaaaaaaaaaaaaaaaaaaaaaaaaaaaaaaaaaaaaaaaaaaaaaaaaaaaaaaaaaaaaaaaaagaauu

SEQ ID NO: 24900 - RNA, 1717 nt, Artificial Sequence
  mRNA product Design a-1 (hSL-A64-N5) comprising derived and/or modified sequence from LASV(Z0947-SLE-2011;Clade IV)__AIT17840__GPCmut3 (opt4)
aggagagucccgcagucggcguccagcggcucugcuuguucgugugugugucguugcaggccuuauucaagcuuaccaugggccagaucgugaccuucuuccaggaggugccccacgugaucgaggaggugaugaacaucgugcugaucgcccugagcauccuggccgugcugaagggccuguacaacuucgccaccugcggccuggugggccuggugaccuuccugcugcugugcggcagaagcugcaccaucagccuguacaagggcguguacgagcugcagacccuggagcugaacauggagacccugaacaugaccaugccccugagcugcaccaagaacaacagccaccacuacaucauggugggcaacgagaccggccuggagcugacccugaccaacaccagcaucaucaaccacaaguucugcaaccugagcgacgcccacaagaagaaccuguacgaccacgcccugaugagcaucaucagcaccuuccaccugagcauccccaacuucaaccaguacgaggccaugagcugcgacuucaacggcggcaagaucagcgugcaguacaaccugagccacagcuacgccggcgacgccgccaaccacugcggcaccguggccaacggcgugcugcagaccuucaugagaauggccuggggcggcagcuacaucgcccuggacagcggcagagacagaugggacugcaucaugaccagcuaccaguaccugaucauccagaacaccaccugggaggaccacugccaguucagcagacccagccccaucggcuaccugggccugcugagccagagaaccagagacaucuacaucagcagaagaagaagaggcaccuucaccuggacccugagcgacagcgagggcaaggacacccccggcggcuacugccugaccagauggaugcugaucgaggccgagcugaagugcuucggcaacaccgccguggccaagugcaacgagaagcacgacgaggaguucugcgacaugcugagacuguucgacuucaacaagcaggccauccagagacugaaggcccccgcccagaugagcauccagcugaucaacaaggccgugaacgcccugaucaacgaccagcugaucaugaagaaccaccugagagacaucaugggcauccccuacugcaacuacagcaaguacugcuaccugaaccacaccaccaccggcaagaccagccugcccaagugcugccuggugagcaacggcagcuaccugaacgagacccacuucagcgacgacaucgagcagcaggccgacaacaugaucaccgagaugcugcagaaggaguacauggagagacagggcaagaccccccugggccugguggaccuguucguguucagcaccagcuucuaccugaucagcaucuuccugcaccuggugaagauccccacccacagacacaucgugggcaagcccugccccaagccccacagacugaaccacaugggcaucugcagcugcggccuguacaagcagcccggcgugcccgugaaguggaagagaugaggacuagucccuguucccagagcccacuuuuuuuucuuuuuuugaaauaaaauagccugucuuucagaucucaaaggcucuuuucagagccaccaaaaaaaaaaaaaaaaaaaaaaaaaaaaaaaaaaaaaaaaaaaaaaaaaaaaaaaaaaaaaaaaagaauu

SEQ ID NO: 24901 - RNA, 1717 nt, Artificial Sequence
  mRNA product Design a-1 (hSL-A64-N5) comprising derived and/or modified sequence from LASV(Josiah;Clade IV)__NP_694870__GPCmut3 (opt5)
aggagagucccgcagucggcguccagcggcucugcuuguucgugugugugucguugcaggccuuauucaagcuuaccaugggccagaucgugaccuucuuucaagaggucccccacguuauugaagaggugaugaacaucgugcugauugcccucagcguccuggcugugcuuaaggggcuguacaauuucgccacaugcggacucguuggccuggugacguuucuucugcucugugggagauccugcaccacaucucuguauaaaggagucuacgaacugcagacccucgagcugaacauggaaacacuuaauaugaccaugccucugagcuguacaaagaacaauucccaucacuauaucauggugggcaacgagaccgggcucgagcugacgcuuaccaauacaucuauuaucaaccauaaauucugcaaucugagcgacgcgcacaagaaaaaccucuacgaucaugcucugauguccaucauuucuaccuuucaccugagcaucccgaauuucaaccaguaugaagccauguccugugacuuuaauggaggcaagauuagcguucaguacaaccucucucacuccuaugccggcgaugcugccaaucauugcgggacaguggcuaacggaguccugcaaaccuucaugcggauggccuggggcgggagcuacaucgcgcuugacucuggacgcggcaacugggauuguauuaugacguccuaccaguaucugaucauucagaauacaaccugggaggaccacugccaguuuagcagacccucuccuaucggguaccucggacugcuuucccaacggacacgcgauaucuauauuagcagacggcgcagaggcaccuucaccuggacacuguccgacucugaaggcaaggauacgcccgggggauacugucucacccgguggaugcugaucgaggccgagcugaaaugcuuuggcaacacagcuguggccaaguguaaugaaaaacaugacgaggaguucugcgauaugcuccgccuguuugacuucaacaagcaggcuauucagagacuuaaagccccugcgcagaugagcauccaacugauuaauaaggccgugaacgcucucaucaaugaucagcugaucaugaagaaccaccuucgggacauuauggggauccccuauugcaauuacuccaaauauuguuaccugaaccacaccacaaccggacgcacgagccucccuaagugcugucuggucucuaauggcuccuaccugaacgaaacacauuucagcgacgauauugaacagcaagccgacaauaugaucaccgagaugcuccagaaagaguauauggaaagacaggggaagaccccgcugggacuuguugaucuguuuguguucucuaccagcuuuuaccucauuuccaucuuccugcaccuggugaaaauccccacacaucggcacauugucggcaagucuugcccuaaaccccaucgccuuaaccacaugggcaucuguagcugcgggcucuauaagcagccuggagugcccguuaaguggaaaagaugaggacuagucccuguucccagagcccacuuuuuuuucuuuuuuugaaauaaaauagccugucuuucagaucucaaaggcucuuuucagagccaccaaaaaaaaaaaaaaaaaaaaaaaaaaaaaaaaaaaaaaaaaaaaaaaaaaaaaaaaaaaaaaaaagaauu

SEQ ID NO: 24902 - RNA, 1714 nt, Artificial Sequence
  mRNA product Design a-1 (hSL-A64-N5) comprising derived and/or modified sequence from LASV(LP;Clade I)__AAF86701__GPCmut3 (opt5)
aggagagucccgcagucggcguccagcggcucugcuuguucgugugugugucguugcaggccuuauucaagcuuaccaugggccagaucauuaccuucuuucaagaggugccccacgucaucgaagagguuaugaacauugugcugaucgcccucagccugcuugcuauucugaaggggcucuacaauaucgccacaugcggaaucauuggccugguggcguuccuuuuucugugugggaaauccugcucucucacgcugaagggaggcuaugaacugcagacccucgagcugaacauggaaacacuuaauaugaccaugccucugagcuguaccaaaaacuccucucaucacuacaucagagucgggaaugagacaggacucgagcugacacuuaccaacacgagcauuaucaaucauaaguucugcaaccuguccgacgcucacaaaaagaaucucuaugaucaugcccugaugucuauuaucagcaccuuucaccuguccauuccgaacuucaaucaguacgaagccaugagcugugacuuuaacggcggcaagaucucugugcaguauaaucucucccacagcuacgcuggggaugccgcugagcauugcggaacaguugccaacggcgugcugcaaaccuucaugcggauggcguggggagggcgcuauaucgcccuugacucuggcaaagggaauugggauuguauuaugacauccuaccaguaccugaucauucagaacaccacgugggaagaccacugccaguuuagcagacccucuccuaucggauaucucggccugcuuucccaacggacacgcgauauuuacaucagcagacggcgcagaggcaccuucacauggacccuguccgacucugaggggaacgagacccccggaggcuauugucucacacgguggaugcugaucgaagcugagcugaagugcuuugggaauacggccgucgcuaaauguaacgaaaagcaugaugaggaguucugcgacaugcuccgccuguuugauuucaauaaacaggccauuagacggcuuaaggcgccugcccagaugagcauccagcugauuaacaaggcugugaaugcccucaucaacgaccaacugauuaugaaaaaucaccuucgcgauaucaugggaauccccuacugcaacuauuccaaguacuguuaucugaaucacaccagcucuggcagaacaucccucccuaaaugcugucugauuagcaacgggucuuaccugaaugaaacccaguucagcgacgacaucgagcagcaagcugauaacaugauuacagaaaugcuccagaaggaguacaucgaacggcagggaaaaaccccgcugggccuuguugacauuuuuaucuucuccacgucuuuuuaucugauuagcaucuuccuccaucugaucaagauucccacacaccgccauaucgugggcaaaccuugccccaagccucacagacugaaucauaugggggucuguuccugcggacuuuacaagcaccccggcgugccgaccaaauggaagcggugaggacuagucccuguucccagagcccacuuuuuuuucuuuuuuugaaauaaaauagccugucuuucagaucucaaaggcucuuuucagagccaccaaaaaaaaaaaaaaaaaaaaaaaaaaaaaaaaaaaaaaaaaaaaaaaaaaaaaaaaaaaaaaaaagaauu

SEQ ID NO: 24903 - RNA, 1714 nt, Artificial Sequence
  mRNA product Design a-1 (hSL-A64-N5) comprising derived and/or modified sequence from LASV(803213;Clade II)__AAF86703__GPCmut3 (opt5)
aggagagucccgcagucggcguccagcggcucugcuuguucgugugugugucguugcaggccuuauucaagcuuaccaugggccagaucauuaccuucuuucaagaggugccccacgucaucgaagagguuaugaacauugugcugaucgcccucagccugcuugcuauucugaaggggaucuacaauguggccacaugcggacucuucggccugaucuccuuucuucugcucugugggagaucuugcagcgucacguauaaaggaguguacgaacugcagacccuggagcucaacauggcgaaucugaacaugacaaugccucuuuccuguaccaagaauaacucucaucacuauauuaugguuggcaaugaaacagggcuggagcucacccugacaaacaccagcaucauuaaucauaaauucugcaaccuuuccgacgcucacaagaaaaaucuguacgaucaugcccucaugucuaucauuagcacguuucaccuguccaucccgaacuucaaucaguaugaggccaugagcugugacuuuaacggaggcaagauuucugugcaguacaaucugucccacagcuucgcugucgaugccgcuaaccauugcggcaccaucgccaacggggugcuccaaacauuuaugcggauggcguggggaggcucuuauaucgcccuggacuccgggaagggaaauugggauuguauuaugaccagcuaccaguaccuuaucauucagaacacaaccugggaagaccacugccaguucucucgccccuccccuaucggcuaucuggggcuccugagccaaagaacgcgggauauuuacaucucccgcagacggcgcggaacauuuaccuggacacuuucugacagcgagggcaaugaagcucccggcggguauugucugaccagauggaugcucaucgaggccgagcugaaaugcuucggaaacaccgcuguugccaaguguaaugaaaaacaugaugaggaauuuugcgacaugcugcgccucuucgauuucaacaagcaggcgauuaaacggcugaagacgccugcccagauguccauccagcuuauuaauaaggcugugaacgcccugaucaaugaccaacucauuaugaaaaaccaccugagagauaucaugggcauccccuacugcaauuauagccgguacuguuaucuuaaccacacagucaccgggaagacaucucugccucgcugcugucucguguccaauggaagcuaccugaacgagacccauuuuucugacgacauugaacagcaggcugauaauaugaucacagagaugcugcaaaaagaguacauggacagacagggcaagaccccgcucgggcugguggaucuuuucgucuuuagcacguccuucuaucugauuucuaucuuucuccaccugguuaaaauucccacacaucggcacaucgugggaaagccuugccccaaaccucaucgccugaaccacaugggcauuuguagcugcggccuuuacaagcaccccggggugccggucaaguggaaaagaugaggacuagucccuguucccagagcccacuuuuuuuucuuuuuuugaaauaaaauagccugucuuucagaucucaaaggcucuuuucagagccaccaaaaaaaaaaaaaaaaaaaaaaaaaaaaaaaaaaaaaaaaaaaaaaaaaaaaaaaaaaaaaaaaagaauu

SEQ ID NO: 24904 - RNA, 1714 nt, Artificial Sequence
  mRNA product Design a-1 (hSL-A64-N5) comprising derived and/or modified sequence from LASV(GA391;Clade III)__CAA36645__GPCmut3 (opt5)
aggagagucccgcagucggcguccagcggcucugcuuguucgugugugugucguugcaggccuuauucaagcuuaccaugggccagaucgugaccuucuuucaagaggucccccacguuauugaagaggugaugaacaucgugcugauugcccucagcauccuggcuauucuuaaggggcuguacaaugucgccacaugcggacucaucggccuggugacguuccuucugcucuccgggagaucuuguagccugaucuauaaaggaaccuacgaacugcagacacucgagcugaacauggaaacccuuaauaugacaaugccucuguccugcaccaagaacaauucucaucacuauauucggguuggcaacgagacagggcucgagcugacccuuacgaauaccagcauccugaaccauaaauuuuguaaucucuccgacgcgcacaagcgcaaccuguacgaucauucucugaugagcauuaucuccacauuccaccucagcauuccgaauuuuaaccaguaugaagcuaugucuugcgacuucaauggaggcaaaaucaccgugcaguacaaccugucccacagcuuugccgucgaugccgcuggccauugugggacacuugccaauggagugcugcaaaccuucaugagaauggcuuggggcgggucuuauauugcccucgacuccggacggggcaacugggauugcaucaugacgagcuaccaguaccugaucauucagaacacaaccugggacgaucacugucaguuuucucgccccuccccuaucggguaucuuggacugcucagccaaagaacacgggacauuuacaucucccgcagacggcgcggcaccuucaccuggacacugucugauagcgagggcaaugaaacgcccgggggauauugccugaccagauggaugcucauugaggcggagcugaaguguuuuggcaacacagccguugcuaagugcaaugaaaaacaugacgaggaguucugugauaugcuucggcuguuugacuucaacaagcaggccauccgcagacucaaaaccccugcucagauguccauccagcugauuaauaaggccgugaacgcgcuuaucaaugaucaacugauuaugaaaaaccaccuccgggacaucauggggauucccuacugcaauuauagccgcuacugcuaucugaaccacacaucuaccggaaagacgucccugccuagauguugccucaucagcaauggcucuuaccugaacgaaacaaaguucagcgacgauaucgaacagcaggccgacaauaugauuaccgagaugcuucaaaaagaguacaucgaucggcaggggaagaccccgcugggacucgucgaccuguuuguguucuccacaucuuuuuaucugauuagcaucuuccuucaucucgugaaaauucccacccacagacauaucgucggcaagccuugucccaaaccucaccgccugaaccauaugggcauuugcuccugugggcuguacaagcagcccggaguuccggugcgguggaaaagaugaggacuagucccuguucccagagcccacuuuuuuuucuuuuuuugaaauaaaauagccugucuuucagaucucaaaggcucuuuucagagccaccaaaaaaaaaaaaaaaaaaaaaaaaaaaaaaaaaaaaaaaaaaaaaaaaaaaaaaaaaaaaaaaaagaauu

SEQ ID NO: 24905 - RNA, 1717 nt, Artificial Sequence
  mRNA product Design a-1 (hSL-A64-N5) comprising derived and/or modified sequence from LASV(AV;Clade V)__CCA30314__GPCmut3 (opt5)
aggagagucccgcagucggcguccagcggcucugcuuguucgugugugugucguugcaggccuuauucaagcuuaccaugggccagaucgugaccuucuuucaagaggucccccacguuauugaagaggugaugaacaucgugcugauugcccucagcauccuggcuguccuuaaggggcuguacaauauugccacaugcggacucaucggccugaucacguuccuucugcucugugggagauccugcucuagcaaccuguauaaaggaguguacgaacugcagucccucgaccugaauauggagacccuuaacaugacaaugccucugucuuguaccaagaauaacagccaucacuauauucggguuggcaaugauacagggcucgaacugacccuuacaaacaccuccauccugaaucauaaauuuugcaaccucucugacgcgcacaagaaagaucuguacgaccaugcucugaugagcauuaucuccacguuccaccucagcauuccgaauuuuaaccaguaugaggccaugucuugugauuucaauggaggcaagaucuccgugcaguacaaccugagccacucuuaugccauugacgcugccaaucauugcggcaccgucgcuaacgggauccuucaaacauuuaugcgcauggccuggggaggcuccuacaucgcgcuggauagcgggagaggaaacugggacuguauuaugaccucuuaccaguaucucaucauucagaauacaaccugggagaaccacugccaguucucccggcccagcccuaucggcuaccuggggcuucugucccaacgcacgagagauauuuauaucucucggcgcagacggggaacauuuaccuggacacucagcgacuccgaaggcaaugccacccccggcggguacugucugacccgcuggaugcugaucgaggcugaacucaagugcuucggaaacacagccguggcuaaauguaaugagaagcaugaugaggaauuuugcgacaugcugagacuuuucgauuuuaacaaacaggccauuagccggcugaagucuccugcgcagauguccauccagcucauuaauaaagccguuaacgcucugaucaaugaccaacuuauuaugaagaaccaucugcgcgacaucaugggcauccccuauugcaauuacagcaaguauuguuaccucaaccacacgauuaccgggaaaacaucucugccuaagugcugucuggugagcaauggauccuaccucaacgagacccacuucucugaugacaucgaacagcaggccgauaauaugauuacagagaugcugcaaaaagaauauauggagagacagggcaagaccccgcuugggcuggucgaccucuucguguuuagcacguccuucuaccugaucagcauuuuucugcggcuugugaaaauccccacacaccgccauauugucggaaagccuugccccaaaccucacagacucaaccauaugggcaucuguucuugcggccuguauaagcagcccgggguuccggugcgguggaagagaugaggacuagucccuguucccagagcccacuuuuuuuucuuuuuuugaaauaaaauagccugucuuucagaucucaaaggcucuuuucagagccaccaaaaaaaaaaaaaaaaaaaaaaaaaaaaaaaaaaaaaaaaaaaaaaaaaaaaaaaaaaaaaaaaagaauu

SEQ ID NO: 24906 - RNA, 1714 nt, Artificial Sequence
  mRNA product Design a-1 (hSL-A64-N5) comprising derived and/or modified sequence from LASV(Togo/2016/7082;Clade VI)__AMR44577__GPCmut3 (opt5)
aggagagucccgcagucggcguccagcggcucugcuuguucgugugugugucguugcaggccuuauucaagcuuaccaugggccagaucauuaccuucuuucaagaggugccccacgucaucgaagagguuaugaacauugugcugaucgcccucagccugcuugcuauucugaaggggguguacaaugucgccacaugcggaaucaucggccucgugacguuccuguuucuuugugggagauccugcucucugauuuauaaaggaagcuacgaacuccagacccuggagcugaacauggaaacacucaauaugaccaugccucuguccuguacaaagaacucuagccaucacuauauccggguuggcaaugagaccgggcuugagcugacacucaccaacacguccauuaucaaucauaaauucugcaaccugucugacgcgcacaagcgcaaucuuuacgaucaugcucugaugagcauucucuccaccuuucaccugagcaucccgaacuucaaucaguaugaagccaugucuugugacuuuaacggaggcaaaauuuccgugcaguacaaucugagccacgccuaugcugucgaugccgcugagcauugcggcacaguggccaacgggguucuccaaaccuucaugagaauggcguggggaggcucuuacaucgcccuggacuccgggcggggaaauugggauuguaucaugacaagcuaccaguaucuuauuauccagaacaccacgugggaagaccacugccaguuuucucgccccuccccuauuggcuaccuggggcuccugagccaaagaacacgggauaucuauauuucccgcagacggcgcggaaccuucacauggacccuuucugacagcgagggcaacgagacccccggcggguacugucugacaagauggaugcucaucgaagcugagcugaagugcuuuggaaauacggccguggcuaaguguaacgaaaaacaugaugaggaguucugcgacaugcugcggcucuuugauuucaauaagcaggccauccagcgccugaaauccccugcgcagaugagcauucaacuuaucaacaaggccgucaaugcucugauuaacgaccagcucaucaugaaaaaucaccugagagauaugaugggcauucccuauugcaacuacucuaaguauuguuaccuuaaucacaccuccagcgggcggacaucucugccuaagugcugucucgugagcaacggauccuaccugaaugaaacccauuucucugacgacaucgagcagcaagccgauaacaugaucacagaaaugcugcagaaagaguauauugaccgccagggcaagaccccgcucgggcugguggaucuuuuugucuucagcacguccuuuuaccugaucagcauuuuccuccaccugaucaaaauucccacacauagacacaucguuggaaagccuugccccaaaccucaucggcugaaucacaugggcauuuguucuugcggccuuuauaagcagcccggggugccgaccagauggaaacgcugaggacuagucccuguucccagagcccacuuuuuuuucuuuuuuugaaauaaaauagccugucuuucagaucucaaaggcucuuuucagagccaccaaaaaaaaaaaaaaaaaaaaaaaaaaaaaaaaaaaaaaaaaaaaaaaaaaaaaaaaaaaaaaaaagaauu

SEQ ID NO: 24907 - RNA, 1714 nt, Artificial Sequence
  mRNA product Design a-1 (hSL-A64-N5) comprising derived and/or modified sequence from LASV(KAK-428;Clade n.d. (VII))__ANH09740__GPCmut3 (opt5)
aggagagucccgcagucggcguccagcggcucugcuuguucgugugugugucguugcaggccuuauucaagcuuaccaugggccagaucgugaccuucuuucaagaggucccccacguuauugaagaggugaugaacaucgugcugauugcccucagccugcuugcuauccugaaggggcucuacaauuucgccacaugcggagucauuggccugaucacguuucuucugcucugugggagauccugcucugcgaccuauaaaggacaguacgaacugcagacacuggagcucaacauggaaagccugaauaugaccaugccucuuuccuguacaaagaacaauucucaucacuauauccgggcuggcaacaauaccgggcuggagcucacacugaccaacacgagcauuaucucccauaaauucugcaaucuuucugacgcccacaagaaaaaccuguacgaucauacccucaugagcauuaucacaaccuuucaccuguccauuccgaauuucaaccaguaugaggccaugagcugugacuuuaauggaggcaagaucucuauucaauacaaccugucccacagcuaugcuggcgaugccgcucagcauugcgggacaguggccaauggaguucuccagaccuucaugcgcauggcguggggcgggucuuaccuggcccuugacuccggaagacggggcugggauuguaucaucagcucuuaccaguaucugauuauccaaaacacgacaugggacgaucacugccaguuuucccgccccagcccuauuggguaccucggauucgugucccagaagaccagagacaucuauauuucucggcgcagacggggcacauuuaccuggacccugagcgauuccgaaggccaugacaugcccgggggauacugucuuacacgcuggaugcugaucgaggcugaucucaaaugcuucggcaacacggccgucgcuaaguguaaugaaaaacacgacgaggaguuuugcgauauguggagacuguucgacuucaacaagcaggccauccaacggcugaaagcgccugcccagaugaauauucagcucaucaacaaggcugugaaugcccugauuaacgaccaacuuaugaugaagaaucaucugcgcgauaucauggggauucccuauugcaacuacagcaaauuuuguuaucucaauaacaccacaaccggaagaacaucucugccucggugcugucuuaucuccaauggcagcuaccugaacgaaacccacuucucugacgauaucgagcagcaggcugacaauaugauuacggaaaugcuccagaaggaguacauggaucgccaagggaaaacaccgcugggacugguugaccucuuuguguucagcaccuccuuuuaucugaucaccauuuuccuucaccuggucaagauccccacacauagacacauugugggcaaaccuugccccaagccucaucggcucaaccacaugggcaucuguucuugcgggcuguacaaacagcccggagugccggucagauggaagcgcugaggacuagucccuguucccagagcccacuuuuuuuucuuuuuuugaaauaaaauagccugucuuucagaucucaaaggcucuuuucagagccaccaaaaaaaaaaaaaaaaaaaaaaaaaaaaaaaaaaaaaaaaaaaaaaaaaaaaaaaaaaaaaaaaagaauu

SEQ ID NO: 24908 - RNA, 1714 nt, Artificial Sequence; identical to SEQ ID NO: 24902
  mRNA product Design a-1 (hSL-A64-N5) comprising derived and/or modified sequence from LASV(Pinneo-NIG-1969;Clade I)__AIT17836__GPCmut3 (opt5)

SEQ ID NO: 24909 - RNA, 1714 nt, Artificial Sequence
  mRNA product Design a-1 (hSL-A64-N5) comprising derived and/or modified sequence from LASV(ISTH0009-NIG-2011;Clade II)__AIT17404__GPCmut3 (opt5)
aggagagucccgcagucggcguccagcggcucugcuuguucgugugugugucguugcaggccuuauucaagcuuaccaugggccagaucauuaccuucuuucaagaggugccccacgucaucgaagagguuaugaacauugugcugaucgcccucagccugcuugcuauucugaaggggaucuacaauguggccacaugcggacucuucggccuggucuccuuucuucugcucugugggagaucuugcagcacgaccuauaaaggaguguacgaacugcagacacuggagcucgacauggcgucccugaacaugaccaugccucuuucuuguacaaagaauaacagccaucacuauaucaugguuggcaaugaaaccgggcuggagcucacacugaccaacacguccauuaucaaucauaaauucugcaaccuuucugaugcucacaagaaaaaucuguacgaccaugcccucaugagcauuaucuccaccuuucaccugagcauuccgaacuucaaucaguaugaggccaugucuugugauuuuaacggaggcaagaucuccgugcaguacaaucugagccacgcuuaugccgucgacgcugccaaccauugcggcacaauugcgaauggggugcuccaaaccuucaugcggauggccuggggaggcucuuacaucgcucuggauuccgggaagggaagcugggacuguaucaugacaucuuaccaguaucuuauuauccagaacaccacgugggaagaucacugccaguuuucccgccccagcccuauuggcuaccuggggcuccugucccaaagaacacgggacaucuauauuucucgcagacggcgcggaaccuucacauggacccuuagcgauuccgagggcaacgaaacccccggcggguacugucugacaagauggaugcucaucgaggccgagcugaaaugcuuuggaaauacggcuguugccaaguguaacgaaaaacaugacgaggaguucugcgauaugcugcggcucuuugacuucaauaagcaggcgauccgcagacugaaaaccccugcccagaugagcauucagcuuaucaacaaggcugugaaugcccugauuaacgaucaacucaucaugaagaaucaucugcgggacauuaugggcauccccuauugcaacuacucuaaauauuguuaccuuaaucacacagucaccgggaagacaucccugccucgcugcugucucgugagcaacggaucuuaccugaaugaaacccacuucagcgacgauaucgaacagcaggcugacaacaugauuacggagcugcuccaaaaagaguauauggauagacagggcaagacaccgcuggggcuuguggaccuguuugucuucuccaccucuuuuuaccucaucagcauuuuccugcaccugaucaaaauucccacccaucggcacaucacaggaaagccuugccccaaaccucaucgccuuaaucacaugggcauuuguuccugcggccucuauaagcaccccgggguuccggugaaguggaaaagaugaggacuagucccuguucccagagcccacuuuuuuuucuuuuuuugaaauaaaauagccugucuuucagaucucaaaggcucuuuucagagccaccaaaaaaaaaaaaaaaaaaaaaaaaaaaaaaaaaaaaaaaaaaaaaaaaaaaaaaaaaaaaaaaaagaauu

SEQ ID NO: 24910 - RNA, 1714 nt, Artificial Sequence
  mRNA product Design a-1 (hSL-A64-N5) comprising derived and/or modified sequence from LASV(ISTH2010-NIG-2012;Clade II)__AIT17482__GPCmut3 (opt5)
aggagagucccgcagucggcguccagcggcucugcuuguucgugugugugucguugcaggccuuauucaagcuuaccaugggccagaucauuaccuucuuucaagaggugccccacgucaucgaagagguuaugaacauugugcugaucgcccucagccugcuugcuauucugaaggggaucuacaauguggccacaugcggacucuucggccuggucuccuuucuucugcucugugggagaucuugcagcacgaccuauaaaggaguguacgaacugcagacacuggagcucgacauggcgucccugaacaugaccaugccucuuucuuguacaaagaauaacagccaucacuauaucaugguuggcaaugaaaccgggcuggagcucacacugaccaacacguccauuaucaaucauaaauucugcaaccuuucugaugcucacaagaaaaaucuguacgaccaugcccucaugagcauuaucuccaccuuucaccugagcauuccgaacuucaaucaguaugaggccaugucuugugauuuuaacggaggcaagaucuccgugcaguacaaucugagccacgcuuaugccgucgacgcugccaaccauugcggcacaauugcgaauggggugcuccaaaccuucaugcggauggccuggggaggcucuuacaucgcucuggauuccgggaagggaagcugggacuguaucaugacaucuuaccaguaucuuauuauccagaacauuaccugggaagaucacugccaguuuucccgccccagcccuaucggcuaccuggggcuccugucccaaagaacgcgggacauuuauaucucucgcagacggcgcggaacauucaccuggacacuuagcgauuccgagggcaacgaaacccccggcggguacugucugaccagauggaugcucaucgaggccgagcugaaaugcuuuggaaauacagcuguugccaaguguaacgaaaaacaugacgaggaguucugcgauaugcugcggcucuuugacuucaauaagcaggcgauucgcagacugaaaacgccugcccagaugagcauccagcuuauuaacaaggcugugaaugcccugaucaacgaucaacucauuaugaagaaucaucugcgggacaucaugggcauccccuauugcaacuacucuaaauauuguuaccuuaaucacaccgucacagggaagaccucccugccucgcugcugucucgugagcaacggaucuuaccugaaugaaacacacuucagcgacgauauugaacagcaggcugacaacaugaucaccgagcugcuccaaaaagaguauauugauagacagggcaagacgccgcuggggcuuguggaccuguuugucuucuccacaucuuuuuaccucaucagcauuuuccugcaccugguuaaaauccccacccaucggcacguggugggaaagccuugccccaaaccucaucgccuuaaucacaugggcauuuguuccugcggccucuauaagcaccccggggucccggugaaguggaaaagaugaggacuagucccuguucccagagcccacuuuuuuuucuuuuuuugaaauaaaauagccugucuuucagaucucaaaggcucuuuucagagccaccaaaaaaaaaaaaaaaaaaaaaaaaaaaaaaaaaaaaaaaaaaaaaaaaaaaaaaaaaaaaaaaaagaauu

SEQ ID NO: 24911 - RNA, 1714 nt, Artificial Sequence
  mRNA product Design a-1 (hSL-A64-N5) comprising derived and/or modified sequence from LASV(Lassa virus/H.sapiens-wt/NGA/2015/ISTH_0543;Clade II)__AVO03639__GPCmut3 (opt5)
aggagagucccgcagucggcguccagcggcucugcuuguucgugugugugucguugcaggccuuauucaagcuuaccaugggccagaucauuaccuucuuucaagaggugccccacgucaucgaagagguuaugaacauugugcugaucgcccucagccugcuugcuauucugaaggggaucuacaauguggccacaugcggacucuucggccuggucuccuuucuucugcucugugggagaucuugcagcacgaccuauaaaggaguguacgaacugcagacacuggagcucgacauggcgaaccugaauaugaccaugccucuuuccuguacaaagaacaauucucaucacuauaucaugguuggcaacgaaaccgggcuggagcucacacugaccaauacgagcauuaucaaccauaaauucugcaaucuuuccgaugcucacaagaaaaaccuguacgaccaugcccucaugucuauuaucagcaccuuucaccuguccauuccgaauuucaaccaguaugaggccaugagcugugauuuuaauggaggcaagaucucugugcaguacaaccugucccacacauaugcugucgacgccgcuaaucauugcggcaccauugccaacggggugcuccaaacauucaugcggauggcguggggaggcagcuacaucgcccuggauucugggaagggauccugggacuguaucaugaccagcuaccaguaucuuguuauucagaacacgacaugggaagaucacugccaguuuucucgccccuccccuaucggcuaccuggggcuccugagccaaagaacccgggacauuuauaucucccgcagacggcgcggaacauucaccuggacccuuucugauagcgagggcaaugaaacacccggcggguacugucugacgagauggaugcucauugaggcugagcugaaaugcuuuggaaacaccgccguggcuaaguguaaugaaaaacaugacgaggaguucugcgauaugcugcggcucuuugacuucaacaagcaggccauccgcagacugaaaaccccugcgcagauguccauccagcuuauuaauaaggccgucaacgcucugaucaaugaucaacucauuaugaagaaccaucugcgggacaucaugggcauucccuauugcaauuacagcaaauauuguuaccuuaaccacacagugacagggaagaccucucugccucgcugcugucucguguccaauggaagcuaccugaacgaaacgcacuucucugacgauaucgaacagcaggccgacaauaugaucacagagcugcuccaaaaagaguauauugauagacagggcaagaccccgcuggggcuugucgaccuguuuguuuucagcaccuccuuuuaccucaucucuauuuuccugcaccuggugaaaauccccacacaucggcacauuaccggaaagccuugccccaaaccucaucgccuuaaccacaugggcaucuguagcugcggccucuauaagcaccccggggugccggucaaguggaaaagaugaggacuagucccuguucccagagcccacuuuuuuuucuuuuuuugaaauaaaauagccugucuuucagaucucaaaggcucuuuucagagccaccaaaaaaaaaaaaaaaaaaaaaaaaaaaaaaaaaaaaaaaaaaaaaaaaaaaaaaaaaaaaaaaaagaauu

SEQ ID NO: 24912 - RNA, 1714 nt, Artificial Sequence
  mRNA product Design a-1 (hSL-A64-N5) comprising derived and/or modified sequence from LASV(Lassa virus/H.sapiens-wt/NGA/2016/ISTH_0009;Clade II)__AVO03571__GPCmut3 (opt5)
aggagagucccgcagucggcguccagcggcucugcuuguucgugugugugucguugcaggccuuauucaagcuuaccaugggccagaucauuaccuucuuucaagaggugccccacgucaucgaagagguuaugaacauugugcugaucgcccucagccugcuugcuauucugaaggggaucuacaauguggccacaugcggacuccugggccuugucuccuuccugcuccugugugggagaucuugcagcacgaccuauaaaggaguguacgaacugcagacacucgagcuggacauggcgucccuuaacaugaccaugccucugucuuguacaaagaauaacagccaucacuauaucaugguuggcaaugaaaccgggcucgagcugacacuuaccaacacguccauuaucaaucauaaauuuugcaaccugucugaugcucacaagaaaaaucucuacgaccaugcccugaugagcauuaucuccaccuuccaccugagcauuccgaacuuuaaucaguaugaggccaugucuugugauuucaacggaggccggaucuccgugcaguacaaucucagccacucuuaugcugucgacgccgcuaaccauugcggcacaauugccaauggggugcugcaaaccuuuaugcgcauggcguggggaggcuccuacaucgcccuugauagcgggaagggaucuugggacuguaucaugacauccuaccaguaucugauuauccagaacaccacgugggaagaucacugccaguucagcagacccuccccuauuggcuaccucgggcugcuuucucaacggacacgcgacaucuauauuagcagacggcgcagaggaaccuuuacauggacccuguccgauagcgagggcaacgaaacccccggcggguacugucucacacgguggaugcugaucgaggcugagcugaagugcuucggaaauacggccguugcuaaauguaacgaaaagcaugacgaggaauuuugcgauaugcuccgccuguucgacuuuaauaaacaggccaucagacggcuuaagaccccugcgcagaugucuauucagcugaucaacaaagccgugaaugcucucauuaacgaucaacugaucaugaagaaucaccuucgcgacauuaugggcauccccuauugcaacuacuccaaguauuguuaccugaaucacacagucaccgggaaaacaagccucccuagaugcugucuggugucuaacggaagcuaccugaaugagacccauuucuccgacgauaucgaacagcaggccgacaacaugauuacggagcuccugcaaaaggaguauaucgaucggcagggcaaaacaccgcuugggcugguggaccucuucgucuuuucuaccagcuucuaccugauuuccaucuuucugcaccuuguuaagauucccacccaucgccacaucacaggaaaaccuugccccaagccucauagacucaaucacaugggcauuuguagcugcggccuguauaaccaccccggggugccggugaaauggaagcggugaggacuagucccuguucccagagcccacuuuuuuuucuuuuuuugaaauaaaauagccugucuuucagaucucaaaggcucuuuucagagccaccaaaaaaaaaaaaaaaaaaaaaaaaaaaaaaaaaaaaaaaaaaaaaaaaaaaaaaaaaaaaaaaaagaauu

SEQ ID NO: 24913 - RNA, 1714 nt, Artificial Sequence
  mRNA product Design a-1 (hSL-A64-N5) comprising derived and/or modified sequence from LASV(Lassa virus/H.sapiens-wt/NGA/2016/ISTH_0017;Clade II)__AVO03567__GPCmut3 (opt5)
aggagagucccgcagucggcguccagcggcucugcuuguucgugugugugucguugcaggccuuauucaagcuuaccaugggccagaucauuaccuucuuucaagaggugccccacgucaucgaagagguuaugaacauugugcugaucgcccucagccugcuugcuauucugaaggggaucuacaauguggccacaugcggacucuucggccuggucuccuuucuucugcucugugggagaucuugcagcacgaccuauaaaggaguguacgaacugcagacacuggagcucgacauggcgucccugaacaugaccaugccucuuucuuguacaaagaauaacagccaucacuauaucaugguuggcaaugaaaccgggcuggagcucacacugaccaacacguccauuaucaaucauaaauucugcaaccuuucugaugcucacaagaaaaaucuguacgaccaugcccucaugagcauuaucuccaccuuucaccugagcauuccgaacuucaaucaguaugaggccaugucuugugauuuuaacggaggcaagaucuccgugcaguacaaucugagccacacauaugcuauugacgccgcuaaccauugcggcaccaucgccaaugggguccuccaaacauucaugcggauggcguggggaggcucuuacaucgcccuggauuccgggaagggaagcugggacuguauuaugaccucuuaccaguaucuuaucauucagaacacgacaugggaagaucacugccaguuuucccgccccagcccuaucggcuaccuggggcuccugucccaaagaacccgggacauuuauaucucucgcagacggcgcggaacauucaccuggacccuuagcgauuccgagggcaacgaaacacccggcggguacugucugacgagauggaugcucaucgaggcugagcugaaaugcuuuggaaauaccgccguggcuaaguguaacgaaaaacaugacgaggaguucugcgauaugcugcggcucuuugacuucaauaagcaggccauucgcagacugaaaaccccugcgcagaugagcauccagcuuauuaacaaggccguuaaugcucugaucaacgaucaacucauuaugaagaaucaucugcgggacaucaugggcauccccuauugcaacuacucuaaauauuguuaccuuaaucacacagugacagggaagaccucccugccucgcugcugucucgucagcaacggaucuuaccugaaugaaacgcacuucagcgacgauauugaacagcaggccgacaacaugaucacagagcugcuccaaaaagaguauauggauagacagggcaagaccccgcuggggcuuguggaccuguuuguguucuccaccucuuuuuaccucauuagcaucuuccugcaccugguccggauucccacacaucgccacguuaucggaaaaccuugccccaagccucauagacuuaaucacaugggcauuuguuccugcggccucuauaaacaccccggggugccggugaaguggaagcggugaggacuagucccuguucccagagcccacuuuuuuuucuuuuuuugaaauaaaauagccugucuuucagaucucaaaggcucuuuucagagccaccaaaaaaaaaaaaaaaaaaaaaaaaaaaaaaaaaaaaaaaaaaaaaaaaaaaaaaaaaaaaaaaaagaauu

SEQ ID NO: 24914 - RNA, 1714 nt, Artificial Sequence
  mRNA product Design a-1 (hSL-A64-N5) comprising derived and/or modified sequence from LASV(Lassa virus/H.sapiens-wt/NGA/2018/ISTH_0959;Clade II)__AVV65099__GPCmut3 (opt5)
aggagagucccgcagucggcguccagcggcucugcuuguucgugugugugucguugcaggccuuauucaagcuuaccaugggccagaucauuaccuucuuucaagaggugccccacgucaucgaagagguuaugaacauugugcugaucgcccucagccugcuugcuauucugaaggggaucuacaauguggucacaugcggacucuucggccugguguccuuucuucugcucugugggagaucuugcagcacgaccuauaaaggaguuuacgaacugcagacacuggagcucgacauggccucccugaacaugaccaugccucuuucuuguacaaagaauaacagccaucacuauaucauggugggcaaugaaaccgggcuggagcucacacugaccaacacguccauuaucaaucauaaauucugcaaccuuucugaugcgcacaagaaaaaucuguacgaccaugcucucaugagcauuaucuccaccuuucaccugagcauuccgaacuucaaucaguaugaggccaugucuugugauuuuaacggaggcaagaucuccguccaguacaaucugagccacgccuaugcuauugacgccgcuaaccauugcggcacaaucgccaauggggugcuccaaaccuucaugcggauggcguggggaggcucuuacaucgcccuggauuccgggaagggaagcugggacuguauuaugacaucuuaccaguaucuuaucauucagaacaccacgugggaagaucacugccaguuuucccgccccagcccuaucggcuaccuggggcuccugucccaaagaacacgggacauuuauaucucucgcagacggcgcggaaccuucacauggacccuuagcgauuccgagggcaacgaaacccccggcggguacugucugacaagauggaugcucaucgaggcugagcugaaaugcuuuggaaauacggccguugcuaaguguaacgaaaaacaugacgaggaguucugcgauaugcugcggcucuuugacuucaauaagcaggccauucgcagacugaaaaccccugcgcagaugagcauccagcuuauuaacaaggccgugaaugcucugaucaacgaucaacucauuaugaagaaucaucugcgggacaucaugggcauccccuauugcaacuacucuaaauauuguuaccuuaaucacacagucaccgggaagacaucccugccucgcugcugucucgugagcaacggaucuuaccugaaugaaacccacuucagcgacgauauugaacagcaggccgacaacaugaucacggagcugcuccaaaaagaguauauugauagacagggcaagacaccgcuggggcuuguggaccuguuugucuucuccaccucuuuuuaccucaucagcauuuuccugcaccugguuaaaauccccacccaucggcacgugauuggaaagccuugccccaaaccucaucgccuuaaucacaugggcaucuguuccugcggccucuauaagcaccccggggugccggucaaguggaaaagaugaggacuagucccuguucccagagcccacuuuuuuuucuuuuuuugaaauaaaauagccugucuuucagaucucaaaggcucuuuucagagccaccaaaaaaaaaaaaaaaaaaaaaaaaaaaaaaaaaaaaaaaaaaaaaaaaaaaaaaaaaaaaaaaaagaauu

SEQ ID NO: 24915 - RNA, 1714 nt, Artificial Sequence
  mRNA product Design a-1 (hSL-A64-N5) comprising derived and/or modified sequence from LASV(LASV003-NIG-2008;Clade II)__AIT17580__GPCmut3 (opt5)
aggagagucccgcagucggcguccagcggcucugcuuguucgugugugugucguugcaggccuuauucaagcuuaccaugggccagaucauuaccuucuuucaagaggugccccacgucaucgaagagguuaugaacauugugcugaucgcccucagccugcuugcuauucugaaggggaucuacaauguggccacaugcggacucuucggccuggucuccuuucuucugcucugugggagaucuugcagcacgaccuauaaaggaguguacgaacugcagacacuggagcucgacauggcgucccugaacaugaccaugccucuuucuuguacaaagaauaacagccaucacuauaucaugguuggcaaugaaaccgggcuggagcucacacugaccaacacguccauuaucaaucauaaauucugcaaccuuucugaugcucacaagaaaaaucuguacgaccaugcccucaugagcauuaucuccaccuuucaccugagcauuccgaacuucaaucaguaugaggccaugucuugugauuuuaacggaggcaagaucuccgugcaguacaaucugagccacacauaugcugucgacgccgcuaaccauugcggcaccauugccaauggggugcuccaaacauucaugcggauggcguggggaggcucuuacaucgcccuggauuccgggaagggaagcugggacuguaucaugaccucuuaccaguaucuuauuauccagaacacgacaugggaagaucacugccaguuuucccgccccagcccuauuggcuaccuggggcuccugucccaaagaacccgggacaucuauauuucucgcagacggcgcggaacauucaccuggacccuuagcgauuccgagagcaacgaaacacccggcggcuacugucugacgagauggaugcucaucgaggcugagcugaaaugcuuugggaauaccgccguugcuaaguguaacgaaaaacaugacgaggaguucugcgauaugcugcggcucuuugacuucaauaagcaggccauccgcagacugaaagcgccugcccagaugucuauucagcuuaucaacaaggcugugaaugcccugauuaacgaucaacucaucaugaagaaucaucugcgggacauuaugggaauccccuauugcaacuacuccaaauauuguuaccuuaaucacacagucaccggccgcacaagccugccuagaugcugucucgugucuaacgggagcuaccugaaugaaacccacuucuccgacgauaucgaacagcaggcugacaacaugauuacggagcugcuccaaaaggaguauauggaucggcagggaaaaacaccgcugggccuuguggaccuguuugucuucucuaccagcuuuuaccucaucuccauuuuccugcaccugguuaagauccccacccaucgccacgugauugggaaaccuugccccaagccucauagacuuaaucacaugggaaucuguagcugcggccucuauaaacaccccggcgugccggucaaguggaagcggugaggacuagucccuguucccagagcccacuuuuuuuucuuuuuuugaaauaaaauagccugucuuucagaucucaaaggcucuuuucagagccaccaaaaaaaaaaaaaaaaaaaaaaaaaaaaaaaaaaaaaaaaaaaaaaaaaaaaaaaaaaaaaaaaagaauu

SEQ ID NO: 24916 - RNA, 1714 nt, Artificial Sequence
  mRNA product Design a-1 (hSL-A64-N5) comprising derived and/or modified sequence from LASV(LASV035-NIG-2009;Clade II)__AIT17588__GPCmut3 (opt5)
aggagagucccgcagucggcguccagcggcucugcuuguucgugugugugucguugcaggccuuauucaagcuuaccaugggccagaucauuaccuucuuucaagaggugccccacgucaucgaagagguuaugaacauugugcugaucgcccucagccugcuugcuauucugaaggggaucuacaauguggccacaugcggacucuucggccuggucuccuuucuucugcucugugggagaucuugcagcacgaccuauaaaggaguguacgaacugcagacacuggagcucgacauggcgucccugaacaugaccaugccucuuucuuguacaaagaauaacagccaucacuauaucaugguuggcaaugaaaccgggcuggagcucacacugaccaacacguccauuaucaaucauaaauucugcaaccuuucugaugcucacaagaaaaaucuguacgaccaugcccucaugagcauuaucuccaccuuucaccugagcauuccgaacuucaaucaguaugaggccaugucuugugauuuuaacggaggcaagaucuccgugcaguacaaucugagccacgcuuaugccgucgacgcugccaaccauugcggcacaauugcgaauggggugcuccaaaccuucaugcggauggccuggggaggcucuuacaucgcucuggauuccgggaagggaagcugggacuguaucaugacaucuuaccaguaucuuauuauccagaacaccacgugggaagaucacugccaguuuucccgccccagcccuauuggcuaccuggggcuccugucccaaagaacacgggacaucuauauuucucgcagacggcgcggaaccuucacauggacccuuagcgauuccgagggcaacgaaacccccggcggguacugucugacaagauggaugcucaucgaggccgagcugaaaugcuuuggaaauacggcuguugccaaguguaacgaaaaacaugacgaggaguucugcgauaugcugcggcucuuugacuucaauaagcaggcgauccgcagacugaaagccccugcucagaugagcauucagcuuaucaacaaggccgugaaugcucugauuaacgaucaacucaucaugaagaaucaucugcgggacauuaugggcauccccuauugcaacuacucuaaauauuguuaccuuaaucacaccgucacagggaagaccucccugccucgcugcugucucgugagcaacggaucuuaccugaaugaaacacacuucagcgacgauaucgaacagcaggccgacaacaugauuaccgagcugcuccaaaaagaguauaucgauagacagggcaagacgccgcuggggcuuguggaccuguuugucuucuccacaucuuuuuaccucauuagcaucuuccugcaccugguuaaaauucccacccaucggcacgugaucggaaagccuugccccaaaccucaucgccuuaaucacaugggcauuuguuccugcggccucuauaagcaccccggggugccggucaaguggaaaagaugaggacuagucccuguucccagagcccacuuuuuuuucuuuuuuugaaauaaaauagccugucuuucagaucucaaaggcucuuuucagagccaccaaaaaaaaaaaaaaaaaaaaaaaaaaaaaaaaaaaaaaaaaaaaaaaaaaaaaaaaaaaaaaaaagaauu

SEQ ID NO: 24917 - RNA, 1714 nt, Artificial Sequence
  mRNA product Design a-1 (hSL-A64-N5) comprising derived and/or modified sequence from LASV(LASV1000-NIG-2009;Clade II)__AIT17782__GPCmut3 (opt5)
aggagagucccgcagucggcguccagcggcucugcuuguucgugugugugucguugcaggccuuauucaagcuuaccaugggccagaucauuaccuucuuucaagaggugccccacgucaucgaagagguuaugaacauugugcugaucgcccucagccugcuugcuauucugaaggggaucuacaauguggccacaugcggacucuucggccuggucuccuuucuucugcucugugggagaucuugcagcacgaccuauaaaggaguguacgaacugcagacacuggagcucgacauggcgucccugaacaugaccaugccucuuucuuguacaaagaauaacagccaucacuauaucaugguuggcaaugaaaccgggcuggagcucacacugaccaacacguccauuaucaaucauaaauucugcaaccuuucugaugcucacaagaaaaaucuguacgaccaugcccucaugagcauuaucuccaccuuucaccugagcauuccgaacuucaaucaguaugaggccaugucuugugauuuuaacggaggcaagaucuccgugcaguacaaucugagccacacauaugcugucgacgccgcuaaccauugcggcaccauugccaauggggugcuccaaacauucaugcggauggcguggggaggcucuuacaucgcccuggauuccgggaagggaagcugggacuguaucaugaccucuuaccaguaucuuauuauccagaacacgacaugggaagaucacugccaguuuucccgccccagcccuauuggcuaccuggggcuccugucccaaagaacccgggacaucuauauuucucgcagacggcgcggaacauucaccuggacccuuagcgauuccgagggcaacgaaacacccggcggguacugucugacgagauggaugcucaucgaggcugagcugaaaugcuuuggaaauaccgccguugcuaaguguaacgaaaaacaugacgaggaguucugcgauaugcugcggcucuuugacuucaauaagcaggccaucaaacgccugaagaccccugcgcagaugagcauucagcuuaucaacaaggccgugaaugcucugauuaacgaucaacucaucaugaaaaaucaccugagagacauuaugggcauccccuauugcaacuacucuaaguauuguuaccuuaaucacacagucacagggaaaaccucccugccucggugcugucucgugagcaacggaucuuaccugaaugaaacgcauuucagcgacgauaucgaacagcaggccgacaacaugauuacagagcugcuccaaaaggaguauaucgaucgccagggcaaaaccccgcuggggcuuguggaccuguuugucuucuccaccucuuuuuaccucauuagcaucuuccugcaccugguuaagauucccacacauagacacguggugggaaaaccuugccccaagccucaucggcuuaaucacaugggcaucuguuccugcggccucuauaagcaccccggggucccggugaaauggaagcgcugaggacuagucccuguucccagagcccacuuuuuuuucuuuuuuugaaauaaaauagccugucuuucagaucucaaaggcucuuuucagagccaccaaaaaaaaaaaaaaaaaaaaaaaaaaaaaaaaaaaaaaaaaaaaaaaaaaaaaaaaaaaaaaaaagaauu

SEQ ID NO: 24918 - RNA, 1714 nt, Artificial Sequence
  mRNA product Design a-1 (hSL-A64-N5) comprising derived and/or modified sequence from LASV(LASV221-NIG-2010;Clade II)__AIT17624__GPCmut3 (opt5)
aggagagucccgcagucggcguccagcggcucugcuuguucgugugugugucguugcaggccuuauucaagcuuaccaugggccagaucauuaccuucuuucaagaggugccccacgucaucgaagagguuaugaacauugugcugaucgcccucagccugcuugcuauucugaaggggaucuacaauguggccacaugcggacucuucggccuggucuccuuucuucugcucugugggagaucuugcagcacgaccuauaaaggaguguacgaacugcagacacuggagcucgacauggcgucccugaacaugaccaugccucuuucuuguacaaagaauaacagccaucacuauaucaugguuggcaaugaaaccgggcuggagcucacacugaccaacacguccauuaucaaucauaaauucugcaaccuuucugaugcucacaagaaaaaucuguacgaccaugcccucaugagcauuaucuccaccuuucaccugagcauuccgaacuucaaucaguaugaggccaugucuugugauuuuaacggaggcaagaucuccgugcaguacaaucugagccacacauaugcuauugacgccgcuaaccauugcggcaccaucgccaaugggguccuccaaacauucaugcggauggcguggggaggcucuuacaucgcccuggauuccgggaagggaagcugggacuguauuaugaccucuuaccaguaucuuaucauucagaacacgacaugggaagaucacugccaguuuucccgccccagcccuaucggcuaccuggggcuccugucccaaagaacccgggacauuuauaucucucgcagacggcgcggaacauucaccuggacccuuagcgauuccgagggcaacgaaacacccggcggguacugucugacgagauggaugcucaucgaggcugagcugaaaugcuuuggaaauaccgccguggcuaaguguaacgaaaaacaugacgaggaguucugcgauaugcugcggcucuuugacuucaauaagcaggccauucgcagacugaaaaccccugcgcagaugagcauccagcuuauuaacaaggccguuaaugcucugaucaacgaucaacucauuaugaagaaucaucugcgggacaucaugggcauccccuauugcaacuacucuaaauauuguuaccuuaaucacacagugacagggaagaccucccugccucgcugcugucucgucagcaacggaucuuaccugaaugaaacgcacuucagcgacgauauugaacagcaggccgacaacaugaucacagagaugcugcaaaaagaguauauggauagacagggcaagaccccgcucgggcugguggaccuuuuuguguucuccaccucuuuuuaccugauuagcaucuuccuccaccuggucaaaauucccacacaucggcacguuaucggaaagccuugccccaaaccucaucgccugaaucacaugggcauuuguuccugcggccuuuauaagcaccccggggugccggugaaguggaaaagaugaggacuagucccuguucccagagcccacuuuuuuuucuuuuuuugaaauaaaauagccugucuuucagaucucaaaggcucuuuucagagccaccaaaaaaaaaaaaaaaaaaaaaaaaaaaaaaaaaaaaaaaaaaaaaaaaaaaaaaaaaaaaaaaaagaauu

SEQ ID NO: 24919 - RNA, 1714 nt, Artificial Sequence
  mRNA product Design a-1 (hSL-A64-N5) comprising derived and/or modified sequence from LASV(LASV237-NIG-2010;Clade II)__AIT17638__GPCmut3 (opt5)
aggagagucccgcagucggcguccagcggcucugcuuguucgugugugugucguugcaggccuuauucaagcuuaccaugggccagaucauuaccuucuuucaagaggugccccacgucaucgaagagguuaugaacauugugcugaucgcccucagccugcuugcuauucugaaggggaucuacaauguggccacaugcggacucuucggccuggucuccuuucuucugcucugugggagaucuugcagcacgaccuauaaaggaguguacgaacugcagacacuggagcucgacauggcgucccugaacaugaccaugccucuuucuuguacaaagaauaacagccaucacuauaucaugguuggcaaugaaaccgggcuggagcucacacugaccaacacguccauuaucaaucauaaauucugcaaccuuucugaugcucacaagaaagaccuguacgaucaugcccucaugagcauuaucuccaccuuucaccugagcauuccgaauuucaaccaguaugaggccaugucuugugacuuuaauggaggcaagaucuccgugcaguacaaccugagccacacauaugcugucgaugccgcuaaucauugcggcaccauugccaacggggugcuccaaacauucaugcggauggcguggggaggcucuuacaucgcccuggacuccgggaagggaagcugggauuguaucaugaccucuuaccaguaucuuauuauccagaauacgacaugggaagaccacugccaguuuucccgccccagcccuauuggcuaccuggggcuccugucccaaagaacccgggauaucuauauuucucgcagacggcgcggaacauucaccuggacccuuagcgacuccgagggcaacgaaacacccggcggguacugucugacgagauggaugcucaucgaggcugagcugaaaugcuuuggaaacaccgccguugcuaaguguaaugaaaaacaugaugaggaguucugcgacaugcugcggcucuuugauuucaacaagcaggccauccgcagacugaaaaccccugcgcagaugagcauucagcuuaucaauaaggccgugaacgcucugauuaaugaccaacucaucaugaagaaccaucugcgggacauuaugggcauccccuauugcaauuacucuaaauauuguuaccuuaaccacacagucacagggaagaccucccugccucgcugcugucucgugagcaauggaucuuaccugaacgaaacgcacuucagcgaugacaucgaacagcaggccgauaauaugauuacagagcugcuccaaaaagaguauauggacagacagggcaagaccccgcuggggcuuguggaucuguuugucuucuccaccucuuuuuaccucaucagcauuuuccugcaccugaucaaaauucccacacaucggcacaucaccggaaagccuugccccaaaccucaucgccuuaaccacaugggcauuuguuccugcggccucuauaagcaccccgggguuccggugaaguggaaaagaugaggacuagucccuguucccagagcccacuuuuuuuucuuuuuuugaaauaaaauagccugucuuucagaucucaaaggcucuuuucagagccaccaaaaaaaaaaaaaaaaaaaaaaaaaaaaaaaaaaaaaaaaaaaaaaaaaaaaaaaaaaaaaaaaagaauu

SEQ ID NO: 24920 - RNA, 1714 nt, Artificial Sequence
  mRNA product Design a-1 (hSL-A64-N5) comprising derived and/or modified sequence from LASV(LASV253-NIG-2011;Clade II)__AIT17670__GPCmut3 (opt5)
aggagagucccgcagucggcguccagcggcucugcuuguucgugugugugucguugcaggccuuauucaagcuuaccaugggccagaucauuaccuucuuucaagaggugccccacgucaucgaagagguuaugaacauugugcugaucgcccucagccugcuugcuauucugaaggggaucuacaauguggccacaugcggacucuucggccuggucuccuuucuucugcucugugggagaucuugcagcacgaccuauaaaggaguguacgaacugcagacacuggagcucgacauggcgucccugaacaugaccaugccucuuucuuguacaaagaauaacagccaucacuauaucaugguuggcaaugaaaccgggcuggagcucacacugaccaacacguccauuaucaaucauaaauucugcaaccuuucugaugcucacaagaaaaaucuguacgaccaugcccucaugagcauuaucuccaccuuucaccugagcauuccgaacuucaaucaguaugaggccaugucuugugauuuuaacggaggcaagaucuccgugcaguacaaucugagccacacauaugcugucgacgccgcuaaccauugcggcaccauugccaauggggugcuccaaacauucaugcggauggcguggggaggcucuuacaucgcccuggauuccgggaagggaagcugggacuguaucaugaccucuuaccaguaucuuauuauccagaacacgacaugggaagaucacugccaguuuucccgccccagcccuauuggcuaccuggggcuccugucccaaagaacccgggacaucuauauuucucgcagacggcgcggaacauucaccuggacccuuagcgauuccgagggcaacgaaacacccggcggguacugucugacgagauggaugcucaucgaggcugagcugaaaugcuuuggaaauaccgccguugcuaaguguaacgaaaaacaugacgaggaguucugcgauaugcugcggcucuuugacuucaauaagcaggccauccgcagacugaaagcgccugcccagaugagcauucagcuuaucaacaaggcugugaaugcccugauuaacgaucaacucaucaugaagaaucaucugcgggacauuaugggcauccccuauugcaacuacucuaaauauuguuaccuuaaucacacagucaccgggcgcacaucccugccuagaugcugucucgugagcaacggaucuuaccugaaugaaacccacuucagcgacgauaucgaacagcaggcugacaacaugauuacggagcugcuccaaaaggaguauaucgaucggcagggcaaaacaccgcuggggcuuguggaccuguuugucuucuccaccucuuuuuaccucauuagcaucuuccugcaccugguuaagauucccacccaucgccacaucauuggaaaaccuugccccaagccucauagacuuaaucacaugggcaucuguuccugcggccucuauaaacaccccggggugccggugaaguggaagcggugaggacuagucccuguucccagagcccacuuuuuuuucuuuuuuugaaauaaaauagccugucuuucagaucucaaaggcucuuuucagagccaccaaaaaaaaaaaaaaaaaaaaaaaaaaaaaaaaaaaaaaaaaaaaaaaaaaaaaaaaaaaaaaaaagaauu

SEQ ID NO: 24921 - RNA, 1714 nt, Artificial Sequence
  mRNA product Design a-1 (hSL-A64-N5) comprising derived and/or modified sequence from LASV(LASV254-NIG-2011;Clade II)__AIT17674__GPCmut3 (opt5)
aggagagucccgcagucggcguccagcggcucugcuuguucgugugugugucguugcaggccuuauucaagcuuaccaugggccagaucauuaccuucuuucaagaggugccccacgucaucgaagagguuaugaacauugugcugaucgcccucagccugcuugcuauucugaaggggaucuacaauguggccacaugcggacucuucggccuggucuccuuucuucugcucugugggagaucuugcagcacgaccuauaaaggaguguacgaacugcagacacuggagcucgacaugaccaaccugaauaugacaaugccucuuuccuguaccaagaacaauucucaucacuauaucaugguuggcaacgaaacagggcuggagcucacccugacgaauaccagcauuaucaaccauaaauucugcaaucuuuccgaugcgcacaagaaaaaccuguacaaucaugcucucaugucuauuaucagcacauuucaccuguccauuccgaacuucaaucaguaugaggccaugagcugugacuuuaacggaggcaagaucucugugcaguacaaucugucccacagcuaugccgucgaugcugccaaccauugcggcaccauugcuaacggggugcuccaaacauucaugcggauggccuggggaggcucuuacaucgcgcuggacuccgggaagggaaauugggauuguaucaugaccagcuaccaguaucuuauuauccagaacacgacaugggaagaccacugccaguuuucucgccccuccccuauuggcuaccuggggcuccugagccaaagaacccgggauaucuauauuucccgcagacggcgcggaacauucaccuggacccuuucugacagcgagggcaaugaaacacccggcggguacugucugacgagauggaugcucaucgaggccgagcugaaaugcuuuggaaacaccgcuguugccaaguguaaugaaaaacaugaugaggaguucugcgacaugcugcggcucuuugauuucaacaagcaggcuauccgcagacugaaaaccccugcccaggcgaauauucagcuuaucaacaaggccgugaaugcucugauuaacgaccaacucaucaugaagaaucaucugcgggauauuaugggcauccccuauugcaacuacuccaaauauuguuaccuuaaucacacagucacagggaagaccagccugccucgcugcugucucgugucuaacggauccuaccugaaugaaacgcacuucagcgacgacaucgaacagcaggccgauaacaugauuacagagcugcuccaaaaagaguauauggacagacagggcaagaccccgcuggggcuuguggaucuguuugucuucucuaccagcuuuuaccucaucuccauuuuccugcaccugguuaaaauccccacacaucggcacgugauuggaaagccuugccccaaaccucaucgccuuaaccacaugggcaucuguucuugcggccucuauaagcaccccggggugccggucaaguggaaaagaugaggacuagucccuguucccagagcccacuuuuuuuucuuuuuuugaaauaaaauagccugucuuucagaucucaaaggcucuuuucagagccaccaaaaaaaaaaaaaaaaaaaaaaaaaaaaaaaaaaaaaaaaaaaaaaaaaaaaaaaaaaaaaaaaagaauu

SEQ ID NO: 24922 - RNA, 1714 nt, Artificial Sequence
  mRNA product Design a-1 (hSL-A64-N5) comprising derived and/or modified sequence from LASV(Nig08-A19;Clade III)__ADU56618__GPCmut3 (opt5)
aggagagucccgcagucggcguccagcggcucugcuuguucgugugugugucguugcaggccuuauucaagcuuaccaugggccagaucgugaccuucuuucaagaggucccccacguuauugaagaggugaugaacaucgugcugauugcccucagcauccuggcuauucuuaaggggcuguacaauaucgccacaugcggacucaucggccuggucacguuccuucugcucuccgggagaucuuguagcaugaccuauaaaggaguguacgaacugcagacacuggagcucaacaugaauacccugaacaugacaaugccucuuuccugcaccaagaauaacucucaucacuauauuaugguuggcaaugaaacagggcuggagcucacccugacgaacaccagccuucugcaucacaaauuuuguaaucucuccgacgcgcauaagaaaaaccuguacgaucacacacugaugucuaucauuagcaccuuccaccucuccaucccgaauuuuaaccaguaugaggcuaugagcugcgacuucaauggaggcaagauuacagugcaguacaaccugucucauuccuaugccaucgaugccgcuaaucacuguggcaccgucgccaacggggugcuucaaacguuuaugcggauggcuuggggaggcagcuacauugcccuggacucugggcgcggaaagugggauugcaucaugacauccuaccaguaucucaucauucagaacaccacaugggaagaccauugucaguucagcagacccucuccuaucggcuaccuggggcuucugucccaacggacccgcgauauuuauaucagcagacggcgcagaggaaccuuuacauggacgcucuccgacucugagggcaaugaaacccccggcggguacugccugacacgguggaugcugauugaggcggagcucaaauguuucggaaacaccgccguugcuaagugcaaugaaaaacacgaugaggaauuuugugacaugcugcgccuuuucgauuuuaacaagcaggccaucagacggcugaaagcuccugcccagaugagcauccagcucauuaauaaggcggugaacgcccugaucaaugaccaacuuauuaugaagaaccaucugcgcgauaucaugggcauucccuauugcaauuacuccaaauauugcuaccucaaccacacaagcaccgggagaacgucucugccucgguguugccuggucuccaauggaagcuaccucaacgagacacacuucucugacgacaucgaacagcaggcugauaauaugaucaccgagaugcugcaaaaggaguaucuugaccgccagggcaaaaccccgcuggggcucguggaucuguucguguuuagcacauccuucuaccugauuucuaucuuucuucaucucgucaagauucccacccacagacauaucguuggaaaaccuugucccaagccucaccggcugaaccacaugggcauuugcagcuguggccuguauaaacagcccggggugccggugagauggaagcgcugaggacuagucccuguucccagagcccacuuuuuuuucuuuuuuugaaauaaaauagccugucuuucagaucucaaaggcucuuuucagagccaccaaaaaaaaaaaaaaaaaaaaaaaaaaaaaaaaaaaaaaaaaaaaaaaaaaaaaaaaaaaaaaaaagaauu

SEQ ID NO: 24923 - RNA, 1717 nt, Artificial Sequence
  mRNA product Design a-1 (hSL-A64-N5) comprising derived and/or modified sequence from LASV(G1180-SLE-2010;Clade IV)__AIT17168__GPCmut3 (opt5)
aggagagucccgcagucggcguccagcggcucugcuuguucgugugugugucguugcaggccuuauucaagcuuaccaugggccagaucgugaccuucuuucaagaggucccccacguuauugaagaggugaugaacaucgugcugauugcccucagcauccuggcuguccuuaaggggcuguacaauuucgccacaugcggacucgugggccugcuuacguuucugcuccugugugggagauccugcaccgcgucucgguauaaaggaguuuacgaacugcagacacucgagcugaacauggaaacccuuaauaugacaaugccucugagcuguaccaagaacaauucccaucacuauauuauggugggcaacgagacagggcucgagcugacccuuacgaauaccucuaucaucaaccauaaauucugcaaucugagcgacgcucacaagaaaaaccucuacgaucaugcccugauguccauuaucucuacauuucaccugagcauuccgaauuucaaccaguaugaagccauguccugugacuuuaauggaggcaagaucagcguccaguacaaccucucucacuccuaugcuggcgaugccgcuaaucauugcgggaccguggccaacggaguucugcaaacauucaugcgcauggcguggggcgggagcuacauugcccuugacucuggacacggcuccugggauuguaucaugaccagcuaccaguaucugauuauccagaacacgacaugggaggaccauugccaguuuucuagacccuccccuaucggguaccucggacugcuuagccaacggacccgcgauauuuauaucuccagacggcgcagaggcacauucaccuggacccugucugacagcgaaggcaaggauacacccgggggauacugucucacgcgguggaugcugauugaggcugagcugaaaugcuuuggcaauaccgccguggcuaaguguaacgaaaaacacgacgaggaguucugcgauaugcuccgccuguuugacuucaauaagcaggccauccagagacuuaaagcgccugcccagauguccauucaacugaucaacaaggcugucaaugcccucaucaacgaucagcugauuaugaagaaucaccuucgggacaucauggggauucccuauugcaacuacagcaaauauuguuaccugaaucauacaaccacaggaaagaccucucucccuaaaugcugucugguguccaacggcagcuaccugaaugaaacgcacuucucugacgauaucgaacagcaagcugacaacaugauuacagagaugcuccagaaggaguauauggaacgccaggggaaaaccccgcugggacuuguggaucuguuugucuucagcaccuccuuuuaccucaucucuaucuuccugcaucugguuaagauucccacacacagacauaucgugggcaaaagcugcccuaagccccaccggcuuaaucacaugggcauuuguuccugcgggcucuauaagcagccuggagugcccgucaaauggaagcgcugaggacuagucccuguucccagagcccacuuuuuuuucuuuuuuugaaauaaaauagccugucuuucagaucucaaaggcucuuuucagagccaccaaaaaaaaaaaaaaaaaaaaaaaaaaaaaaaaaaaaaaaaaaaaaaaaaaaaaaaaaaaaaaaaagaauu

SEQ ID NO: 24924 - RNA, 1717 nt, Artificial Sequence
  mRNA product Design a-1 (hSL-A64-N5) comprising derived and/or modified sequence from LASV(G1442-SLE-2011;Clade IV)__AIT17180__GPCmut3 (opt5)
aggagagucccgcagucggcguccagcggcucugcuuguucgugugugugucguugcaggccuuauucaagcuuaccaugggccagaucgugaccuucuuucaagaggucccccacguuauugaagaggugaugaacaucgugcugauugcccucagcauccuggcuguccuuaaggggcuguacaauguggccacaugcggacucauuggccugguuacguuccuucugcucugugggagauccugcaccacaacccuguauaaaggaguguacgaacugcagacacucgagcugaacauggaaacccuuaauaugacaaugccucugucuuguaccaagaacaauagccaucacuauauccgggucggcaacgagacggggcucgagcugacccuuacaaauaccuccaucauuaaccauaaauuuugcaaucugucugacgcgcacaagaaaaaccucuacgaucaugcucugaugagcaucauuuccacauuccaccugucuaucccgaauuuuaaccaguaugaagccaugagcugugacuucaauggaggcaagauuuccgugcaguacaaccucagccacucuuaugccggcgaugcugccaaucauugcgggaccguugcuaacggagugcugcaaacguuuaugcgcauggccuggggcggguccuacaucgcgcuugacagcggaagaggcaacugggauuguauuaugacaucuuaccaguaucugaucauccagaauaccacaugggacgaucacugccaguucucccggcccagcccuauuggguaccucggacugcuuucucaacgcaccagagacgucuauaucucccggcgcagacggggcaccuuuacauggacgcugagcgauuccgagggcaaggacacccccgggggauacugucucacacgcuggaugcugauugaagccgagcugaaaugcuucggcaacaccgcuguggccaaguguaaugagaaacaugaugaagaguuuugcgacaugcucagacuguucgauuuuaacaagcaggcuauccagcggcuuaaagccccugcgcagaugucuauucaacugaucaauaaggccgugaacgcucucaucaaugaccagcugauuaugaagaaccaccuucgcgacaucauggggauucccuauugcaauuacagcaaauauuguuaccugaacaauacagccaccggaaagacgucccucccuaaaugcugucugaucagcaacggcucuuaccugaaugaaacacacuucuccgaugacauugagcaggaagcugauaacaugaucaccgagaugcuccaaaaggaguauauggaaagacaggggaaaaccccgcugggacuugucgaccuguucguuuuuagcacaucuuucuaccucaucagcauuuuucugcaucuggugaagauccccacccaccggcauauugugggcaaauccugcccuaagccccaccgccuuaaucauaugggcaucuguucuugcgggcucuauaagcagccuggaguccccgugagauggaaacggugaggacuagucccuguucccagagcccacuuuuuuuucuuuuuuugaaauaaaauagccugucuuucagaucucaaaggcucuuuucagagccaccaaaaaaaaaaaaaaaaaaaaaaaaaaaaaaaaaaaaaaaaaaaaaaaaaaaaaaaaaaaaaaaaagaauu

SEQ ID NO: 24925 - RNA, 1717 nt, Artificial Sequence
  mRNA product Design a-1 (hSL-A64-N5) comprising derived and/or modified sequence from LASV(G3010-SLE-2013;Clade IV)__AIT17344__GPCmut3 (opt5)
aggagagucccgcagucggcguccagcggcucugcuuguucgugugugugucguugcaggccuuauucaagcuuaccaugggccagaucgugaccuucuuucaagaggucccccacguuauugaagaggugaugaacaucgugcugauugcccucagcauccuggcuguccuuaaggggcuguacaauuucgccacaugcggacucgugggccugguuacguuucuucugcucugugggagauccugcaccacaucucuguauaaaggaguguacgaacugcagacccucgagcugaacauggaaacacuuaauaugaccaugccucugagcuguacaaagaacaauucccaucacuauauuauggucggcaacgagaccgggcucgagcugacgcuuaccaauacaucuaucaucaaccauaaauucugcaaucugagcgacgcgcacaagaaaaaccucuacaaucaugcucugauguccauuaucucuaccuuucaccugagcauuccgaacuucaaucaguaugaagccauguccugugauuuuaacggaggcaagaucagcgugcaguacaaucucucucacuccuaugccggcgacgcugccagccauugcgggacaguugcuaacggagugcugcaaaccuucaugcggauggccuggggcgggucuuacauugcgcuugauuccggauacggcaagugggacuguaucaugacgagcuaucaguaccugauuauccagaacacaaccugggaggaucacugccaguuuucucgccccuccccuaucggguaucucggacugcuuagccaaagaacacgggacauuuacaucucccgcagacggcgcggcaccuucaccuggacacugucugauagcgaaggcaaagacacgcccgggggauauugucucaccagauggaugcugauugaggccgagcugaagugcuuuggcaauacagcugucgccaaauguaacgaaaagcaugaugaggaguucugcgacaugcuccggcuguuugauuucaauaaacaggcuauccagcgccuuaagaccccugcccagauguccauucaacugaucaacaaggcggugaaugcccucaucaacgaccagcugauuaugaaaaaucaccuuagagauaucauggggauucccuacugcaacuauagcaaguacuguuaccugaaucacacaaccacgggaaaaacaucucucccuaagugcugucugguguccaacggcagcuaucugaaugaaacccauuucucugacgacaucgaacagcaagcugauaacaugauuaccgagaugcuccagaaagaguacauggaacggcaggggaagacaccgcugggacuugucgaccuguuuguuuucagcaccuccuuuuaucucaucucuaucuuccugcaccuggugaaaauucccacacaucgccacaucgugggcaagagcugcccuaagccccauagacuuaaucacaugggcauuuguuccugcgggcucuacaaacagccuggaguccccgugcgguggaagcgcugaggacuagucccuguucccagagcccacuuuuuuuucuuuuuuugaaauaaaauagccugucuuucagaucucaaaggcucuuuucagagccaccaaaaaaaaaaaaaaaaaaaaaaaaaaaaaaaaaaaaaaaaaaaaaaaaaaaaaaaaaaaaaaaaagaauu

SEQ ID NO: 24926 - RNA, 1717 nt, Artificial Sequence
  mRNA product Design a-1 (hSL-A64-N5) comprising derived and/or modified sequence from LASV(G502-SLE-2009;Clade IV)__AIT17126__GPCmut3 (opt5)
aggagagucccgcagucggcguccagcggcucugcuuguucgugugugugucguugcaggccuuauucaagcuuaccaugggccagaucgugaccuucuuucaagaggucccccacguuauugaagaggugaugaacaucgugcugauugcccucagcauccuggcuguccuuaaggggcuguacaauuucgccacaugcggacucgugggccugcuuacguuucugcuccugugugggagauccugcaccacaggacuguauaaaggcguuuacgaacuccagacccuggagcuuaacauggaaacacugaauaugaccaugccucucucuuguacaaagaacaauagccaucacuauauuaugguggggaacgagaccggacuggagcuuacgcugaccaauacauccaucaucaaccauaaauucugcaaucucucugacgcgcacaagaaaaaccuguacgaucaugcucugaugagcauuaucuccaccuuucaccucucuauuccgaauuucaaccaguaugaagccaugagcugugacuuuaauggcggcaagaucuccguccaguacaaccugagccacucuuaugccggggaugcugccgaccauugcggaacaguggcuaauggcguucuucaaaccuucaugcggauggccuggggaggguccuacauugcgcuggauagcggccgcgggagaugggacuguaucaugacgucuuaccaguaucucauuauccagaacacaaccugggaggaucacugccaguuuucccggcccagcccuaucggauaccugggccuucugucucaacgcacaagagacauuuauaucucccggcgcagacggggcaccuucaccuggacacucagcgauuccgaagggaaggacacgcccggaggcuacugucugacccgcuggaugcugauugaggccgagcucaaaugcuuugggaacacagcuguggccaaguguaaugaaaaacaugaugaggaguucugcgacaugcugagacuuuuugauuucaacaagcaggcuauccagcggcugaaagccccugcgcagaugucuauucaacucaucaauaaggccgucaacgcucugaucaaugaccagcuugugaugaagaaccaucugcgcgacauuaugggaauccccuauugcaauuacagcagauauuguuaccucaaccacaccacaaccggccggacgucccugccuaaaugcugucuggugagcaaugggucuuaccucaacgaaacacacuucuccgaugacauugaacagcaagccgauaauaugaucaccgagaugcugcagaaggaguauauggaacgccagggaaaaaccccgcuuggccuggucgaccucuuuguuuucagcacaucuuuuuaccugauuagcaucuuccugcaccuugugaagauccccacccauagacacauugugggcaaauccugcccuaagccccaucggcucaaccacauggggaucuguucuugcggacuguauaaacagccuggcguccccgugaaguggaagagaugaggacuagucccuguucccagagcccacuuuuuuuucuuuuuuugaaauaaaauagccugucuuucagaucucaaaggcucuuuucagagccaccaaaaaaaaaaaaaaaaaaaaaaaaaaaaaaaaaaaaaaaaaaaaaaaaaaaaaaaaaaaaaaaaagaauu

SEQ ID NO: 24927 - RNA, 1717 nt, Artificial Sequence
  mRNA product Design a-1 (hSL-A64-N5) comprising derived and/or modified sequence from LASV(G733-SLE-2010;Clade IV)__AIT17154__GPCmut3 (opt5)
aggagagucccgcagucggcguccagcggcucugcuuguucgugugugugucguugcaggccuuauucaagcuuaccaugggccagaucgugaccuucuuucaagaggucccccacguuauugaagaggugaugaacaucgugcugauugcccucagcauccuggcuguccuuaaggggcuguacaauuucgccacaugcggaauugugggccucguuuccuuucugcuucugugugggagaucuugcacgaccagccucuauaaaggaguguacgaacugcagacacuggagcucaacauggaaacccugaauaugacaaugccucuuuccuguaccaagaacaauucucaucacuauaucauggucggcaacgagacagggcuggagcucacccugacgaauaccagcaucauuaaccauaaauucugcaaucuuuccgacgcgcacaagaaaaaccuguacgaucaugcucucaugucuaucauuagcacauuucaccuguccaucccgaauuucaaccaguaugaagccaugagcugugacuuuaauggaggcaagauuucugugcaguacaaccugucccacagcuaugccggcgaugcugccaaucauugcgggaccaucgcuaacggaguucuccaaacauucaugcggauggccuggggcgggucuuacauugcgcuggacuccggacgcgauagaugggacuguaucaugaccagcuaccaguaucuuaucauucagaacacgacaugggaggaucacugccaguuuucucggcccuccccuaucggcuaccuggggcuccugagccaacgcaccagagacauuuauaucucccggcgcagacggggaacauucaccuggacccuuucugauagcgaaggcaaggacacacccggcggguacugucugacgcgcuggaugcucauugaggccgagcugaaaugcuuuggaaauaccgcuguggccaaguguaacgaaaaacaugaugaggaguucugcgacaugcugagacucuuugauuucaauaagcaggcuauccagcggcugaaagccccugcgcagauguccauccaacuuauuaacaaggccgucaaugcucugaucaacgaccagcucauuaugaagaaucaucugcgcgacaucaugggcauucccuauugcaacuacagcaaauauuguuaccuuaaucacacaaccacagggaagaccucucugccuaaaugcugucucguguccaacggaagcuaccugaaugaaacgcacuucucugaugacaucgaacagcaagccgauaacaugaucacagagaugcugcagaaggaguauauggaaagacagggcaaaaccccgcucgggcugguggaccuuuuugucuucagcaccuccuuuuaccugauuucuaucuuccuccaccugguuaagauucccacacaucggcacguggugggaaaaagcugcccuaagccccaucgccugaaucacaugggcaucuguuccugcggccuuuaugggcagccuggaguccccgugaaguggaaaagaugaggacuagucccuguucccagagcccacuuuuuuuucuuuuuuugaaauaaaauagccugucuuucagaucucaaaggcucuuuucagagccaccaaaaaaaaaaaaaaaaaaaaaaaaaaaaaaaaaaaaaaaaaaaaaaaaaaaaaaaaaaaaaaaaagaauu

SEQ ID NO: 24928 - RNA, 1717 nt, Artificial Sequence
  mRNA product Design a-1 (hSL-A64-N5) comprising derived and/or modified sequence from MOPV/LASV reassortant(IGS-1;Clade IV)__AFY05576__GPCmut3 (opt5)
aggagagucccgcagucggcguccagcggcucugcuuguucgugugugugucguugcaggccuuauucaagcuuaccaugggccagaucgugaccuucuuucaagaggucccccacguuauugaagaggugaugaacaucgugcugauugcccucagcguccuggcugugcuuaaggggcuguacaauuucgccacaugcggacucguuggccuggugacguuucuucugcucugugggagauccugcaccacaucucuguauaaaggagucuacgaacugcagacccucgagcugaacauggaaacacuuaauaugaccaugccucugagcuguacaaagaacaauucccaucacuauaucauggugggcaacgagaccgggcucgagcugacgcuuaccaauacaucuauuaucaaccauaaauucugcaaucugagcgacgcgcacaagaaaaaccucuacgaucaugcucugauguccaucauuucuaccuuucaccugagcaucccgaauuucaaccaguaugaagccauguccugugacuuuaauggaggcaagauuagcguucaguacaaccucucucacuccuaugccggcgaugcugccaaucauugcgggacaguggcuaacggaguccugcaaaccuucaugcggauggccuggggcgggagcuacaucgcgcuugacucuggacgcggcaacugggauuguauuaugacguccuaccaguaucugaucauucagaauacaaccugggaggaccacugccaguuuagcagacccucuccuaucggguaccucggacugcuuucccaacggacacgcgauaucuauauuagcagacggcgcagaggcaccuucaccuggacacuguccgacucugaaggcgaggauacgcccgggggauacugucucacccgguggaugcugaucgaggccgaacugaagugcuuuggcaacacagcuguggccaaauguaaugagaagcaugacgaagaguucugcgauaugcuccgccuguuugacuucaacaaacaggcuauucagagacuuaaggccccugcgcagaugagcauccaacugauuaauaaagccgugaacgcucucaucaaugaucagcugaucaugaagaaccaccuucgggacauuauggggauccccuauugcaauuacuccaaguauuguuaccugaaccacaccacaaccggacgcacgagccucccuaaaugcugucuggucucuaauggcuccuaccugaacgaaacacauuucagcgacgauauugagcagcaagccgacaauaugaucaccgagaugcuccagaaggaauauauggagagacaggggaaaaccccgcugggacuuguugaucuguuuguguucucuaccagcuuuuaccucauuuccaucuuccugcaccuggugaagauccccacacaucggcacauugucggcaaaucuugcccuaagccccaucgccuuaaccacaugggcaucuguagcugcgggcucuauaaacagccuggagugcccguuaaguggaagagaugaggacuagucccuguucccagagcccacuuuuuuuucuuuuuuugaaauaaaauagccugucuuucagaucucaaaggcucuuuucagagccaccaaaaaaaaaaaaaaaaaaaaaaaaaaaaaaaaaaaaaaaaaaaaaaaaaaaaaaaaaaaaaaaaagaauu

SEQ ID NO: 24929 - RNA, 1717 nt, Artificial Sequence
  mRNA product Design a-1 (hSL-A64-N5) comprising derived and/or modified sequence from LASV(LM765-SLE-2012;Clade IV)__AIT17814__GPCmut3 (opt5)
aggagagucccgcagucggcguccagcggcucugcuuguucgugugugugucguugcaggccuuauucaagcuuaccaugggccagaucgugaccuucuuucaagaggucccccacguuauugaagaggugaugaacaucgugcugauugcccucagcauccuggcuguccuuaaggggcuguacaauuucgccacaugcggacucgugggccugguuacguuucuucugcucugugggagauccugcaccacaucucuguauaaaggaguguacgaacugcagacccucgagcugaacauggaaacacuuaauaugaccaugccucugagcuguacaaagaacaauucccaucacuauauuauggucggcaacgagaccgggcucgagcugacgcuuaccaauacaucuaucaucgaccauaaauucugcaaccugagcgaugcgcaccggaagaaucucuacgaccaugcucugauguccauuaucucuaccuuucaccugagcauuccgaacuucaaucaguaugaagccauguccugugauuuuaacggaggcaaaaucagcgugcaguacaaucucucucacuccuaugccaaggacgcugccgaucauugcggcacaguugcuaacggggugcugcaaaccuucaugcgcauggccuggggaggcagcuacauugcgcuugacucugggagaggacggugggauuguaucaugacguccuaccaguaucugauuauccagaauacaaccugggaggaccacugccaguuuagccgccccucuccuaucggcuaccucgggcugcuuucccaaagaacacgggauauuuauaucagccgcagacggcgcggaaccuucaccuggacacuguccgacucugaaggcaaggauacgcccggcggguacugucucaccagauggaugcugauugaggccgagcugaaaugcuuuggaaacacagcugucgccaaguguaacgaaaaacaugacgaggaguucugcgauaugcuccggcuguuugacuucaauaagcaggcuauccagcgccuuaaagccccugcgcagaugagcauucaacugaucaacaaggccgugaaugcucucaucaacgaccagcugauuaugaagaaucaccuuagagauaucaugggcauucccuauugcaacuacuccaaauauuguuaccugaaucacaccacaaccgggaagacgagccucccuaaaugcugucuggugucuaacggauccuaccugaaugaaacacauuucagcgacgauaucgaacagcaagccgacaacaugauuaccgagaugcuccagaaggaguauauggaacggcagggcaaaaccccgcuggggcuugucgaucuguuuguuuucucuaccagcuuuuaccucaucuccaucuuccugcaccuggugaagauucccacacaucgccacaucgugggaaaaccuugccccaagccucauagacuuaaucacaugggcauuuguucuugcggccucuauaagcagcccggggucccggugaaauggaagcggugaggacuagucccuguucccagagcccacuuuuuuuucuuuuuuugaaauaaaauagccugucuuucagaucucaaaggcucuuuucagagccaccaaaaaaaaaaaaaaaaaaaaaaaaaaaaaaaaaaaaaaaaaaaaaaaaaaaaaaaaaaaaaaaaagaauu

SEQ ID NO: 24930 - RNA, 1717 nt, Artificial Sequence
  mRNA product Design a-1 (hSL-A64-N5) comprising derived and/or modified sequence from LASV(LM776-SLE-2012;Clade IV)__AIT17824__GPCmut3 (opt5)
aggagagucccgcagucggcguccagcggcucugcuuguucgugugugugucguugcaggccuuauucaagcuuaccaugggccagaucgugaccuucuuucaagaggucccccacguuauugaagaggugaugaacaucgugcugauugcccucagcauccuggcuguccuuaaggggcuguacaauuucgccacaugcggacucgugggccugguuacguuucuucugcucugugggagauccugcaccacaucuguguauaaaggagucuacgaacugcagacccuggagcucaacauggaaacacugaauaugaccaugccucuuagcuguacaaagaacaauucccaucacuauauuauggugggcaacgagaccgggcuggagcucacgcugaccaauacaucuaucaucaaccauaaauucugcaaucuuagcgacgcgcacaagaaaaaccuguacgaucaugcucucauguccauuaucucuaccuuucaccugagcauuccgaauuucaaccaguaugaagccauguccugugacuuuaauggaggcaagaucagcguucaguacaaccugucucacuccuaugccggcgaugcugccaaucauugcgggacaguggcuaacggaguccuccaaaccuucaugcggauggccuggggcgggagcuacauugcgcuggacucuggacacggcaagugggauuguaucaugacguccuaccaguaucuuauuauccagaacacaaccugggaggaccauugccaguuuagccgccccucuccuaucggguaccugggacuccugucccaaagaacacgggauauuuauaucagccgcagacggcgcggcaccuucaccuggacacuuuccgacucugaaggcaaagauacgcccgggggauacugucugaccagauggaugcucauugaggccgagcugaagugcuuuggcaauacagcuguggccaaauguaacgaaaagcacgacgaggaguucugcgauaugcugcggcucuuugacuucaauaaacaggcuauccagcgccugaaggccccugcgcagaugagcauucaacuuaucaacaaggccgugaaugcucugaucaacgaucagcucauuaugaaaaaucaccugagagacaucauggggauucccuauugcaacuacuccaaguauuguuaccuuaaucauaccacaaccggaaaaacgagccugccuaagugcugucucgucucuaacggcuccuaccugaaugaaacacacuucagcgacgauaucgaacagcaagccgacaacaugauuaccgagaugcugcagaaagaguauauggaacggcaggggaagaccccgcucggacugguugaucuuuuuguguucucuaccagcuuuuaccugaucuccaucuuccuccaucuggugaaaauucccacacaccgccauaucgucggcaagucuugcccuaagccccacagacugaaucacaugggcauuuguagcugcgggcuuuauaaacagccuggagugcccguucgguggaagcgcugaggacuagucccuguucccagagcccacuuuuuuuucuuuuuuugaaauaaaauagccugucuuucagaucucaaaggcucuuuucagagccaccaaaaaaaaaaaaaaaaaaaaaaaaaaaaaaaaaaaaaaaaaaaaaaaaaaaaaaaaaaaaaaaaagaauu

SEQ ID NO: 24931 - RNA, 1717 nt, Artificial Sequence
  mRNA product Design a-1 (hSL-A64-N5) comprising derived and/or modified sequence from LASV(Mad39;Clade IV)__ANH09722__GPCmut3 (opt5)
aggagagucccgcagucggcguccagcggcucugcuuguucgugugugugucguugcaggccuuauucaagcuuaccaugggccagaucgugaccuucuuucaagaggucccccacguuauugaagaggugaugaacaucgugcugauugcccucagcauccuggcuguccuuaaggggcuguacaauguggccacaugcggacucauuggccugguuacguuccuucugcucugugggagauccugcaccacaacccuguauaaaggaguguacgaacugcaggcgcucgagcugaacauggaaacacuuaauaugaccaugccucugucuuguacaaagaacaauagccaucacuauauccgggucggcaacgagaccgggcucgagcugacgcuuaccaauacaucccugaucaaccauaaauuuugcaaucucucugacgcucacaagaaaaaccuguacgaucaugcccugaugagcauuaucuccaccuuccaccucucuauuccgaauuuuaaccaguaugaagccaugagcugugacuucaaugauggaaagaucuccgugcaguacaaccugagccacacauaugcuggcgacaccgccaaucauugcggcacgguugcuaacggggugcuucaaacauuuaugcgcauggccuggggaggcucuuacauugcgcuggauuccgggagaggaggcugggacuguaucaugaccagcuaccaguaucucauuauccagaacacaaccugggaggaucacugccaguucucucggcccuccccuaucggguaccugggacuucugagccaacgcaccagagacauuuauaucucucggcgcagacggggcacauuuacguggacccucuccgauagcgaaggcaaggacacacccgggggauacugucugacccgcuggaugcugauugaggccgagcucaaaugcuucggcaauacagcugucgccaaguguaacgaaaaacaugaugaggaauuuugcgacaugcugagacuuuucgauuuuaauaagcaggcuauccagcggcugaaagccccugcgcagauguccauucaacucaucaacaaggccgugaaugcucugaucaacgaccagcuuauuaugaagaaucaucugcgcgacaucauggggauucccuauugcaacuacucuaaauauuguuaccucaaucacaccgugacgggaaagacaagccugccuaaaugcugucuggucuccaacggcagcuaccucaaugagacccacuucucugaugacaucgaacagcaagccgauaacaugauuaccgagaugcugcagaaggaguauauggaaagacaggggaaaacaccgcuuggacugguugaccucuucguguuuuccaccagcuucuaccugaucucuaucuuucugcaccuugugaagauucccacacaucggcacgucgugggcaaaccuugccccaagccucaucgccucaaucacaugggcaucuguagcugcggguucuauaagcagcccggaguuccggugagauggaaacggugaggacuagucccuguucccagagcccacuuuuuuuucuuuuuuugaaauaaaauagccugucuuucagaucucaaaggcucuuuucagagccaccaaaaaaaaaaaaaaaaaaaaaaaaaaaaaaaaaaaaaaaaaaaaaaaaaaaaaaaaaaaaaaaaagaauu

SEQ ID NO: 24932 - RNA, 1717 nt, Artificial Sequence
  mRNA product Design a-1 (hSL-A64-N5) comprising derived and/or modified sequence from LASV(Z0947-SLE-2011;Clade IV)__AIT17840__GPCmut3 (opt5)
aggagagucccgcagucggcguccagcggcucugcuuguucgugugugugucguugcaggccuuauucaagcuuaccaugggccagaucgugaccuucuuucaagaggucccccacguuauugaagaggugaugaacaucgugcugauugcccucagcauccuggcuguccuuaaggggcuguacaauuucgccacaugcggacucgugggccugguuacguuucuucugcucugugggagauccugcaccauuucucuguauaaaggaguguacgaacugcagacacucgagcugaacauggaaacccuuaauaugacaaugccucugagcuguaccaagaacaauucccaucacuauaucauggucggcaacgagacagggcucgagcugacccuuacgaauaccucuaucauuaaccauaaauucugcaaucugagcgacgcgcacaagaaaaaccucuacgaucaugcucugauguccaucauuucuacauuucaccugagcaucccgaauuucaaccaguaugaagccauguccugugacuuuaauggaggcaagauuagcgugcaguacaaccucucucacuccuaugccggcgaugcugccaaucauugcgggaccguugcuaacggagugcugcaaacauucaugcggauggccuggggcgggagcuacaucgcgcuugacucuggacgcgauagaugggacuguauuaugaccuccuaccaguaucugaucauccagaacacgacaugggaggaucacugccaguuuagccggcccucuccuauuggcuaccucgggcugcuuucccaacgcaccagagacaucuauauuagccggcgcagacggggaacauucaccuggacccuguccgauucugaaggcaaggacacacccggcggguacugucucacgcgcuggaugcugaucgaggccgagcugaaaugcuuuggaaauaccgcugucgccaaguguaacgaaaaacaugaugaggaguucugcgacaugcucagacuguuugauuucaauaagcaggcuauucagcggcuuaaagccccugcgcagaugagcauccaacugaucaacaaggccgugaaugcucucauuaacgaccagcugaucaugaagaaucaccuucgcgacauuaugggcauccccuauugcaacuacuccaaauauuguuaccugaaucacacaaccacagggaagaccagccucccuaaaugcugucuggugucuaacggauccuaccugaaugaaacgcauuucagcgaugacauugaacagcaagccgauaacaugaucacagagaugcuccagaaggaguauauggaaagacagggcaaaaccccgcuggggcuugucgaccuguuuguuuucucuaccagcuuuuaccucaucuccauuuuccugcaccuggugaagauccccacacaucggcacauugugggaaaaccuugccccaagccucaucgccuuaaucacaugggcaucuguucuugcggccucuauaagcagcccggggucccggugaaauggaagagaugaggacuagucccuguucccagagcccacuuuuuuuucuuuuuuugaaauaaaauagccugucuuucagaucucaaaggcucuuuucagagccaccaaaaaaaaaaaaaaaaaaaaaaaaaaaaaaaaaaaaaaaaaaaaaaaaaaaaaaaaaaaaaaaaagaauu

SEQ ID NO: 24933 - RNA, 1748 nt, Artificial Sequence
  mRNA product Design a-1 (hSL-A100) comprising derived and/or modified sequence from LASV(Josiah;Clade IV)__NP_694870__GPCmut3 (opt1)
aggagagucccgcagucggcguccagcggcucugcuuguucgugugugugucguugcaggccuuauucaagcuuaccaugggccagaucgugaccuucuuccaggaggucccccacgugaucgaggaggugaugaacaucguccugaucgcccucagcgugcuggccgugcugaaggggcucuacaacuucgcgaccugcggccuggucgggcuggugacguuccuccugcugugcggccgcuccugcaccaccagccucuacaaggggguguacgagcugcagacccuggagcucaacauggagacgcugaacaugaccaugccgcuguccugcaccaagaacaacagccaccacuacaucauggucggcaacgagaccggccucgagcugacgcugaccaacaccuccaucaucaaccacaaguucugcaaccucagcgacgcccacaagaagaaccuguacgaccacgcccugauguccaucaucagcaccuuccaccucuccauccccaacuucaaccaguacgaggccaugagcugcgacuucaacgggggcaagaucuccgugcaguacaaccugagccacuccuacgccggggacgcggccaaccacugcggcacgguggccaacgggguccugcagaccuucaugcggauggccuggggcggcagcuacaucgcgcucgacuccgggcgcggcaacugggacugcaucaugaccagcuaccaguaccugaucauccagaacaccacgugggaggaccacugccaguucucccggcccagccccaucggguaccugggccuccugucccagcgcacccgggacaucuacaucagccgccggcgccggggcaccuucaccuggacgcugagcgacuccgaggggaaggacaccccgggcggguacugccugacccgcuggaugcucaucgaggccgagcugaagugcuucggcaacaccgccguggccaagugcaacgagaagcacgacgaggaguucugcgacaugcugcggcuguucgacuucaacaagcaggccauccagcgccugaaggcgcccgcccagaugagcauccagcugaucaacaaggccgugaacgcccucaucaacgaccagcugaucaugaagaaccaccuccgggacaucauggggauccccuacugcaacuacuccaaguacugcuaccucaaccacacgaccaccggccgcaccagccugcccaagugcugccuggucuccaacggcagcuaccucaacgagacgcacuucuccgacgacaucgagcagcaggccgacaacaugaucaccgagaugcugcagaaggaguacauggagcggcaggggaagacgccccugggccucguggaccuguucguguucagcaccuccuucuaccugaucagcaucuuccugcaccucgucaagaucccgacccaccgccacaucguggggaaguccugccccaagccccaccggcugaaccacaugggcaucugcagcugcgggcuguacaagcagcccggcgugccggucaaguggaagcgcugaggacuagucccuguucccagagcccacuuuuuuuucuuuuuuugaaauaaaauagccugucuuucagaucucaaaggcucuuuucagagccaccaaaaaaaaaaaaaaaaaaaaaaaaaaaaaaaaaaaaaaaaaaaaaaaaaaaaaaaaaaaaaaaaaaaaaaaaaaaaaaaaaaaaaaaaaaaaaaaaaaaaa

SEQ ID NO: 24934 - RNA, 1745 nt, Artificial Sequence
  mRNA product Design a-1 (hSL-A100) comprising derived and/or modified sequence from LASV(LP;Clade I)__AAF86701__GPCmut3 (opt1)
aggagagucccgcagucggcguccagcggcucugcuuguucgugugugugucguugcaggccuuauucaagcuuaccaugggccagaucaucaccuucuuccaggaggugccccacgucaucgaggaggugaugaacaucgugcugaucgcccucagccugcuggccauccucaaggggcuguacaacaucgcgaccugcggcaucaucgggcuggucgccuuccucuuccugugcggcaaguccugcagccugacgcucaagggcggguacgagcugcagacccuggagcucaacauggagacccugaacaugaccaugccgcuguccugcacgaagaacagcucccaccacuacauccgcgugggcaacgagaccgggcucgagcugacccugaccaacacgagcaucaucaaccacaaguucugcaaccucuccgacgcccacaagaagaaccuguacgaccacgcccugaugagcaucaucuccaccuuccaccucagcauccccaacuucaaccaguacgaggccauguccugcgacuucaacggcgggaagaucagcgugcaguacaaccugucccacagcuacgcgggcgacgccgccgagcacugcgggaccgucgccaacggcgugcugcagaccuucaugcggauggcguggggcgggcgcuacaucgcccucgacuccggcaaggggaacugggacugcaucaugacgagcuaccaguaccugaucauccagaacaccaccugggaggaccacugccaguucucccggcccagccccaucggcuaccugggccuccugucccagcgcacccgggacaucuacaucagccgccggcgccgggggacguucaccuggacccugagcgacuccgagggcaacgagacccccgggggcuacugccugacgcgcuggaugcucaucgaggccgagcugaagugcuucgggaacaccgccguggccaagugcaacgagaagcacgacgaggaguucugcgacaugcugcggcuguucgacuucaacaagcaggcgauccgccggcugaaggcccccgcccagaugagcauccagcugaucaacaaggccgucaacgcccucaucaacgaccagcugaucaugaagaaccaccuccgcgacaucaugggcauccccuacugcaacuacuccaaguacugcuaccucaaccacaccagcuccggccggaccagccugcccaagugcugccugaucuccaacgggagcuaccucaacgagacgcaguucuccgacgacaucgagcagcaggcggacaacaugaucaccgagaugcugcagaaggaguacaucgagcgccagggcaagaccccgcuggggcucguggacaucuucaucuucagcaccuccuucuaccugaucagcaucuuccugcaccugaucaagaucccgacgcaccggcacaucgugggcaagcccugccccaagccccaccgccucaaccacaugggggucugcuccugcggccuguacaagcacccgggcgugcccaccaaguggaagcggugaggacuagucccuguucccagagcccacuuuuuuuucuuuuuuugaaauaaaauagccugucuuucagaucucaaaggcucuuuucagagccaccaaaaaaaaaaaaaaaaaaaaaaaaaaaaaaaaaaaaaaaaaaaaaaaaaaaaaaaaaaaaaaaaaaaaaaaaaaaaaaaaaaaaaaaaaaaaaaaaaaaaa

SEQ ID NO: 24935 - RNA, 1745 nt, Artificial Sequence
  mRNA product Design a-1 (hSL-A100) comprising derived and/or modified sequence from LASV(803213;Clade II)__AAF86703__GPCmut3 (opt1)
aggagagucccgcagucggcguccagcggcucugcuuguucgugugugugucguugcaggccuuauucaagcuuaccaugggccagaucaucaccuucuuccaggaggugccccacgucaucgaggaggugaugaacaucgugcugaucgcccucagccugcuggccauccucaaggggaucuacaacgucgcgaccugcggccuguucgggcugaucuccuuccuccugcugugcggccgcagcugcuccgugacguacaaggggguguacgagcuccagacccuggagcugaacauggccaaccucaacaugaccaugccgcugagcugcaccaagaacaacucccaccacuacaucauggucggcaacgagacgggccuggagcucacccugaccaacaccagcaucaucaaccacaaguucugcaaccuguccgacgcccacaagaagaaccucuacgaccacgcccugaugagcaucaucuccacguuccaccugagcauccccaacuucaaccaguacgaggccauguccugcgacuucaacgggggcaagaucagcgugcaguacaaccucucccacagcuucgcgguggacgccgccaaccacugcgggaccaucgccaacggcguccugcagaccuucaugcggauggcguggggcggguccuacaucgcccuggacagcggcaaggggaacugggacugcaucaugaccuccuaccaguaccucaucauccagaacacgaccugggaggaccacugccaguucagccgccccucccccaucggcuaccuggggcugcucagccagcggacccgcgacaucuacaucagccggcgccgccggggcaccuucacguggacccucuccgacagcgagggcaacgaggcccccgggggcuacugccugacccgguggaugcugaucgaggccgagcucaagugcuucgggaacaccgccguggcgaagugcaacgagaagcacgacgaggaguucugcgacaugcugcgccuguucgacuucaacaagcaggccaucaagcggcucaagacgcccgcccagauguccauccagcugaucaacaaggccgugaacgcccugaucaacgaccagcucaucaugaagaaccaccuccgcgacaucaugggcauccccuacugcaacuacagccgguacugcuaccugaaccacaccgucaccgggaagaccucccugccccgcugcugccuggugagcaacggcuccuaccugaacgagacgcacuucagcgacgacaucgagcagcaggcggacaacaugaucaccgagaugcuccagaaggaguacauggaccggcagggcaagaccccgcuggggcugguggaccucuucgucuucuccaccagcuucuaccugaucuccaucuuccugcaccuggugaagaucccgacgcaccgccacaucgugggcaagcccugccccaagccccaccggcucaaccacauggggaucugcagcugcggccuguacaagcacccggggguccccgugaaguggaagcgcugaggacuagucccuguucccagagcccacuuuuuuuucuuuuuuugaaauaaaauagccugucuuucagaucucaaaggcucuuuucagagccaccaaaaaaaaaaaaaaaaaaaaaaaaaaaaaaaaaaaaaaaaaaaaaaaaaaaaaaaaaaaaaaaaaaaaaaaaaaaaaaaaaaaaaaaaaaaaaaaaaaaaa

SEQ ID NO: 24936 - RNA, 1745 nt, Artificial Sequence
  mRNA product Design a-1 (hSL-A100) comprising derived and/or modified sequence from LASV(GA391;Clade III)__CAA36645__GPCmut3 (opt1)
aggagagucccgcagucggcguccagcggcucugcuuguucgugugugugucguugcaggccuuauucaagcuuaccaugggccagaucgugaccuucuuccaggaggucccccacgugaucgaggaggugaugaacaucguccugaucgcccucagcauccuggccauccugaaggggcucuacaacguggcgaccugcggccugaucgggcuggugacguuccuccugcuguccggccgcagcugcucccucaucuacaaggggaccuacgagcugcagacccuggagcucaacauggagacccugaacaugacgaugccgcugagcugcaccaagaacaacucccaccacuacauccgggucggcaacgagaccggccucgagcugacccugacgaacaccagcauccucaaccacaaguucugcaaccuguccgacgcccacaagcgcaaccuguacgaccacagccucauguccaucaucagcaccuuccaccuguccauccccaacuucaaccaguacgaggccaugagcugcgacuucaacgggggcaagaucaccgugcaguacaaccugucccacagcuucgccguggacgccgcggggcacugcggcacgcucgccaacgggguccugcagaccuucaugcggauggccuggggcggcuccuacaucgcccuggacagcgggcgcggcaacugggacugcaucaugaccuccuaccaguaccucaucauccagaacaccacgugggacgaccacugccaguucagccggcccucccccaucggguaccugggccugcucagccagcgcacccgggacaucuacaucagccgccggcgccggggcaccuucaccuggacgcucuccgacagcgaggggaacgagaccccgggcggguacugccugacccgcuggaugcugaucgaggcggagcucaagugcuucggcaacaccgccguggccaagugcaacgagaagcacgacgaggaguucugcgacaugcugcggcuguucgacuucaacaagcaggccauccgccggcucaagacgcccgcccagauguccauccagcugaucaacaaggcggugaacgcccugaucaacgaccagcucaucaugaagaaccaccuccgcgacaucauggggauccccuacugcaacuacagccgguacugcuaccugaaccacaccuccaccggcaagaccagccugccccgcugcugccugaucuccaacggcagcuaccugaacgagacgaaguucuccgacgacaucgagcagcaggccgacaacaugaucaccgagaugcuccagaaggaguacaucgaccggcaggggaagacgccccugggccuggucgaccuguucguguucagcaccuccuucuaccucaucagcaucuuccugcaccuggugaagaucccgacccaccgccacaucgucgggaagcccugccccaagccccaccggcucaaccacaugggcaucugcuccugcgggcuguacaagcagccgggcgugcccgugcgcuggaagcggugaggacuagucccuguucccagagcccacuuuuuuuucuuuuuuugaaauaaaauagccugucuuucagaucucaaaggcucuuuucagagccaccaaaaaaaaaaaaaaaaaaaaaaaaaaaaaaaaaaaaaaaaaaaaaaaaaaaaaaaaaaaaaaaaaaaaaaaaaaaaaaaaaaaaaaaaaaaaaaaaaaaaa

SEQ ID NO: 24937 - RNA, 1748 nt, Artificial Sequence
  mRNA product Design a-1 (hSL-A100) comprising derived and/or modified sequence from LASV(AV;Clade V)__CCA30314__GPCmut3 (opt1)
aggagagucccgcagucggcguccagcggcucugcuuguucgugugugugucguugcaggccuuauucaagcuuaccaugggccagaucgugaccuucuuccaggaggucccccacgugaucgaggaggugaugaacaucguccugaucgcccucagcauccuggccgugcugaaggggcucuacaacaucgcgaccugcggccugaucgggcugaucacguuccuccugcugugcggccgcuccugcagcuccaaccucuacaaggggguguacgagcugcagagccuggaccucaacauggagacccugaacaugaccaugccgcuguccugcaccaagaacaacagccaccacuacauccgggucggcaacgacacgggccucgagcugacccugaccaacaccuccauccucaaccacaaguucugcaaccugagcgacgcccacaagaaggaccuguacgaccacgcccucauguccaucaucagcacguuccaccuguccauccccaacuucaaccaguacgaggccaugagcugcgacuucaacgggggcaagaucuccgugcaguacaaccugagccacuccuacgccaucgacgcggccaaccacugcgggaccguggccaacggcauccuccagaccuucaugcgcauggccuggggcgggagcuacaucgcgcuggacuccggccgggggaacugggacugcaucaugaccagcuaccaguaccugaucauccagaacacgaccugggagaaccacugccaguucucccgccccagccccaucggcuaccucgggcugcugagccagcggacccgcgacaucuacaucucccggcgccgccggggcaccuucacguggacccugagcgacuccgagggcaacgccacccccgggggcuacugccucacccgguggaugcugaucgaggccgagcugaagugcuucgggaacacggccgucgccaagugcaacgagaagcacgacgaggaguucugcgacaugcuccgccuguucgacuucaacaagcaggcgaucagccggcugaagucccccgcccagaugagcauccagcucaucaacaaggccgugaacgcccugaucaacgaccagcugaucaugaagaaccaccuccgcgacaucaugggcauccccuacugcaacuacuccaaguacugcuaccugaaccacaccaucaccgggaagaccagccugcccaagugcugccucguguccaacggcagcuaccugaacgagacgcacuucuccgacgacaucgagcagcaggccgacaacaugaucaccgagaugcugcagaaggaguacauggagcggcagggcaagaccccgcucgggcuggucgaccuguucguguucagcaccuccuucuaccugaucagcaucuuccuccgccuggugaagaucccgacgcaccggcacaucgucggcaagcccugccccaagccccaccgccugaaccacauggggaucugcuccugcggccucuacaagcagccgggggugcccgugcgguggaagcgcugaggacuagucccuguucccagagcccacuuuuuuuucuuuuuuugaaauaaaauagccugucuuucagaucucaaaggcucuuuucagagccaccaaaaaaaaaaaaaaaaaaaaaaaaaaaaaaaaaaaaaaaaaaaaaaaaaaaaaaaaaaaaaaaaaaaaaaaaaaaaaaaaaaaaaaaaaaaaaaaaaaaaa

SEQ ID NO: 24938 - RNA, 1745 nt, Artificial Sequence
  mRNA product Design a-1 (hSL-A100) comprising derived and/or modified sequence from LASV(Togo/2016/7082;Clade VI)__AMR44577__GPCmut3 (opt1)
aggagagucccgcagucggcguccagcggcucugcuuguucgugugugugucguugcaggccuuauucaagcuuaccaugggccagaucaucaccuucuuccaggaggugccccacgucaucgaggaggugaugaacaucgugcugaucgcccucagccugcuggccauccucaagggggucuacaacguggcgaccugcggcaucaucgggcuggugacguuccuguuccucugcggccgcuccugcagccugaucuacaagggguccuacgagcugcagacccucgagcugaacauggagacccugaacaugaccaugccgcucagcugcacgaagaacuccagccaccacuacauccgggucggcaacgagaccggccuggagcugacccucaccaacacguccaucaucaaccacaaguucugcaaccugagcgacgcccacaagcgcaaccuguacgaccacgcccucauguccauccugagcaccuuccaccuguccauccccaacuucaaccaguacgaggccaugagcugcgacuucaacgggggcaagaucuccgugcaguacaaccucagccacgccuacgcgguggacgccgccgagcacugcgggaccgucgccaacggcgugcugcagaccuucaugcggauggcguggggcggguccuacaucgcccuggacagcggccgcgggaacugggacugcaucaugacguccuaccaguaccucaucauccagaacaccaccugggaggaccacugccaguucagccggcccucccccaucggcuaccuggggcugcucagccagcgcacccgggacaucuacaucagccgccggcgccggggcacguucaccuggacccucuccgacagcgagggcaacgagacccccgggggcuacugccugacgcgcuggaugcugaucgaggccgagcucaagugcuucgggaacaccgccguggccaagugcaacgagaagcacgacgaggaguucugcgacaugcugcggcuguucgacuucaacaagcaggcgauccagcgccucaagucccccgcccagaugagcauccagcugaucaacaaggccgucaacgcccugaucaacgaccagcucaucaugaagaaccaccuccgggacaugaugggcauccccuacugcaacuacuccaaguacugcuaccugaaccacaccagcuccgggcgcaccagccugcccaagugcugccugguguccaacggcagcuaccugaacgagacgcacuucuccgacgacaucgagcagcaggccgacaacaugaucaccgagaugcuccagaaggaguacaucgaccggcagggcaagaccccgcuggggcugguggaccucuucgucuucagcaccuccuucuaccugaucagcaucuuccugcaccugaucaagaucccgacgcaccgccacaucgugggcaagcccugccccaagccccaccggcucaaccacauggggaucugcuccugcggccuguacaagcagccgggggugcccacccgcuggaagcggugaggacuagucccuguucccagagcccacuuuuuuuucuuuuuuugaaauaaaauagccugucuuucagaucucaaaggcucuuuucagagccaccaaaaaaaaaaaaaaaaaaaaaaaaaaaaaaaaaaaaaaaaaaaaaaaaaaaaaaaaaaaaaaaaaaaaaaaaaaaaaaaaaaaaaaaaaaaaaaaaaaaaa

SEQ ID NO: 24939 - RNA, 1745 nt, Artificial Sequence
  mRNA product Design a-1 (hSL-A100) comprising derived and/or modified sequence from LASV(KAK-428;Clade n.d. (VII))__ANH09740__GPCmut3 (opt1)
aggagagucccgcagucggcguccagcggcucugcuuguucgugugugugucguugcaggccuuauucaagcuuaccaugggccagaucgugaccuucuuccaggaggucccccacgugaucgaggaggugaugaacaucguccugaucgcccucagccugcuggccauccucaaggggcuguacaacuucgcgaccugcggcgugaucgggcugaucacguuccuccugcugugcggccgcuccugcagcgccaccuacaaggggcaguacgagcuccagacccuggagcugaacauggagucccucaacaugaccaugccgcugagcugcacgaagaacaacucccaccacuacauccgggccggcaacaacaccggccuggagcucacccugaccaacacgagcaucaucucccacaaguucugcaaccugagcgacgcccacaagaagaaccucuacgaccacacccugauguccaucaucaccaccuuccaccugagcauccccaacuucaaccaguacgaggccauguccugcgacuucaacgggggcaagaucagcauccaguacaaccucucccacagcuacgcgggggacgccgcccagcacugcggcacgguggccaacgggguccugcagaccuucaugcgcauggcguggggcggcuccuaccuggcccucgacagcgggcggcgcggcugggacugcaucaucuccagcuaccaguaccugaucauccagaacaccaccugggacgaccacugccaguucucccggcccagccccaucggguaccugggcuucgugagccagaagacgcgcgacaucuacaucucccggcgccgccggggcaccuucaccuggacccugagcgacuccgaggggcacgacaugccgggcggguacugccucacgcgguggaugcugaucgaggccgaccugaagugcuucggcaacaccgccguggccaagugcaacgagaagcacgacgaggaguucugcgacauguggcgccucuucgacuucaacaagcaggcgauccagcggcugaaggcccccgcccagaugaacauccagcugaucaacaaggccgucaacgcccucaucaacgaccagcugaugaugaagaaccaccuccgcgacaucauggggauccccuacugcaacuacagcaaguucugcuaccugaacaacaccaccacgggccggaccucccugccccgcugcugccugaucagcaacggcuccuaccucaacgagacccacuucagcgacgacaucgagcagcaggcggacaacaugaucaccgagaugcugcagaaggaguacauggaccggcaggggaagacgccccugggccucguggaccuguucguguucuccaccagcuucuaccugaucaccaucuuccuccaccuggucaagaucccgacccaccgccacaucguggggaagcccugccccaagccccaccggcugaaccacaugggcaucugcuccugcgggcuguacaagcagccgggcgugcccguccgcuggaagcggugaggacuagucccuguucccagagcccacuuuuuuuucuuuuuuugaaauaaaauagccugucuuucagaucucaaaggcucuuuucagagccaccaaaaaaaaaaaaaaaaaaaaaaaaaaaaaaaaaaaaaaaaaaaaaaaaaaaaaaaaaaaaaaaaaaaaaaaaaaaaaaaaaaaaaaaaaaaaaaaaaaaaa

SEQ ID NO: 24940 - RNA, 1745 nt, Artificial Sequence; identical to SEQ ID NO: 24934
  mRNA product Design a-1 (hSL-A100) comprising derived and/or modified sequence from LASV(Pinneo-NIG-1969;Clade I)__AIT17836__GPCmut3 (opt1)

SEQ ID NO: 24941 - RNA, 1745 nt, Artificial Sequence
  mRNA product Design a-1 (hSL-A100) comprising derived and/or modified sequence from LASV(ISTH0009-NIG-2011;Clade II)__AIT17404__GPCmut3 (opt1)
aggagagucccgcagucggcguccagcggcucugcuuguucgugugugugucguugcaggccuuauucaagcuuaccaugggccagaucaucaccuucuuccaggaggugccccacgucaucgaggaggugaugaacaucgugcugaucgcccucagccugcuggccauccucaaggggaucuacaacgucgcgaccugcggccuguucgggcugguguccuuccuccugcugugcggccgcagcugcuccacgaccuacaaggggguguacgagcuccagacccuggagcuggacauggccagccucaacaugaccaugccgcuguccugcacgaagaacaacagccaccacuacaucauggucggcaacgagaccggccuggagcucacccugaccaacacguccaucaucaaccacaaguucugcaaccugagcgacgcccacaagaagaaccucuacgaccacgcccugauguccaucaucagcaccuuccaccuguccauccccaacuucaaccaguacgaggccaugagcugcgacuucaacgggggcaagaucuccgugcaguacaaccucagccacgcguacgccguggacgccgccaaccacugcgggaccaucgcgaacggcguccugcagaccuucaugcggauggccuggggcggguccuacaucgcccuggacagcggcaagggguccugggacugcaucaugacgagcuaccaguaccucaucauccagaacaccaccugggaggaccacugccaguucucccgccccagccccaucggcuaccuggggcugcucagccagcggacccgcgacaucuacaucucccggcgccgccggggcacguucaccuggacccucagcgacuccgagggcaacgagacccccgggggcuacugccugacgcgguggaugcugaucgaggccgagcucaagugcuucgggaacaccgccguggcgaagugcaacgagaagcacgacgaggaguucugcgacaugcugcgccuguucgacuucaacaagcaggccauccggcgccucaagacccccgcccagaugagcauccagcugaucaacaaggccgugaacgcccugaucaacgaccagcucaucaugaagaaccaccuccgggacaucaugggcaucccguacugcaacuacuccaaguacugcuaccugaaccacaccgucacggggaagaccagccugccccgcugcugccugguguccaacggcagcuaccugaacgagacccacuucuccgacgacaucgagcagcaggcggacaacaugaucaccgagcuccugcagaaggaguacauggaccggcagggcaagacgccccuggggcucguggaccuguucgucuucagcaccuccuucuaccugaucagcaucuuccugcaccucaucaagaucccgacccaccgccacaucaccggcaagcccugccccaagccccaccggcugaaccacauggggaucugcuccugcggccuguacaagcacccgggggugcccgugaaguggaagcgcugaggacuagucccuguucccagagcccacuuuuuuuucuuuuuuugaaauaaaauagccugucuuucagaucucaaaggcucuuuucagagccaccaaaaaaaaaaaaaaaaaaaaaaaaaaaaaaaaaaaaaaaaaaaaaaaaaaaaaaaaaaaaaaaaaaaaaaaaaaaaaaaaaaaaaaaaaaaaaaaaaaaaa

SEQ ID NO: 24942 - RNA, 1745 nt, Artificial Sequence
  mRNA product Design a-1 (hSL-A100) comprising derived and/or modified sequence from LASV(ISTH2010-NIG-2012;Clade II)__AIT17482__GPCmut3 (opt1)
aggagagucccgcagucggcguccagcggcucugcuuguucgugugugugucguugcaggccuuauucaagcuuaccaugggccagaucaucaccuucuuccaggaggugccccacgucaucgaggaggugaugaacaucgugcugaucgcccucagccugcuggccauccucaaggggaucuacaacgucgcgaccugcggccuguucgggcugguguccuuccuccugcugugcggccgcagcugcuccacgaccuacaaggggguguacgagcuccagacccuggagcuggacauggccagccucaacaugaccaugccgcuguccugcacgaagaacaacagccaccacuacaucauggucggcaacgagaccggccuggagcucacccugaccaacacguccaucaucaaccacaaguucugcaaccugagcgacgcccacaagaagaaccucuacgaccacgcccugauguccaucaucagcaccuuccaccuguccauccccaacuucaaccaguacgaggccaugagcugcgacuucaacgggggcaagaucuccgugcaguacaaccucagccacgcguacgccguggacgccgccaaccacugcgggaccaucgcgaacggcguccugcagaccuucaugcggauggccuggggcggguccuacaucgcccuggacagcggcaagggguccugggacugcaucaugacgagcuaccaguaccucaucauccagaacaucaccugggaggaccacugccaguucucccgccccagccccaucggcuaccuggggcugcucagccagcggacccgcgacaucuacaucucccggcgccgccggggcaccuucacguggacccucagcgacuccgagggcaacgagacccccgggggcuacugccugacccgguggaugcugaucgaggccgagcucaagugcuucgggaacacggccguggcgaagugcaacgagaagcacgacgaggaguucugcgacaugcugcgccuguucgacuucaacaagcaggccauccggcgccucaagacccccgcccagaugagcauccagcugaucaacaaggccgugaacgcccugaucaacgaccagcucaucaugaagaaccaccuccgggacaucaugggcauccccuacugcaacuacuccaaguacugcuaccugaaccacaccgucaccgggaagacgagccugccccgcugcugccugguguccaacggcagcuaccugaacgagacccacuucuccgacgacaucgagcagcaggcggacaacaugaucaccgagcuccugcagaaggaguacaucgaccggcagggcaagaccccgcuggggcucguggaccuguucgucuucagcacguccuucuaccugaucagcaucuuccugcaccucgugaagaucccgacccaccgccacguggucggcaagcccugccccaagccccaccggcugaaccacauggggaucugcuccugcggccuguacaagcacccgggggugcccgugaaguggaagcgcugaggacuagucccuguucccagagcccacuuuuuuuucuuuuuuugaaauaaaauagccugucuuucagaucucaaaggcucuuuucagagccaccaaaaaaaaaaaaaaaaaaaaaaaaaaaaaaaaaaaaaaaaaaaaaaaaaaaaaaaaaaaaaaaaaaaaaaaaaaaaaaaaaaaaaaaaaaaaaaaaaaaaa

SEQ ID NO: 24943 - RNA, 1745 nt, Artificial Sequence
  mRNA product Design a-1 (hSL-A100) comprising derived and/or modified sequence from LASV(Lassa virus/H.sapiens-wt/NGA/2015/ISTH_0543;Clade II)__AVO03639__GPCmut3 (opt1)
aggagagucccgcagucggcguccagcggcucugcuuguucgugugugugucguugcaggccuuauucaagcuuaccaugggccagaucaucaccuucuuccaggaggugccccacgucaucgaggaggugaugaacaucgugcugaucgcccucagccugcuggccauccucaaggggaucuacaacgucgcgaccugcggccuguucgggcugguguccuuccuccugcugugcggccgcagcugcuccacgaccuacaaggggguguacgagcuccagacccuggagcuggacauggccaaccucaacaugaccaugccgcugagcugcacgaagaacaacucccaccacuacaucauggucggcaacgagaccggccuggagcucacccugaccaacacgagcaucaucaaccacaaguucugcaaccuguccgacgcccacaagaagaaccucuacgaccacgcccugaugagcaucaucuccaccuuccaccugagcauccccaacuucaaccaguacgaggccauguccugcgacuucaacgggggcaagaucagcgugcaguacaaccucucccacaccuacgcgguggacgccgccaaccacugcgggaccaucgccaacggcguccugcagacguucaugcggauggcguggggcgggagcuacaucgcccuggacuccggcaaggggagcugggacugcaucaugaccuccuaccaguaccucgugauccagaacaccaccugggaggaccacugccaguucagccgccccucccccaucggcuaccuggggcugcucagccagcggacgcgcgacaucuacaucagccggcgccgccggggcaccuucaccuggacccucuccgacagcgagggcaacgagacgcccgggggcuacugccugacccgguggaugcugaucgaggccgagcucaagugcuucgggaacaccgccguggccaagugcaacgagaagcacgacgaggaguucugcgacaugcugcgccuguucgacuucaacaagcaggcgauccggcgccucaagacccccgcccagauguccauccagcugaucaacaaggccgucaacgcccugaucaacgaccagcucaucaugaagaaccaccuccgggacaucaugggcauccccuacugcaacuacagcaaguacugcuaccugaaccacacggugaccgggaagaccucccugccccgcugcugccuggugagcaacggcuccuaccugaacgagacccacuucagcgacgacaucgagcagcaggccgacaacaugaucacggagcuccugcagaaggaguacaucgaccggcagggcaagaccccgcuggggcucgucgaccuguucguguucuccaccagcuucuaccugaucuccaucuuccugcaccucgugaagaucccgacccaccgccacaucacgggcaagcccugccccaagccccaccggcugaaccacauggggaucugcagcugcggccuguacaagcacccggggguccccgugaaguggaagcgcugaggacuagucccuguucccagagcccacuuuuuuuucuuuuuuugaaauaaaauagccugucuuucagaucucaaaggcucuuuucagagccaccaaaaaaaaaaaaaaaaaaaaaaaaaaaaaaaaaaaaaaaaaaaaaaaaaaaaaaaaaaaaaaaaaaaaaaaaaaaaaaaaaaaaaaaaaaaaaaaaaaaaa

SEQ ID NO: 24944 - RNA, 1745 nt, Artificial Sequence
  mRNA product Design a-1 (hSL-A100) comprising derived and/or modified sequence from LASV(Lassa virus/H.sapiens-wt/NGA/2016/ISTH_0009;Clade II)__AVO03571__GPCmut3 (opt1)
aggagagucccgcagucggcguccagcggcucugcuuguucgugugugugucguugcaggccuuauucaagcuuaccaugggccagaucaucaccuucuuccaggaggugccccacgucaucgaggaggugaugaacaucgugcugaucgcccucagccugcuggccauccucaaggggaucuacaacgucgcgaccugcggccugcuggggcucguguccuuccugcugcucugcggccgcagcugcuccacgaccuacaaggggguguacgagcugcagacccuggagcucgacauggccagccugaacaugaccaugccgcuguccugcacgaagaacaacagccaccacuacaucauggucggcaacgagaccggccucgagcugacccugaccaacacguccaucaucaaccacaaguucugcaaccucagcgacgcccacaagaagaaccuguacgaccacgcccugauguccaucaucagcaccuuccaccucuccauccccaacuucaaccaguacgaggccaugagcugcgacuucaacgggggccggaucuccgugcaguacaaccugagccacuccuacgcgguggacgccgccaaccacugcgggaccaucgccaacggcguccugcagaccuucaugcgcauggcguggggcgggagcuacaucgcccucgacuccggcaaggggagcugggacugcaucaugacguccuaccaguaccugaucauccagaacaccaccugggaggaccacugccaguucagccggcccagccccaucggcuaccuggggcuccugucccagcgcacccgggacaucuacaucagccgccggcgccggggcacguucaccuggacccuguccgacagcgagggcaacgagacccccgggggcuacugccugacgcgcuggaugcucaucgaggccgagcugaagugcuucgggaacaccgccguggccaagugcaacgagaagcacgacgaggaguucugcgacaugcugcggcuguucgacuucaacaagcaggcgauccgccggcugaagacccccgcccagauguccauccagcugaucaacaaggccgugaacgcccucaucaacgaccagcugaucaugaagaaccaccuccgcgacaucaugggcaucccguacugcaacuacagcaaguacugcuaccucaaccacaccgucacggggaagaccucccugccccggugcugccuggugagcaacggcuccuaccucaacgagacccacuucagcgacgacaucgagcagcaggccgacaacaugaucaccgagcugcugcagaaggaguacaucgaccgccagggcaagacgccccucgggcugguggaccuguucgucuucuccaccagcuucuaccugaucuccaucuuccuccaccuggugaagaucccgacccaccggcacaucaccggcaagcccugccccaagccccaccgccugaaccacauggggaucugcagcugcggccucuacaaccacccgggggugcccgucaaguggaagcggugaggacuagucccuguucccagagcccacuuuuuuuucuuuuuuugaaauaaaauagccugucuuucagaucucaaaggcucuuuucagagccaccaaaaaaaaaaaaaaaaaaaaaaaaaaaaaaaaaaaaaaaaaaaaaaaaaaaaaaaaaaaaaaaaaaaaaaaaaaaaaaaaaaaaaaaaaaaaaaaaaaaaa

SEQ ID NO: 24945 - RNA, 1745 nt, Artificial Sequence
  mRNA product Design a-1 (hSL-A100) comprising derived and/or modified sequence from LASV(Lassa virus/H.sapiens-wt/NGA/2016/ISTH_0017;Clade II)__AVO03567__GPCmut3 (opt1)
aggagagucccgcagucggcguccagcggcucugcuuguucgugugugugucguugcaggccuuauucaagcuuaccaugggccagaucaucaccuucuuccaggaggugccccacgucaucgaggaggugaugaacaucgugcugaucgcccucagccugcuggccauccucaaggggaucuacaacgucgcgaccugcggccuguucgggcugguguccuuccuccugcugugcggccgcagcugcuccacgaccuacaaggggguguacgagcuccagacccuggagcuggacauggccagccucaacaugaccaugccgcuguccugcacgaagaacaacagccaccacuacaucauggucggcaacgagaccggccuggagcucacccugaccaacacguccaucaucaaccacaaguucugcaaccugagcgacgcccacaagaagaaccucuacgaccacgcccugauguccaucaucagcaccuuccaccuguccauccccaacuucaaccaguacgaggccaugagcugcgacuucaacgggggcaagaucuccgugcaguacaaccucagccacaccuacgcgaucgacgccgccaaccacugcgggaccaucgccaacggcgugcugcagacguucaugcggauggcguggggcggguccuacaucgcccuggacagcggcaagggguccugggacugcaucaugaccagcuaccaguaccucaucauccagaacaccaccugggaggaccacugccaguucucccgccccagccccaucggcuaccuggggcugcucagccagcggacgcgcgacaucuacaucucccggcgccgccggggcaccuucaccuggacccucagcgacuccgagggcaacgagacgcccgggggcuacugccugacccgguggaugcugaucgaggccgagcucaagugcuucgggaacaccgccgucgccaagugcaacgagaagcacgacgaggaguucugcgacaugcugcgccuguucgacuucaacaagcaggcgauccggcgccucaagacccccgcccagaugagcauccagcugaucaacaaggccgugaacgcccugaucaacgaccagcucaucaugaagaaccaccuccgggacaucaugggcauccccuacugcaacuacuccaaguacugcuaccugaaccacacggugaccgggaagaccagccugccccgcugcugccuggucuccaacggcagcuaccugaacgagacccacuucuccgacgacaucgagcagcaggccgacaacaugaucacggagcuccugcagaaggaguacauggaccggcagggcaagaccccgcuggggcucguggaccuguucguguucagcaccuccuucuaccugaucagcaucuuccugcaccucguccgcaucccgacccaccggcacgugaucggcaagcccugccccaagccccaccgccugaaccacauggggaucugcuccugcggccuguacaagcacccgggggugcccgucaaguggaagcggugaggacuagucccuguucccagagcccacuuuuuuuucuuuuuuugaaauaaaauagccugucuuucagaucucaaaggcucuuuucagagccaccaaaaaaaaaaaaaaaaaaaaaaaaaaaaaaaaaaaaaaaaaaaaaaaaaaaaaaaaaaaaaaaaaaaaaaaaaaaaaaaaaaaaaaaaaaaaaaaaaaaaa

SEQ ID NO: 24946 - RNA, 1745 nt, Artificial Sequence
  mRNA product Design a-1 (hSL-A100) comprising derived and/or modified sequence from LASV(Lassa virus/H.sapiens-wt/NGA/2018/ISTH_0959;Clade II)__AVV65099__GPCmut3 (opt1)
aggagagucccgcagucggcguccagcggcucugcuuguucgugugugugucguugcaggccuuauucaagcuuaccaugggccagaucaucaccuucuuccaggaggugccccacgucaucgaggaggugaugaacaucgugcugaucgcccucagccugcuggccauccucaaggggaucuacaacgucgugaccugcggccuguucgggcugguguccuuccuccugcugugcggccgcagcugcuccacgaccuacaagggggucuacgagcuccagacccuggagcuggacauggcgagccucaacaugaccaugccgcuguccugcacgaagaacaacagccaccacuacaucauggugggcaacgagaccggccuggagcucacccugaccaacacguccaucaucaaccacaaguucugcaaccugagcgacgcccacaagaagaaccucuacgaccacgcccugauguccaucaucagcaccuuccaccuguccauccccaacuucaaccaguacgaggccaugagcugcgacuucaacgggggcaagaucuccgugcaguacaaccucagccacgccuacgcgaucgacgccgccaaccacugcgggaccaucgccaacggcguccugcagaccuucaugcggauggcguggggcggguccuacaucgcccuggacagcggcaagggguccugggacugcaucaugacgagcuaccaguaccucaucauccagaacaccaccugggaggaccacugccaguucucccgccccagccccaucggcuaccuggggcugcucagccagcggacccgcgacaucuacaucucccggcgccgccggggcacguucaccuggacccucagcgacuccgagggcaacgagacccccgggggcuacugccugacgcgguggaugcugaucgaggccgagcucaagugcuucgggaacaccgccguggccaagugcaacgagaagcacgacgaggaguucugcgacaugcugcgccuguucgacuucaacaagcaggcgauccggcgccucaagacccccgcccagaugagcauccagcugaucaacaaggccgugaacgcccugaucaacgaccagcucaucaugaagaaccaccuccgggacaucaugggcaucccguacugcaacuacuccaaguacugcuaccugaaccacaccgucacggggaagaccagccugccccgcugcugccugguguccaacggcagcuaccugaacgagacccacuucuccgacgacaucgagcagcaggccgacaacaugaucaccgagcuccugcagaaggaguacaucgaccggcagggcaagacgccccuggggcucguggaccuguucgucuucagcaccuccuucuaccugaucagcaucuuccugcaccucgugaagaucccgacccaccgccacgugaucggcaagcccugccccaagccccaccggcugaaccacauggggaucugcuccugcggccuguacaagcacccggggguccccgugaaguggaagcgcugaggacuagucccuguucccagagcccacuuuuuuuucuuuuuuugaaauaaaauagccugucuuucagaucucaaaggcucuuuucagagccaccaaaaaaaaaaaaaaaaaaaaaaaaaaaaaaaaaaaaaaaaaaaaaaaaaaaaaaaaaaaaaaaaaaaaaaaaaaaaaaaaaaaaaaaaaaaaaaaaaaaaa

SEQ ID NO: 24947 - RNA, 1745 nt, Artificial Sequence
  mRNA product Design a-1 (hSL-A100) comprising derived and/or modified sequence from LASV(LASV003-NIG-2008;Clade II)__AIT17580__GPCmut3 (opt1)
aggagagucccgcagucggcguccagcggcucugcuuguucgugugugugucguugcaggccuuauucaagcuuaccaugggccagaucaucaccuucuuccaggaggugccccacgucaucgaggaggugaugaacaucgugcugaucgcccucagccugcuggccauccucaaggggaucuacaacgucgcgaccugcggccuguucgggcugguguccuuccuccugcugugcggccgcagcugcuccacgaccuacaaggggguguacgagcuccagacccuggagcuggacauggccagccucaacaugaccaugccgcuguccugcacgaagaacaacagccaccacuacaucauggucggcaacgagaccggccuggagcucacccugaccaacacguccaucaucaaccacaaguucugcaaccugagcgacgcccacaagaagaaccucuacgaccacgcccugauguccaucaucagcaccuuccaccuguccauccccaacuucaaccaguacgaggccaugagcugcgacuucaacgggggcaagaucuccgugcaguacaaccucagccacaccuacgcgguggacgccgccaaccacugcgggaccaucgccaacggcguccugcagacguucaugcggauggcguggggcggguccuacaucgcccuggacagcggcaagggguccugggacugcaucaugaccagcuaccaguaccucaucauccagaacaccaccugggaggaccacugccaguucucccgccccagccccaucggcuaccuggggcugcucagccagcggacgcgcgacaucuacaucucccggcgccgccggggcaccuucaccuggacccucagcgacuccgagagcaacgagacgccgggcggguacugccugacccgguggaugcugaucgaggccgagcucaagugcuucggcaacaccgccguggccaagugcaacgagaagcacgacgaggaguucugcgacaugcugcgccuguucgacuucaacaagcaggcgauccggcgccucaaggcccccgcccagauguccauccagcugaucaacaaggccgugaacgcccugaucaacgaccagcucaucaugaagaaccaccuccgggacaucauggggauccccuacugcaacuacagcaaguacugcuaccugaaccacaccgucacgggccgcaccucccugccccggugcugccuggugagcaacggguccuaccugaacgagacccacuucagcgacgacaucgagcagcaggcggacaacaugaucaccgagcuccugcagaaggaguacauggaccgccagggcaagacgccccugggccucguggaccuguucgucuucuccaccagcuucuaccugaucuccaucuuccugcaccucgugaagaucccgacccaccggcacgugaucgggaagcccugccccaagccccaccgccugaaccacaugggcaucugcagcugcgggcuguacaagcacccgggcguccccgugaaguggaagcggugaggacuagucccuguucccagagcccacuuuuuuuucuuuuuuugaaauaaaauagccugucuuucagaucucaaaggcucuuuucagagccaccaaaaaaaaaaaaaaaaaaaaaaaaaaaaaaaaaaaaaaaaaaaaaaaaaaaaaaaaaaaaaaaaaaaaaaaaaaaaaaaaaaaaaaaaaaaaaaaaaaaaa

SEQ ID NO: 24948 - RNA, 1745 nt, Artificial Sequence
  mRNA product Design a-1 (hSL-A100) comprising derived and/or modified sequence from LASV(LASV035-NIG-2009;Clade II)__AIT17588__GPCmut3 (opt1)
aggagagucccgcagucggcguccagcggcucugcuuguucgugugugugucguugcaggccuuauucaagcuuaccaugggccagaucaucaccuucuuccaggaggugccccacgucaucgaggaggugaugaacaucgugcugaucgcccucagccugcuggccauccucaaggggaucuacaacgucgcgaccugcggccuguucgggcugguguccuuccuccugcugugcggccgcagcugcuccacgaccuacaaggggguguacgagcuccagacccuggagcuggacauggccagccucaacaugaccaugccgcuguccugcacgaagaacaacagccaccacuacaucauggucggcaacgagaccggccuggagcucacccugaccaacacguccaucaucaaccacaaguucugcaaccugagcgacgcccacaagaagaaccucuacgaccacgcccugauguccaucaucagcaccuuccaccuguccauccccaacuucaaccaguacgaggccaugagcugcgacuucaacgggggcaagaucuccgugcaguacaaccucagccacgcguacgccguggacgccgccaaccacugcgggaccaucgcgaacggcguccugcagaccuucaugcggauggccuggggcggguccuacaucgcccuggacagcggcaagggguccugggacugcaucaugacgagcuaccaguaccucaucauccagaacaccaccugggaggaccacugccaguucucccgccccagccccaucggcuaccuggggcugcucagccagcggacccgcgacaucuacaucucccggcgccgccggggcacguucaccuggacccucagcgacuccgagggcaacgagacccccgggggcuacugccugacgcgguggaugcugaucgaggccgagcucaagugcuucgggaacaccgccguggcgaagugcaacgagaagcacgacgaggaguucugcgacaugcugcgccuguucgacuucaacaagcaggccauccggcgccucaaggcccccgcccagaugagcauccagcugaucaacaaggccgugaacgcgcugaucaacgaccagcucaucaugaagaaccaccuccgggacaucaugggcauccccuacugcaacuacuccaaguacugcuaccugaaccacaccgucaccgggaagacgagccugccccgcugcugccugguguccaacggcagcuaccugaacgagacccacuucuccgacgacaucgagcagcaggccgacaacaugaucaccgagcuccugcagaaggaguacaucgaccggcagggcaagaccccgcuggggcucguggaccuguucgucuucagcacguccuucuaccugaucagcaucuuccugcaccucgugaagaucccgacccaccgccacgugaucggcaagcccugccccaagccccaccggcugaaccacauggggaucugcuccugcggccuguacaagcacccggggguccccgugaaguggaagcgcugaggacuagucccuguucccagagcccacuuuuuuuucuuuuuuugaaauaaaauagccugucuuucagaucucaaaggcucuuuucagagccaccaaaaaaaaaaaaaaaaaaaaaaaaaaaaaaaaaaaaaaaaaaaaaaaaaaaaaaaaaaaaaaaaaaaaaaaaaaaaaaaaaaaaaaaaaaaaaaaaaaaaa

SEQ ID NO: 24949 - RNA, 1745 nt, Artificial Sequence
  mRNA product Design a-1 (hSL-A100) comprising derived and/or modified sequence from LASV(LASV1000-NIG-2009;Clade II)__AIT17782__GPCmut3 (opt1)
aggagagucccgcagucggcguccagcggcucugcuuguucgugugugugucguugcaggccuuauucaagcuuaccaugggccagaucaucaccuucuuccaggaggugccccacgucaucgaggaggugaugaacaucgugcugaucgcccucagccugcuggccauccucaaggggaucuacaacgucgcgaccugcggccuguucgggcugguguccuuccuccugcugugcggccgcagcugcuccacgaccuacaaggggguguacgagcuccagacccuggagcuggacauggccagccucaacaugaccaugccgcuguccugcacgaagaacaacagccaccacuacaucauggucggcaacgagaccggccuggagcucacccugaccaacacguccaucaucaaccacaaguucugcaaccugagcgacgcccacaagaagaaccucuacgaccacgcccugauguccaucaucagcaccuuccaccuguccauccccaacuucaaccaguacgaggccaugagcugcgacuucaacgggggcaagaucuccgugcaguacaaccucagccacaccuacgcgguggacgccgccaaccacugcgggaccaucgccaacggcguccugcagacguucaugcggauggcguggggcggguccuacaucgcccuggacagcggcaagggguccugggacugcaucaugaccagcuaccaguaccucaucauccagaacaccaccugggaggaccacugccaguucucccgccccagccccaucggcuaccuggggcugcucagccagcggacgcgcgacaucuacaucucccggcgccgccggggcaccuucaccuggacccucagcgacuccgagggcaacgagacgcccgggggcuacugccugacccgguggaugcugaucgaggccgagcucaagugcuucgggaacaccgccguggccaagugcaacgagaagcacgacgaggaguucugcgacaugcugcgccuguucgacuucaacaagcaggcgaucaagcggcucaagacccccgcccagaugagcauccagcugaucaacaaggccgugaacgcccugaucaacgaccagcucaucaugaagaaccaccuccgcgacaucaugggcauccccuacugcaacuacuccaaguacugcuaccugaaccacacggucaccgggaagaccagccugccccggugcugccugguguccaacggcagcuaccugaacgagacccacuucuccgacgacaucgagcagcaggccgacaacaugaucacggagcuccugcagaaggaguacaucgaccgccagggcaagaccccgcuggggcucguggaccuguucgucuucagcaccuccuucuaccugaucagcaucuuccugcaccucgugaagaucccgacccaccggcacguggucggcaagcccugccccaagccccaccgccugaaccacauggggaucugcuccugcggccuguacaagcacccgggggugcccgugaaguggaagcggugaggacuagucccuguucccagagcccacuuuuuuuucuuuuuuugaaauaaaauagccugucuuucagaucucaaaggcucuuuucagagccaccaaaaaaaaaaaaaaaaaaaaaaaaaaaaaaaaaaaaaaaaaaaaaaaaaaaaaaaaaaaaaaaaaaaaaaaaaaaaaaaaaaaaaaaaaaaaaaaaaaaaa

SEQ ID NO: 24950 - RNA, 1745 nt, Artificial Sequence
  mRNA product Design a-1 (hSL-A100) comprising derived and/or modified sequence from LASV(LASV221-NIG-2010;Clade II)__AIT17624__GPCmut3 (opt1)
aggagagucccgcagucggcguccagcggcucugcuuguucgugugugugucguugcaggccuuauucaagcuuaccaugggccagaucaucaccuucuuccaggaggugccccacgucaucgaggaggugaugaacaucgugcugaucgcccucagccugcuggccauccucaaggggaucuacaacgucgcgaccugcggccuguucgggcugguguccuuccuccugcugugcggccgcagcugcuccacgaccuacaaggggguguacgagcuccagacccuggagcuggacauggccagccucaacaugaccaugccgcuguccugcacgaagaacaacagccaccacuacaucauggucggcaacgagaccggccuggagcucacccugaccaacacguccaucaucaaccacaaguucugcaaccugagcgacgcccacaagaagaaccucuacgaccacgcccugauguccaucaucagcaccuuccaccuguccauccccaacuucaaccaguacgaggccaugagcugcgacuucaacgggggcaagaucuccgugcaguacaaccucagccacaccuacgcgaucgacgccgccaaccacugcgggaccaucgccaacggcgugcugcagacguucaugcggauggcguggggcggguccuacaucgcccuggacagcggcaagggguccugggacugcaucaugaccagcuaccaguaccucaucauccagaacaccaccugggaggaccacugccaguucucccgccccagccccaucggcuaccuggggcugcucagccagcggacgcgcgacaucuacaucucccggcgccgccggggcaccuucaccuggacccucagcgacuccgagggcaacgagacgcccgggggcuacugccugacccgguggaugcugaucgaggccgagcucaagugcuucgggaacaccgccgucgccaagugcaacgagaagcacgacgaggaguucugcgacaugcugcgccuguucgacuucaacaagcaggcgauccggcgccucaagacccccgcccagaugagcauccagcugaucaacaaggccgugaacgcccugaucaacgaccagcucaucaugaagaaccaccuccgggacaucaugggcauccccuacugcaacuacuccaaguacugcuaccugaaccacacggugaccgggaagaccagccugccccgcugcugccuggucuccaacggcagcuaccugaacgagacccacuucuccgacgacaucgagcagcaggccgacaacaugaucacggagaugcuccagaaggaguacauggaccggcagggcaagaccccgcuggggcugguggaccucuucguguucagcaccuccuucuaccugaucagcaucuuccugcaccuggucaagaucccgacccaccgccacgugaucggcaagcccugccccaagccccaccggcucaaccacauggggaucugcuccugcggccuguacaagcacccgggggugcccgucaaguggaagcgcugaggacuagucccuguucccagagcccacuuuuuuuucuuuuuuugaaauaaaauagccugucuuucagaucucaaaggcucuuuucagagccaccaaaaaaaaaaaaaaaaaaaaaaaaaaaaaaaaaaaaaaaaaaaaaaaaaaaaaaaaaaaaaaaaaaaaaaaaaaaaaaaaaaaaaaaaaaaaaaaaaaaaa

SEQ ID NO: 24951 - RNA, 1745 nt, Artificial Sequence
  mRNA product Design a-1 (hSL-A100) comprising derived and/or modified sequence from LASV(LASV237-NIG-2010;Clade II)__AIT17638__GPCmut3 (opt1)
aggagagucccgcagucggcguccagcggcucugcuuguucgugugugugucguugcaggccuuauucaagcuuaccaugggccagaucaucaccuucuuccaggaggugccccacgucaucgaggaggugaugaacaucgugcugaucgcccucagccugcuggccauccucaaggggaucuacaacgucgcgaccugcggccuguucgggcugguguccuuccuccugcugugcggccgcagcugcuccacgaccuacaaggggguguacgagcuccagacccuggagcuggacauggccagccucaacaugaccaugccgcuguccugcacgaagaacaacagccaccacuacaucauggucggcaacgagaccggccuggagcucacccugaccaacacguccaucaucaaccacaaguucugcaaccugagcgacgcccacaagaaggaccucuacgaccacgcccugauguccaucaucagcaccuuccaccuguccauccccaacuucaaccaguacgaggccaugagcugcgacuucaacgggggcaagaucuccgugcaguacaaccucagccacaccuacgcgguggacgccgccaaccacugcgggaccaucgccaacggcguccugcagacguucaugcggauggcguggggcggguccuacaucgcccuggacagcggcaagggguccugggacugcaucaugaccagcuaccaguaccucaucauccagaacaccaccugggaggaccacugccaguucucccgccccagccccaucggcuaccuggggcugcucagccagcggacgcgcgacaucuacaucucccggcgccgccggggcaccuucaccuggacccucagcgacuccgagggcaacgagacgcccgggggcuacugccugacccgguggaugcugaucgaggccgagcucaagugcuucgggaacaccgccguggccaagugcaacgagaagcacgacgaggaguucugcgacaugcugcgccuguucgacuucaacaagcaggcgauccggcgccucaagacccccgcccagaugagcauccagcugaucaacaaggccgugaacgcccugaucaacgaccagcucaucaugaagaaccaccuccgggacaucaugggcauccccuacugcaacuacuccaaguacugcuaccugaaccacacggucaccgggaagaccagccugccccgcugcugccugguguccaacggcagcuaccugaacgagacccacuucuccgacgacaucgagcagcaggccgacaacaugaucacggagcuccugcagaaggaguacauggaccggcagggcaagaccccgcuggggcucguggaccuguucgucuucagcaccuccuucuaccugaucagcaucuuccugcaccucaucaagaucccgacccaccgccacaucacgggcaagcccugccccaagccccaccggcugaaccacauggggaucugcuccugcggccuguacaagcacccgggggugcccgugaaguggaagcgcugaggacuagucccuguucccagagcccacuuuuuuuucuuuuuuugaaauaaaauagccugucuuucagaucucaaaggcucuuuucagagccaccaaaaaaaaaaaaaaaaaaaaaaaaaaaaaaaaaaaaaaaaaaaaaaaaaaaaaaaaaaaaaaaaaaaaaaaaaaaaaaaaaaaaaaaaaaaaaaaaaaaaa

SEQ ID NO: 24952 - RNA, 1745 nt, Artificial Sequence
  mRNA product Design a-1 (hSL-A100) comprising derived and/or modified sequence from LASV(LASV253-NIG-2011;Clade II)__AIT17670__GPCmut3 (opt1)
aggagagucccgcagucggcguccagcggcucugcuuguucgugugugugucguugcaggccuuauucaagcuuaccaugggccagaucaucaccuucuuccaggaggugccccacgucaucgaggaggugaugaacaucgugcugaucgcccucagccugcuggccauccucaaggggaucuacaacgucgcgaccugcggccuguucgggcugguguccuuccuccugcugugcggccgcagcugcuccacgaccuacaaggggguguacgagcuccagacccuggagcuggacauggccagccucaacaugaccaugccgcuguccugcacgaagaacaacagccaccacuacaucauggucggcaacgagaccggccuggagcucacccugaccaacacguccaucaucaaccacaaguucugcaaccugagcgacgcccacaagaagaaccucuacgaccacgcccugauguccaucaucagcaccuuccaccuguccauccccaacuucaaccaguacgaggccaugagcugcgacuucaacgggggcaagaucuccgugcaguacaaccucagccacaccuacgcgguggacgccgccaaccacugcgggaccaucgccaacggcguccugcagacguucaugcggauggcguggggcggguccuacaucgcccuggacagcggcaagggguccugggacugcaucaugaccagcuaccaguaccucaucauccagaacaccaccugggaggaccacugccaguucucccgccccagccccaucggcuaccuggggcugcucagccagcggacgcgcgacaucuacaucucccggcgccgccggggcaccuucaccuggacccucagcgacuccgagggcaacgagacgcccgggggcuacugccugacccgguggaugcugaucgaggccgagcucaagugcuucgggaacaccgccguggccaagugcaacgagaagcacgacgaggaguucugcgacaugcugcgccuguucgacuucaacaagcaggcgauccggcgccucaaggcccccgcccagaugagcauccagcugaucaacaaggccgugaacgcccugaucaacgaccagcucaucaugaagaaccaccuccgggacaucaugggcaucccguacugcaacuacuccaaguacugcuaccugaaccacaccgucacggggcgcaccagccugccccggugcugccugguguccaacggcagcuaccugaacgagacccacuucuccgacgacaucgagcagcaggcggacaacaugaucaccgagcuccugcagaaggaguacaucgaccgccagggcaagacgccccuggggcucguggaccuguucgucuucagcaccuccuucuaccugaucagcaucuuccugcaccucgugaagaucccgacccaccggcacaucaucggcaagcccugccccaagccccaccgccugaaccacauggggaucugcuccugcggccuguacaagcacccgggggugcccgucaaguggaagcggugaggacuagucccuguucccagagcccacuuuuuuuucuuuuuuugaaauaaaauagccugucuuucagaucucaaaggcucuuuucagagccaccaaaaaaaaaaaaaaaaaaaaaaaaaaaaaaaaaaaaaaaaaaaaaaaaaaaaaaaaaaaaaaaaaaaaaaaaaaaaaaaaaaaaaaaaaaaaaaaaaaaaa

SEQ ID NO: 24953 - RNA, 1745 nt, Artificial Sequence
  mRNA product Design a-1 (hSL-A100) comprising derived and/or modified sequence from LASV(LASV254-NIG-2011;Clade II)__AIT17674__GPCmut3 (opt1)
aggagagucccgcagucggcguccagcggcucugcuuguucgugugugugucguugcaggccuuauucaagcuuaccaugggccagaucaucaccuucuuccaggaggugccccacgucaucgaggaggugaugaacaucgugcugaucgcccucagccugcuggccauccucaaggggaucuacaacgucgcgaccugcggccuguucgggcugguguccuuccuccugcugugcggccgcagcugcuccacgaccuacaaggggguguacgagcuccagacccuggagcuggacaugaccaaccucaacaugacgaugccgcugagcugcaccaagaacaacucccaccacuacaucauggucggcaacgagaccggccuggagcucacccugacgaacaccagcaucaucaaccacaaguucugcaaccuguccgacgcccacaagaagaaccucuacaaccacgcccugaugagcaucaucuccaccuuccaccugagcauccccaacuucaaccaguacgaggccauguccugcgacuucaacgggggcaagaucagcgugcaguacaaccucucccacagcuacgccguggacgcggccaaccacugcgggaccaucgccaacggcguccugcagacguucaugcggauggccuggggcggguccuacaucgcgcuggacagcggcaaggggaacugggacugcaucaugaccuccuaccaguaccucaucauccagaacaccaccugggaggaccacugccaguucagccgccccucccccaucggcuaccuggggcugcucagccagcggacgcgcgacaucuacaucagccggcgccgccggggcaccuucaccuggacccucuccgacagcgagggcaacgagacgcccgggggcuacugccugacccgguggaugcugaucgaggccgagcucaagugcuucgggaacaccgccguggccaagugcaacgagaagcacgacgaggaguucugcgacaugcugcgccuguucgacuucaacaagcaggccauccggcgccucaagacccccgcgcaggccaacauccagcugaucaacaaggccgugaacgcccugaucaacgaccagcucaucaugaagaaccaccuccgggacaucaugggcauccccuacugcaacuacuccaaguacugcuaccugaaccacacggucaccgggaagaccagccugccccgcugcugccugguguccaacggcagcuaccugaacgagacccacuucuccgacgacaucgagcagcaggccgacaacaugaucacggagcuccugcagaaggaguacauggaccggcagggcaagaccccgcuggggcucguggaccuguucgucuucagcaccuccuucuaccugaucagcaucuuccugcaccucgugaagaucccgacccaccgccacgugaucggcaagcccugccccaagccccaccggcugaaccacauggggaucugcuccugcggccuguacaagcacccggggguccccgugaaguggaagcgcugaggacuagucccuguucccagagcccacuuuuuuuucuuuuuuugaaauaaaauagccugucuuucagaucucaaaggcucuuuucagagccaccaaaaaaaaaaaaaaaaaaaaaaaaaaaaaaaaaaaaaaaaaaaaaaaaaaaaaaaaaaaaaaaaaaaaaaaaaaaaaaaaaaaaaaaaaaaaaaaaaaaaa

SEQ ID NO: 24954 - RNA, 1745 nt, Artificial Sequence
  mRNA product Design a-1 (hSL-A100) comprising derived and/or modified sequence from LASV(Nig08-A19;Clade III)__ADU56618__GPCmut3 (opt1)
aggagagucccgcagucggcguccagcggcucugcuuguucgugugugugucguugcaggccuuauucaagcuuaccaugggccagaucgugaccuucuuccaggaggucccccacgugaucgaggaggugaugaacaucguccugaucgcccucagcauccuggccauccugaaggggcucuacaacaucgcgaccugcggccugaucgggcuggugacguuccuccugcuguccggccgcagcugcuccaugaccuacaaggggguguacgagcuccagacccuggagcugaacaugaacacccucaacaugacgaugccgcugagcugcaccaagaacaacucccaccacuacaucauggucggcaacgagaccggccuggagcucacccugacgaacaccagccugcuccaccacaaguucugcaaccuguccgacgcccacaagaagaaccuguacgaccacacccucaugagcaucaucuccaccuuccaccugagcauccccaacuucaaccaguacgaggccauguccugcgacuucaacgggggcaagaucacggugcaguacaaccugagccacuccuacgccaucgacgccgcgaaccacugcgggaccguggccaacggcguccuccagaccuucaugcggauggccuggggcgggagcuacaucgcccuggacuccggccgcgggaagugggacugcaucaugaccagcuaccaguaccugaucauccagaacacgaccugggaggaccacugccaguucucccggcccagccccaucggcuaccucgggcugcugucccagcgcacccgggacaucuacaucagccgccggcgccggggcaccuucacguggacccugagcgacuccgagggcaacgagacccccgggggcuacugccucacccgcuggaugcugaucgaggcggagcugaagugcuucgggaacacggccguggccaagugcaacgagaagcacgacgaggaguucugcgacaugcuccggcuguucgacuucaacaagcaggccauccgccggcugaaggcccccgcgcagaugagcauccagcucaucaacaaggccgugaacgcccugaucaacgaccagcugaucaugaagaaccaccuccgcgacaucaugggcauccccuacugcaacuacuccaaguacugcuaccugaaccacaccagcaccgggcggaccucccugccccgcugcugccucgucagcaacggcuccuaccugaacgagacgcacuucagcgacgacaucgagcagcaggccgacaacaugaucaccgagaugcugcagaaggaguaccucgaccggcagggcaagaccccgcuggggcugguggaccuguucguguucuccaccagcuucuaccucaucuccaucuuccugcaccuggucaagaucccgacgcaccgccacaucgugggcaagcccugccccaagccccaccggcucaaccacauggggaucugcagcugcggccuguacaagcagccgggggugcccguccgcuggaagcggugaggacuagucccuguucccagagcccacuuuuuuuucuuuuuuugaaauaaaauagccugucuuucagaucucaaaggcucuuuucagagccaccaaaaaaaaaaaaaaaaaaaaaaaaaaaaaaaaaaaaaaaaaaaaaaaaaaaaaaaaaaaaaaaaaaaaaaaaaaaaaaaaaaaaaaaaaaaaaaaaaaaaa

SEQ ID NO: 24955 - RNA, 1748 nt, Artificial Sequence
  mRNA product Design a-1 (hSL-A100) comprising derived and/or modified sequence from LASV(G1180-SLE-2010;Clade IV)__AIT17168__GPCmut3 (opt1)
aggagagucccgcagucggcguccagcggcucugcuuguucgugugugugucguugcaggccuuauucaagcuuaccaugggccagaucgugaccuucuuccaggaggucccccacgugaucgaggaggugaugaacaucguccugaucgcccucagcauccuggccgugcugaaggggcucuacaacuucgcgaccugcggccugguggggcugcucaccuuccugcugcucugcggccgcuccugcaccgccagccgguacaagggggucuacgagcugcagacccuggagcucaacauggagacccugaacaugacgaugccgcuguccugcaccaagaacaacagccaccacuacaucauggugggcaacgagaccggccucgagcugacccugacgaacaccuccaucaucaaccacaaguucugcaaccucagcgacgcccacaagaagaaccuguacgaccacgcccugauguccaucaucagcaccuuccaccucuccauccccaacuucaaccaguacgaggccaugagcugcgacuucaacgggggcaagaucuccgugcaguacaaccugagccacuccuacgcgggggacgccgccaaccacugcggcaccgucgccaacggggugcugcagacguucaugcgcauggcguggggcggcagcuacaucgcccucgacuccgggcacggcagcugggacugcaucaugaccuccuaccaguaccugaucauccagaacaccaccugggaggaccacugccaguucagccggcccucccccaucggguaccugggccuccugagccagcgcacgcgggacaucuacaucagccgccggcgccggggcaccuucaccuggacccuguccgacagcgaggggaaggacacgccgggcggguacugccugacccgcuggaugcucaucgaggccgagcugaagugcuucggcaacaccgccguggccaagugcaacgagaagcacgacgaggaguucugcgacaugcugcggcuguucgacuucaacaagcaggcgauccagcgccugaaggcccccgcccagauguccauccagcugaucaacaaggccgucaacgcccucaucaacgaccagcugaucaugaagaaccaccuccgggacaucauggggauccccuacugcaacuacagcaaguacugcuaccucaaccacaccacgaccggcaagaccucccugcccaagugcugccuggugagcaacggcuccuaccucaacgagacccacuucagcgacgacaucgagcagcaggcggacaacaugaucacggagaugcugcagaaggaguacauggagcgccaggggaagacgccccugggccucguggaccuguucgucuucuccaccagcuucuaccugaucuccaucuuccugcaccucgugaagaucccgacccaccggcacaucgugggcaagagcugccccaagccccaccgccugaaccacauggggaucugcuccugcgggcuguacaagcagcccggcgucccggugaaguggaagcggugaggacuagucccuguucccagagcccacuuuuuuuucuuuuuuugaaauaaaauagccugucuuucagaucucaaaggcucuuuucagagccaccaaaaaaaaaaaaaaaaaaaaaaaaaaaaaaaaaaaaaaaaaaaaaaaaaaaaaaaaaaaaaaaaaaaaaaaaaaaaaaaaaaaaaaaaaaaaaaaaaaaaa

SEQ ID NO: 24956 - RNA, 1748 nt, Artificial Sequence
  mRNA product Design a-1 (hSL-A100) comprising derived and/or modified sequence from LASV(G1442-SLE-2011;Clade IV)__AIT17180__GPCmut3 (opt1)
aggagagucccgcagucggcguccagcggcucugcuuguucgugugugugucguugcaggccuuauucaagcuuaccaugggccagaucgugaccuucuuccaggaggucccccacgugaucgaggaggugaugaacaucguccugaucgcccucagcauccuggccgugcugaaggggcucuacaacguggcgaccugcggccugaucgggcuggucacguuccuccugcugugcggccgcuccugcaccaccacccucuacaaggggguguacgagcugcagacgcuggagcucaacauggagacccugaacaugaccaugccgcugagcugcaccaagaacaacucccaccacuacauccgggugggcaacgagacgggccucgagcugacccugaccaacaccagcaucaucaaccacaaguucugcaaccucuccgacgcccacaagaagaaccuguacgaccacgcccugaugagcaucaucuccacguuccaccucagcauccccaacuucaaccaguacgaggccauguccugcgacuucaacgggggcaagaucagcguccaguacaaccugucccacagcuacgccggggacgcggccaaccacugcggcaccguggccaacggggugcugcagaccuucaugcgcauggccuggggcggcuccuacaucgcgcucgacagcgggcggggcaacugggacugcaucaugaccuccuaccaguaccugaucauccagaacacgaccugggacgaccacugccaguucagccgccccucccccaucggguaccugggccuccugagccagcggacccgcgacgucuacaucucccggcgccgccggggcaccuucacguggacccugagcgacagcgaggggaaggacaccccgggcggguacugccugacccgguggaugcucaucgaggccgagcugaagugcuucggcaacacggccguggccaagugcaacgagaagcacgacgaggaguucugcgacaugcugcgccucuucgacuucaacaagcaggccauccagcggcugaaggcgcccgcccagauguccauccagcugaucaacaaggccgugaacgcccucaucaacgaccagcugaucaugaagaaccaccuccgcgacaucauggggauccccuacugcaacuacagcaaguacugcuaccugaacaacaccgccaccggcaagaccucccugcccaagugcugccugaucagcaacggcuccuaccucaacgagacgcacuucagcgacgacaucgagcaggaggcggacaacaugaucaccgagaugcugcagaaggaguacauggagcggcaggggaagacgccccugggccucgucgaccuguucguguucuccaccagcuucuaccugaucuccaucuuccugcaccucgugaagaucccgacccaccgccacaucgucggcaagagcugccccaagccccaccggcugaaccacauggggaucugcuccugcgggcuguacaagcagcccggcgugccggugcgcuggaagcggugaggacuagucccuguucccagagcccacuuuuuuuucuuuuuuugaaauaaaauagccugucuuucagaucucaaaggcucuuuucagagccaccaaaaaaaaaaaaaaaaaaaaaaaaaaaaaaaaaaaaaaaaaaaaaaaaaaaaaaaaaaaaaaaaaaaaaaaaaaaaaaaaaaaaaaaaaaaaaaaaaaaaa

SEQ ID NO: 24957 - RNA, 1748 nt, Artificial Sequence
  mRNA product Design a-1 (hSL-A100) comprising derived and/or modified sequence from LASV(G3010-SLE-2013;Clade IV)__AIT17344__GPCmut3 (opt1)
aggagagucccgcagucggcguccagcggcucugcuuguucgugugugugucguugcaggccuuauucaagcuuaccaugggccagaucgugaccuucuuccaggaggucccccacgugaucgaggaggugaugaacaucguccugaucgcccucagcauccuggccgugcugaaggggcucuacaacuucgcgaccugcggccugguggggcuggucacguuccuccugcugugcggccgcuccugcaccaccagccucuacaaggggguguacgagcugcagacccuggagcucaacauggagacgcugaacaugaccaugccgcuguccugcaccaagaacaacagccaccacuacaucauggugggcaacgagaccggccucgagcugacgcugaccaacaccuccaucaucaaccacaaguucugcaaccucagcgacgcccacaagaagaaccuguacaaccacgcccugauguccaucaucagcaccuuccaccucuccauccccaacuucaaccaguacgaggccaugagcugcgacuucaacgggggcaagaucuccguccaguacaaccugagccacuccuacgccggggacgcggccagccacugcggcacgguggccaacggggugcugcagaccuucaugcggauggccuggggcggcuccuacaucgcgcucgacagcggguacggcaagugggacugcaucaugaccuccuaccaguaccugaucauccagaacaccacgugggaggaccacugccaguucagccgccccucccccaucggguaccugggccuccugagccagcggacccgcgacaucuacaucagccggcgccgccggggcaccuucaccuggacgcuguccgacagcgaggggaaggacaccccgggcggguacugccugacccgguggaugcucaucgaggccgagcugaagugcuucggcaacaccgccgucgccaagugcaacgagaagcacgacgaggaguucugcgacaugcugcgccucuucgacuucaacaagcaggccauccagcggcugaagacgcccgcgcagauguccauccagcugaucaacaaggccgugaacgcccucaucaacgaccagcugaucaugaagaaccaccuccgcgacaucauggggauccccuacugcaacuacagcaaguacugcuaccugaaccacaccaccaccggcaagacgucccugcccaagugcugccuggugagcaacggcuccuaccucaacgagacccacuucagcgacgacaucgagcagcaggccgacaacaugaucaccgagaugcugcagaaggaguacauggagcggcaggggaagacgccccugggccucgucgaccuguucguguucuccaccagcuucuaccugaucuccaucuuccugcaccucgugaagaucccgacccaccgccacaucgucggcaagagcugccccaagccccaccggcugaaccacauggggaucugcuccugcgggcuguacaagcagcccggcgugccggugcgcuggaagcggugaggacuagucccuguucccagagcccacuuuuuuuucuuuuuuugaaauaaaauagccugucuuucagaucucaaaggcucuuuucagagccaccaaaaaaaaaaaaaaaaaaaaaaaaaaaaaaaaaaaaaaaaaaaaaaaaaaaaaaaaaaaaaaaaaaaaaaaaaaaaaaaaaaaaaaaaaaaaaaaaaaaaa

SEQ ID NO: 24958 - RNA, 1748 nt, Artificial Sequence
  mRNA product Design a-1 (hSL-A100) comprising derived and/or modified sequence from LASV(G502-SLE-2009;Clade IV)__AIT17126__GPCmut3 (opt1)
aggagagucccgcagucggcguccagcggcucugcuuguucgugugugugucguugcaggccuuauucaagcuuaccaugggccagaucgugaccuucuuccaggaggucccccacgugaucgaggaggugaugaacaucguccugaucgcccucagcauccuggccgugcugaaggggcucuacaacuucgcgaccugcggccugguggggcugcucacguuccugcugcucugcggccgcuccugcaccaccgggcuguacaagggcgucuacgagcugcagacccucgagcugaacauggagacgcugaacaugaccaugccgcucagcugcaccaagaacaacucccaccacuacaucauggugggcaacgagaccgggcuggagcugacgcucaccaacaccagcaucaucaaccacaaguucugcaaccuguccgacgcccacaagaagaaccuguacgaccacgcccucaugagcaucaucuccaccuuccaccugagcauccccaacuucaaccaguacgaggccauguccugcgacuucaacggcgggaagaucagcgugcaguacaaccugucccacagcuacgccggcgacgcggccgaccacugcgggacggucgccaacggcgugcuccagaccuucaugcggauggccuggggcggguccuacaucgcgcuggacagcggccgcgggcggugggacugcaucaugaccuccuaccaguaccugaucauccagaacaccacgugggaggaccacugccaguucagccgccccucccccaucggcuaccucggccugcugagccagcggacccgcgacaucuacaucucccggcgccgccgggggaccuucaccuggacgcugagcgacagcgagggcaaggacacccccgggggcuacugccucacccgguggaugcugaucgaggccgagcugaagugcuucgggaacaccgccguggccaagugcaacgagaagcacgacgaggaguucugcgacaugcuccgccuguucgacuucaacaagcaggccauccagcggcugaaggcgcccgcccagauguccauccagcucaucaacaaggccgucaacgcccugaucaacgaccagcuggugaugaagaaccaccuccgcgacaucaugggcauccccuacugcaacuacagccgguacugcuaccugaaccacacgaccaccggccgcaccucccugcccaagugcugccucgugagcaacggguccuaccugaacgagacgcacuucagcgacgacaucgagcagcaggccgacaacaugaucaccgagaugcugcagaaggaguacauggagcggcagggcaagaccccgcucgggcuggucgaccuguucguguucuccaccagcuucuaccugaucuccaucuuccuccaccuggugaagaucccgacgcaccgccacaucgucggcaagagcugccccaagccccaccggcugaaccacauggggaucugcuccugcggccucuacaagcagcccggcgugccggugaaguggaagcgcugaggacuagucccuguucccagagcccacuuuuuuuucuuuuuuugaaauaaaauagccugucuuucagaucucaaaggcucuuuucagagccaccaaaaaaaaaaaaaaaaaaaaaaaaaaaaaaaaaaaaaaaaaaaaaaaaaaaaaaaaaaaaaaaaaaaaaaaaaaaaaaaaaaaaaaaaaaaaaaaaaaaaa

SEQ ID NO: 24959 - RNA, 1748 nt, Artificial Sequence
  mRNA product Design a-1 (hSL-A100) comprising derived and/or modified sequence from LASV(G733-SLE-2010;Clade IV)__AIT17154__GPCmut3 (opt1)
aggagagucccgcagucggcguccagcggcucugcuuguucgugugugugucguugcaggccuuauucaagcuuaccaugggccagaucgugaccuucuuccaggaggucccccacgugaucgaggaggugaugaacaucguccugaucgcccucagcauccuggccgugcugaaggggcucuacaacuucgcgaccugcggcaucguggggcuggucuccuuccugcuccugugcggccgcagcugcacgaccucccuguacaaggggguguacgagcuccagacccuggagcugaacauggagacccucaacaugacgaugccgcugagcugcaccaagaacaacucccaccacuacaucauggugggcaacgagaccggccuggagcucacccugacgaacaccagcaucaucaaccacaaguucugcaaccuguccgacgcccacaagaagaaccucuacgaccacgcccugaugagcaucaucuccaccuuccaccugagcauccccaacuucaaccaguacgaggccauguccugcgacuucaacgggggcaagaucagcguccaguacaaccucucccacagcuacgccggggacgcggccaaccacugcggcaccaucgccaacggggugcugcagacguucaugcggauggccuggggcggcuccuacaucgcgcuggacagcgggcgcgaccggugggacugcaucaugaccuccuaccaguaccucaucauccagaacaccaccugggaggaccacugccaguucagccgccccucccccaucggcuaccuggggcugcucagccagcggacgcgcgacaucuacaucagccggcgccgccggggcaccuucaccuggacccucuccgacagcgagggcaaggacacgcccgggggcuacugccugacccgguggaugcugaucgaggccgagcucaagugcuucgggaacaccgccguggccaagugcaacgagaagcacgacgaggaguucugcgacaugcugcgccuguucgacuucaacaagcaggccauccagcggcucaaggcgcccgcccagauguccauccagcugaucaacaaggccgucaacgcccugaucaacgaccagcucaucaugaagaaccaccuccgcgacaucaugggcauccccuacugcaacuacagcaaguacugcuaccugaaccacaccacgaccgggaagaccucccugcccaagugcugccuggugagcaacggcuccuaccugaacgagacccacuucagcgacgacaucgagcagcaggccgacaacaugaucacggagaugcuccagaaggaguacauggagcggcagggcaagaccccgcuggggcugguggaccucuucgucuucuccaccagcuucuaccugaucuccaucuuccugcaccuggugaagaucccgacccaccgccacguggucggcaagagcugccccaagccccaccggcucaaccacauggggaucugcuccugcggccuguacgggcagcccggcgugccggugaaguggaagcgcugaggacuagucccuguucccagagcccacuuuuuuuucuuuuuuugaaauaaaauagccugucuuucagaucucaaaggcucuuuucagagccaccaaaaaaaaaaaaaaaaaaaaaaaaaaaaaaaaaaaaaaaaaaaaaaaaaaaaaaaaaaaaaaaaaaaaaaaaaaaaaaaaaaaaaaaaaaaaaaaaaaaaa

SEQ ID NO: 24960 - RNA, 1748 nt, Artificial Sequence
  mRNA product Design a-1 (hSL-A100) comprising derived and/or modified sequence from MOPV/LASV reassortant(IGS-1;Clade IV)__AFY05576__GPCmut3 (opt1)
aggagagucccgcagucggcguccagcggcucugcuuguucgugugugugucguugcaggccuuauucaagcuuaccaugggccagaucgugaccuucuuccaggaggucccccacgugaucgaggaggugaugaacaucguccugaucgcccucagcgugcuggccgugcugaaggggcucuacaacuucgcgaccugcggccuggucgggcuggugacguuccuccugcugugcggccgcuccugcaccaccagccucuacaaggggguguacgagcugcagacccuggagcucaacauggagacgcugaacaugaccaugccgcuguccugcaccaagaacaacagccaccacuacaucauggucggcaacgagaccggccucgagcugacgcugaccaacaccuccaucaucaaccacaaguucugcaaccucagcgacgcccacaagaagaaccuguacgaccacgcccugauguccaucaucagcaccuuccaccucuccauccccaacuucaaccaguacgaggccaugagcugcgacuucaacgggggcaagaucuccgugcaguacaaccugagccacuccuacgccggggacgcggccaaccacugcggcacgguggccaacgggguccugcagaccuucaugcggauggccuggggcggcagcuacaucgcgcucgacuccgggcgcggcaacugggacugcaucaugaccagcuaccaguaccugaucauccagaacaccacgugggaggaccacugccaguucucccggcccagccccaucggguaccugggccuccugucccagcgcacccgggacaucuacaucagccgccggcgccggggcaccuucaccuggacgcugagcgacuccgagggggaggacaccccgggcggguacugccugacccgcuggaugcucaucgaggccgagcugaagugcuucggcaacaccgccguggccaagugcaacgagaagcacgacgaggaguucugcgacaugcugcggcuguucgacuucaacaagcaggccauccagcgccugaaggcgcccgcccagaugagcauccagcugaucaacaaggccgugaacgcccucaucaacgaccagcugaucaugaagaaccaccuccgggacaucauggggauccccuacugcaacuacuccaaguacugcuaccucaaccacacgaccaccggccgcaccagccugcccaagugcugccuggucuccaacggcagcuaccucaacgagacgcacuucuccgacgacaucgagcagcaggccgacaacaugaucaccgagaugcugcagaaggaguacauggagcggcaggggaagacgccccugggccucguggaccuguucguguucagcaccuccuucuaccugaucagcaucuuccugcaccucgucaagaucccgacccaccgccacaucguggggaaguccugccccaagccccaccggcugaaccacaugggcaucugcagcugcgggcuguacaagcagcccggcgugccggucaaguggaagcgcugaggacuagucccuguucccagagcccacuuuuuuuucuuuuuuugaaauaaaauagccugucuuucagaucucaaaggcucuuuucagagccaccaaaaaaaaaaaaaaaaaaaaaaaaaaaaaaaaaaaaaaaaaaaaaaaaaaaaaaaaaaaaaaaaaaaaaaaaaaaaaaaaaaaaaaaaaaaaaaaaaaaaa

SEQ ID NO: 24961 - RNA, 1748 nt, Artificial Sequence
  mRNA product Design a-1 (hSL-A100) comprising derived and/or modified sequence from LASV(LM765-SLE-2012;Clade IV)__AIT17814__GPCmut3 (opt1)
aggagagucccgcagucggcguccagcggcucugcuuguucgugugugugucguugcaggccuuauucaagcuuaccaugggccagaucgugaccuucuuccaggaggucccccacgugaucgaggaggugaugaacaucguccugaucgcccucagcauccuggccgugcugaaggggcucuacaacuucgcgaccugcggccugguggggcuggucacguuccuccugcugugcggccgcuccugcaccaccagccucuacaaggggguguacgagcugcagacccuggagcucaacauggagacgcugaacaugaccaugccgcuguccugcaccaagaacaacagccaccacuacaucauggugggcaacgagaccggccucgagcugacgcugaccaacaccuccaucaucgaccacaaguucugcaaccucagcgacgcccaccggaagaaccuguacgaccacgcccugauguccaucaucagcaccuuccaccucuccauccccaacuucaaccaguacgaggccaugagcugcgacuucaacgggggcaagaucuccguccaguacaaccugagccacuccuacgccaaggacgcggccgaccacugcgggacgguggccaacggcgugcugcagaccuucaugcgcauggccuggggcgggagcuacaucgcgcucgacuccggccgggggcgcugggacugcaucaugaccagcuaccaguaccugaucauccagaacaccacgugggaggaccacugccaguucucccggcccagccccaucggcuaccuggggcuccugucccagcgcacccgggacaucuacaucagccgccggcgccggggcaccuucaccuggacgcugagcgacuccgagggcaaggacacccccgggggcuacugccugacccgcuggaugcucaucgaggccgagcugaagugcuucgggaacaccgccgucgccaagugcaacgagaagcacgacgaggaguucugcgacaugcugcggcuguucgacuucaacaagcaggccauccagcgccugaaggcgcccgcccagaugagcauccagcugaucaacaaggccgugaacgcccucaucaacgaccagcugaucaugaagaaccaccuccgggacaucaugggcauccccuacugcaacuacuccaaguacugcuaccucaaccacacgaccaccgggaagaccagccugcccaagugcugccugguguccaacggcagcuaccucaacgagacgcacuucuccgacgacaucgagcagcaggccgacaacaugaucaccgagaugcugcagaaggaguacauggagcgccagggcaagaccccgcuggggcucgucgaccuguucguguucagcaccuccuucuaccugaucagcaucuuccugcaccucgugaagaucccgacgcaccggcacaucgucggcaagcccugccccaagccccaccgccugaaccacauggggaucugcuccugcggccuguacaagcagccgggggugcccgugaaguggaagcggugaggacuagucccuguucccagagcccacuuuuuuuucuuuuuuugaaauaaaauagccugucuuucagaucucaaaggcucuuuucagagccaccaaaaaaaaaaaaaaaaaaaaaaaaaaaaaaaaaaaaaaaaaaaaaaaaaaaaaaaaaaaaaaaaaaaaaaaaaaaaaaaaaaaaaaaaaaaaaaaaaaaaa

SEQ ID NO: 24962 - RNA, 1748 nt, Artificial Sequence
  mRNA product Design a-1 (hSL-A100) comprising derived and/or modified sequence from LASV(LM776-SLE-2012;Clade IV)__AIT17824__GPCmut3 (opt1)
aggagagucccgcagucggcguccagcggcucugcuuguucgugugugugucguugcaggccuuauucaagcuuaccaugggccagaucgugaccuucuuccaggaggucccccacgugaucgaggaggugaugaacaucguccugaucgcccucagcauccuggccgugcugaaggggcucuacaacuucgcgaccugcggccugguggggcuggucacguuccuccugcugugcggccgcuccugcaccaccagcguguacaaggggguguacgagcuccagacccuggagcugaacauggagacgcucaacaugaccaugccgcuguccugcaccaagaacaacagccaccacuacaucauggucggcaacgagaccggccuggagcucacgcugaccaacaccuccaucaucaaccacaaguucugcaaccugagcgacgcccacaagaagaaccucuacgaccacgcccugauguccaucaucagcaccuuccaccuguccauccccaacuucaaccaguacgaggccaugagcugcgacuucaacgggggcaagaucuccgugcaguacaaccucagccacuccuacgccggggacgcggccaaccacugcggcacgguggccaacgggguccugcagaccuucaugcggauggccuggggcggcagcuacaucgcgcuggacuccgggcacggcaagugggacugcaucaugaccagcuaccaguaccucaucauccagaacaccacgugggaggaccacugccaguucucccgccccagccccaucggguaccugggccugcucucccagcggacccgcgacaucuacaucagccggcgccgccggggcaccuucaccuggacgcucagcgacuccgaggggaaggacaccccgggcggguacugccugacccgguggaugcugaucgaggccgagcucaagugcuucggcaacaccgccguggccaagugcaacgagaagcacgacgaggaguucugcgacaugcugcgccuguucgacuucaacaagcaggccauccagcggcucaaggcgcccgcccagaugagcauccagcugaucaacaaggccgugaacgcccugaucaacgaccagcucaucaugaagaaccaccuccgcgacaucauggggauccccuacugcaacuacuccaaguacugcuaccugaaccacacgaccaccggcaagaccagccugcccaagugcugccuggucuccaacggcagcuaccugaacgagacgcacuucuccgacgacaucgagcagcaggccgacaacaugaucaccgagaugcuccagaaggaguacauggagcggcaggggaagacgccccugggccugguggaccucuucguguucagcaccuccuucuaccugaucagcaucuuccugcaccuggucaagaucccgacccaccgccacaucguggggaaguccugccccaagccccaccggcucaaccacaugggcaucugcagcugcgggcuguacaagcagcccggcgugccgguccgcuggaagcggugaggacuagucccuguucccagagcccacuuuuuuuucuuuuuuugaaauaaaauagccugucuuucagaucucaaaggcucuuuucagagccaccaaaaaaaaaaaaaaaaaaaaaaaaaaaaaaaaaaaaaaaaaaaaaaaaaaaaaaaaaaaaaaaaaaaaaaaaaaaaaaaaaaaaaaaaaaaaaaaaaaaaa

SEQ ID NO: 24963 - RNA, 1748 nt, Artificial Sequence
  mRNA product Design a-1 (hSL-A100) comprising derived and/or modified sequence from LASV(Mad39;Clade IV)__ANH09722__GPCmut3 (opt1)
aggagagucccgcagucggcguccagcggcucugcuuguucgugugugugucguugcaggccuuauucaagcuuaccaugggccagaucgugaccuucuuccaggaggucccccacgugaucgaggaggugaugaacaucguccugaucgcccucagcauccuggccgugcugaaggggcucuacaacguggcgaccugcggccugaucgggcuggucacguuccuccugcugugcggccgcuccugcaccaccacccucuacaaggggguguacgagcugcaggcccuggagcucaacauggagacgcugaacaugaccaugccgcugagcugcaccaagaacaacucccaccacuacauccgggugggcaacgagaccggccucgagcugacgcugaccaacaccagccucaucaaccacaaguucugcaaccuguccgacgcccacaagaagaaccuguacgaccacgcccucaugagcaucaucuccaccuuccaccugagcauccccaacuucaaccaguacgaggccauguccugcgacuucaacgacgggaagaucagcguccaguacaaccugucccacacguacgcgggcgacaccgccaaccacugcgggaccguggccaacggcgugcuccagaccuucaugcgcauggccuggggcgggagcuacaucgcgcuggacuccggccgcgggggcugggacugcaucaugacgagcuaccaguaccugaucauccagaacaccaccugggaggaccacugccaguucucccggcccagccccaucggguaccucggccugcugucccagcggacccgcgacaucuacaucagccggcgccgccggggcacguucaccuggacccuguccgacagcgaggggaaggacaccccgggcggguacugccucacgcgguggaugcugaucgaggccgagcugaagugcuucggcaacaccgccgucgccaagugcaacgagaagcacgacgaggaguucugcgacaugcuccgccuguucgacuucaacaagcaggccauccagcggcugaaggcgcccgcccagaugagcauccagcucaucaacaaggccgugaacgcccugaucaacgaccagcugaucaugaagaaccaccuccgcgacaucauggggauccccuacugcaacuacuccaaguacugcuaccugaaccacaccgugaccggcaagacgagccugcccaagugcugccucgucuccaacggcagcuaccugaacgagacccacuucuccgacgacaucgagcagcaggccgacaacaugaucaccgagaugcugcagaaggaguacauggagcggcaggggaagacgccccucggccugguggaccuguucguguucagcaccuccuucuaccugaucagcaucuuccuccaccuggucaagaucccgacccaccgccacgugguggggaagcccugccccaagccccaccggcugaaccacaugggcaucugcuccugcggguucuacaagcagccgggcguccccgugcgcuggaagcggugaggacuagucccuguucccagagcccacuuuuuuuucuuuuuuugaaauaaaauagccugucuuucagaucucaaaggcucuuuucagagccaccaaaaaaaaaaaaaaaaaaaaaaaaaaaaaaaaaaaaaaaaaaaaaaaaaaaaaaaaaaaaaaaaaaaaaaaaaaaaaaaaaaaaaaaaaaaaaaaaaaaaa

SEQ ID NO: 24964 - RNA, 1748 nt, Artificial Sequence
  mRNA product Design a-1 (hSL-A100) comprising derived and/or modified sequence from LASV(Z0947-SLE-2011;Clade IV)__AIT17840__GPCmut3 (opt1)
aggagagucccgcagucggcguccagcggcucugcuuguucgugugugugucguugcaggccuuauucaagcuuaccaugggccagaucgugaccuucuuccaggaggucccccacgugaucgaggaggugaugaacaucguccugaucgcccucagcauccuggccgugcugaaggggcucuacaacuucgcgaccugcggccugguggggcuggucacguuccuccugcugugcggccgcuccugcaccaucagccucuacaaggggguguacgagcugcagacccuggagcucaacauggagacccugaacaugacgaugccgcuguccugcaccaagaacaacagccaccacuacaucauggugggcaacgagaccggccucgagcugacccugacgaacaccuccaucaucaaccacaaguucugcaaccucagcgacgcccacaagaagaaccuguacgaccacgcccugauguccaucaucagcaccuuccaccucuccauccccaacuucaaccaguacgaggccaugagcugcgacuucaacgggggcaagaucuccguccaguacaaccugagccacuccuacgccggggacgcggccaaccacugcggcaccguggccaacggggugcugcagacguucaugcggauggccuggggcggcagcuacaucgcgcucgacuccgggcgcgaccggugggacugcaucaugaccagcuaccaguaccugaucauccagaacaccaccugggaggaccacugccaguucucccgccccagccccaucggcuaccuggggcuccugucccagcggacgcgcgacaucuacaucagccggcgccgccggggcaccuucaccuggacccugagcgacuccgagggcaaggacacgcccgggggcuacugccugacccgguggaugcucaucgaggccgagcugaagugcuucgggaacaccgccgucgccaagugcaacgagaagcacgacgaggaguucugcgacaugcugcgccucuucgacuucaacaagcaggccauccagcggcugaaggcgcccgcccagaugagcauccagcugaucaacaaggccgugaacgcccucaucaacgaccagcugaucaugaagaaccaccuccgcgacaucaugggcauccccuacugcaacuacuccaaguacugcuaccugaaccacaccacgaccgggaagaccagccugcccaagugcugccugguguccaacggcagcuaccucaacgagacccacuucuccgacgacaucgagcagcaggccgacaacaugaucacggagaugcugcagaaggaguacauggagcggcagggcaagaccccgcuggggcucgucgaccuguucguguucagcaccuccuucuaccugaucagcaucuuccugcaccucgugaagaucccgacccaccgccacaucgucggcaagcccugccccaagccccaccggcugaaccacauggggaucugcuccugcggccuguacaagcagccgggggugcccgugaaguggaagcgcugaggacuagucccuguucccagagcccacuuuuuuuucuuuuuuugaaauaaaauagccugucuuucagaucucaaaggcucuuuucagagccaccaaaaaaaaaaaaaaaaaaaaaaaaaaaaaaaaaaaaaaaaaaaaaaaaaaaaaaaaaaaaaaaaaaaaaaaaaaaaaaaaaaaaaaaaaaaaaaaaaaaaa

SEQ ID NO: 24965 - RNA, 1748 nt, Artificial Sequence
  mRNA product Design a-1 (hSL-A100) comprising derived and/or modified sequence from LASV(Josiah;Clade IV)__NP_694870__GPCmut3 (opt1)
aggagagucccgcagucggcguccagcggcucugcuuguucgugugugugucguugcaggccuuauucaagcuuaccaugggccagaucgugaccuucuuccaggaggucccccacgugaucgaggaggugaugaacaucguccugaucgcccucagcgugcuggccgugcugaaggggcucuacaacuucgcgaccugcggccuggucgggcuggugacguuccuccugcugugcggccgcuccugcaccaccagccucuacaaggggguguacgagcugcagacccuggagcucaacauggagacgcugaacaugaccaugccgcuguccugcaccaagaacaacagccaccacuacaucauggucggcaacgagaccggccucgagcugacgcugaccaacaccuccaucaucaaccacaaguucugcaaccucagcgacgcccacaagaagaaccuguacgaccacgcccugauguccaucaucagcaccuuccaccucuccauccccaacuucaaccaguacgaggccaugagcugcgacuucaacgggggcaagaucuccgugcaguacaaccugagccacuccuacgccggggacgcggccaaccacugcggcacgguggccaacgggguccugcagaccuucaugcggauggccuggggcggcagcuacaucgcgcucgacuccgggcgcggcaacugggacugcaucaugaccagcuaccaguaccugaucauccagaacaccacgugggaggaccacugccaguucucccggcccagccccaucggguaccugggccuccugucccagcgcacccgggacaucuacaucagccgccggcgccggggcaccuucaccuggacgcugagcgacuccgaggggaaggacaccccgggcggguacugccucacccgcuggaugcugaucgaggccgagcugaagugcuucggcaacaccgccguggccaagugcaacgagaagcacgacgaggaguucugcgacaugcuccggcuguucgacuucaacaagcaggccauccagcgccugaaggcgcccgcccagaugagcauccagcucaucaacaaggccgugaacgcccugaucaacgaccagcugaucaugaagaaccaccuccgggacaucauggggauccccuacugcaacuacuccaaguacugcuaccugaaccacacgaccaccggccgcaccagccugcccaagugcugccucgucuccaacggcagcuaccugaacgagacgcacuucuccgacgacaucgagcagcaggccgacaacaugaucaccgagaugcugcagaaggaguacauggagcggcaggggaagaccccgcucggccugguggaccuguucguguucagcaccuccuucuaccugaucagcaucuuccuccaccuggucaagauccccacgcaccgccacaucguggggaaguccugccccaagccccaccggcugaaccacaugggcaucugcagcugcgggcucuacaagcagccgggcgugcccgucaaguggaagcgcugaggacuagucccuguucccagagcccacuuuuuuuucuuuuuuugaaauaaaauagccugucuuucagaucucaaaggcucuuuucagagccaccaaaaaaaaaaaaaaaaaaaaaaaaaaaaaaaaaaaaaaaaaaaaaaaaaaaaaaaaaaaaaaaaaaaaaaaaaaaaaaaaaaaaaaaaaaaaaaaaaaaaa

SEQ ID NO: 24966 - RNA, 1745 nt, Artificial Sequence
  mRNA product Design a-1 (hSL-A100) comprising derived and/or modified sequence from LASV(LP;Clade I)__AAF86701__GPCmut3 (opt1)
aggagagucccgcagucggcguccagcggcucugcuuguucgugugugugucguugcaggccuuauucaagcuuaccaugggccagaucaucaccuucuuccaggaggugccccacgucaucgaggaggugaugaacaucgugcugaucgcccucagccugcuggccauccucaaggggcuguacaacaucgcgaccugcggcaucaucgggcuggucgccuuccucuuccugugcggcaaguccugcagccugacgcucaagggcggguacgagcugcagacccuggagcucaacauggagacccugaacaugaccaugccgcuguccugcacgaagaacagcucccaccacuacauccgcgugggcaacgagaccgggcucgagcugacccugaccaacacgagcaucaucaaccacaaguucugcaaccucuccgacgcccacaagaagaaccuguacgaccacgcccugaugagcaucaucuccaccuuccaccucagcauccccaacuucaaccaguacgaggccauguccugcgacuucaacggcgggaagaucagcgugcaguacaaccugucccacagcuacgcgggcgacgccgccgagcacugcgggaccgucgccaacggcgugcugcagaccuucaugcggauggcguggggcgggcgcuacaucgcccucgacuccggcaaggggaacugggacugcaucaugacgagcuaccaguaccugaucauccagaacaccaccugggaggaccacugccaguucucccggcccagccccaucggcuaccugggccuccugucccagcgcacccgggacaucuacaucagccgccggcgccgggggacguucaccuggacccugagcgacuccgagggcaacgagacccccgggggcuacugccucacgcgcuggaugcugaucgaggccgagcugaagugcuucgggaacaccgccguggccaagugcaacgagaagcacgacgaggaguucugcgacaugcuccggcuguucgacuucaacaagcaggcgauccgccggcugaaggccccggcccagaugagcauccagcucaucaacaaggccgucaacgcccugaucaacgaccagcugaucaugaagaaccaccuccgcgacaucaugggcauccccuacugcaacuacuccaaguacugcuaccugaaccacaccagcuccggccggaccagccugcccaagugcugccucaucuccaacgggagcuaccugaacgagacgcaguucuccgacgacaucgagcagcaggcggacaacaugaucaccgagaugcugcagaaggaguacaucgagcgccagggcaagaccccgcucgggcugguggacaucuucaucuucagcaccuccuucuaccugaucagcaucuuccugcaccucaucaagauccccacgcaccggcacaucgugggcaagcccugccccaagccgcaccgccugaaccacaugggggucugcuccugcggccuguacaagcaccccggcgugcccaccaaguggaagcggugaggacuagucccuguucccagagcccacuuuuuuuucuuuuuuugaaauaaaauagccugucuuucagaucucaaaggcucuuuucagagccaccaaaaaaaaaaaaaaaaaaaaaaaaaaaaaaaaaaaaaaaaaaaaaaaaaaaaaaaaaaaaaaaaaaaaaaaaaaaaaaaaaaaaaaaaaaaaaaaaaaaaa

SEQ ID NO: 24967 - RNA, 1745 nt, Artificial Sequence
  mRNA product Design a-1 (hSL-A100) comprising derived and/or modified sequence from LASV(803213;Clade II)__AAF86703__GPCmut3 (opt1)
aggagagucccgcagucggcguccagcggcucugcuuguucgugugugugucguugcaggccuuauucaagcuuaccaugggccagaucaucaccuucuuccaggaggugccccacgucaucgaggaggugaugaacaucgugcugaucgcccucagccugcuggccauccucaaggggaucuacaacgucgcgaccugcggccuguucgggcugaucuccuuccuccugcugugcggccgcagcugcuccgugacguacaaggggguguacgagcuccagacccuggagcugaacauggccaaccucaacaugaccaugccgcugagcugcaccaagaacaacucccaccacuacaucauggucggcaacgagacgggccuggagcucacccugaccaacaccagcaucaucaaccacaaguucugcaaccuguccgacgcccacaagaagaaccucuacgaccacgcccugaugagcaucaucuccacguuccaccugagcauccccaacuucaaccaguacgaggccauguccugcgacuucaacgggggcaagaucagcgugcaguacaaccucucccacagcuucgcgguggacgccgccaaccacugcgggaccaucgccaacggcguccugcagaccuucaugcggauggcguggggcggguccuacaucgcccuggacagcggcaaggggaacugggacugcaucaugaccuccuaccaguaccucaucauccagaacacgaccugggaggaccacugccaguucagccgccccucccccaucggcuaccuggggcugcucagccagcggacccgcgacaucuacaucagccggcgccggcgcggcaccuucacguggacccuguccgacagcgagggcaacgaggcccccgggggcuacugccugacccgguggaugcucaucgaggccgagcugaagugcuucgggaacaccgccguggcgaagugcaacgagaagcacgacgaggaguucugcgacaugcugcgccucuucgacuucaacaagcaggccaucaagcggcugaagacgccggcccagauguccauccagcugaucaacaaggccgugaacgcccucaucaacgaccagcugaucaugaagaaccaccuccgcgacaucaugggcauccccuacugcaacuacagccgguacugcuaccugaaccacaccgucaccgggaagaccucccugccccgcugcugccuggugagcaacggcuccuaccucaacgagacgcacuucagcgacgacaucgagcagcaggcggacaacaugaucaccgagaugcugcagaaggaguacauggaccggcagggcaagaccccgcuggggcucguggaccuguucgucuucuccaccagcuucuaccugaucuccaucuuccugcaccucgugaagauccccacgcaccgccacaucgugggcaagcccugccccaagccgcaccggcugaaccacauggggaucugcagcugcggccuguacaagcaccccgggguccccgugaaguggaagcgcugaggacuagucccuguucccagagcccacuuuuuuuucuuuuuuugaaauaaaauagccugucuuucagaucucaaaggcucuuuucagagccaccaaaaaaaaaaaaaaaaaaaaaaaaaaaaaaaaaaaaaaaaaaaaaaaaaaaaaaaaaaaaaaaaaaaaaaaaaaaaaaaaaaaaaaaaaaaaaaaaaaaaa

SEQ ID NO: 24968 - RNA, 1745 nt, Artificial Sequence
  mRNA product Design a-1 (hSL-A100) comprising derived and/or modified sequence from LASV(GA391;Clade III)__CAA36645__GPCmut3 (opt1)
aggagagucccgcagucggcguccagcggcucugcuuguucgugugugugucguugcaggccuuauucaagcuuaccaugggccagaucgugaccuucuuccaggaggucccccacgugaucgaggaggugaugaacaucguccugaucgcccucagcauccuggccauccugaaggggcucuacaacguggcgaccugcggccugaucgggcuggugacguuccuccugcuguccggccgcagcugcucccucaucuacaaggggaccuacgagcugcagacccuggagcucaacauggagacccugaacaugacgaugccgcugagcugcaccaagaacaacucccaccacuacauccgggucggcaacgagaccggccucgagcugacccugacgaacaccagcauccucaaccacaaguucugcaaccuguccgacgcccacaagcgcaaccuguacgaccacagccucauguccaucaucagcaccuuccaccuguccauccccaacuucaaccaguacgaggccaugagcugcgacuucaacgggggcaagaucaccgugcaguacaaccugucccacagcuucgccguggacgccgcggggcacugcggcacgcucgccaacgggguccugcagaccuucaugcggauggccuggggcggcuccuacaucgcccuggacagcgggcgcggcaacugggacugcaucaugaccuccuaccaguaccucaucauccagaacaccacgugggacgaccacugccaguucagccggcccucccccaucggguaccugggccugcucagccagcgcacccgggacaucuacaucagccgccggcgccggggcaccuucaccuggacgcuguccgacagcgaggggaacgagaccccgggcggguacugccugacccgcuggaugcucaucgaggcggagcugaagugcuucggcaacaccgccguggccaagugcaacgagaagcacgacgaggaguucugcgacaugcugcggcuguucgacuucaacaagcaggccauccgccggcugaagacgcccgcccagauguccauccagcugaucaacaaggcggugaacgcccucaucaacgaccagcugaucaugaagaaccaccuccgcgacaucauggggauccccuacugcaacuacagccgguacugcuaccucaaccacaccuccaccggcaagaccagccugccccgcugcugccugaucuccaacggcagcuaccucaacgagacgaaguucuccgacgacaucgagcagcaggccgacaacaugaucaccgagaugcugcagaaggaguacaucgaccggcaggggaagaccccgcugggccuggucgaccucuucguguucagcaccuccuucuaccugaucagcaucuuccugcaccucgugaagauccccacgcaccgccacaucgucgggaagcccugccccaagccgcaccggcugaaccacaugggcaucugcuccugcgggcuguacaagcagcccggcgugcccgugcgcuggaagcgcugaggacuagucccuguucccagagcccacuuuuuuuucuuuuuuugaaauaaaauagccugucuuucagaucucaaaggcucuuuucagagccaccaaaaaaaaaaaaaaaaaaaaaaaaaaaaaaaaaaaaaaaaaaaaaaaaaaaaaaaaaaaaaaaaaaaaaaaaaaaaaaaaaaaaaaaaaaaaaaaaaaaaa

SEQ ID NO: 24969 - RNA, 1748 nt, Artificial Sequence
  mRNA product Design a-1 (hSL-A100) comprising derived and/or modified sequence from LASV(AV;Clade V)__CCA30314__GPCmut3 (opt1)
aggagagucccgcagucggcguccagcggcucugcuuguucgugugugugucguugcaggccuuauucaagcuuaccaugggccagaucgugaccuucuuccaggaggucccccacgugaucgaggaggugaugaacaucguccugaucgcccucagcauccuggccgugcugaaggggcucuacaacaucgcgaccugcggccugaucgggcugaucacguuccuccugcugugcggccgcuccugcagcuccaaccucuacaaggggguguacgagcugcagagccuggaccucaacauggagacccugaacaugaccaugccgcuguccugcaccaagaacaacagccaccacuacauccgggucggcaacgacacgggccucgagcugacccugaccaacaccuccauccucaaccacaaguucugcaaccugagcgacgcccacaagaaggaccuguacgaccacgcccucauguccaucaucagcacguuccaccuguccauccccaacuucaaccaguacgaggccaugagcugcgacuucaacgggggcaagaucuccgugcaguacaaccugagccacuccuacgccaucgacgcggccaaccacugcgggaccguggccaacggcauccuccagaccuucaugcgcauggccuggggcgggagcuacaucgcgcuggacuccggccgggggaacugggacugcaucaugaccagcuaccaguaccugaucauccagaacacgaccugggagaaccacugccaguucucccgccccagccccaucggcuaccucgggcugcugagccagcggacccgcgacaucuacaucucccggcgccggcgcggcaccuucacguggacccucagcgacuccgagggcaacgccacccccgggggcuacugccugacccgguggaugcugaucgaggccgagcucaagugcuucgggaacacggccgucgccaagugcaacgagaagcacgacgaggaguucugcgacaugcugcgccuguucgacuucaacaagcaggcgaucagccggcucaaguccccggcccagaugagcauccagcugaucaacaaggccgugaacgcccugaucaacgaccagcucaucaugaagaaccaccuccgcgacaucaugggcauccccuacugcaacuacuccaaguacugcuaccugaaccacaccaucaccgggaagaccagccugcccaagugcugccugguguccaacggcagcuaccugaacgagacgcacuucuccgacgacaucgagcagcaggccgacaacaugaucaccgagaugcuccagaaggaguacauggagcggcagggcaagaccccgcuggggcuggucgaccuguucguguucagcaccuccuucuaccucaucagcaucuuccugcgccuggugaagauccccacgcaccggcacaucgucggcaagcccugccccaagccgcaccgccucaaccacauggggaucugcuccugcggccuguacaagcagcccggggugcccgugcgguggaagcgcugaggacuagucccuguucccagagcccacuuuuuuuucuuuuuuugaaauaaaauagccugucuuucagaucucaaaggcucuuuucagagccaccaaaaaaaaaaaaaaaaaaaaaaaaaaaaaaaaaaaaaaaaaaaaaaaaaaaaaaaaaaaaaaaaaaaaaaaaaaaaaaaaaaaaaaaaaaaaaaaaaaaaa

SEQ ID NO: 24970 - RNA, 1745 nt, Artificial Sequence
  mRNA product Design a-1 (hSL-A100) comprising derived and/or modified sequence from LASV(Togo/2016/7082;Clade VI)__AMR44577__GPCmut3 (opt1)
aggagagucccgcagucggcguccagcggcucugcuuguucgugugugugucguugcaggccuuauucaagcuuaccaugggccagaucaucaccuucuuccaggaggugccccacgucaucgaggaggugaugaacaucgugcugaucgcccucagccugcuggccauccucaagggggucuacaacguggcgaccugcggcaucaucgggcuggugacguuccuguuccucugcggccgcuccugcagccugaucuacaagggguccuacgagcugcagacccucgagcugaacauggagacccugaacaugaccaugccgcucagcugcacgaagaacuccagccaccacuacauccgggucggcaacgagaccggccuggagcugacccucaccaacacguccaucaucaaccacaaguucugcaaccugagcgacgcccacaagcgcaaccuguacgaccacgcccucauguccauccugagcaccuuccaccuguccauccccaacuucaaccaguacgaggccaugagcugcgacuucaacgggggcaagaucuccgugcaguacaaccucagccacgccuacgcgguggacgccgccgagcacugcgggaccgucgccaacggcgugcugcagaccuucaugcggauggcguggggcggguccuacaucgcccuggacagcggccgcgggaacugggacugcaucaugacguccuaccaguaccucaucauccagaacaccaccugggaggaccacugccaguucagccggcccucccccaucggcuaccuggggcugcucagccagcgcacccgggacaucuacaucagccgccggcgccggggcacguucaccuggacccuguccgacagcgagggcaacgagacccccgggggcuacugccugacgcgcuggaugcucaucgaggccgagcugaagugcuucgggaacaccgccguggccaagugcaacgagaagcacgacgaggaguucugcgacaugcugcggcuguucgacuucaacaagcaggcgauccagcgccugaaguccccggcccagaugagcauccagcugaucaacaaggccgucaacgcccucaucaacgaccagcugaucaugaagaaccaccuccgggacaugaugggcauccccuacugcaacuacuccaaguacugcuaccucaaccacaccagcuccgggcgcaccagccugcccaagugcugccugguguccaacggcagcuaccucaacgagacgcacuucuccgacgacaucgagcagcaggccgacaacaugaucaccgagaugcugcagaaggaguacaucgaccggcagggcaagaccccgcuggggcucguggaccuguucgucuucagcaccuccuucuaccugaucagcaucuuccugcaccucaucaagauccccacgcaccgccacaucgugggcaagcccugccccaagccgcaccggcugaaccacauggggaucugcuccugcggccuguacaagcagcccggggugcccacccgcuggaagcggugaggacuagucccuguucccagagcccacuuuuuuuucuuuuuuugaaauaaaauagccugucuuucagaucucaaaggcucuuuucagagccaccaaaaaaaaaaaaaaaaaaaaaaaaaaaaaaaaaaaaaaaaaaaaaaaaaaaaaaaaaaaaaaaaaaaaaaaaaaaaaaaaaaaaaaaaaaaaaaaaaaaaa

SEQ ID NO: 24971 - RNA, 1745 nt, Artificial Sequence
  mRNA product Design a-1 (hSL-A100) comprising derived and/or modified sequence from LASV(KAK-428;Clade n.d. (VII))__ANH09740__GPCmut3 (opt1)
aggagagucccgcagucggcguccagcggcucugcuuguucgugugugugucguugcaggccuuauucaagcuuaccaugggccagaucgugaccuucuuccaggaggucccccacgugaucgaggaggugaugaacaucguccugaucgcccucagccugcuggccauccucaaggggcuguacaacuucgcgaccugcggcgugaucgggcugaucacguuccuccugcugugcggccgcuccugcagcgccaccuacaaggggcaguacgagcuccagacccuggagcugaacauggagucccucaacaugaccaugccgcugagcugcacgaagaacaacucccaccacuacauccgggccggcaacaacaccggccuggagcucacccugaccaacacgagcaucaucucccacaaguucugcaaccugagcgacgcccacaagaagaaccucuacgaccacacccugauguccaucaucaccaccuuccaccugagcauccccaacuucaaccaguacgaggccauguccugcgacuucaacgggggcaagaucagcauccaguacaaccucucccacagcuacgcgggggacgccgcccagcacugcggcacgguggccaacgggguccugcagaccuucaugcgcauggcguggggcggcuccuaccuggcccucgacagcgggcggcgcggcugggacugcaucaucuccagcuaccaguaccugaucauccagaacaccaccugggacgaccacugccaguucucccggcccagccccaucggguaccugggcuucgugagccagaagacgcgcgacaucuacaucucccggcgccggcgcggcaccuucaccuggacccucagcgacuccgaggggcacgacaugccgggcggguacugccugacgcgguggaugcugaucgaggccgaccucaagugcuucggcaacaccgccguggccaagugcaacgagaagcacgacgaggaguucugcgacauguggcgccuguucgacuucaacaagcaggcgauccagcggcugaaggcccccgcccagaugaacauccagcucaucaacaaggccgucaacgcccugaucaacgaccagcugaugaugaagaaccaccuccgcgacaucauggggauccccuacugcaacuacagcaaguucugcuaccugaacaacaccaccacgggccggaccucccugccccgcugcugccucaucagcaacggcuccuaccugaacgagacccacuucagcgacgacaucgagcagcaggcggacaacaugaucaccgagaugcugcagaaggaguacauggaccggcaggggaagacgccgcucggccugguggaccuguucguguucuccaccagcuucuaccucaucaccaucuuccugcaccuggucaagauccccacccaccgccacaucguggggaagcccugccccaagccgcaccggcugaaccacaugggcaucugcuccugcgggcucuacaagcagcccggcgugcccguccgcuggaagcggugaggacuagucccuguucccagagcccacuuuuuuuucuuuuuuugaaauaaaauagccugucuuucagaucucaaaggcucuuuucagagccaccaaaaaaaaaaaaaaaaaaaaaaaaaaaaaaaaaaaaaaaaaaaaaaaaaaaaaaaaaaaaaaaaaaaaaaaaaaaaaaaaaaaaaaaaaaaaaaaaaaaaa

SEQ ID NO: 24972 - RNA, 1745 nt, Artificial Sequence; identical to SEQ ID NO: 24966
  mRNA product Design a-1 (hSL-A100) comprising derived and/or modified sequence from LASV(Pinneo-NIG-1969;Clade I)__AIT17836__GPCmut3 (opt1)

SEQ ID NO: 24973 - RNA, 1745 nt, Artificial Sequence
  mRNA product Design a-1 (hSL-A100) comprising derived and/or modified sequence from LASV(ISTH0009-NIG-2011;Clade II)__AIT17404__GPCmut3 (opt1)
aggagagucccgcagucggcguccagcggcucugcuuguucgugugugugucguugcaggccuuauucaagcuuaccaugggccagaucaucaccuucuuccaggaggugccccacgucaucgaggaggugaugaacaucgugcugaucgcccucagccugcuggccauccucaaggggaucuacaacgucgcgaccugcggccuguucgggcugguguccuuccuccugcugugcggccgcagcugcuccacgaccuacaaggggguguacgagcuccagacccuggagcuggacauggccagccucaacaugaccaugccgcuguccugcacgaagaacaacagccaccacuacaucauggucggcaacgagaccggccuggagcucacccugaccaacacguccaucaucaaccacaaguucugcaaccugagcgacgcccacaagaagaaccucuacgaccacgcccugauguccaucaucagcaccuuccaccuguccauccccaacuucaaccaguacgaggccaugagcugcgacuucaacgggggcaagaucuccgugcaguacaaccucagccacgcguacgccguggacgccgccaaccacugcgggaccaucgcgaacggcguccugcagaccuucaugcggauggccuggggcggguccuacaucgcccuggacagcggcaagggguccugggacugcaucaugacgagcuaccaguaccucaucauccagaacaccaccugggaggaccacugccaguucucccgccccagccccaucggcuaccuggggcugcucagccagcggacccgcgacaucuacaucucccggcgccggcgcggcacguucaccuggacccugagcgacuccgagggcaacgagacccccgggggcuacugccugacgcgguggaugcucaucgaggccgagcugaagugcuucgggaacaccgccguggcgaagugcaacgagaagcacgacgaggaguucugcgacaugcugcgccucuucgacuucaacaagcaggccauccggcgccugaagaccccggcccagaugagcauccagcugaucaacaaggccgugaacgcccucaucaacgaccagcugaucaugaagaaccaccuccgggacaucaugggcauccccuacugcaacuacuccaaguacugcuaccugaaccacaccgucacggggaagaccagccugccccgcugcugccugguguccaacggcagcuaccucaacgagacccacuucuccgacgacaucgagcagcaggcggacaacaugaucaccgagcugcugcagaaggaguacauggaccggcagggcaagacgccgcucgggcugguggaccuguucgucuucagcaccuccuucuaccugaucagcaucuuccuccaccugaucaagauccccacccaccgccacaucaccggcaagcccugccccaagccgcaccggcugaaccacauggggaucugcuccugcggccucuacaagcaccccggggugcccgugaaguggaagcgcugaggacuagucccuguucccagagcccacuuuuuuuucuuuuuuugaaauaaaauagccugucuuucagaucucaaaggcucuuuucagagccaccaaaaaaaaaaaaaaaaaaaaaaaaaaaaaaaaaaaaaaaaaaaaaaaaaaaaaaaaaaaaaaaaaaaaaaaaaaaaaaaaaaaaaaaaaaaaaaaaaaaaa

SEQ ID NO: 24974 - RNA, 1745 nt, Artificial Sequence
  mRNA product Design a-1 (hSL-A100) comprising derived and/or modified sequence from LASV(ISTH2010-NIG-2012;Clade II)__AIT17482__GPCmut3 (opt1)
aggagagucccgcagucggcguccagcggcucugcuuguucgugugugugucguugcaggccuuauucaagcuuaccaugggccagaucaucaccuucuuccaggaggugccccacgucaucgaggaggugaugaacaucgugcugaucgcccucagccugcuggccauccucaaggggaucuacaacgucgcgaccugcggccuguucgggcugguguccuuccuccugcugugcggccgcagcugcuccacgaccuacaaggggguguacgagcuccagacccuggagcuggacauggccagccucaacaugaccaugccgcuguccugcacgaagaacaacagccaccacuacaucauggucggcaacgagaccggccuggagcucacccugaccaacacguccaucaucaaccacaaguucugcaaccugagcgacgcccacaagaagaaccucuacgaccacgcccugauguccaucaucagcaccuuccaccuguccauccccaacuucaaccaguacgaggccaugagcugcgacuucaacgggggcaagaucuccgugcaguacaaccucagccacgcguacgccguggacgccgccaaccacugcgggaccaucgcgaacggcguccugcagaccuucaugcggauggccuggggcggguccuacaucgcccuggacagcggcaagggguccugggacugcaucaugacgagcuaccaguaccucaucauccagaacaucaccugggaggaccacugccaguucucccgccccagccccaucggcuaccuggggcugcucagccagcggacccgcgacaucuacaucucccggcgccggcgcggcaccuucacguggacccugagcgacuccgagggcaacgagacccccgggggcuacugccugacccgguggaugcucaucgaggccgagcugaagugcuucgggaacacggccguggcgaagugcaacgagaagcacgacgaggaguucugcgacaugcugcgccucuucgacuucaacaagcaggccauccggcgccugaagaccccggcccagaugagcauccagcugaucaacaaggccgugaacgcccucaucaacgaccagcugaucaugaagaaccaccuccgggacaucaugggcauccccuacugcaacuacuccaaguacugcuaccugaaccacaccgucaccgggaagacgagccugccccgcugcugccugguguccaacggcagcuaccucaacgagacccacuucuccgacgacaucgagcagcaggcggacaacaugaucaccgagcugcugcagaaggaguacaucgaccggcagggcaagaccccgcucgggcugguggaccuguucgucuucagcacguccuucuaccugaucagcaucuuccuccaccuggugaagauccccacccaccgccacguggucggcaagcccugccccaagccgcaccggcugaaccacauggggaucugcuccugcggccucuacaagcaccccggggugcccgugaaguggaagcgcugaggacuagucccuguucccagagcccacuuuuuuuucuuuuuuugaaauaaaauagccugucuuucagaucucaaaggcucuuuucagagccaccaaaaaaaaaaaaaaaaaaaaaaaaaaaaaaaaaaaaaaaaaaaaaaaaaaaaaaaaaaaaaaaaaaaaaaaaaaaaaaaaaaaaaaaaaaaaaaaaaaaaa

SEQ ID NO: 24975 - RNA, 1745 nt, Artificial Sequence
  mRNA product Design a-1 (hSL-A100) comprising derived and/or modified sequence from LASV(Lassa virus/H.sapiens-wt/NGA/2015/ISTH_0543;Clade II)__AVO03639__GPCmut3 (opt1)
aggagagucccgcagucggcguccagcggcucugcuuguucgugugugugucguugcaggccuuauucaagcuuaccaugggccagaucaucaccuucuuccaggaggugccccacgucaucgaggaggugaugaacaucgugcugaucgcccucagccugcuggccauccucaaggggaucuacaacgucgcgaccugcggccuguucgggcugguguccuuccuccugcugugcggccgcagcugcuccacgaccuacaaggggguguacgagcuccagacccuggagcuggacauggccaaccucaacaugaccaugccgcugagcugcacgaagaacaacucccaccacuacaucauggucggcaacgagaccggccuggagcucacccugaccaacacgagcaucaucaaccacaaguucugcaaccuguccgacgcccacaagaagaaccucuacgaccacgcccugaugagcaucaucuccaccuuccaccugagcauccccaacuucaaccaguacgaggccauguccugcgacuucaacgggggcaagaucagcgugcaguacaaccucucccacaccuacgcgguggacgccgccaaccacugcgggaccaucgccaacggcguccugcagacguucaugcggauggcguggggcgggagcuacaucgcccuggacuccggcaaggggagcugggacugcaucaugaccuccuaccaguaccucgugauccagaacaccaccugggaggaccacugccaguucagccgccccucccccaucggcuaccuggggcugcucagccagcggacgcgcgacaucuacaucagccggcgccggcgcggcaccuucaccuggacccuguccgacagcgagggcaacgagacgcccgggggcuacugccugacccgguggaugcucaucgaggccgagcugaagugcuucgggaacaccgccguggccaagugcaacgagaagcacgacgaggaguucugcgacaugcugcgccucuucgacuucaacaagcaggcgauccggcgccugaagaccccggcccagauguccauccagcugaucaacaaggccgucaacgcccucaucaacgaccagcugaucaugaagaaccaccuccgggacaucaugggcauccccuacugcaacuacagcaaguacugcuaccugaaccacacggugaccgggaagaccucccugccccgcugcugccuggugagcaacggcuccuaccucaacgagacccacuucagcgacgacaucgagcagcaggccgacaacaugaucacggagcugcugcagaaggaguacaucgaccggcagggcaagaccccgcucgggcuggucgaccuguucguguucuccaccagcuucuaccugaucuccaucuuccuccaccuggugaagauccccacccaccgccacaucacgggcaagcccugccccaagccgcaccggcugaaccacauggggaucugcagcugcggccucuacaagcaccccgggguccccgugaaguggaagcgcugaggacuagucccuguucccagagcccacuuuuuuuucuuuuuuugaaauaaaauagccugucuuucagaucucaaaggcucuuuucagagccaccaaaaaaaaaaaaaaaaaaaaaaaaaaaaaaaaaaaaaaaaaaaaaaaaaaaaaaaaaaaaaaaaaaaaaaaaaaaaaaaaaaaaaaaaaaaaaaaaaaaaa

SEQ ID NO: 24976 - RNA, 1745 nt, Artificial Sequence
  mRNA product Design a-1 (hSL-A100) comprising derived and/or modified sequence from LASV(Lassa virus/H.sapiens-wt/NGA/2016/ISTH_0009;Clade II)__AVO03571__GPCmut3 (opt1)
aggagagucccgcagucggcguccagcggcucugcuuguucgugugugugucguugcaggccuuauucaagcuuaccaugggccagaucaucaccuucuuccaggaggugccccacgucaucgaggaggugaugaacaucgugcugaucgcccucagccugcuggccauccucaaggggaucuacaacgucgcgaccugcggccugcuggggcucguguccuuccugcugcucugcggccgcagcugcuccacgaccuacaaggggguguacgagcugcagacccuggagcucgacauggccagccugaacaugaccaugccgcuguccugcacgaagaacaacagccaccacuacaucauggucggcaacgagaccggccucgagcugacccugaccaacacguccaucaucaaccacaaguucugcaaccucagcgacgcccacaagaagaaccuguacgaccacgcccugauguccaucaucagcaccuuccaccucuccauccccaacuucaaccaguacgaggccaugagcugcgacuucaacgggggccggaucuccgugcaguacaaccugagccacuccuacgcgguggacgccgccaaccacugcgggaccaucgccaacggcguccugcagaccuucaugcgcauggcguggggcgggagcuacaucgcccucgacuccggcaaggggagcugggacugcaucaugacguccuaccaguaccugaucauccagaacaccaccugggaggaccacugccaguucagccggcccagccccaucggcuaccuggggcuccugucccagcgcacccgggacaucuacaucagccgccggcgccggggcacguucaccuggacccuguccgacagcgagggcaacgagacccccgggggcuacugccucacgcgcuggaugcugaucgaggccgagcugaagugcuucgggaacaccgccguggccaagugcaacgagaagcacgacgaggaguucugcgacaugcuccggcuguucgacuucaacaagcaggcgauccgccggcugaagaccccggcccagauguccauccagcucaucaacaaggccgugaacgcccugaucaacgaccagcugaucaugaagaaccaccuccgcgacaucaugggcauccccuacugcaacuacagcaaguacugcuaccugaaccacaccgucacggggaagaccucccugccccggugcugccucgugagcaacggcuccuaccugaacgagacccacuucagcgacgacaucgagcagcaggccgacaacaugaucaccgagcugcuccagaaggaguacaucgaccgccagggcaagacgccgcuggggcugguggaccuguucgucuucuccaccagcuucuaccucaucuccaucuuccugcaccuggugaagauccccacccaccggcacaucaccggcaagcccugccccaagccgcaccgccucaaccacauggggaucugcagcugcggccuguacaaccaccccggggugcccgucaaguggaagcggugaggacuagucccuguucccagagcccacuuuuuuuucuuuuuuugaaauaaaauagccugucuuucagaucucaaaggcucuuuucagagccaccaaaaaaaaaaaaaaaaaaaaaaaaaaaaaaaaaaaaaaaaaaaaaaaaaaaaaaaaaaaaaaaaaaaaaaaaaaaaaaaaaaaaaaaaaaaaaaaaaaaaa

SEQ ID NO: 24977 - RNA, 1745 nt, Artificial Sequence
  mRNA product Design a-1 (hSL-A100) comprising derived and/or modified sequence from LASV(Lassa virus/H.sapiens-wt/NGA/2016/ISTH_0017;Clade II)__AVO03567__GPCmut3 (opt1)
aggagagucccgcagucggcguccagcggcucugcuuguucgugugugugucguugcaggccuuauucaagcuuaccaugggccagaucaucaccuucuuccaggaggugccccacgucaucgaggaggugaugaacaucgugcugaucgcccucagccugcuggccauccucaaggggaucuacaacgucgcgaccugcggccuguucgggcugguguccuuccuccugcugugcggccgcagcugcuccacgaccuacaaggggguguacgagcuccagacccuggagcuggacauggccagccucaacaugaccaugccgcuguccugcacgaagaacaacagccaccacuacaucauggucggcaacgagaccggccuggagcucacccugaccaacacguccaucaucaaccacaaguucugcaaccugagcgacgcccacaagaagaaccucuacgaccacgcccugauguccaucaucagcaccuuccaccuguccauccccaacuucaaccaguacgaggccaugagcugcgacuucaacgggggcaagaucuccgugcaguacaaccucagccacaccuacgcgaucgacgccgccaaccacugcgggaccaucgccaacggcgugcugcagacguucaugcggauggcguggggcggguccuacaucgcccuggacagcggcaagggguccugggacugcaucaugaccagcuaccaguaccucaucauccagaacaccaccugggaggaccacugccaguucucccgccccagccccaucggcuaccuggggcugcucagccagcggacgcgcgacaucuacaucucccggcgccggcgcggcaccuucaccuggacccugagcgacuccgagggcaacgagacgcccgggggcuacugccugacccgguggaugcucaucgaggccgagcugaagugcuucgggaacaccgccgucgccaagugcaacgagaagcacgacgaggaguucugcgacaugcugcgccucuucgacuucaacaagcaggcgauccggcgccugaagaccccggcccagaugagcauccagcugaucaacaaggccgugaacgcccucaucaacgaccagcugaucaugaagaaccaccuccgggacaucaugggcauccccuacugcaacuacuccaaguacugcuaccugaaccacacggugaccgggaagaccagccugccccgcugcugccuggucuccaacggcagcuaccucaacgagacccacuucuccgacgacaucgagcagcaggccgacaacaugaucacggagcugcugcagaaggaguacauggaccggcagggcaagaccccgcucgggcugguggaccuguucguguucagcaccuccuucuaccugaucagcaucuuccuccaccugguccgcauccccacccaccggcacgugaucggcaagcccugccccaagccgcaccgccugaaccacauggggaucugcuccugcggccucuacaagcaccccggggugcccgucaaguggaagcggugaggacuagucccuguucccagagcccacuuuuuuuucuuuuuuugaaauaaaauagccugucuuucagaucucaaaggcucuuuucagagccaccaaaaaaaaaaaaaaaaaaaaaaaaaaaaaaaaaaaaaaaaaaaaaaaaaaaaaaaaaaaaaaaaaaaaaaaaaaaaaaaaaaaaaaaaaaaaaaaaaaaaa

SEQ ID NO: 24978 - RNA, 1745 nt, Artificial Sequence
  mRNA product Design a-1 (hSL-A100) comprising derived and/or modified sequence from LASV(Lassa virus/H.sapiens-wt/NGA/2018/ISTH_0959;Clade II)__AVV65099__GPCmut3 (opt1)
aggagagucccgcagucggcguccagcggcucugcuuguucgugugugugucguugcaggccuuauucaagcuuaccaugggccagaucaucaccuucuuccaggaggugccccacgucaucgaggaggugaugaacaucgugcugaucgcccucagccugcuggccauccucaaggggaucuacaacgucgugaccugcggccuguucgggcugguguccuuccuccugcugugcggccgcagcugcuccacgaccuacaagggggucuacgagcuccagacccuggagcuggacauggcgagccucaacaugaccaugccgcuguccugcacgaagaacaacagccaccacuacaucauggugggcaacgagaccggccuggagcucacccugaccaacacguccaucaucaaccacaaguucugcaaccugagcgacgcccacaagaagaaccucuacgaccacgcccugauguccaucaucagcaccuuccaccuguccauccccaacuucaaccaguacgaggccaugagcugcgacuucaacgggggcaagaucuccgugcaguacaaccucagccacgccuacgcgaucgacgccgccaaccacugcgggaccaucgccaacggcguccugcagaccuucaugcggauggcguggggcggguccuacaucgcccuggacagcggcaagggguccugggacugcaucaugacgagcuaccaguaccucaucauccagaacaccaccugggaggaccacugccaguucucccgccccagccccaucggcuaccuggggcugcucagccagcggacccgcgacaucuacaucucccggcgccggcgcggcacguucaccuggacccugagcgacuccgagggcaacgagacccccgggggcuacugccugacgcgguggaugcucaucgaggccgagcugaagugcuucgggaacaccgccguggccaagugcaacgagaagcacgacgaggaguucugcgacaugcugcgccucuucgacuucaacaagcaggcgauccggcgccugaagaccccggcccagaugagcauccagcugaucaacaaggccgugaacgcccucaucaacgaccagcugaucaugaagaaccaccuccgggacaucaugggcauccccuacugcaacuacuccaaguacugcuaccugaaccacaccgucacggggaagaccagccugccccgcugcugccugguguccaacggcagcuaccucaacgagacccacuucuccgacgacaucgagcagcaggccgacaacaugaucaccgagcugcugcagaaggaguacaucgaccggcagggcaagacgccgcucgggcugguggaccuguucgucuucagcaccuccuucuaccugaucagcaucuuccuccaccuggugaagauccccacccaccgccacgugaucggcaagcccugccccaagccgcaccggcugaaccacauggggaucugcuccugcggccucuacaagcaccccgggguccccgugaaguggaagcgcugaggacuagucccuguucccagagcccacuuuuuuuucuuuuuuugaaauaaaauagccugucuuucagaucucaaaggcucuuuucagagccaccaaaaaaaaaaaaaaaaaaaaaaaaaaaaaaaaaaaaaaaaaaaaaaaaaaaaaaaaaaaaaaaaaaaaaaaaaaaaaaaaaaaaaaaaaaaaaaaaaaaaa

SEQ ID NO: 24979 - RNA, 1745 nt, Artificial Sequence
  mRNA product Design a-1 (hSL-A100) comprising derived and/or modified sequence from LASV(LASV003-NIG-2008;Clade II)__AIT17580__GPCmut3 (opt1)
aggagagucccgcagucggcguccagcggcucugcuuguucgugugugugucguugcaggccuuauucaagcuuaccaugggccagaucaucaccuucuuccaggaggugccccacgucaucgaggaggugaugaacaucgugcugaucgcccucagccugcuggccauccucaaggggaucuacaacgucgcgaccugcggccuguucgggcugguguccuuccuccugcugugcggccgcagcugcuccacgaccuacaaggggguguacgagcuccagacccuggagcuggacauggccagccucaacaugaccaugccgcuguccugcacgaagaacaacagccaccacuacaucauggucggcaacgagaccggccuggagcucacccugaccaacacguccaucaucaaccacaaguucugcaaccugagcgacgcccacaagaagaaccucuacgaccacgcccugauguccaucaucagcaccuuccaccuguccauccccaacuucaaccaguacgaggccaugagcugcgacuucaacgggggcaagaucuccgugcaguacaaccucagccacaccuacgcgguggacgccgccaaccacugcgggaccaucgccaacggcguccugcagacguucaugcggauggcguggggcggguccuacaucgcccuggacagcggcaagggguccugggacugcaucaugaccagcuaccaguaccucaucauccagaacaccaccugggaggaccacugccaguucucccgccccagccccaucggcuaccuggggcugcucagccagcggacgcgcgacaucuacaucucccggcgccggcgcggcaccuucaccuggacccugagcgacuccgagagcaacgagacgccgggcggguacugccugacccgguggaugcucaucgaggccgagcugaagugcuucggcaacaccgccguggccaagugcaacgagaagcacgacgaggaguucugcgacaugcugcgccucuucgacuucaacaagcaggcgauccggcgccugaaggcccccgcccagauguccauccagcugaucaacaaggccgugaacgcccucaucaacgaccagcugaucaugaagaaccaccuccgggacaucauggggauccccuacugcaacuacagcaaguacugcuaccugaaccacaccgucacgggccgcaccucccugccccggugcugccuggugagcaacggguccuaccucaacgagacccacuucagcgacgacaucgagcagcaggcggacaacaugaucaccgagcugcugcagaaggaguacauggaccgccagggcaagacgccgcucggccugguggaccuguucgucuucuccaccagcuucuaccugaucuccaucuuccuccaccuggugaagauccccacccaccggcacgugaucgggaagcccugccccaagccgcaccgccugaaccacaugggcaucugcagcugcgggcucuacaagcaccccggcguccccgugaaguggaagcggugaggacuagucccuguucccagagcccacuuuuuuuucuuuuuuugaaauaaaauagccugucuuucagaucucaaaggcucuuuucagagccaccaaaaaaaaaaaaaaaaaaaaaaaaaaaaaaaaaaaaaaaaaaaaaaaaaaaaaaaaaaaaaaaaaaaaaaaaaaaaaaaaaaaaaaaaaaaaaaaaaaaaa

SEQ ID NO: 24980 - RNA, 1745 nt, Artificial Sequence
  mRNA product Design a-1 (hSL-A100) comprising derived and/or modified sequence from LASV(LASV035-NIG-2009;Clade II)__AIT17588__GPCmut3 (opt1)
aggagagucccgcagucggcguccagcggcucugcuuguucgugugugugucguugcaggccuuauucaagcuuaccaugggccagaucaucaccuucuuccaggaggugccccacgucaucgaggaggugaugaacaucgugcugaucgcccucagccugcuggccauccucaaggggaucuacaacgucgcgaccugcggccuguucgggcugguguccuuccuccugcugugcggccgcagcugcuccacgaccuacaaggggguguacgagcuccagacccuggagcuggacauggccagccucaacaugaccaugccgcuguccugcacgaagaacaacagccaccacuacaucauggucggcaacgagaccggccuggagcucacccugaccaacacguccaucaucaaccacaaguucugcaaccugagcgacgcccacaagaagaaccucuacgaccacgcccugauguccaucaucagcaccuuccaccuguccauccccaacuucaaccaguacgaggccaugagcugcgacuucaacgggggcaagaucuccgugcaguacaaccucagccacgcguacgccguggacgccgccaaccacugcgggaccaucgcgaacggcguccugcagaccuucaugcggauggccuggggcggguccuacaucgcccuggacagcggcaagggguccugggacugcaucaugacgagcuaccaguaccucaucauccagaacaccaccugggaggaccacugccaguucucccgccccagccccaucggcuaccuggggcugcucagccagcggacccgcgacaucuacaucucccggcgccggcgcggcacguucaccuggacccugagcgacuccgagggcaacgagacccccgggggcuacugccugacgcgguggaugcucaucgaggccgagcugaagugcuucgggaacaccgccguggcgaagugcaacgagaagcacgacgaggaguucugcgacaugcugcgccucuucgacuucaacaagcaggccauccggcgccugaaggccccggcccagaugagcauccagcugaucaacaaggccgugaacgcgcucaucaacgaccagcugaucaugaagaaccaccuccgggacaucaugggcauccccuacugcaacuacuccaaguacugcuaccugaaccacaccgucaccgggaagacgagccugccccgcugcugccugguguccaacggcagcuaccucaacgagacccacuucuccgacgacaucgagcagcaggccgacaacaugaucaccgagcugcugcagaaggaguacaucgaccggcagggcaagaccccgcucgggcugguggaccuguucgucuucagcacguccuucuaccugaucagcaucuuccuccaccuggugaagauccccacccaccgccacgugaucggcaagcccugccccaagccgcaccggcugaaccacauggggaucugcuccugcggccucuacaagcaccccgggguccccgugaaguggaagcgcugaggacuagucccuguucccagagcccacuuuuuuuucuuuuuuugaaauaaaauagccugucuuucagaucucaaaggcucuuuucagagccaccaaaaaaaaaaaaaaaaaaaaaaaaaaaaaaaaaaaaaaaaaaaaaaaaaaaaaaaaaaaaaaaaaaaaaaaaaaaaaaaaaaaaaaaaaaaaaaaaaaaaa

SEQ ID NO: 24981 - RNA, 1745 nt, Artificial Sequence
  mRNA product Design a-1 (hSL-A100) comprising derived and/or modified sequence from LASV(LASV1000-NIG-2009;Clade II)__AIT17782__GPCmut3 (opt1)
aggagagucccgcagucggcguccagcggcucugcuuguucgugugugugucguugcaggccuuauucaagcuuaccaugggccagaucaucaccuucuuccaggaggugccccacgucaucgaggaggugaugaacaucgugcugaucgcccucagccugcuggccauccucaaggggaucuacaacgucgcgaccugcggccuguucgggcugguguccuuccuccugcugugcggccgcagcugcuccacgaccuacaaggggguguacgagcuccagacccuggagcuggacauggccagccucaacaugaccaugccgcuguccugcacgaagaacaacagccaccacuacaucauggucggcaacgagaccggccuggagcucacccugaccaacacguccaucaucaaccacaaguucugcaaccugagcgacgcccacaagaagaaccucuacgaccacgcccugauguccaucaucagcaccuuccaccuguccauccccaacuucaaccaguacgaggccaugagcugcgacuucaacgggggcaagaucuccgugcaguacaaccucagccacaccuacgcgguggacgccgccaaccacugcgggaccaucgccaacggcguccugcagacguucaugcggauggcguggggcggguccuacaucgcccuggacagcggcaagggguccugggacugcaucaugaccagcuaccaguaccucaucauccagaacaccaccugggaggaccacugccaguucucccgccccagccccaucggcuaccuggggcugcucagccagcggacgcgcgacaucuacaucucccggcgccggcgcggcaccuucaccuggacccugagcgacuccgagggcaacgagacgcccgggggcuacugccugacccgguggaugcucaucgaggccgagcugaagugcuucgggaacaccgccguggccaagugcaacgagaagcacgacgaggaguucugcgacaugcugcgccucuucgacuucaacaagcaggcgaucaagcggcugaagaccccggcccagaugagcauccagcugaucaacaaggccgugaacgcccucaucaacgaccagcugaucaugaagaaccaccuccgcgacaucaugggcauccccuacugcaacuacuccaaguacugcuaccugaaccacacggucaccgggaagaccagccugccccggugcugccugguguccaacggcagcuaccucaacgagacccacuucuccgacgacaucgagcagcaggccgacaacaugaucacggagcugcugcagaaggaguacaucgaccgccagggcaagaccccgcucgggcugguggaccuguucgucuucagcaccuccuucuaccugaucagcaucuuccuccaccuggugaagauccccacccaccggcacguggucggcaagcccugccccaagccgcaccgccugaaccacauggggaucugcuccugcggccucuacaagcaccccggggugcccgugaaguggaagcggugaggacuagucccuguucccagagcccacuuuuuuuucuuuuuuugaaauaaaauagccugucuuucagaucucaaaggcucuuuucagagccaccaaaaaaaaaaaaaaaaaaaaaaaaaaaaaaaaaaaaaaaaaaaaaaaaaaaaaaaaaaaaaaaaaaaaaaaaaaaaaaaaaaaaaaaaaaaaaaaaaaaaa

SEQ ID NO: 24982 - RNA, 1745 nt, Artificial Sequence
  mRNA product Design a-1 (hSL-A100) comprising derived and/or modified sequence from LASV(LASV221-NIG-2010;Clade II)__AIT17624__GPCmut3 (opt1)
aggagagucccgcagucggcguccagcggcucugcuuguucgugugugugucguugcaggccuuauucaagcuuaccaugggccagaucaucaccuucuuccaggaggugccccacgucaucgaggaggugaugaacaucgugcugaucgcccucagccugcuggccauccucaaggggaucuacaacgucgcgaccugcggccuguucgggcugguguccuuccuccugcugugcggccgcagcugcuccacgaccuacaaggggguguacgagcuccagacccuggagcuggacauggccagccucaacaugaccaugccgcuguccugcacgaagaacaacagccaccacuacaucauggucggcaacgagaccggccuggagcucacccugaccaacacguccaucaucaaccacaaguucugcaaccugagcgacgcccacaagaagaaccucuacgaccacgcccugauguccaucaucagcaccuuccaccuguccauccccaacuucaaccaguacgaggccaugagcugcgacuucaacgggggcaagaucuccgugcaguacaaccucagccacaccuacgcgaucgacgccgccaaccacugcgggaccaucgccaacggcgugcugcagacguucaugcggauggcguggggcggguccuacaucgcccuggacagcggcaagggguccugggacugcaucaugaccagcuaccaguaccucaucauccagaacaccaccugggaggaccacugccaguucucccgccccagccccaucggcuaccuggggcugcucagccagcggacgcgcgacaucuacaucucccggcgccggcgcggcaccuucaccuggacccugagcgacuccgagggcaacgagacgcccgggggcuacugccugacccgguggaugcucaucgaggccgagcugaagugcuucgggaacaccgccgucgccaagugcaacgagaagcacgacgaggaguucugcgacaugcugcgccucuucgacuucaacaagcaggcgauccggcgccugaagaccccggcccagaugagcauccagcugaucaacaaggccgugaacgcccucaucaacgaccagcugaucaugaagaaccaccuccgggacaucaugggcauccccuacugcaacuacuccaaguacugcuaccugaaccacacggugaccgggaagaccagccugccccgcugcugccuggucuccaacggcagcuaccucaacgagacccacuucuccgacgacaucgagcagcaggccgacaacaugaucacggagaugcugcagaaggaguacauggaccggcagggcaagaccccgcuggggcucguggaccuguucguguucagcaccuccuucuaccugaucagcaucuuccugcaccucgucaagauccccacccaccgccacgugaucggcaagcccugccccaagccgcaccggcugaaccacauggggaucugcuccugcggccuguacaagcaccccggggugcccgucaaguggaagcgcugaggacuagucccuguucccagagcccacuuuuuuuucuuuuuuugaaauaaaauagccugucuuucagaucucaaaggcucuuuucagagccaccaaaaaaaaaaaaaaaaaaaaaaaaaaaaaaaaaaaaaaaaaaaaaaaaaaaaaaaaaaaaaaaaaaaaaaaaaaaaaaaaaaaaaaaaaaaaaaaaaaaaa

SEQ ID NO: 24983 - RNA, 1745 nt, Artificial Sequence
  mRNA product Design a-1 (hSL-A100) comprising derived and/or modified sequence from LASV(LASV237-NIG-2010;Clade II)__AIT17638__GPCmut3 (opt1)
aggagagucccgcagucggcguccagcggcucugcuuguucgugugugugucguugcaggccuuauucaagcuuaccaugggccagaucaucaccuucuuccaggaggugccccacgucaucgaggaggugaugaacaucgugcugaucgcccucagccugcuggccauccucaaggggaucuacaacgucgcgaccugcggccuguucgggcugguguccuuccuccugcugugcggccgcagcugcuccacgaccuacaaggggguguacgagcuccagacccuggagcuggacauggccagccucaacaugaccaugccgcuguccugcacgaagaacaacagccaccacuacaucauggucggcaacgagaccggccuggagcucacccugaccaacacguccaucaucaaccacaaguucugcaaccugagcgacgcccacaagaaggaccucuacgaccacgcccugauguccaucaucagcaccuuccaccuguccauccccaacuucaaccaguacgaggccaugagcugcgacuucaacgggggcaagaucuccgugcaguacaaccucagccacaccuacgcgguggacgccgccaaccacugcgggaccaucgccaacggcguccugcagacguucaugcggauggcguggggcggguccuacaucgcccuggacagcggcaagggguccugggacugcaucaugaccagcuaccaguaccucaucauccagaacaccaccugggaggaccacugccaguucucccgccccagccccaucggcuaccuggggcugcucagccagcggacgcgcgacaucuacaucucccggcgccggcgcggcaccuucaccuggacccugagcgacuccgagggcaacgagacgcccgggggcuacugccugacccgguggaugcucaucgaggccgagcugaagugcuucgggaacaccgccguggccaagugcaacgagaagcacgacgaggaguucugcgacaugcugcgccucuucgacuucaacaagcaggcgauccggcgccugaagaccccggcccagaugagcauccagcugaucaacaaggccgugaacgcccucaucaacgaccagcugaucaugaagaaccaccuccgggacaucaugggcauccccuacugcaacuacuccaaguacugcuaccugaaccacacggucaccgggaagaccagccugccccgcugcugccugguguccaacggcagcuaccucaacgagacccacuucuccgacgacaucgagcagcaggccgacaacaugaucacggagcugcugcagaaggaguacauggaccggcagggcaagaccccgcucgggcugguggaccuguucgucuucagcaccuccuucuaccugaucagcaucuuccuccaccugaucaagauccccacccaccgccacaucacgggcaagcccugccccaagccgcaccggcugaaccacauggggaucugcuccugcggccucuacaagcaccccggggugcccgugaaguggaagcgcugaggacuagucccuguucccagagcccacuuuuuuuucuuuuuuugaaauaaaauagccugucuuucagaucucaaaggcucuuuucagagccaccaaaaaaaaaaaaaaaaaaaaaaaaaaaaaaaaaaaaaaaaaaaaaaaaaaaaaaaaaaaaaaaaaaaaaaaaaaaaaaaaaaaaaaaaaaaaaaaaaaaaa

SEQ ID NO: 24984 - RNA, 1745 nt, Artificial Sequence
  mRNA product Design a-1 (hSL-A100) comprising derived and/or modified sequence from LASV(LASV253-NIG-2011;Clade II)__AIT17670__GPCmut3 (opt1)
aggagagucccgcagucggcguccagcggcucugcuuguucgugugugugucguugcaggccuuauucaagcuuaccaugggccagaucaucaccuucuuccaggaggugccccacgucaucgaggaggugaugaacaucgugcugaucgcccucagccugcuggccauccucaaggggaucuacaacgucgcgaccugcggccuguucgggcugguguccuuccuccugcugugcggccgcagcugcuccacgaccuacaaggggguguacgagcuccagacccuggagcuggacauggccagccucaacaugaccaugccgcuguccugcacgaagaacaacagccaccacuacaucauggucggcaacgagaccggccuggagcucacccugaccaacacguccaucaucaaccacaaguucugcaaccugagcgacgcccacaagaagaaccucuacgaccacgcccugauguccaucaucagcaccuuccaccuguccauccccaacuucaaccaguacgaggccaugagcugcgacuucaacgggggcaagaucuccgugcaguacaaccucagccacaccuacgcgguggacgccgccaaccacugcgggaccaucgccaacggcguccugcagacguucaugcggauggcguggggcggguccuacaucgcccuggacagcggcaagggguccugggacugcaucaugaccagcuaccaguaccucaucauccagaacaccaccugggaggaccacugccaguucucccgccccagccccaucggcuaccuggggcugcucagccagcggacgcgcgacaucuacaucucccggcgccggcgcggcaccuucaccuggacccugagcgacuccgagggcaacgagacgcccgggggcuacugccugacccgguggaugcucaucgaggccgagcugaagugcuucgggaacaccgccguggccaagugcaacgagaagcacgacgaggaguucugcgacaugcugcgccucuucgacuucaacaagcaggcgauccggcgccugaaggccccggcccagaugagcauccagcugaucaacaaggccgugaacgcccucaucaacgaccagcugaucaugaagaaccaccuccgggacaucaugggcauccccuacugcaacuacuccaaguacugcuaccugaaccacaccgucacggggcgcaccagccugccccggugcugccugguguccaacggcagcuaccucaacgagacccacuucuccgacgacaucgagcagcaggcggacaacaugaucaccgagcugcugcagaaggaguacaucgaccgccagggcaagacgccgcucgggcugguggaccuguucgucuucagcaccuccuucuaccugaucagcaucuuccuccaccuggugaagauccccacccaccggcacaucaucggcaagcccugccccaagccgcaccgccugaaccacauggggaucugcuccugcggccucuacaagcaccccggggugcccgucaaguggaagcggugaggacuagucccuguucccagagcccacuuuuuuuucuuuuuuugaaauaaaauagccugucuuucagaucucaaaggcucuuuucagagccaccaaaaaaaaaaaaaaaaaaaaaaaaaaaaaaaaaaaaaaaaaaaaaaaaaaaaaaaaaaaaaaaaaaaaaaaaaaaaaaaaaaaaaaaaaaaaaaaaaaaaa

SEQ ID NO: 24985 - RNA, 1745 nt, Artificial Sequence
  mRNA product Design a-1 (hSL-A100) comprising derived and/or modified sequence from LASV(LASV254-NIG-2011;Clade II)__AIT17674__GPCmut3 (opt1)
aggagagucccgcagucggcguccagcggcucugcuuguucgugugugugucguugcaggccuuauucaagcuuaccaugggccagaucaucaccuucuuccaggaggugccccacgucaucgaggaggugaugaacaucgugcugaucgcccucagccugcuggccauccucaaggggaucuacaacgucgcgaccugcggccuguucgggcugguguccuuccuccugcugugcggccgcagcugcuccacgaccuacaaggggguguacgagcuccagacccuggagcuggacaugaccaaccucaacaugacgaugccgcugagcugcaccaagaacaacucccaccacuacaucauggucggcaacgagaccggccuggagcucacccugacgaacaccagcaucaucaaccacaaguucugcaaccuguccgacgcccacaagaagaaccucuacaaccacgcccugaugagcaucaucuccaccuuccaccugagcauccccaacuucaaccaguacgaggccauguccugcgacuucaacgggggcaagaucagcgugcaguacaaccucucccacagcuacgccguggacgcggccaaccacugcgggaccaucgccaacggcguccugcagacguucaugcggauggccuggggcggguccuacaucgcgcuggacagcggcaaggggaacugggacugcaucaugaccuccuaccaguaccucaucauccagaacaccaccugggaggaccacugccaguucagccgccccucccccaucggcuaccuggggcugcucagccagcggacgcgcgacaucuacaucagccggcgccggcgcggcaccuucaccuggacccuguccgacagcgagggcaacgagacgcccgggggcuacugccugacccgguggaugcucaucgaggccgagcugaagugcuucgggaacaccgccguggccaagugcaacgagaagcacgacgaggaguucugcgacaugcugcgccucuucgacuucaacaagcaggccauccggcgccugaagaccccggcgcaggccaacauccagcugaucaacaaggccgugaacgcccucaucaacgaccagcugaucaugaagaaccaccuccgggacaucaugggcauccccuacugcaacuacuccaaguacugcuaccugaaccacacggucaccgggaagaccagccugccccgcugcugccugguguccaacggcagcuaccucaacgagacccacuucuccgacgacaucgagcagcaggccgacaacaugaucacggagcugcugcagaaggaguacauggaccggcagggcaagaccccgcucgggcugguggaccuguucgucuucagcaccuccuucuaccugaucagcaucuuccuccaccuggugaagauccccacccaccgccacgugaucggcaagcccugccccaagccgcaccggcugaaccacauggggaucugcuccugcggccucuacaagcaccccgggguccccgugaaguggaagcgcugaggacuagucccuguucccagagcccacuuuuuuuucuuuuuuugaaauaaaauagccugucuuucagaucucaaaggcucuuuucagagccaccaaaaaaaaaaaaaaaaaaaaaaaaaaaaaaaaaaaaaaaaaaaaaaaaaaaaaaaaaaaaaaaaaaaaaaaaaaaaaaaaaaaaaaaaaaaaaaaaaaaaa

SEQ ID NO: 24986 - RNA, 1745 nt, Artificial Sequence
  mRNA product Design a-1 (hSL-A100) comprising derived and/or modified sequence from LASV(Nig08-A19;Clade III)__ADU56618__GPCmut3 (opt1)
aggagagucccgcagucggcguccagcggcucugcuuguucgugugugugucguugcaggccuuauucaagcuuaccaugggccagaucgugaccuucuuccaggaggucccccacgugaucgaggaggugaugaacaucguccugaucgcccucagcauccuggccauccugaaggggcucuacaacaucgcgaccugcggccugaucgggcuggugacguuccuccugcuguccggccgcagcugcuccaugaccuacaaggggguguacgagcuccagacccuggagcugaacaugaacacccucaacaugacgaugccgcugagcugcaccaagaacaacucccaccacuacaucauggucggcaacgagaccggccuggagcucacccugacgaacaccagccugcuccaccacaaguucugcaaccuguccgacgcccacaagaagaaccuguacgaccacacccucaugagcaucaucuccaccuuccaccugagcauccccaacuucaaccaguacgaggccauguccugcgacuucaacgggggcaagaucacggugcaguacaaccugagccacuccuacgccaucgacgccgcgaaccacugcgggaccguggccaacggcguccuccagaccuucaugcggauggccuggggcgggagcuacaucgcccuggacuccggccgcgggaagugggacugcaucaugaccagcuaccaguaccugaucauccagaacacgaccugggaggaccacugccaguucucccggcccagccccaucggcuaccucgggcugcugucccagcgcacccgggacaucuacaucagccgccggcgccggggcaccuucacguggacccucagcgacuccgagggcaacgagacccccgggggcuacugccugacccgcuggaugcugaucgaggcggagcucaagugcuucgggaacacggccguggccaagugcaacgagaagcacgacgaggaguucugcgacaugcugcggcuguucgacuucaacaagcaggccauccgccggcucaaggccccggcgcagaugagcauccagcugaucaacaaggccgugaacgcccugaucaacgaccagcucaucaugaagaaccaccuccgcgacaucaugggcauccccuacugcaacuacuccaaguacugcuaccugaaccacaccagcaccgggcggaccucccugccccgcugcugccuggucagcaacggcuccuaccugaacgagacgcacuucagcgacgacaucgagcagcaggccgacaacaugaucaccgagaugcuccagaaggaguaccuggaccggcagggcaagaccccgcuggggcugguggaccucuucguguucuccaccagcuucuaccugaucuccaucuuccugcaccucgucaagauccccacgcaccgccacaucgugggcaagcccugccccaagccgcaccggcugaaccacauggggaucugcagcugcggccuguacaagcagcccggggugcccguccgcuggaagcggugaggacuagucccuguucccagagcccacuuuuuuuucuuuuuuugaaauaaaauagccugucuuucagaucucaaaggcucuuuucagagccaccaaaaaaaaaaaaaaaaaaaaaaaaaaaaaaaaaaaaaaaaaaaaaaaaaaaaaaaaaaaaaaaaaaaaaaaaaaaaaaaaaaaaaaaaaaaaaaaaaaaaa

SEQ ID NO: 24987 - RNA, 1748 nt, Artificial Sequence
  mRNA product Design a-1 (hSL-A100) comprising derived and/or modified sequence from LASV(G1180-SLE-2010;Clade IV)__AIT17168__GPCmut3 (opt1)
aggagagucccgcagucggcguccagcggcucugcuuguucgugugugugucguugcaggccuuauucaagcuuaccaugggccagaucgugaccuucuuccaggaggucccccacgugaucgaggaggugaugaacaucguccugaucgcccucagcauccuggccgugcugaaggggcucuacaacuucgcgaccugcggccugguggggcugcucacguuccugcugcucugcggccgcuccugcaccgccagccgguacaagggggucuacgagcugcagacccuggagcucaacauggagacccugaacaugacgaugccgcuguccugcaccaagaacaacagccaccacuacaucauggugggcaacgagaccggccucgagcugacccugacgaacaccuccaucaucaaccacaaguucugcaaccucagcgacgcccacaagaagaaccuguacgaccacgcccugauguccaucaucagcaccuuccaccucuccauccccaacuucaaccaguacgaggccaugagcugcgacuucaacgggggcaagaucuccgugcaguacaaccugagccacuccuacgcgggggacgccgccaaccacugcggcaccgucgccaacggggugcugcagacguucaugcgcauggcguggggcggcagcuacaucgcccucgacuccgggcacggcagcugggacugcaucaugaccuccuaccaguaccugaucauccagaacaccaccugggaggaccacugccaguucagccggcccucccccaucggguaccugggccuccugagccagcgcacgcgggacaucuacaucagccgccggcgccggggcaccuucaccuggacccuguccgacagcgaggggaaggacacgccgggcggguacugccucacccgcuggaugcugaucgaggccgagcugaagugcuucggcaacaccgccguggccaagugcaacgagaagcacgacgaggaguucugcgacaugcuccggcuguucgacuucaacaagcaggcgauccagcgccugaaggcccccgcccagauguccauccagcucaucaacaaggccgucaacgcccugaucaacgaccagcugaucaugaagaaccaccuccgggacaucauggggauccccuacugcaacuacagcaaguacugcuaccugaaccacaccacgaccggcaagaccucccugcccaagugcugccucgugagcaacggcuccuaccugaacgagacccacuucagcgacgacaucgagcagcaggcggacaacaugaucacggagaugcugcagaaggaguacauggagcgccaggggaagaccccgcucggccugguggaccuguucgucuucuccaccagcuucuaccugaucuccaucuuccuccaccuggugaagauccccacccaccggcacaucgugggcaagagcugccccaagccccaccgccugaaccacauggggaucugcuccugcgggcucuacaagcagccgggcguccccgugaaguggaagcggugaggacuagucccuguucccagagcccacuuuuuuuucuuuuuuugaaauaaaauagccugucuuucagaucucaaaggcucuuuucagagccaccaaaaaaaaaaaaaaaaaaaaaaaaaaaaaaaaaaaaaaaaaaaaaaaaaaaaaaaaaaaaaaaaaaaaaaaaaaaaaaaaaaaaaaaaaaaaaaaaaaaaa

SEQ ID NO: 24988 - RNA, 1748 nt, Artificial Sequence
  mRNA product Design a-1 (hSL-A100) comprising derived and/or modified sequence from LASV(G1442-SLE-2011;Clade IV)__AIT17180__GPCmut3 (opt1)
aggagagucccgcagucggcguccagcggcucugcuuguucgugugugugucguugcaggccuuauucaagcuuaccaugggccagaucgugaccuucuuccaggaggucccccacgugaucgaggaggugaugaacaucguccugaucgcccucagcauccuggccgugcugaaggggcucuacaacguggcgaccugcggccugaucgggcuggucacguuccuccugcugugcggccgcuccugcaccaccacccucuacaaggggguguacgagcugcagacgcuggagcucaacauggagacccugaacaugaccaugccgcugagcugcaccaagaacaacucccaccacuacauccgggugggcaacgagacgggccucgagcugacccugaccaacaccagcaucaucaaccacaaguucugcaaccucuccgacgcccacaagaagaaccuguacgaccacgcccugaugagcaucaucuccacguuccaccucagcauccccaacuucaaccaguacgaggccauguccugcgacuucaacgggggcaagaucagcguccaguacaaccugucccacagcuacgccggggacgcggccaaccacugcggcaccguggccaacggggugcugcagaccuucaugcgcauggccuggggcggcuccuacaucgcgcucgacagcgggcggggcaacugggacugcaucaugaccuccuaccaguaccugaucauccagaacacgaccugggacgaccacugccaguucagccgccccucccccaucggguaccugggccuccugagccagcggacccgcgacgucuacaucucccggcgccggcgcggcaccuucacguggacccugagcgacagcgaggggaaggacaccccgggcggguacugccucacccgguggaugcugaucgaggccgagcugaagugcuucggcaacacggccguggccaagugcaacgagaagcacgacgaggaguucugcgacaugcuccgccuguucgacuucaacaagcaggccauccagcggcugaaggcgcccgcccagauguccauccagcucaucaacaaggccgugaacgcccugaucaacgaccagcugaucaugaagaaccaccuccgcgacaucauggggauccccuacugcaacuacagcaaguacugcuaccugaacaacaccgccaccggcaagaccucccugcccaagugcugccucaucagcaacggcuccuaccugaacgagacgcacuucagcgacgacaucgagcaggaggcggacaacaugaucaccgagaugcugcagaaggaguacauggagcggcaggggaagaccccgcucggccuggucgaccuguucguguucuccaccagcuucuaccugaucuccaucuuccuccaccuggugaagauccccacgcaccgccacaucgucggcaagagcugccccaagccccaccggcugaaccacauggggaucugcuccugcgggcucuacaagcagccgggcgugcccgugcgcuggaagcggugaggacuagucccuguucccagagcccacuuuuuuuucuuuuuuugaaauaaaauagccugucuuucagaucucaaaggcucuuuucagagccaccaaaaaaaaaaaaaaaaaaaaaaaaaaaaaaaaaaaaaaaaaaaaaaaaaaaaaaaaaaaaaaaaaaaaaaaaaaaaaaaaaaaaaaaaaaaaaaaaaaaaa

SEQ ID NO: 24989 - RNA, 1748 nt, Artificial Sequence
  mRNA product Design a-1 (hSL-A100) comprising derived and/or modified sequence from LASV(G3010-SLE-2013;Clade IV)__AIT17344__GPCmut3 (opt1)
aggagagucccgcagucggcguccagcggcucugcuuguucgugugugugucguugcaggccuuauucaagcuuaccaugggccagaucgugaccuucuuccaggaggucccccacgugaucgaggaggugaugaacaucguccugaucgcccucagcauccuggccgugcugaaggggcucuacaacuucgcgaccugcggccugguggggcuggucacguuccuccugcugugcggccgcuccugcaccaccagccucuacaaggggguguacgagcugcagacccuggagcucaacauggagacgcugaacaugaccaugccgcuguccugcaccaagaacaacagccaccacuacaucauggugggcaacgagaccggccucgagcugacgcugaccaacaccuccaucaucaaccacaaguucugcaaccucagcgacgcccacaagaagaaccuguacaaccacgcccugauguccaucaucagcaccuuccaccucuccauccccaacuucaaccaguacgaggccaugagcugcgacuucaacgggggcaagaucuccguccaguacaaccugagccacuccuacgccggggacgcggccagccacugcggcacgguggccaacggggugcugcagaccuucaugcggauggccuggggcggcuccuacaucgcgcucgacagcggguacggcaagugggacugcaucaugaccuccuaccaguaccugaucauccagaacaccacgugggaggaccacugccaguucagccgccccucccccaucggguaccugggccuccugagccagcggacccgcgacaucuacaucagccggcgccggcgcggcaccuucaccuggacgcuguccgacagcgaggggaaggacaccccgggcggguacugccucacccgguggaugcugaucgaggccgagcugaagugcuucggcaacaccgccgucgccaagugcaacgagaagcacgacgaggaguucugcgacaugcuccgccuguucgacuucaacaagcaggccauccagcggcugaagacgcccgcgcagauguccauccagcucaucaacaaggccgugaacgcccugaucaacgaccagcugaucaugaagaaccaccuccgcgacaucauggggauccccuacugcaacuacagcaaguacugcuaccugaaccacaccaccaccggcaagacgucccugcccaagugcugccucgugagcaacggcuccuaccugaacgagacccacuucagcgacgacaucgagcagcaggccgacaacaugaucaccgagaugcugcagaaggaguacauggagcggcaggggaagaccccgcucggccuggucgaccuguucguguucuccacgagcuucuaccugaucuccaucuuccuccaccuggugaagauccccacccaccgccacaucgucggcaagagcugccccaagccccaccggcugaaccacauggggaucugcuccugcgggcucuacaagcagccgggcgugcccgugcgcuggaagcggugaggacuagucccuguucccagagcccacuuuuuuuucuuuuuuugaaauaaaauagccugucuuucagaucucaaaggcucuuuucagagccaccaaaaaaaaaaaaaaaaaaaaaaaaaaaaaaaaaaaaaaaaaaaaaaaaaaaaaaaaaaaaaaaaaaaaaaaaaaaaaaaaaaaaaaaaaaaaaaaaaaaaa

SEQ ID NO: 24990 - RNA, 1748 nt, Artificial Sequence
  mRNA product Design a-1 (hSL-A100) comprising derived and/or modified sequence from LASV(G502-SLE-2009;Clade IV)__AIT17126__GPCmut3 (opt1)
aggagagucccgcagucggcguccagcggcucugcuuguucgugugugugucguugcaggccuuauucaagcuuaccaugggccagaucgugaccuucuuccaggaggucccccacgugaucgaggaggugaugaacaucguccugaucgcccucagcauccuggccgugcugaaggggcucuacaacuucgcgaccugcggccugguggggcugcucacguuccugcugcucugcggccgcuccugcaccaccgggcuguacaagggcgucuacgagcugcagacccucgagcugaacauggagacgcugaacaugaccaugccgcucagcugcaccaagaacaacucccaccacuacaucauggugggcaacgagaccgggcuggagcugacgcucaccaacaccagcaucaucaaccacaaguucugcaaccuguccgacgcccacaagaagaaccuguacgaccacgcccucaugagcaucaucuccaccuuccaccugagcauccccaacuucaaccaguacgaggccauguccugcgacuucaacggcgggaagaucagcgugcaguacaaccugucccacagcuacgccggcgacgcggccgaccacugcgggacggucgccaacggcgugcuccagaccuucaugcggauggccuggggcggguccuacaucgcgcuggacagcggccgcgggcggugggacugcaucaugaccuccuaccaguaccugaucauccagaacaccacgugggaggaccacugccaguucagccgccccucccccaucggcuaccucggccugcugagccagcggacccgcgacaucuacaucucccggcgccggcgcgggaccuucaccuggacgcucagcgacagcgagggcaaggacacccccgggggcuacugccugacccgguggaugcugaucgaggccgagcucaagugcuucgggaacaccgccguggccaagugcaacgagaagcacgacgaggaguucugcgacaugcugcgccuguucgacuucaacaagcaggccauccagcggcucaaggcgccggcccagauguccauccagcugaucaacaaggccgucaacgcccugaucaacgaccagcucgugaugaagaaccaccuccgcgacaucaugggcauccccuacugcaacuacagccgguacugcuaccugaaccacacgaccaccggccgcaccucccugcccaagugcugccuggugagcaacggguccuaccugaacgagacgcacuucagcgacgacaucgagcagcaggccgacaacaugaucaccgagaugcuccagaaggaguacauggagcggcagggcaagaccccgcuggggcuggucgaccuguucguguucuccaccagcuucuaccucaucuccaucuuccugcaccuggugaagauccccacgcaccgccacaucgucggcaagagcugccccaagccccaccggcucaaccacauggggaucugcuccugcggccuguacaagcagccgggcgugcccgugaaguggaagcgcugaggacuagucccuguucccagagcccacuuuuuuuucuuuuuuugaaauaaaauagccugucuuucagaucucaaaggcucuuuucagagccaccaaaaaaaaaaaaaaaaaaaaaaaaaaaaaaaaaaaaaaaaaaaaaaaaaaaaaaaaaaaaaaaaaaaaaaaaaaaaaaaaaaaaaaaaaaaaaaaaaaaaa

SEQ ID NO: 24991 - RNA, 1748 nt, Artificial Sequence
  mRNA product Design a-1 (hSL-A100) comprising derived and/or modified sequence from LASV(G733-SLE-2010;Clade IV)__AIT17154__GPCmut3 (opt1)
aggagagucccgcagucggcguccagcggcucugcuuguucgugugugugucguugcaggccuuauucaagcuuaccaugggccagaucgugaccuucuuccaggaggucccccacgugaucgaggaggugaugaacaucguccugaucgcccucagcauccuggccgugcugaaggggcucuacaacuucgcgaccugcggcaucguggggcuggucuccuuccugcuccugugcggccgcagcugcacgaccucccuguacaaggggguguacgagcuccagacccuggagcugaacauggagacccucaacaugacgaugccgcugagcugcaccaagaacaacucccaccacuacaucauggugggcaacgagaccggccuggagcucacccugacgaacaccagcaucaucaaccacaaguucugcaaccuguccgacgcccacaagaagaaccucuacgaccacgcccugaugagcaucaucuccaccuuccaccugagcauccccaacuucaaccaguacgaggccauguccugcgacuucaacgggggcaagaucagcguccaguacaaccucucccacagcuacgccggggacgcggccaaccacugcggcaccaucgccaacggggugcugcagacguucaugcggauggccuggggcggcuccuacaucgcgcuggacagcgggcgcgaccggugggacugcaucaugaccuccuaccaguaccucaucauccagaacaccaccugggaggaccacugccaguucagccgccccucccccaucggcuaccuggggcugcucagccagcggacgcgcgacaucuacaucagccggcgccggcgcggcaccuucaccuggacccuguccgacagcgagggcaaggacacgcccgggggcuacugccugacccgguggaugcucaucgaggccgagcugaagugcuucgggaacaccgccguggccaagugcaacgagaagcacgacgaggaguucugcgacaugcugcgccucuucgacuucaacaagcaggccauccagcggcugaaggcgccggcccagauguccauccagcugaucaacaaggccgucaacgcccucaucaacgaccagcugaucaugaagaaccaccuccgcgacaucaugggcauccccuacugcaacuacagcaaguacugcuaccugaaccacaccacgaccgggaagaccucccugcccaagugcugccuggugagcaacggcuccuaccucaacgagacccacuucagcgacgacaucgagcagcaggccgacaacaugaucacggagaugcugcagaaggaguacauggagcggcagggcaagaccccgcuggggcucguggaccuguucgucuucuccaccagcuucuaccugaucuccaucuuccugcaccucgugaagauccccacccaccgccacguggucggcaagagcugccccaagccccaccggcugaaccacauggggaucugcuccugcggccuguacgggcagccgggcgugcccgugaaguggaagcgcugaggacuagucccuguucccagagcccacuuuuuuuucuuuuuuugaaauaaaauagccugucuuucagaucucaaaggcucuuuucagagccaccaaaaaaaaaaaaaaaaaaaaaaaaaaaaaaaaaaaaaaaaaaaaaaaaaaaaaaaaaaaaaaaaaaaaaaaaaaaaaaaaaaaaaaaaaaaaaaaaaaaaa

SEQ ID NO: 24992 - RNA, 1748 nt, Artificial Sequence
  mRNA product Design a-1 (hSL-A100) comprising derived and/or modified sequence from MOPV/LASV reassortant(IGS-1;Clade IV)__AFY05576__GPCmut3 (opt1)
aggagagucccgcagucggcguccagcggcucugcuuguucgugugugugucguugcaggccuuauucaagcuuaccaugggccagaucgugaccuucuuccaggaggucccccacgugaucgaggaggugaugaacaucguccugaucgcccucagcgugcuggccgugcugaaggggcucuacaacuucgcgaccugcggccuggucgggcuggugacguuccuccugcugugcggccgcuccugcaccaccagccucuacaaggggguguacgagcugcagacccuggagcucaacauggagacgcugaacaugaccaugccgcuguccugcaccaagaacaacagccaccacuacaucauggucggcaacgagaccggccucgagcugacgcugaccaacaccuccaucaucaaccacaaguucugcaaccucagcgacgcccacaagaagaaccuguacgaccacgcccugauguccaucaucagcaccuuccaccucuccauccccaacuucaaccaguacgaggccaugagcugcgacuucaacgggggcaagaucuccgugcaguacaaccugagccacuccuacgccggggacgcggccaaccacugcggcacgguggccaacgggguccugcagaccuucaugcggauggccuggggcggcagcuacaucgcgcucgacuccgggcgcggcaacugggacugcaucaugaccagcuaccaguaccugaucauccagaacaccacgugggaggaccacugccaguucucccggcccagccccaucggguaccugggccuccugucccagcgcacccgggacaucuacaucagccgccggcgccggggcaccuucaccuggacgcugagcgacuccgagggggaggacaccccgggcggguacugccucacccgcuggaugcugaucgaggccgagcugaagugcuucggcaacaccgccguggccaagugcaacgagaagcacgacgaggaguucugcgacaugcuccggcuguucgacuucaacaagcaggccauccagcgccugaaggcgcccgcccagaugagcauccagcucaucaacaaggccgugaacgcccugaucaacgaccagcugaucaugaagaaccaccuccgggacaucauggggauccccuacugcaacuacuccaaguacugcuaccugaaccacacgaccaccggccgcaccagccugcccaagugcugccucgucuccaacggcagcuaccugaacgagacgcacuucuccgacgacaucgagcagcaggccgacaacaugaucaccgagaugcugcagaaggaguacauggagcggcaggggaagaccccgcucggccugguggaccuguucguguucagcaccuccuucuaccugaucagcaucuuccuccaccuggucaagauccccacgcaccgccacaucguggggaaguccugccccaagccccaccggcugaaccacaugggcaucugcagcugcgggcucuacaagcagccgggcgugcccgucaaguggaagcgcugaggacuagucccuguucccagagcccacuuuuuuuucuuuuuuugaaauaaaauagccugucuuucagaucucaaaggcucuuuucagagccaccaaaaaaaaaaaaaaaaaaaaaaaaaaaaaaaaaaaaaaaaaaaaaaaaaaaaaaaaaaaaaaaaaaaaaaaaaaaaaaaaaaaaaaaaaaaaaaaaaaaaa

SEQ ID NO: 24993 - RNA, 1748 nt, Artificial Sequence
  mRNA product Design a-1 (hSL-A100) comprising derived and/or modified sequence from LASV(LM765-SLE-2012;Clade IV)__AIT17814__GPCmut3 (opt1)
aggagagucccgcagucggcguccagcggcucugcuuguucgugugugugucguugcaggccuuauucaagcuuaccaugggccagaucgugaccuucuuccaggaggucccccacgugaucgaggaggugaugaacaucguccugaucgcccucagcauccuggccgugcugaaggggcucuacaacuucgcgaccugcggccugguggggcuggucacguuccuccugcugugcggccgcuccugcaccaccagccucuacaaggggguguacgagcugcagacccuggagcucaacauggagacgcugaacaugaccaugccgcuguccugcaccaagaacaacagccaccacuacaucauggugggcaacgagaccggccucgagcugacgcugaccaacaccuccaucaucgaccacaaguucugcaaccucagcgacgcccaccggaagaaccuguacgaccacgcccugauguccaucaucagcaccuuccaccucuccauccccaacuucaaccaguacgaggccaugagcugcgacuucaacgggggcaagaucuccguccaguacaaccugagccacuccuacgccaaggacgcggccgaccacugcgggacgguggccaacggcgugcugcagaccuucaugcgcauggccuggggcgggagcuacaucgcgcucgacuccggccgggggcgcugggacugcaucaugaccagcuaccaguaccugaucauccagaacaccacgugggaggaccacugccaguucucccggcccagccccaucggcuaccuggggcuccugucccagcgcacccgggacaucuacaucagccgccggcgccggggcaccuucaccuggacgcugagcgacuccgagggcaaggacacccccgggggcuacugccucacccgcuggaugcugaucgaggccgagcugaagugcuucgggaacaccgccgucgccaagugcaacgagaagcacgacgaggaguucugcgacaugcuccggcuguucgacuucaacaagcaggccauccagcgccugaaggcgccggcccagaugagcauccagcucaucaacaaggccgugaacgcccugaucaacgaccagcugaucaugaagaaccaccuccgggacaucaugggcauccccuacugcaacuacuccaaguacugcuaccugaaccacacgaccaccgggaagaccagccugcccaagugcugccucguguccaacggcagcuaccugaacgagacgcacuucuccgacgacaucgagcagcaggccgacaacaugaucaccgagaugcugcagaaggaguacauggagcgccagggcaagaccccgcucgggcuggucgaccuguucguguucagcaccuccuucuaccugaucagcaucuuccuccaccuggugaagauccccacgcaccggcacaucgucggcaagcccugccccaagccgcaccgccugaaccacauggggaucugcuccugcggccucuacaagcagcccggggugcccgugaaguggaagcggugaggacuagucccuguucccagagcccacuuuuuuuucuuuuuuugaaauaaaauagccugucuuucagaucucaaaggcucuuuucagagccaccaaaaaaaaaaaaaaaaaaaaaaaaaaaaaaaaaaaaaaaaaaaaaaaaaaaaaaaaaaaaaaaaaaaaaaaaaaaaaaaaaaaaaaaaaaaaaaaaaaaaa

SEQ ID NO: 24994 - RNA, 1748 nt, Artificial Sequence
  mRNA product Design a-1 (hSL-A100) comprising derived and/or modified sequence from LASV(LM776-SLE-2012;Clade IV)__AIT17824__GPCmut3 (opt1)
aggagagucccgcagucggcguccagcggcucugcuuguucgugugugugucguugcaggccuuauucaagcuuaccaugggccagaucgugaccuucuuccaggaggucccccacgugaucgaggaggugaugaacaucguccugaucgcccucagcauccuggccgugcugaaggggcucuacaacuucgcgaccugcggccugguggggcuggucacguuccuccugcugugcggccgcuccugcaccaccagcguguacaaggggguguacgagcuccagacccuggagcugaacauggagacgcucaacaugaccaugccgcuguccugcaccaagaacaacagccaccacuacaucauggucggcaacgagaccggccuggagcucacgcugaccaacaccuccaucaucaaccacaaguucugcaaccugagcgacgcccacaagaagaaccucuacgaccacgcccugauguccaucaucagcaccuuccaccuguccauccccaacuucaaccaguacgaggccaugagcugcgacuucaacgggggcaagaucuccgugcaguacaaccucagccacuccuacgccggggacgcggccaaccacugcggcacgguggccaacgggguccugcagaccuucaugcggauggccuggggcggcagcuacaucgcgcuggacuccgggcacggcaagugggacugcaucaugaccagcuaccaguaccucaucauccagaacaccacgugggaggaccacugccaguucucccgccccagccccaucggguaccugggccugcucucccagcggacccgcgacaucuacaucagccggcgccggcgcggcaccuucaccuggacgcugagcgacuccgaggggaaggacaccccgggcggguacugccugacccgguggaugcucaucgaggccgagcugaagugcuucggcaacaccgccguggccaagugcaacgagaagcacgacgaggaguucugcgacaugcugcgccucuucgacuucaacaagcaggccauccagcggcugaaggcgcccgcccagaugagcauccagcugaucaacaaggccgugaacgcccucaucaacgaccagcugaucaugaagaaccaccuccgcgacaucauggggauccccuacugcaacuacuccaaguacugcuaccugaaccacacgaccaccggcaagaccagccugcccaagugcugccuggucuccaacggcagcuaccucaacgagacgcacuucuccgacgacaucgagcagcaggccgacaacaugaucaccgagaugcugcagaaggaguacauggagcggcaggggaagaccccgcugggccucguggaccuguucguguucagcaccuccuucuaccugaucagcaucuuccugcaccucgucaagauccccacgcaccgccacaucguggggaaguccugccccaagccccaccggcugaaccacaugggcaucugcagcugcgggcuguacaagcagccgggcgugcccguccgcuggaagcggugaggacuagucccuguucccagagcccacuuuuuuuucuuuuuuugaaauaaaauagccugucuuucagaucucaaaggcucuuuucagagccaccaaaaaaaaaaaaaaaaaaaaaaaaaaaaaaaaaaaaaaaaaaaaaaaaaaaaaaaaaaaaaaaaaaaaaaaaaaaaaaaaaaaaaaaaaaaaaaaaaaaaa

SEQ ID NO: 24995 - RNA, 1748 nt, Artificial Sequence
  mRNA product Design a-1 (hSL-A100) comprising derived and/or modified sequence from LASV(Mad39;Clade IV)__ANH09722__GPCmut3 (opt1)
aggagagucccgcagucggcguccagcggcucugcuuguucgugugugugucguugcaggccuuauucaagcuuaccaugggccagaucgugaccuucuuccaggaggucccccacgugaucgaggaggugaugaacaucguccugaucgcccucagcauccuggccgugcugaaggggcucuacaacguggcgaccugcggccugaucgggcuggucacguuccuccugcugugcggccgcuccugcaccaccacccucuacaaggggguguacgagcugcaggcccuggagcucaacauggagacgcugaacaugaccaugccgcugagcugcaccaagaacaacucccaccacuacauccgggugggcaacgagaccggccucgagcugacgcugaccaacaccagccucaucaaccacaaguucugcaaccuguccgacgcccacaagaagaaccuguacgaccacgcccucaugagcaucaucuccaccuuccaccugagcauccccaacuucaaccaguacgaggccauguccugcgacuucaacgacgggaagaucagcguccaguacaaccugucccacacguacgcgggcgacaccgccaaccacugcgggaccguggccaacggcgugcuccagaccuucaugcgcauggccuggggcgggagcuacaucgcgcuggacuccggccgcgggggcugggacugcaucaugacgagcuaccaguaccugaucauccagaacaccaccugggaggaccacugccaguucucccggcccagccccaucggguaccucggccugcugucccagcggacccgcgacaucuacaucagccggcgccggcgcggcacguucaccuggacccucuccgacagcgaggggaaggacaccccgggcggguacugccugacgcgguggaugcugaucgaggccgagcucaagugcuucggcaacaccgccgucgccaagugcaacgagaagcacgacgaggaguucugcgacaugcugcgccuguucgacuucaacaagcaggccauccagcggcucaaggcgcccgcccagaugagcauccagcugaucaacaaggccgugaacgcccugaucaacgaccagcucaucaugaagaaccaccuccgcgacaucauggggauccccuacugcaacuacuccaaguacugcuaccugaaccacaccgugaccggcaagacgagccugcccaagugcugccuggucuccaacggcagcuaccugaacgagacccacuucuccgacgacaucgagcagcaggccgacaacaugaucaccgagaugcuccagaaggaguacauggagcggcaggggaagaccccgcugggccugguggaccuguucguguucagcacguccuucuaccucaucagcaucuuccugcaccuggucaagauccccacccaccgccacgugguggggaagcccugccccaagccgcaccggcucaaccacaugggcaucugcuccugcggguucuacaagcagcccggcguccccgugcgcuggaagcggugaggacuagucccuguucccagagcccacuuuuuuuucuuuuuuugaaauaaaauagccugucuuucagaucucaaaggcucuuuucagagccaccaaaaaaaaaaaaaaaaaaaaaaaaaaaaaaaaaaaaaaaaaaaaaaaaaaaaaaaaaaaaaaaaaaaaaaaaaaaaaaaaaaaaaaaaaaaaaaaaaaaaa

SEQ ID NO: 24996 - RNA, 1748 nt, Artificial Sequence
  mRNA product Design a-1 (hSL-A100) comprising derived and/or modified sequence from LASV(Z0947-SLE-2011;Clade IV)__AIT17840__GPCmut3 (opt1)
aggagagucccgcagucggcguccagcggcucugcuuguucgugugugugucguugcaggccuuauucaagcuuaccaugggccagaucgugaccuucuuccaggaggucccccacgugaucgaggaggugaugaacaucguccugaucgcccucagcauccuggccgugcugaaggggcucuacaacuucgcgaccugcggccugguggggcuggucacguuccuccugcugugcggccgcuccugcaccaucagccucuacaaggggguguacgagcugcagacccuggagcucaacauggagacccugaacaugacgaugccgcuguccugcaccaagaacaacagccaccacuacaucauggugggcaacgagaccggccucgagcugacccugacgaacaccuccaucaucaaccacaaguucugcaaccucagcgacgcccacaagaagaaccuguacgaccacgcccugauguccaucaucagcaccuuccaccucuccauccccaacuucaaccaguacgaggccaugagcugcgacuucaacgggggcaagaucuccguccaguacaaccugagccacuccuacgccggggacgcggccaaccacugcggcaccguggccaacggggugcugcagacguucaugcggauggccuggggcggcagcuacaucgcgcucgacuccgggcgcgaccggugggacugcaucaugaccagcuaccaguaccugaucauccagaacaccaccugggaggaccacugccaguucucccgccccagccccaucggcuaccuggggcuccugucccagcggacgcgcgacaucuacaucagccggcgccggcgcggcaccuucaccuggacccugagcgacuccgagggcaaggacacgcccgggggcuacugccucacccgguggaugcugaucgaggccgagcugaagugcuucgggaacaccgccgucgccaagugcaacgagaagcacgacgaggaguucugcgacaugcuccgccuguucgacuucaacaagcaggccauccagcggcugaaggcgccggcccagaugagcauccagcucaucaacaaggccgugaacgcccugaucaacgaccagcugaucaugaagaaccaccuccgcgacaucaugggcauccccuacugcaacuacuccaaguacugcuaccugaaccacaccacgaccgggaagaccagccugcccaagugcugccucguguccaacggcagcuaccugaacgagacccacuucuccgacgacaucgagcagcaggccgacaacaugaucacggagaugcugcagaaggaguacauggagcggcagggcaagaccccgcucgggcuggucgaccuguucguguucagcaccuccuucuaccugaucagcaucuuccuccaccuggugaagauccccacccaccgccacaucgucggcaagcccugccccaagccgcaccggcugaaccacauggggaucugcuccugcggccucuacaagcagcccggggugcccgugaaguggaagcgcugaggacuagucccuguucccagagcccacuuuuuuuucuuuuuuugaaauaaaauagccugucuuucagaucucaaaggcucuuuucagagccaccaaaaaaaaaaaaaaaaaaaaaaaaaaaaaaaaaaaaaaaaaaaaaaaaaaaaaaaaaaaaaaaaaaaaaaaaaaaaaaaaaaaaaaaaaaaaaaaaaaaaa

SEQ ID NO: 24997 - RNA, 1748 nt, Artificial Sequence
  mRNA product Design a-1 (hSL-A100) comprising derived and/or modified sequence from LASV(Josiah;Clade IV)__NP_694870__GPCmut3 (opt4)
aggagagucccgcagucggcguccagcggcucugcuuguucgugugugugucguugcaggccuuauucaagcuuaccaugggccagaucgugaccuucuuccaggaggugccccacgugaucgaggaggugaugaacaucgugcugaucgcccugagcgugcuggccgugcugaagggccuguacaacuucgccaccugcggccuggugggccuggugaccuuccugcugcugugcggcagaagcugcaccaccagccuguacaagggcguguacgagcugcagacccuggagcugaacauggagacccugaacaugaccaugccccugagcugcaccaagaacaacagccaccacuacaucauggugggcaacgagaccggccuggagcugacccugaccaacaccagcaucaucaaccacaaguucugcaaccugagcgacgcccacaagaagaaccuguacgaccacgcccugaugagcaucaucagcaccuuccaccugagcauccccaacuucaaccaguacgaggccaugagcugcgacuucaacggcggcaagaucagcgugcaguacaaccugagccacagcuacgccggcgacgccgccaaccacugcggcaccguggccaacggcgugcugcagaccuucaugagaauggccuggggcggcagcuacaucgcccuggacagcggcagaggcaacugggacugcaucaugaccagcuaccaguaccugaucauccagaacaccaccugggaggaccacugccaguucagcagacccagccccaucggcuaccugggccugcugagccagagaaccagagacaucuacaucagcagaagaagaagaggcaccuucaccuggacccugagcgacagcgagggcaaggacacccccggcggcuacugccugaccagauggaugcugaucgaggccgagcugaagugcuucggcaacaccgccguggccaagugcaacgagaagcacgacgaggaguucugcgacaugcugagacuguucgacuucaacaagcaggccauccagagacugaaggcccccgcccagaugagcauccagcugaucaacaaggccgugaacgcccugaucaacgaccagcugaucaugaagaaccaccugagagacaucaugggcauccccuacugcaacuacagcaaguacugcuaccugaaccacaccaccaccggcagaaccagccugcccaagugcugccuggugagcaacggcagcuaccugaacgagacccacuucagcgacgacaucgagcagcaggccgacaacaugaucaccgagaugcugcagaaggaguacauggagagacagggcaagaccccccugggccugguggaccuguucguguucagcaccagcuucuaccugaucagcaucuuccugcaccuggugaagauccccacccacagacacaucgugggcaagagcugccccaagccccacagacugaaccacaugggcaucugcagcugcggccuguacaagcagcccggcgugcccgugaaguggaagagaugaggacuagucccuguucccagagcccacuuuuuuuucuuuuuuugaaauaaaauagccugucuuucagaucucaaaggcucuuuucagagccaccaaaaaaaaaaaaaaaaaaaaaaaaaaaaaaaaaaaaaaaaaaaaaaaaaaaaaaaaaaaaaaaaaaaaaaaaaaaaaaaaaaaaaaaaaaaaaaaaaaaaa

SEQ ID NO: 24998 - RNA, 1745 nt, Artificial Sequence
  mRNA product Design a-1 (hSL-A100) comprising derived and/or modified sequence from LASV(LP;Clade I)__AAF86701__GPCmut3 (opt4)
aggagagucccgcagucggcguccagcggcucugcuuguucgugugugugucguugcaggccuuauucaagcuuaccaugggccagaucaucaccuucuuccaggaggugccccacgugaucgaggaggugaugaacaucgugcugaucgcccugagccugcuggccauccugaagggccuguacaacaucgccaccugcggcaucaucggccugguggccuuccuguuccugugcggcaagagcugcagccugacccugaagggcggcuacgagcugcagacccuggagcugaacauggagacccugaacaugaccaugccccugagcugcaccaagaacagcagccaccacuacaucagagugggcaacgagaccggccuggagcugacccugaccaacaccagcaucaucaaccacaaguucugcaaccugagcgacgcccacaagaagaaccuguacgaccacgcccugaugagcaucaucagcaccuuccaccugagcauccccaacuucaaccaguacgaggccaugagcugcgacuucaacggcggcaagaucagcgugcaguacaaccugagccacagcuacgccggcgacgccgccgagcacugcggcaccguggccaacggcgugcugcagaccuucaugagaauggccuggggcggcagauacaucgcccuggacagcggcaagggcaacugggacugcaucaugaccagcuaccaguaccugaucauccagaacaccaccugggaggaccacugccaguucagcagacccagccccaucggcuaccugggccugcugagccagagaaccagagacaucuacaucagcagaagaagaagaggcaccuucaccuggacccugagcgacagcgagggcaacgagacccccggcggcuacugccugaccagauggaugcugaucgaggccgagcugaagugcuucggcaacaccgccguggccaagugcaacgagaagcacgacgaggaguucugcgacaugcugagacuguucgacuucaacaagcaggccaucagaagacugaaggcccccgcccagaugagcauccagcugaucaacaaggccgugaacgcccugaucaacgaccagcugaucaugaagaaccaccugagagacaucaugggcauccccuacugcaacuacagcaaguacugcuaccugaaccacaccagcagcggcagaaccagccugcccaagugcugccugaucagcaacggcagcuaccugaacgagacccaguucagcgacgacaucgagcagcaggccgacaacaugaucaccgagaugcugcagaaggaguacaucgagagacagggcaagaccccccugggccugguggacaucuucaucuucagcaccagcuucuaccugaucagcaucuuccugcaccugaucaagauccccacccacagacacaucgugggcaagcccugccccaagccccacagacugaaccacaugggcgugugcagcugcggccuguacaagcaccccggcgugcccaccaaguggaagagaugaggacuagucccuguucccagagcccacuuuuuuuucuuuuuuugaaauaaaauagccugucuuucagaucucaaaggcucuuuucagagccaccaaaaaaaaaaaaaaaaaaaaaaaaaaaaaaaaaaaaaaaaaaaaaaaaaaaaaaaaaaaaaaaaaaaaaaaaaaaaaaaaaaaaaaaaaaaaaaaaaaaaa

SEQ ID NO: 24999 - RNA, 1745 nt, Artificial Sequence
  mRNA product Design a-1 (hSL-A100) comprising derived and/or modified sequence from LASV(803213;Clade II)__AAF86703__GPCmut3 (opt4)
aggagagucccgcagucggcguccagcggcucugcuuguucgugugugugucguugcaggccuuauucaagcuuaccaugggccagaucaucaccuucuuccaggaggugccccacgugaucgaggaggugaugaacaucgugcugaucgcccugagccugcuggccauccugaagggcaucuacaacguggccaccugcggccuguucggccugaucagcuuccugcugcugugcggcagaagcugcagcgugaccuacaagggcguguacgagcugcagacccuggagcugaacauggccaaccugaacaugaccaugccccugagcugcaccaagaacaacagccaccacuacaucauggugggcaacgagaccggccuggagcugacccugaccaacaccagcaucaucaaccacaaguucugcaaccugagcgacgcccacaagaagaaccuguacgaccacgcccugaugagcaucaucagcaccuuccaccugagcauccccaacuucaaccaguacgaggccaugagcugcgacuucaacggcggcaagaucagcgugcaguacaaccugagccacagcuucgccguggacgccgccaaccacugcggcaccaucgccaacggcgugcugcagaccuucaugagaauggccuggggcggcagcuacaucgcccuggacagcggcaagggcaacugggacugcaucaugaccagcuaccaguaccugaucauccagaacaccaccugggaggaccacugccaguucagcagacccagccccaucggcuaccugggccugcugagccagagaaccagagacaucuacaucagcagaagaagaagaggcaccuucaccuggacccugagcgacagcgagggcaacgaggcccccggcggcuacugccugaccagauggaugcugaucgaggccgagcugaagugcuucggcaacaccgccguggccaagugcaacgagaagcacgacgaggaguucugcgacaugcugagacuguucgacuucaacaagcaggccaucaagagacugaagacccccgcccagaugagcauccagcugaucaacaaggccgugaacgcccugaucaacgaccagcugaucaugaagaaccaccugagagacaucaugggcauccccuacugcaacuacagcagauacugcuaccugaaccacaccgugaccggcaagaccagccugcccagaugcugccuggugagcaacggcagcuaccugaacgagacccacuucagcgacgacaucgagcagcaggccgacaacaugaucaccgagaugcugcagaaggaguacauggacagacagggcaagaccccccugggccugguggaccuguucguguucagcaccagcuucuaccugaucagcaucuuccugcaccuggugaagauccccacccacagacacaucgugggcaagcccugccccaagccccacagacugaaccacaugggcaucugcagcugcggccuguacaagcaccccggcgugcccgugaaguggaagagaugaggacuagucccuguucccagagcccacuuuuuuuucuuuuuuugaaauaaaauagccugucuuucagaucucaaaggcucuuuucagagccaccaaaaaaaaaaaaaaaaaaaaaaaaaaaaaaaaaaaaaaaaaaaaaaaaaaaaaaaaaaaaaaaaaaaaaaaaaaaaaaaaaaaaaaaaaaaaaaaaaaaaa

SEQ ID NO: 25000 - RNA, 1745 nt, Artificial Sequence
  mRNA product Design a-1 (hSL-A100) comprising derived and/or modified sequence from LASV(GA391;Clade III)__CAA36645__GPCmut3 (opt4)
aggagagucccgcagucggcguccagcggcucugcuuguucgugugugugucguugcaggccuuauucaagcuuaccaugggccagaucgugaccuucuuccaggaggugccccacgugaucgaggaggugaugaacaucgugcugaucgcccugagcauccuggccauccugaagggccuguacaacguggccaccugcggccugaucggccuggugaccuuccugcugcugagcggcagaagcugcagccugaucuacaagggcaccuacgagcugcagacccuggagcugaacauggagacccugaacaugaccaugccccugagcugcaccaagaacaacagccaccacuacaucagagugggcaacgagaccggccuggagcugacccugaccaacaccagcauccugaaccacaaguucugcaaccugagcgacgcccacaagagaaaccuguacgaccacagccugaugagcaucaucagcaccuuccaccugagcauccccaacuucaaccaguacgaggccaugagcugcgacuucaacggcggcaagaucaccgugcaguacaaccugagccacagcuucgccguggacgccgccggccacugcggcacccuggccaacggcgugcugcagaccuucaugagaauggccuggggcggcagcuacaucgcccuggacagcggcagaggcaacugggacugcaucaugaccagcuaccaguaccugaucauccagaacaccaccugggacgaccacugccaguucagcagacccagccccaucggcuaccugggccugcugagccagagaaccagagacaucuacaucagcagaagaagaagaggcaccuucaccuggacccugagcgacagcgagggcaacgagacccccggcggcuacugccugaccagauggaugcugaucgaggccgagcugaagugcuucggcaacaccgccguggccaagugcaacgagaagcacgacgaggaguucugcgacaugcugagacuguucgacuucaacaagcaggccaucagaagacugaagacccccgcccagaugagcauccagcugaucaacaaggccgugaacgcccugaucaacgaccagcugaucaugaagaaccaccugagagacaucaugggcauccccuacugcaacuacagcagauacugcuaccugaaccacaccagcaccggcaagaccagccugcccagaugcugccugaucagcaacggcagcuaccugaacgagaccaaguucagcgacgacaucgagcagcaggccgacaacaugaucaccgagaugcugcagaaggaguacaucgacagacagggcaagaccccccugggccugguggaccuguucguguucagcaccagcuucuaccugaucagcaucuuccugcaccuggugaagauccccacccacagacacaucgugggcaagcccugccccaagccccacagacugaaccacaugggcaucugcagcugcggccuguacaagcagcccggcgugcccgugagauggaagagaugaggacuagucccuguucccagagcccacuuuuuuuucuuuuuuugaaauaaaauagccugucuuucagaucucaaaggcucuuuucagagccaccaaaaaaaaaaaaaaaaaaaaaaaaaaaaaaaaaaaaaaaaaaaaaaaaaaaaaaaaaaaaaaaaaaaaaaaaaaaaaaaaaaaaaaaaaaaaaaaaaaaaa

SEQ ID NO: 25001 - RNA, 1748 nt, Artificial Sequence
  mRNA product Design a-1 (hSL-A100) comprising derived and/or modified sequence from LASV(AV;Clade V)__CCA30314__GPCmut3 (opt4)
aggagagucccgcagucggcguccagcggcucugcuuguucgugugugugucguugcaggccuuauucaagcuuaccaugggccagaucgugaccuucuuccaggaggugccccacgugaucgaggaggugaugaacaucgugcugaucgcccugagcauccuggccgugcugaagggccuguacaacaucgccaccugcggccugaucggccugaucaccuuccugcugcugugcggcagaagcugcagcagcaaccuguacaagggcguguacgagcugcagagccuggaccugaacauggagacccugaacaugaccaugccccugagcugcaccaagaacaacagccaccacuacaucagagugggcaacgacaccggccuggagcugacccugaccaacaccagcauccugaaccacaaguucugcaaccugagcgacgcccacaagaaggaccuguacgaccacgcccugaugagcaucaucagcaccuuccaccugagcauccccaacuucaaccaguacgaggccaugagcugcgacuucaacggcggcaagaucagcgugcaguacaaccugagccacagcuacgccaucgacgccgccaaccacugcggcaccguggccaacggcauccugcagaccuucaugagaauggccuggggcggcagcuacaucgcccuggacagcggcagaggcaacugggacugcaucaugaccagcuaccaguaccugaucauccagaacaccaccugggagaaccacugccaguucagcagacccagccccaucggcuaccugggccugcugagccagagaaccagagacaucuacaucagcagaagaagaagaggcaccuucaccuggacccugagcgacagcgagggcaacgccacccccggcggcuacugccugaccagauggaugcugaucgaggccgagcugaagugcuucggcaacaccgccguggccaagugcaacgagaagcacgacgaggaguucugcgacaugcugagacuguucgacuucaacaagcaggccaucagcagacugaagagccccgcccagaugagcauccagcugaucaacaaggccgugaacgcccugaucaacgaccagcugaucaugaagaaccaccugagagacaucaugggcauccccuacugcaacuacagcaaguacugcuaccugaaccacaccaucaccggcaagaccagccugcccaagugcugccuggugagcaacggcagcuaccugaacgagacccacuucagcgacgacaucgagcagcaggccgacaacaugaucaccgagaugcugcagaaggaguacauggagagacagggcaagaccccccugggccugguggaccuguucguguucagcaccagcuucuaccugaucagcaucuuccugagacuggugaagauccccacccacagacacaucgugggcaagcccugccccaagccccacagacugaaccacaugggcaucugcagcugcggccuguacaagcagcccggcgugcccgugagauggaagagaugaggacuagucccuguucccagagcccacuuuuuuuucuuuuuuugaaauaaaauagccugucuuucagaucucaaaggcucuuuucagagccaccaaaaaaaaaaaaaaaaaaaaaaaaaaaaaaaaaaaaaaaaaaaaaaaaaaaaaaaaaaaaaaaaaaaaaaaaaaaaaaaaaaaaaaaaaaaaaaaaaaaaa

SEQ ID NO: 25002 - RNA, 1745 nt, Artificial Sequence
  mRNA product Design a-1 (hSL-A100) comprising derived and/or modified sequence from LASV(Togo/2016/7082;Clade VI)__AMR44577__GPCmut3 (opt4)
aggagagucccgcagucggcguccagcggcucugcuuguucgugugugugucguugcaggccuuauucaagcuuaccaugggccagaucaucaccuucuuccaggaggugccccacgugaucgaggaggugaugaacaucgugcugaucgcccugagccugcuggccauccugaagggcguguacaacguggccaccugcggcaucaucggccuggugaccuuccuguuccugugcggcagaagcugcagccugaucuacaagggcagcuacgagcugcagacccuggagcugaacauggagacccugaacaugaccaugccccugagcugcaccaagaacagcagccaccacuacaucagagugggcaacgagaccggccuggagcugacccugaccaacaccagcaucaucaaccacaaguucugcaaccugagcgacgcccacaagagaaaccuguacgaccacgcccugaugagcauccugagcaccuuccaccugagcauccccaacuucaaccaguacgaggccaugagcugcgacuucaacggcggcaagaucagcgugcaguacaaccugagccacgccuacgccguggacgccgccgagcacugcggcaccguggccaacggcgugcugcagaccuucaugagaauggccuggggcggcagcuacaucgcccuggacagcggcagaggcaacugggacugcaucaugaccagcuaccaguaccugaucauccagaacaccaccugggaggaccacugccaguucagcagacccagccccaucggcuaccugggccugcugagccagagaaccagagacaucuacaucagcagaagaagaagaggcaccuucaccuggacccugagcgacagcgagggcaacgagacccccggcggcuacugccugaccagauggaugcugaucgaggccgagcugaagugcuucggcaacaccgccguggccaagugcaacgagaagcacgacgaggaguucugcgacaugcugagacuguucgacuucaacaagcaggccauccagagacugaagagccccgcccagaugagcauccagcugaucaacaaggccgugaacgcccugaucaacgaccagcugaucaugaagaaccaccugagagacaugaugggcauccccuacugcaacuacagcaaguacugcuaccugaaccacaccagcagcggcagaaccagccugcccaagugcugccuggugagcaacggcagcuaccugaacgagacccacuucagcgacgacaucgagcagcaggccgacaacaugaucaccgagaugcugcagaaggaguacaucgacagacagggcaagaccccccugggccugguggaccuguucguguucagcaccagcuucuaccugaucagcaucuuccugcaccugaucaagauccccacccacagacacaucgugggcaagcccugccccaagccccacagacugaaccacaugggcaucugcagcugcggccuguacaagcagcccggcgugcccaccagauggaagagaugaggacuagucccuguucccagagcccacuuuuuuuucuuuuuuugaaauaaaauagccugucuuucagaucucaaaggcucuuuucagagccaccaaaaaaaaaaaaaaaaaaaaaaaaaaaaaaaaaaaaaaaaaaaaaaaaaaaaaaaaaaaaaaaaaaaaaaaaaaaaaaaaaaaaaaaaaaaaaaaaaaaaa

SEQ ID NO: 25003 - RNA, 1745 nt, Artificial Sequence
  mRNA product Design a-1 (hSL-A100) comprising derived and/or modified sequence from LASV(KAK-428;Clade n.d. (VII))__ANH09740__GPCmut3 (opt4)
aggagagucccgcagucggcguccagcggcucugcuuguucgugugugugucguugcaggccuuauucaagcuuaccaugggccagaucgugaccuucuuccaggaggugccccacgugaucgaggaggugaugaacaucgugcugaucgcccugagccugcuggccauccugaagggccuguacaacuucgccaccugcggcgugaucggccugaucaccuuccugcugcugugcggcagaagcugcagcgccaccuacaagggccaguacgagcugcagacccuggagcugaacauggagagccugaacaugaccaugccccugagcugcaccaagaacaacagccaccacuacaucagagccggcaacaacaccggccuggagcugacccugaccaacaccagcaucaucagccacaaguucugcaaccugagcgacgcccacaagaagaaccuguacgaccacacccugaugagcaucaucaccaccuuccaccugagcauccccaacuucaaccaguacgaggccaugagcugcgacuucaacggcggcaagaucagcauccaguacaaccugagccacagcuacgccggcgacgccgcccagcacugcggcaccguggccaacggcgugcugcagaccuucaugagaauggccuggggcggcagcuaccuggcccuggacagcggcagaagaggcugggacugcaucaucagcagcuaccaguaccugaucauccagaacaccaccugggacgaccacugccaguucagcagacccagccccaucggcuaccugggcuucgugagccagaagaccagagacaucuacaucagcagaagaagaagaggcaccuucaccuggacccugagcgacagcgagggccacgacaugcccggcggcuacugccugaccagauggaugcugaucgaggccgaccugaagugcuucggcaacaccgccguggccaagugcaacgagaagcacgacgaggaguucugcgacauguggagacuguucgacuucaacaagcaggccauccagagacugaaggcccccgcccagaugaacauccagcugaucaacaaggccgugaacgcccugaucaacgaccagcugaugaugaagaaccaccugagagacaucaugggcauccccuacugcaacuacagcaaguucugcuaccugaacaacaccaccaccggcagaaccagccugcccagaugcugccugaucagcaacggcagcuaccugaacgagacccacuucagcgacgacaucgagcagcaggccgacaacaugaucaccgagaugcugcagaaggaguacauggacagacagggcaagaccccccugggccugguggaccuguucguguucagcaccagcuucuaccugaucaccaucuuccugcaccuggugaagauccccacccacagacacaucgugggcaagcccugccccaagccccacagacugaaccacaugggcaucugcagcugcggccuguacaagcagcccggcgugcccgugagauggaagagaugaggacuagucccuguucccagagcccacuuuuuuuucuuuuuuugaaauaaaauagccugucuuucagaucucaaaggcucuuuucagagccaccaaaaaaaaaaaaaaaaaaaaaaaaaaaaaaaaaaaaaaaaaaaaaaaaaaaaaaaaaaaaaaaaaaaaaaaaaaaaaaaaaaaaaaaaaaaaaaaaaaaaa

SEQ ID NO: 25004 - RNA, 1745 nt, Artificial Sequence; identical to SEQ ID NO: 24998
  mRNA product Design a-1 (hSL-A100) comprising derived and/or modified sequence from LASV(Pinneo-NIG-1969;Clade I)__AIT17836__GPCmut3 (opt4)

SEQ ID NO: 25005 - RNA, 1745 nt, Artificial Sequence
  mRNA product Design a-1 (hSL-A100) comprising derived and/or modified sequence from LASV(ISTH0009-NIG-2011;Clade II)__AIT17404__GPCmut3 (opt4)
aggagagucccgcagucggcguccagcggcucugcuuguucgugugugugucguugcaggccuuauucaagcuuaccaugggccagaucaucaccuucuuccaggaggugccccacgugaucgaggaggugaugaacaucgugcugaucgcccugagccugcuggccauccugaagggcaucuacaacguggccaccugcggccuguucggccuggugagcuuccugcugcugugcggcagaagcugcagcaccaccuacaagggcguguacgagcugcagacccuggagcuggacauggccagccugaacaugaccaugccccugagcugcaccaagaacaacagccaccacuacaucauggugggcaacgagaccggccuggagcugacccugaccaacaccagcaucaucaaccacaaguucugcaaccugagcgacgcccacaagaagaaccuguacgaccacgcccugaugagcaucaucagcaccuuccaccugagcauccccaacuucaaccaguacgaggccaugagcugcgacuucaacggcggcaagaucagcgugcaguacaaccugagccacgccuacgccguggacgccgccaaccacugcggcaccaucgccaacggcgugcugcagaccuucaugagaauggccuggggcggcagcuacaucgcccuggacagcggcaagggcagcugggacugcaucaugaccagcuaccaguaccugaucauccagaacaccaccugggaggaccacugccaguucagcagacccagccccaucggcuaccugggccugcugagccagagaaccagagacaucuacaucagcagaagaagaagaggcaccuucaccuggacccugagcgacagcgagggcaacgagacccccggcggcuacugccugaccagauggaugcugaucgaggccgagcugaagugcuucggcaacaccgccguggccaagugcaacgagaagcacgacgaggaguucugcgacaugcugagacuguucgacuucaacaagcaggccaucagaagacugaagacccccgcccagaugagcauccagcugaucaacaaggccgugaacgcccugaucaacgaccagcugaucaugaagaaccaccugagagacaucaugggcauccccuacugcaacuacagcaaguacugcuaccugaaccacaccgugaccggcaagaccagccugcccagaugcugccuggugagcaacggcagcuaccugaacgagacccacuucagcgacgacaucgagcagcaggccgacaacaugaucaccgagcugcugcagaaggaguacauggacagacagggcaagaccccccugggccugguggaccuguucguguucagcaccagcuucuaccugaucagcaucuuccugcaccugaucaagauccccacccacagacacaucaccggcaagcccugccccaagccccacagacugaaccacaugggcaucugcagcugcggccuguacaagcaccccggcgugcccgugaaguggaagagaugaggacuagucccuguucccagagcccacuuuuuuuucuuuuuuugaaauaaaauagccugucuuucagaucucaaaggcucuuuucagagccaccaaaaaaaaaaaaaaaaaaaaaaaaaaaaaaaaaaaaaaaaaaaaaaaaaaaaaaaaaaaaaaaaaaaaaaaaaaaaaaaaaaaaaaaaaaaaaaaaaaaaa

SEQ ID NO: 25006 - RNA, 1745 nt, Artificial Sequence
  mRNA product Design a-1 (hSL-A100) comprising derived and/or modified sequence from LASV(ISTH2010-NIG-2012;Clade II)__AIT17482__GPCmut3 (opt4)
aggagagucccgcagucggcguccagcggcucugcuuguucgugugugugucguugcaggccuuauucaagcuuaccaugggccagaucaucaccuucuuccaggaggugccccacgugaucgaggaggugaugaacaucgugcugaucgcccugagccugcuggccauccugaagggcaucuacaacguggccaccugcggccuguucggccuggugagcuuccugcugcugugcggcagaagcugcagcaccaccuacaagggcguguacgagcugcagacccuggagcuggacauggccagccugaacaugaccaugccccugagcugcaccaagaacaacagccaccacuacaucauggugggcaacgagaccggccuggagcugacccugaccaacaccagcaucaucaaccacaaguucugcaaccugagcgacgcccacaagaagaaccuguacgaccacgcccugaugagcaucaucagcaccuuccaccugagcauccccaacuucaaccaguacgaggccaugagcugcgacuucaacggcggcaagaucagcgugcaguacaaccugagccacgccuacgccguggacgccgccaaccacugcggcaccaucgccaacggcgugcugcagaccuucaugagaauggccuggggcggcagcuacaucgcccuggacagcggcaagggcagcugggacugcaucaugaccagcuaccaguaccugaucauccagaacaucaccugggaggaccacugccaguucagcagacccagccccaucggcuaccugggccugcugagccagagaaccagagacaucuacaucagcagaagaagaagaggcaccuucaccuggacccugagcgacagcgagggcaacgagacccccggcggcuacugccugaccagauggaugcugaucgaggccgagcugaagugcuucggcaacaccgccguggccaagugcaacgagaagcacgacgaggaguucugcgacaugcugagacuguucgacuucaacaagcaggccaucagaagacugaagacccccgcccagaugagcauccagcugaucaacaaggccgugaacgcccugaucaacgaccagcugaucaugaagaaccaccugagagacaucaugggcauccccuacugcaacuacagcaaguacugcuaccugaaccacaccgugaccggcaagaccagccugcccagaugcugccuggugagcaacggcagcuaccugaacgagacccacuucagcgacgacaucgagcagcaggccgacaacaugaucaccgagcugcugcagaaggaguacaucgacagacagggcaagaccccccugggccugguggaccuguucguguucagcaccagcuucuaccugaucagcaucuuccugcaccuggugaagauccccacccacagacacguggugggcaagcccugccccaagccccacagacugaaccacaugggcaucugcagcugcggccuguacaagcaccccggcgugcccgugaaguggaagagaugaggacuagucccuguucccagagcccacuuuuuuuucuuuuuuugaaauaaaauagccugucuuucagaucucaaaggcucuuuucagagccaccaaaaaaaaaaaaaaaaaaaaaaaaaaaaaaaaaaaaaaaaaaaaaaaaaaaaaaaaaaaaaaaaaaaaaaaaaaaaaaaaaaaaaaaaaaaaaaaaaaaaa

SEQ ID NO: 25007 - RNA, 1745 nt, Artificial Sequence
  mRNA product Design a-1 (hSL-A100) comprising derived and/or modified sequence from LASV(Lassa virus/H.sapiens-wt/NGA/2015/ISTH_0543;Clade II)__AVO03639__GPCmut3 (opt4)
aggagagucccgcagucggcguccagcggcucugcuuguucgugugugugucguugcaggccuuauucaagcuuaccaugggccagaucaucaccuucuuccaggaggugccccacgugaucgaggaggugaugaacaucgugcugaucgcccugagccugcuggccauccugaagggcaucuacaacguggccaccugcggccuguucggccuggugagcuuccugcugcugugcggcagaagcugcagcaccaccuacaagggcguguacgagcugcagacccuggagcuggacauggccaaccugaacaugaccaugccccugagcugcaccaagaacaacagccaccacuacaucauggugggcaacgagaccggccuggagcugacccugaccaacaccagcaucaucaaccacaaguucugcaaccugagcgacgcccacaagaagaaccuguacgaccacgcccugaugagcaucaucagcaccuuccaccugagcauccccaacuucaaccaguacgaggccaugagcugcgacuucaacggcggcaagaucagcgugcaguacaaccugagccacaccuacgccguggacgccgccaaccacugcggcaccaucgccaacggcgugcugcagaccuucaugagaauggccuggggcggcagcuacaucgcccuggacagcggcaagggcagcugggacugcaucaugaccagcuaccaguaccuggugauccagaacaccaccugggaggaccacugccaguucagcagacccagccccaucggcuaccugggccugcugagccagagaaccagagacaucuacaucagcagaagaagaagaggcaccuucaccuggacccugagcgacagcgagggcaacgagacccccggcggcuacugccugaccagauggaugcugaucgaggccgagcugaagugcuucggcaacaccgccguggccaagugcaacgagaagcacgacgaggaguucugcgacaugcugagacuguucgacuucaacaagcaggccaucagaagacugaagacccccgcccagaugagcauccagcugaucaacaaggccgugaacgcccugaucaacgaccagcugaucaugaagaaccaccugagagacaucaugggcauccccuacugcaacuacagcaaguacugcuaccugaaccacaccgugaccggcaagaccagccugcccagaugcugccuggugagcaacggcagcuaccugaacgagacccacuucagcgacgacaucgagcagcaggccgacaacaugaucaccgagcugcugcagaaggaguacaucgacagacagggcaagaccccccugggccugguggaccuguucguguucagcaccagcuucuaccugaucagcaucuuccugcaccuggugaagauccccacccacagacacaucaccggcaagcccugccccaagccccacagacugaaccacaugggcaucugcagcugcggccuguacaagcaccccggcgugcccgugaaguggaagagaugaggacuagucccuguucccagagcccacuuuuuuuucuuuuuuugaaauaaaauagccugucuuucagaucucaaaggcucuuuucagagccaccaaaaaaaaaaaaaaaaaaaaaaaaaaaaaaaaaaaaaaaaaaaaaaaaaaaaaaaaaaaaaaaaaaaaaaaaaaaaaaaaaaaaaaaaaaaaaaaaaaaaa

SEQ ID NO: 25008 - RNA, 1745 nt, Artificial Sequence
  mRNA product Design a-1 (hSL-A100) comprising derived and/or modified sequence from LASV(Lassa virus/H.sapiens-wt/NGA/2016/ISTH_0009;Clade II)__AVO03571__GPCmut3 (opt4)
aggagagucccgcagucggcguccagcggcucugcuuguucgugugugugucguugcaggccuuauucaagcuuaccaugggccagaucaucaccuucuuccaggaggugccccacgugaucgaggaggugaugaacaucgugcugaucgcccugagccugcuggccauccugaagggcaucuacaacguggccaccugcggccugcugggccuggugagcuuccugcugcugugcggcagaagcugcagcaccaccuacaagggcguguacgagcugcagacccuggagcuggacauggccagccugaacaugaccaugccccugagcugcaccaagaacaacagccaccacuacaucauggugggcaacgagaccggccuggagcugacccugaccaacaccagcaucaucaaccacaaguucugcaaccugagcgacgcccacaagaagaaccuguacgaccacgcccugaugagcaucaucagcaccuuccaccugagcauccccaacuucaaccaguacgaggccaugagcugcgacuucaacggcggcagaaucagcgugcaguacaaccugagccacagcuacgccguggacgccgccaaccacugcggcaccaucgccaacggcgugcugcagaccuucaugagaauggccuggggcggcagcuacaucgcccuggacagcggcaagggcagcugggacugcaucaugaccagcuaccaguaccugaucauccagaacaccaccugggaggaccacugccaguucagcagacccagccccaucggcuaccugggccugcugagccagagaaccagagacaucuacaucagcagaagaagaagaggcaccuucaccuggacccugagcgacagcgagggcaacgagacccccggcggcuacugccugaccagauggaugcugaucgaggccgagcugaagugcuucggcaacaccgccguggccaagugcaacgagaagcacgacgaggaguucugcgacaugcugagacuguucgacuucaacaagcaggccaucagaagacugaagacccccgcccagaugagcauccagcugaucaacaaggccgugaacgcccugaucaacgaccagcugaucaugaagaaccaccugagagacaucaugggcauccccuacugcaacuacagcaaguacugcuaccugaaccacaccgugaccggcaagaccagccugcccagaugcugccuggugagcaacggcagcuaccugaacgagacccacuucagcgacgacaucgagcagcaggccgacaacaugaucaccgagcugcugcagaaggaguacaucgacagacagggcaagaccccccugggccugguggaccuguucguguucagcaccagcuucuaccugaucagcaucuuccugcaccuggugaagauccccacccacagacacaucaccggcaagcccugccccaagccccacagacugaaccacaugggcaucugcagcugcggccuguacaaccaccccggcgugcccgugaaguggaagagaugaggacuagucccuguucccagagcccacuuuuuuuucuuuuuuugaaauaaaauagccugucuuucagaucucaaaggcucuuuucagagccaccaaaaaaaaaaaaaaaaaaaaaaaaaaaaaaaaaaaaaaaaaaaaaaaaaaaaaaaaaaaaaaaaaaaaaaaaaaaaaaaaaaaaaaaaaaaaaaaaaaaaa

SEQ ID NO: 25009 - RNA, 1745 nt, Artificial Sequence
  mRNA product Design a-1 (hSL-A100) comprising derived and/or modified sequence from LASV(Lassa virus/H.sapiens-wt/NGA/2016/ISTH_0017;Clade II)__AVO03567__GPCmut3 (opt4)
aggagagucccgcagucggcguccagcggcucugcuuguucgugugugugucguugcaggccuuauucaagcuuaccaugggccagaucaucaccuucuuccaggaggugccccacgugaucgaggaggugaugaacaucgugcugaucgcccugagccugcuggccauccugaagggcaucuacaacguggccaccugcggccuguucggccuggugagcuuccugcugcugugcggcagaagcugcagcaccaccuacaagggcguguacgagcugcagacccuggagcuggacauggccagccugaacaugaccaugccccugagcugcaccaagaacaacagccaccacuacaucauggugggcaacgagaccggccuggagcugacccugaccaacaccagcaucaucaaccacaaguucugcaaccugagcgacgcccacaagaagaaccuguacgaccacgcccugaugagcaucaucagcaccuuccaccugagcauccccaacuucaaccaguacgaggccaugagcugcgacuucaacggcggcaagaucagcgugcaguacaaccugagccacaccuacgccaucgacgccgccaaccacugcggcaccaucgccaacggcgugcugcagaccuucaugagaauggccuggggcggcagcuacaucgcccuggacagcggcaagggcagcugggacugcaucaugaccagcuaccaguaccugaucauccagaacaccaccugggaggaccacugccaguucagcagacccagccccaucggcuaccugggccugcugagccagagaaccagagacaucuacaucagcagaagaagaagaggcaccuucaccuggacccugagcgacagcgagggcaacgagacccccggcggcuacugccugaccagauggaugcugaucgaggccgagcugaagugcuucggcaacaccgccguggccaagugcaacgagaagcacgacgaggaguucugcgacaugcugagacuguucgacuucaacaagcaggccaucagaagacugaagacccccgcccagaugagcauccagcugaucaacaaggccgugaacgcccugaucaacgaccagcugaucaugaagaaccaccugagagacaucaugggcauccccuacugcaacuacagcaaguacugcuaccugaaccacaccgugaccggcaagaccagccugcccagaugcugccuggugagcaacggcagcuaccugaacgagacccacuucagcgacgacaucgagcagcaggccgacaacaugaucaccgagcugcugcagaaggaguacauggacagacagggcaagaccccccugggccugguggaccuguucguguucagcaccagcuucuaccugaucagcaucuuccugcaccuggugagaauccccacccacagacacgugaucggcaagcccugccccaagccccacagacugaaccacaugggcaucugcagcugcggccuguacaagcaccccggcgugcccgugaaguggaagagaugaggacuagucccuguucccagagcccacuuuuuuuucuuuuuuugaaauaaaauagccugucuuucagaucucaaaggcucuuuucagagccaccaaaaaaaaaaaaaaaaaaaaaaaaaaaaaaaaaaaaaaaaaaaaaaaaaaaaaaaaaaaaaaaaaaaaaaaaaaaaaaaaaaaaaaaaaaaaaaaaaaaaa

SEQ ID NO: 25010 - RNA, 1745 nt, Artificial Sequence
  mRNA product Design a-1 (hSL-A100) comprising derived and/or modified sequence from LASV(Lassa virus/H.sapiens-wt/NGA/2018/ISTH_0959;Clade II)__AVV65099__GPCmut3 (opt4)
aggagagucccgcagucggcguccagcggcucugcuuguucgugugugugucguugcaggccuuauucaagcuuaccaugggccagaucaucaccuucuuccaggaggugccccacgugaucgaggaggugaugaacaucgugcugaucgcccugagccugcuggccauccugaagggcaucuacaacguggugaccugcggccuguucggccuggugagcuuccugcugcugugcggcagaagcugcagcaccaccuacaagggcguguacgagcugcagacccuggagcuggacauggccagccugaacaugaccaugccccugagcugcaccaagaacaacagccaccacuacaucauggugggcaacgagaccggccuggagcugacccugaccaacaccagcaucaucaaccacaaguucugcaaccugagcgacgcccacaagaagaaccuguacgaccacgcccugaugagcaucaucagcaccuuccaccugagcauccccaacuucaaccaguacgaggccaugagcugcgacuucaacggcggcaagaucagcgugcaguacaaccugagccacgccuacgccaucgacgccgccaaccacugcggcaccaucgccaacggcgugcugcagaccuucaugagaauggccuggggcggcagcuacaucgcccuggacagcggcaagggcagcugggacugcaucaugaccagcuaccaguaccugaucauccagaacaccaccugggaggaccacugccaguucagcagacccagccccaucggcuaccugggccugcugagccagagaaccagagacaucuacaucagcagaagaagaagaggcaccuucaccuggacccugagcgacagcgagggcaacgagacccccggcggcuacugccugaccagauggaugcugaucgaggccgagcugaagugcuucggcaacaccgccguggccaagugcaacgagaagcacgacgaggaguucugcgacaugcugagacuguucgacuucaacaagcaggccaucagaagacugaagacccccgcccagaugagcauccagcugaucaacaaggccgugaacgcccugaucaacgaccagcugaucaugaagaaccaccugagagacaucaugggcauccccuacugcaacuacagcaaguacugcuaccugaaccacaccgugaccggcaagaccagccugcccagaugcugccuggugagcaacggcagcuaccugaacgagacccacuucagcgacgacaucgagcagcaggccgacaacaugaucaccgagcugcugcagaaggaguacaucgacagacagggcaagaccccccugggccugguggaccuguucguguucagcaccagcuucuaccugaucagcaucuuccugcaccuggugaagauccccacccacagacacgugaucggcaagcccugccccaagccccacagacugaaccacaugggcaucugcagcugcggccuguacaagcaccccggcgugcccgugaaguggaagagaugaggacuagucccuguucccagagcccacuuuuuuuucuuuuuuugaaauaaaauagccugucuuucagaucucaaaggcucuuuucagagccaccaaaaaaaaaaaaaaaaaaaaaaaaaaaaaaaaaaaaaaaaaaaaaaaaaaaaaaaaaaaaaaaaaaaaaaaaaaaaaaaaaaaaaaaaaaaaaaaaaaaaa

SEQ ID NO: 25011 - RNA, 1745 nt, Artificial Sequence
  mRNA product Design a-1 (hSL-A100) comprising derived and/or modified sequence from LASV(LASV003-NIG-2008;Clade II)__AIT17580__GPCmut3 (opt4)
aggagagucccgcagucggcguccagcggcucugcuuguucgugugugugucguugcaggccuuauucaagcuuaccaugggccagaucaucaccuucuuccaggaggugccccacgugaucgaggaggugaugaacaucgugcugaucgcccugagccugcuggccauccugaagggcaucuacaacguggccaccugcggccuguucggccuggugagcuuccugcugcugugcggcagaagcugcagcaccaccuacaagggcguguacgagcugcagacccuggagcuggacauggccagccugaacaugaccaugccccugagcugcaccaagaacaacagccaccacuacaucauggugggcaacgagaccggccuggagcugacccugaccaacaccagcaucaucaaccacaaguucugcaaccugagcgacgcccacaagaagaaccuguacgaccacgcccugaugagcaucaucagcaccuuccaccugagcauccccaacuucaaccaguacgaggccaugagcugcgacuucaacggcggcaagaucagcgugcaguacaaccugagccacaccuacgccguggacgccgccaaccacugcggcaccaucgccaacggcgugcugcagaccuucaugagaauggccuggggcggcagcuacaucgcccuggacagcggcaagggcagcugggacugcaucaugaccagcuaccaguaccugaucauccagaacaccaccugggaggaccacugccaguucagcagacccagccccaucggcuaccugggccugcugagccagagaaccagagacaucuacaucagcagaagaagaagaggcaccuucaccuggacccugagcgacagcgagagcaacgagacccccggcggcuacugccugaccagauggaugcugaucgaggccgagcugaagugcuucggcaacaccgccguggccaagugcaacgagaagcacgacgaggaguucugcgacaugcugagacuguucgacuucaacaagcaggccaucagaagacugaaggcccccgcccagaugagcauccagcugaucaacaaggccgugaacgcccugaucaacgaccagcugaucaugaagaaccaccugagagacaucaugggcauccccuacugcaacuacagcaaguacugcuaccugaaccacaccgugaccggcagaaccagccugcccagaugcugccuggugagcaacggcagcuaccugaacgagacccacuucagcgacgacaucgagcagcaggccgacaacaugaucaccgagcugcugcagaaggaguacauggacagacagggcaagaccccccugggccugguggaccuguucguguucagcaccagcuucuaccugaucagcaucuuccugcaccuggugaagauccccacccacagacacgugaucggcaagcccugccccaagccccacagacugaaccacaugggcaucugcagcugcggccuguacaagcaccccggcgugcccgugaaguggaagagaugaggacuagucccuguucccagagcccacuuuuuuuucuuuuuuugaaauaaaauagccugucuuucagaucucaaaggcucuuuucagagccaccaaaaaaaaaaaaaaaaaaaaaaaaaaaaaaaaaaaaaaaaaaaaaaaaaaaaaaaaaaaaaaaaaaaaaaaaaaaaaaaaaaaaaaaaaaaaaaaaaaaaa

SEQ ID NO: 25012 - RNA, 1745 nt, Artificial Sequence
  mRNA product Design a-1 (hSL-A100) comprising derived and/or modified sequence from LASV(LASV035-NIG-2009;Clade II)__AIT17588__GPCmut3 (opt4)
aggagagucccgcagucggcguccagcggcucugcuuguucgugugugugucguugcaggccuuauucaagcuuaccaugggccagaucaucaccuucuuccaggaggugccccacgugaucgaggaggugaugaacaucgugcugaucgcccugagccugcuggccauccugaagggcaucuacaacguggccaccugcggccuguucggccuggugagcuuccugcugcugugcggcagaagcugcagcaccaccuacaagggcguguacgagcugcagacccuggagcuggacauggccagccugaacaugaccaugccccugagcugcaccaagaacaacagccaccacuacaucauggugggcaacgagaccggccuggagcugacccugaccaacaccagcaucaucaaccacaaguucugcaaccugagcgacgcccacaagaagaaccuguacgaccacgcccugaugagcaucaucagcaccuuccaccugagcauccccaacuucaaccaguacgaggccaugagcugcgacuucaacggcggcaagaucagcgugcaguacaaccugagccacgccuacgccguggacgccgccaaccacugcggcaccaucgccaacggcgugcugcagaccuucaugagaauggccuggggcggcagcuacaucgcccuggacagcggcaagggcagcugggacugcaucaugaccagcuaccaguaccugaucauccagaacaccaccugggaggaccacugccaguucagcagacccagccccaucggcuaccugggccugcugagccagagaaccagagacaucuacaucagcagaagaagaagaggcaccuucaccuggacccugagcgacagcgagggcaacgagacccccggcggcuacugccugaccagauggaugcugaucgaggccgagcugaagugcuucggcaacaccgccguggccaagugcaacgagaagcacgacgaggaguucugcgacaugcugagacuguucgacuucaacaagcaggccaucagaagacugaaggcccccgcccagaugagcauccagcugaucaacaaggccgugaacgcccugaucaacgaccagcugaucaugaagaaccaccugagagacaucaugggcauccccuacugcaacuacagcaaguacugcuaccugaaccacaccgugaccggcaagaccagccugcccagaugcugccuggugagcaacggcagcuaccugaacgagacccacuucagcgacgacaucgagcagcaggccgacaacaugaucaccgagcugcugcagaaggaguacaucgacagacagggcaagaccccccugggccugguggaccuguucguguucagcaccagcuucuaccugaucagcaucuuccugcaccuggugaagauccccacccacagacacgugaucggcaagcccugccccaagccccacagacugaaccacaugggcaucugcagcugcggccuguacaagcaccccggcgugcccgugaaguggaagagaugaggacuagucccuguucccagagcccacuuuuuuuucuuuuuuugaaauaaaauagccugucuuucagaucucaaaggcucuuuucagagccaccaaaaaaaaaaaaaaaaaaaaaaaaaaaaaaaaaaaaaaaaaaaaaaaaaaaaaaaaaaaaaaaaaaaaaaaaaaaaaaaaaaaaaaaaaaaaaaaaaaaaa

SEQ ID NO: 25013 - RNA, 1745 nt, Artificial Sequence
  mRNA product Design a-1 (hSL-A100) comprising derived and/or modified sequence from LASV(LASV1000-NIG-2009;Clade II)__AIT17782__GPCmut3 (opt4)
aggagagucccgcagucggcguccagcggcucugcuuguucgugugugugucguugcaggccuuauucaagcuuaccaugggccagaucaucaccuucuuccaggaggugccccacgugaucgaggaggugaugaacaucgugcugaucgcccugagccugcuggccauccugaagggcaucuacaacguggccaccugcggccuguucggccuggugagcuuccugcugcugugcggcagaagcugcagcaccaccuacaagggcguguacgagcugcagacccuggagcuggacauggccagccugaacaugaccaugccccugagcugcaccaagaacaacagccaccacuacaucauggugggcaacgagaccggccuggagcugacccugaccaacaccagcaucaucaaccacaaguucugcaaccugagcgacgcccacaagaagaaccuguacgaccacgcccugaugagcaucaucagcaccuuccaccugagcauccccaacuucaaccaguacgaggccaugagcugcgacuucaacggcggcaagaucagcgugcaguacaaccugagccacaccuacgccguggacgccgccaaccacugcggcaccaucgccaacggcgugcugcagaccuucaugagaauggccuggggcggcagcuacaucgcccuggacagcggcaagggcagcugggacugcaucaugaccagcuaccaguaccugaucauccagaacaccaccugggaggaccacugccaguucagcagacccagccccaucggcuaccugggccugcugagccagagaaccagagacaucuacaucagcagaagaagaagaggcaccuucaccuggacccugagcgacagcgagggcaacgagacccccggcggcuacugccugaccagauggaugcugaucgaggccgagcugaagugcuucggcaacaccgccguggccaagugcaacgagaagcacgacgaggaguucugcgacaugcugagacuguucgacuucaacaagcaggccaucaagagacugaagacccccgcccagaugagcauccagcugaucaacaaggccgugaacgcccugaucaacgaccagcugaucaugaagaaccaccugagagacaucaugggcauccccuacugcaacuacagcaaguacugcuaccugaaccacaccgugaccggcaagaccagccugcccagaugcugccuggugagcaacggcagcuaccugaacgagacccacuucagcgacgacaucgagcagcaggccgacaacaugaucaccgagcugcugcagaaggaguacaucgacagacagggcaagaccccccugggccugguggaccuguucguguucagcaccagcuucuaccugaucagcaucuuccugcaccuggugaagauccccacccacagacacguggugggcaagcccugccccaagccccacagacugaaccacaugggcaucugcagcugcggccuguacaagcaccccggcgugcccgugaaguggaagagaugaggacuagucccuguucccagagcccacuuuuuuuucuuuuuuugaaauaaaauagccugucuuucagaucucaaaggcucuuuucagagccaccaaaaaaaaaaaaaaaaaaaaaaaaaaaaaaaaaaaaaaaaaaaaaaaaaaaaaaaaaaaaaaaaaaaaaaaaaaaaaaaaaaaaaaaaaaaaaaaaaaaaa

SEQ ID NO: 25014 - RNA, 1745 nt, Artificial Sequence
  mRNA product Design a-1 (hSL-A100) comprising derived and/or modified sequence from LASV(LASV221-NIG-2010;Clade II)__AIT17624__GPCmut3 (opt4)
aggagagucccgcagucggcguccagcggcucugcuuguucgugugugugucguugcaggccuuauucaagcuuaccaugggccagaucaucaccuucuuccaggaggugccccacgugaucgaggaggugaugaacaucgugcugaucgcccugagccugcuggccauccugaagggcaucuacaacguggccaccugcggccuguucggccuggugagcuuccugcugcugugcggcagaagcugcagcaccaccuacaagggcguguacgagcugcagacccuggagcuggacauggccagccugaacaugaccaugccccugagcugcaccaagaacaacagccaccacuacaucauggugggcaacgagaccggccuggagcugacccugaccaacaccagcaucaucaaccacaaguucugcaaccugagcgacgcccacaagaagaaccuguacgaccacgcccugaugagcaucaucagcaccuuccaccugagcauccccaacuucaaccaguacgaggccaugagcugcgacuucaacggcggcaagaucagcgugcaguacaaccugagccacaccuacgccaucgacgccgccaaccacugcggcaccaucgccaacggcgugcugcagaccuucaugagaauggccuggggcggcagcuacaucgcccuggacagcggcaagggcagcugggacugcaucaugaccagcuaccaguaccugaucauccagaacaccaccugggaggaccacugccaguucagcagacccagccccaucggcuaccugggccugcugagccagagaaccagagacaucuacaucagcagaagaagaagaggcaccuucaccuggacccugagcgacagcgagggcaacgagacccccggcggcuacugccugaccagauggaugcugaucgaggccgagcugaagugcuucggcaacaccgccguggccaagugcaacgagaagcacgacgaggaguucugcgacaugcugagacuguucgacuucaacaagcaggccaucagaagacugaagacccccgcccagaugagcauccagcugaucaacaaggccgugaacgcccugaucaacgaccagcugaucaugaagaaccaccugagagacaucaugggcauccccuacugcaacuacagcaaguacugcuaccugaaccacaccgugaccggcaagaccagccugcccagaugcugccuggugagcaacggcagcuaccugaacgagacccacuucagcgacgacaucgagcagcaggccgacaacaugaucaccgagaugcugcagaaggaguacauggacagacagggcaagaccccccugggccugguggaccuguucguguucagcaccagcuucuaccugaucagcaucuuccugcaccuggugaagauccccacccacagacacgugaucggcaagcccugccccaagccccacagacugaaccacaugggcaucugcagcugcggccuguacaagcaccccggcgugcccgugaaguggaagagaugaggacuagucccuguucccagagcccacuuuuuuuucuuuuuuugaaauaaaauagccugucuuucagaucucaaaggcucuuuucagagccaccaaaaaaaaaaaaaaaaaaaaaaaaaaaaaaaaaaaaaaaaaaaaaaaaaaaaaaaaaaaaaaaaaaaaaaaaaaaaaaaaaaaaaaaaaaaaaaaaaaaaa

SEQ ID NO: 25015 - RNA, 1745 nt, Artificial Sequence
  mRNA product Design a-1 (hSL-A100) comprising derived and/or modified sequence from LASV(LASV237-NIG-2010;Clade II)__AIT17638__GPCmut3 (opt4)
aggagagucccgcagucggcguccagcggcucugcuuguucgugugugugucguugcaggccuuauucaagcuuaccaugggccagaucaucaccuucuuccaggaggugccccacgugaucgaggaggugaugaacaucgugcugaucgcccugagccugcuggccauccugaagggcaucuacaacguggccaccugcggccuguucggccuggugagcuuccugcugcugugcggcagaagcugcagcaccaccuacaagggcguguacgagcugcagacccuggagcuggacauggccagccugaacaugaccaugccccugagcugcaccaagaacaacagccaccacuacaucauggugggcaacgagaccggccuggagcugacccugaccaacaccagcaucaucaaccacaaguucugcaaccugagcgacgcccacaagaaggaccuguacgaccacgcccugaugagcaucaucagcaccuuccaccugagcauccccaacuucaaccaguacgaggccaugagcugcgacuucaacggcggcaagaucagcgugcaguacaaccugagccacaccuacgccguggacgccgccaaccacugcggcaccaucgccaacggcgugcugcagaccuucaugagaauggccuggggcggcagcuacaucgcccuggacagcggcaagggcagcugggacugcaucaugaccagcuaccaguaccugaucauccagaacaccaccugggaggaccacugccaguucagcagacccagccccaucggcuaccugggccugcugagccagagaaccagagacaucuacaucagcagaagaagaagaggcaccuucaccuggacccugagcgacagcgagggcaacgagacccccggcggcuacugccugaccagauggaugcugaucgaggccgagcugaagugcuucggcaacaccgccguggccaagugcaacgagaagcacgacgaggaguucugcgacaugcugagacuguucgacuucaacaagcaggccaucagaagacugaagacccccgcccagaugagcauccagcugaucaacaaggccgugaacgcccugaucaacgaccagcugaucaugaagaaccaccugagagacaucaugggcauccccuacugcaacuacagcaaguacugcuaccugaaccacaccgugaccggcaagaccagccugcccagaugcugccuggugagcaacggcagcuaccugaacgagacccacuucagcgacgacaucgagcagcaggccgacaacaugaucaccgagcugcugcagaaggaguacauggacagacagggcaagaccccccugggccugguggaccuguucguguucagcaccagcuucuaccugaucagcaucuuccugcaccugaucaagauccccacccacagacacaucaccggcaagcccugccccaagccccacagacugaaccacaugggcaucugcagcugcggccuguacaagcaccccggcgugcccgugaaguggaagagaugaggacuagucccuguucccagagcccacuuuuuuuucuuuuuuugaaauaaaauagccugucuuucagaucucaaaggcucuuuucagagccaccaaaaaaaaaaaaaaaaaaaaaaaaaaaaaaaaaaaaaaaaaaaaaaaaaaaaaaaaaaaaaaaaaaaaaaaaaaaaaaaaaaaaaaaaaaaaaaaaaaaaa

SEQ ID NO: 25016 - RNA, 1745 nt, Artificial Sequence
  mRNA product Design a-1 (hSL-A100) comprising derived and/or modified sequence from LASV(LASV253-NIG-2011;Clade II)__AIT17670__GPCmut3 (opt4)
aggagagucccgcagucggcguccagcggcucugcuuguucgugugugugucguugcaggccuuauucaagcuuaccaugggccagaucaucaccuucuuccaggaggugccccacgugaucgaggaggugaugaacaucgugcugaucgcccugagccugcuggccauccugaagggcaucuacaacguggccaccugcggccuguucggccuggugagcuuccugcugcugugcggcagaagcugcagcaccaccuacaagggcguguacgagcugcagacccuggagcuggacauggccagccugaacaugaccaugccccugagcugcaccaagaacaacagccaccacuacaucauggugggcaacgagaccggccuggagcugacccugaccaacaccagcaucaucaaccacaaguucugcaaccugagcgacgcccacaagaagaaccuguacgaccacgcccugaugagcaucaucagcaccuuccaccugagcauccccaacuucaaccaguacgaggccaugagcugcgacuucaacggcggcaagaucagcgugcaguacaaccugagccacaccuacgccguggacgccgccaaccacugcggcaccaucgccaacggcgugcugcagaccuucaugagaauggccuggggcggcagcuacaucgcccuggacagcggcaagggcagcugggacugcaucaugaccagcuaccaguaccugaucauccagaacaccaccugggaggaccacugccaguucagcagacccagccccaucggcuaccugggccugcugagccagagaaccagagacaucuacaucagcagaagaagaagaggcaccuucaccuggacccugagcgacagcgagggcaacgagacccccggcggcuacugccugaccagauggaugcugaucgaggccgagcugaagugcuucggcaacaccgccguggccaagugcaacgagaagcacgacgaggaguucugcgacaugcugagacuguucgacuucaacaagcaggccaucagaagacugaaggcccccgcccagaugagcauccagcugaucaacaaggccgugaacgcccugaucaacgaccagcugaucaugaagaaccaccugagagacaucaugggcauccccuacugcaacuacagcaaguacugcuaccugaaccacaccgugaccggcagaaccagccugcccagaugcugccuggugagcaacggcagcuaccugaacgagacccacuucagcgacgacaucgagcagcaggccgacaacaugaucaccgagcugcugcagaaggaguacaucgacagacagggcaagaccccccugggccugguggaccuguucguguucagcaccagcuucuaccugaucagcaucuuccugcaccuggugaagauccccacccacagacacaucaucggcaagcccugccccaagccccacagacugaaccacaugggcaucugcagcugcggccuguacaagcaccccggcgugcccgugaaguggaagagaugaggacuagucccuguucccagagcccacuuuuuuuucuuuuuuugaaauaaaauagccugucuuucagaucucaaaggcucuuuucagagccaccaaaaaaaaaaaaaaaaaaaaaaaaaaaaaaaaaaaaaaaaaaaaaaaaaaaaaaaaaaaaaaaaaaaaaaaaaaaaaaaaaaaaaaaaaaaaaaaaaaaaa

SEQ ID NO: 25017 - RNA, 1745 nt, Artificial Sequence
  mRNA product Design a-1 (hSL-A100) comprising derived and/or modified sequence from LASV(LASV254-NIG-2011;Clade II)__AIT17674__GPCmut3 (opt4)
aggagagucccgcagucggcguccagcggcucugcuuguucgugugugugucguugcaggccuuauucaagcuuaccaugggccagaucaucaccuucuuccaggaggugccccacgugaucgaggaggugaugaacaucgugcugaucgcccugagccugcuggccauccugaagggcaucuacaacguggccaccugcggccuguucggccuggugagcuuccugcugcugugcggcagaagcugcagcaccaccuacaagggcguguacgagcugcagacccuggagcuggacaugaccaaccugaacaugaccaugccccugagcugcaccaagaacaacagccaccacuacaucauggugggcaacgagaccggccuggagcugacccugaccaacaccagcaucaucaaccacaaguucugcaaccugagcgacgcccacaagaagaaccuguacaaccacgcccugaugagcaucaucagcaccuuccaccugagcauccccaacuucaaccaguacgaggccaugagcugcgacuucaacggcggcaagaucagcgugcaguacaaccugagccacagcuacgccguggacgccgccaaccacugcggcaccaucgccaacggcgugcugcagaccuucaugagaauggccuggggcggcagcuacaucgcccuggacagcggcaagggcaacugggacugcaucaugaccagcuaccaguaccugaucauccagaacaccaccugggaggaccacugccaguucagcagacccagccccaucggcuaccugggccugcugagccagagaaccagagacaucuacaucagcagaagaagaagaggcaccuucaccuggacccugagcgacagcgagggcaacgagacccccggcggcuacugccugaccagauggaugcugaucgaggccgagcugaagugcuucggcaacaccgccguggccaagugcaacgagaagcacgacgaggaguucugcgacaugcugagacuguucgacuucaacaagcaggccaucagaagacugaagacccccgcccaggccaacauccagcugaucaacaaggccgugaacgcccugaucaacgaccagcugaucaugaagaaccaccugagagacaucaugggcauccccuacugcaacuacagcaaguacugcuaccugaaccacaccgugaccggcaagaccagccugcccagaugcugccuggugagcaacggcagcuaccugaacgagacccacuucagcgacgacaucgagcagcaggccgacaacaugaucaccgagcugcugcagaaggaguacauggacagacagggcaagaccccccugggccugguggaccuguucguguucagcaccagcuucuaccugaucagcaucuuccugcaccuggugaagauccccacccacagacacgugaucggcaagcccugccccaagccccacagacugaaccacaugggcaucugcagcugcggccuguacaagcaccccggcgugcccgugaaguggaagagaugaggacuagucccuguucccagagcccacuuuuuuuucuuuuuuugaaauaaaauagccugucuuucagaucucaaaggcucuuuucagagccaccaaaaaaaaaaaaaaaaaaaaaaaaaaaaaaaaaaaaaaaaaaaaaaaaaaaaaaaaaaaaaaaaaaaaaaaaaaaaaaaaaaaaaaaaaaaaaaaaaaaaa

SEQ ID NO: 25018 - RNA, 1745 nt, Artificial Sequence
  mRNA product Design a-1 (hSL-A100) comprising derived and/or modified sequence from LASV(Nig08-A19;Clade III)__ADU56618__GPCmut3 (opt4)
aggagagucccgcagucggcguccagcggcucugcuuguucgugugugugucguugcaggccuuauucaagcuuaccaugggccagaucgugaccuucuuccaggaggugccccacgugaucgaggaggugaugaacaucgugcugaucgcccugagcauccuggccauccugaagggccuguacaacaucgccaccugcggccugaucggccuggugaccuuccugcugcugagcggcagaagcugcagcaugaccuacaagggcguguacgagcugcagacccuggagcugaacaugaacacccugaacaugaccaugccccugagcugcaccaagaacaacagccaccacuacaucauggugggcaacgagaccggccuggagcugacccugaccaacaccagccugcugcaccacaaguucugcaaccugagcgacgcccacaagaagaaccuguacgaccacacccugaugagcaucaucagcaccuuccaccugagcauccccaacuucaaccaguacgaggccaugagcugcgacuucaacggcggcaagaucaccgugcaguacaaccugagccacagcuacgccaucgacgccgccaaccacugcggcaccguggccaacggcgugcugcagaccuucaugagaauggccuggggcggcagcuacaucgcccuggacagcggcagaggcaagugggacugcaucaugaccagcuaccaguaccugaucauccagaacaccaccugggaggaccacugccaguucagcagacccagccccaucggcuaccugggccugcugagccagagaaccagagacaucuacaucagcagaagaagaagaggcaccuucaccuggacccugagcgacagcgagggcaacgagacccccggcggcuacugccugaccagauggaugcugaucgaggccgagcugaagugcuucggcaacaccgccguggccaagugcaacgagaagcacgacgaggaguucugcgacaugcugagacuguucgacuucaacaagcaggccaucagaagacugaaggcccccgcccagaugagcauccagcugaucaacaaggccgugaacgcccugaucaacgaccagcugaucaugaagaaccaccugagagacaucaugggcauccccuacugcaacuacagcaaguacugcuaccugaaccacaccagcaccggcagaaccagccugcccagaugcugccuggugagcaacggcagcuaccugaacgagacccacuucagcgacgacaucgagcagcaggccgacaacaugaucaccgagaugcugcagaaggaguaccuggacagacagggcaagaccccccugggccugguggaccuguucguguucagcaccagcuucuaccugaucagcaucuuccugcaccuggugaagauccccacccacagacacaucgugggcaagcccugccccaagccccacagacugaaccacaugggcaucugcagcugcggccuguacaagcagcccggcgugcccgugagauggaagagaugaggacuagucccuguucccagagcccacuuuuuuuucuuuuuuugaaauaaaauagccugucuuucagaucucaaaggcucuuuucagagccaccaaaaaaaaaaaaaaaaaaaaaaaaaaaaaaaaaaaaaaaaaaaaaaaaaaaaaaaaaaaaaaaaaaaaaaaaaaaaaaaaaaaaaaaaaaaaaaaaaaaaa

SEQ ID NO: 25019 - RNA, 1748 nt, Artificial Sequence
  mRNA product Design a-1 (hSL-A100) comprising derived and/or modified sequence from LASV(G1180-SLE-2010;Clade IV)__AIT17168__GPCmut3 (opt4)
aggagagucccgcagucggcguccagcggcucugcuuguucgugugugugucguugcaggccuuauucaagcuuaccaugggccagaucgugaccuucuuccaggaggugccccacgugaucgaggaggugaugaacaucgugcugaucgcccugagcauccuggccgugcugaagggccuguacaacuucgccaccugcggccuggugggccugcugaccuuccugcugcugugcggcagaagcugcaccgccagcagauacaagggcguguacgagcugcagacccuggagcugaacauggagacccugaacaugaccaugccccugagcugcaccaagaacaacagccaccacuacaucauggugggcaacgagaccggccuggagcugacccugaccaacaccagcaucaucaaccacaaguucugcaaccugagcgacgcccacaagaagaaccuguacgaccacgcccugaugagcaucaucagcaccuuccaccugagcauccccaacuucaaccaguacgaggccaugagcugcgacuucaacggcggcaagaucagcgugcaguacaaccugagccacagcuacgccggcgacgccgccaaccacugcggcaccguggccaacggcgugcugcagaccuucaugagaauggccuggggcggcagcuacaucgcccuggacagcggccacggcagcugggacugcaucaugaccagcuaccaguaccugaucauccagaacaccaccugggaggaccacugccaguucagcagacccagccccaucggcuaccugggccugcugagccagagaaccagagacaucuacaucagcagaagaagaagaggcaccuucaccuggacccugagcgacagcgagggcaaggacacccccggcggcuacugccugaccagauggaugcugaucgaggccgagcugaagugcuucggcaacaccgccguggccaagugcaacgagaagcacgacgaggaguucugcgacaugcugagacuguucgacuucaacaagcaggccauccagagacugaaggcccccgcccagaugagcauccagcugaucaacaaggccgugaacgcccugaucaacgaccagcugaucaugaagaaccaccugagagacaucaugggcauccccuacugcaacuacagcaaguacugcuaccugaaccacaccaccaccggcaagaccagccugcccaagugcugccuggugagcaacggcagcuaccugaacgagacccacuucagcgacgacaucgagcagcaggccgacaacaugaucaccgagaugcugcagaaggaguacauggagagacagggcaagaccccccugggccugguggaccuguucguguucagcaccagcuucuaccugaucagcaucuuccugcaccuggugaagauccccacccacagacacaucgugggcaagagcugccccaagccccacagacugaaccacaugggcaucugcagcugcggccuguacaagcagcccggcgugcccgugaaguggaagagaugaggacuagucccuguucccagagcccacuuuuuuuucuuuuuuugaaauaaaauagccugucuuucagaucucaaaggcucuuuucagagccaccaaaaaaaaaaaaaaaaaaaaaaaaaaaaaaaaaaaaaaaaaaaaaaaaaaaaaaaaaaaaaaaaaaaaaaaaaaaaaaaaaaaaaaaaaaaaaaaaaaaaa

SEQ ID NO: 25020 - RNA, 1748 nt, Artificial Sequence
  mRNA product Design a-1 (hSL-A100) comprising derived and/or modified sequence from LASV(G1442-SLE-2011;Clade IV)__AIT17180__GPCmut3 (opt4)
aggagagucccgcagucggcguccagcggcucugcuuguucgugugugugucguugcaggccuuauucaagcuuaccaugggccagaucgugaccuucuuccaggaggugccccacgugaucgaggaggugaugaacaucgugcugaucgcccugagcauccuggccgugcugaagggccuguacaacguggccaccugcggccugaucggccuggugaccuuccugcugcugugcggcagaagcugcaccaccacccuguacaagggcguguacgagcugcagacccuggagcugaacauggagacccugaacaugaccaugccccugagcugcaccaagaacaacagccaccacuacaucagagugggcaacgagaccggccuggagcugacccugaccaacaccagcaucaucaaccacaaguucugcaaccugagcgacgcccacaagaagaaccuguacgaccacgcccugaugagcaucaucagcaccuuccaccugagcauccccaacuucaaccaguacgaggccaugagcugcgacuucaacggcggcaagaucagcgugcaguacaaccugagccacagcuacgccggcgacgccgccaaccacugcggcaccguggccaacggcgugcugcagaccuucaugagaauggccuggggcggcagcuacaucgcccuggacagcggcagaggcaacugggacugcaucaugaccagcuaccaguaccugaucauccagaacaccaccugggacgaccacugccaguucagcagacccagccccaucggcuaccugggccugcugagccagagaaccagagacguguacaucagcagaagaagaagaggcaccuucaccuggacccugagcgacagcgagggcaaggacacccccggcggcuacugccugaccagauggaugcugaucgaggccgagcugaagugcuucggcaacaccgccguggccaagugcaacgagaagcacgacgaggaguucugcgacaugcugagacuguucgacuucaacaagcaggccauccagagacugaaggcccccgcccagaugagcauccagcugaucaacaaggccgugaacgcccugaucaacgaccagcugaucaugaagaaccaccugagagacaucaugggcauccccuacugcaacuacagcaaguacugcuaccugaacaacaccgccaccggcaagaccagccugcccaagugcugccugaucagcaacggcagcuaccugaacgagacccacuucagcgacgacaucgagcaggaggccgacaacaugaucaccgagaugcugcagaaggaguacauggagagacagggcaagaccccccugggccugguggaccuguucguguucagcaccagcuucuaccugaucagcaucuuccugcaccuggugaagauccccacccacagacacaucgugggcaagagcugccccaagccccacagacugaaccacaugggcaucugcagcugcggccuguacaagcagcccggcgugcccgugagauggaagagaugaggacuagucccuguucccagagcccacuuuuuuuucuuuuuuugaaauaaaauagccugucuuucagaucucaaaggcucuuuucagagccaccaaaaaaaaaaaaaaaaaaaaaaaaaaaaaaaaaaaaaaaaaaaaaaaaaaaaaaaaaaaaaaaaaaaaaaaaaaaaaaaaaaaaaaaaaaaaaaaaaaaaa

SEQ ID NO: 25021 - RNA, 1748 nt, Artificial Sequence
  mRNA product Design a-1 (hSL-A100) comprising derived and/or modified sequence from LASV(G3010-SLE-2013;Clade IV)__AIT17344__GPCmut3 (opt4)
aggagagucccgcagucggcguccagcggcucugcuuguucgugugugugucguugcaggccuuauucaagcuuaccaugggccagaucgugaccuucuuccaggaggugccccacgugaucgaggaggugaugaacaucgugcugaucgcccugagcauccuggccgugcugaagggccuguacaacuucgccaccugcggccuggugggccuggugaccuuccugcugcugugcggcagaagcugcaccaccagccuguacaagggcguguacgagcugcagacccuggagcugaacauggagacccugaacaugaccaugccccugagcugcaccaagaacaacagccaccacuacaucauggugggcaacgagaccggccuggagcugacccugaccaacaccagcaucaucaaccacaaguucugcaaccugagcgacgcccacaagaagaaccuguacaaccacgcccugaugagcaucaucagcaccuuccaccugagcauccccaacuucaaccaguacgaggccaugagcugcgacuucaacggcggcaagaucagcgugcaguacaaccugagccacagcuacgccggcgacgccgccagccacugcggcaccguggccaacggcgugcugcagaccuucaugagaauggccuggggcggcagcuacaucgcccuggacagcggcuacggcaagugggacugcaucaugaccagcuaccaguaccugaucauccagaacaccaccugggaggaccacugccaguucagcagacccagccccaucggcuaccugggccugcugagccagagaaccagagacaucuacaucagcagaagaagaagaggcaccuucaccuggacccugagcgacagcgagggcaaggacacccccggcggcuacugccugaccagauggaugcugaucgaggccgagcugaagugcuucggcaacaccgccguggccaagugcaacgagaagcacgacgaggaguucugcgacaugcugagacuguucgacuucaacaagcaggccauccagagacugaagacccccgcccagaugagcauccagcugaucaacaaggccgugaacgcccugaucaacgaccagcugaucaugaagaaccaccugagagacaucaugggcauccccuacugcaacuacagcaaguacugcuaccugaaccacaccaccaccggcaagaccagccugcccaagugcugccuggugagcaacggcagcuaccugaacgagacccacuucagcgacgacaucgagcagcaggccgacaacaugaucaccgagaugcugcagaaggaguacauggagagacagggcaagaccccccugggccugguggaccuguucguguucagcaccagcuucuaccugaucagcaucuuccugcaccuggugaagauccccacccacagacacaucgugggcaagagcugccccaagccccacagacugaaccacaugggcaucugcagcugcggccuguacaagcagcccggcgugcccgugagauggaagagaugaggacuagucccuguucccagagcccacuuuuuuuucuuuuuuugaaauaaaauagccugucuuucagaucucaaaggcucuuuucagagccaccaaaaaaaaaaaaaaaaaaaaaaaaaaaaaaaaaaaaaaaaaaaaaaaaaaaaaaaaaaaaaaaaaaaaaaaaaaaaaaaaaaaaaaaaaaaaaaaaaaaaa

SEQ ID NO: 25022 - RNA, 1748 nt, Artificial Sequence
  mRNA product Design a-1 (hSL-A100) comprising derived and/or modified sequence from LASV(G502-SLE-2009;Clade IV)__AIT17126__GPCmut3 (opt4)
aggagagucccgcagucggcguccagcggcucugcuuguucgugugugugucguugcaggccuuauucaagcuuaccaugggccagaucgugaccuucuuccaggaggugccccacgugaucgaggaggugaugaacaucgugcugaucgcccugagcauccuggccgugcugaagggccuguacaacuucgccaccugcggccuggugggccugcugaccuuccugcugcugugcggcagaagcugcaccaccggccuguacaagggcguguacgagcugcagacccuggagcugaacauggagacccugaacaugaccaugccccugagcugcaccaagaacaacagccaccacuacaucauggugggcaacgagaccggccuggagcugacccugaccaacaccagcaucaucaaccacaaguucugcaaccugagcgacgcccacaagaagaaccuguacgaccacgcccugaugagcaucaucagcaccuuccaccugagcauccccaacuucaaccaguacgaggccaugagcugcgacuucaacggcggcaagaucagcgugcaguacaaccugagccacagcuacgccggcgacgccgccgaccacugcggcaccguggccaacggcgugcugcagaccuucaugagaauggccuggggcggcagcuacaucgcccuggacagcggcagaggcagaugggacugcaucaugaccagcuaccaguaccugaucauccagaacaccaccugggaggaccacugccaguucagcagacccagccccaucggcuaccugggccugcugagccagagaaccagagacaucuacaucagcagaagaagaagaggcaccuucaccuggacccugagcgacagcgagggcaaggacacccccggcggcuacugccugaccagauggaugcugaucgaggccgagcugaagugcuucggcaacaccgccguggccaagugcaacgagaagcacgacgaggaguucugcgacaugcugagacuguucgacuucaacaagcaggccauccagagacugaaggcccccgcccagaugagcauccagcugaucaacaaggccgugaacgcccugaucaacgaccagcuggugaugaagaaccaccugagagacaucaugggcauccccuacugcaacuacagcagauacugcuaccugaaccacaccaccaccggcagaaccagccugcccaagugcugccuggugagcaacggcagcuaccugaacgagacccacuucagcgacgacaucgagcagcaggccgacaacaugaucaccgagaugcugcagaaggaguacauggagagacagggcaagaccccccugggccugguggaccuguucguguucagcaccagcuucuaccugaucagcaucuuccugcaccuggugaagauccccacccacagacacaucgugggcaagagcugccccaagccccacagacugaaccacaugggcaucugcagcugcggccuguacaagcagcccggcgugcccgugaaguggaagagaugaggacuagucccuguucccagagcccacuuuuuuuucuuuuuuugaaauaaaauagccugucuuucagaucucaaaggcucuuuucagagccaccaaaaaaaaaaaaaaaaaaaaaaaaaaaaaaaaaaaaaaaaaaaaaaaaaaaaaaaaaaaaaaaaaaaaaaaaaaaaaaaaaaaaaaaaaaaaaaaaaaaaa

SEQ ID NO: 25023 - RNA, 1748 nt, Artificial Sequence
  mRNA product Design a-1 (hSL-A100) comprising derived and/or modified sequence from LASV(G733-SLE-2010;Clade IV)__AIT17154__GPCmut3 (opt4)
aggagagucccgcagucggcguccagcggcucugcuuguucgugugugugucguugcaggccuuauucaagcuuaccaugggccagaucgugaccuucuuccaggaggugccccacgugaucgaggaggugaugaacaucgugcugaucgcccugagcauccuggccgugcugaagggccuguacaacuucgccaccugcggcaucgugggccuggugagcuuccugcugcugugcggcagaagcugcaccaccagccuguacaagggcguguacgagcugcagacccuggagcugaacauggagacccugaacaugaccaugccccugagcugcaccaagaacaacagccaccacuacaucauggugggcaacgagaccggccuggagcugacccugaccaacaccagcaucaucaaccacaaguucugcaaccugagcgacgcccacaagaagaaccuguacgaccacgcccugaugagcaucaucagcaccuuccaccugagcauccccaacuucaaccaguacgaggccaugagcugcgacuucaacggcggcaagaucagcgugcaguacaaccugagccacagcuacgccggcgacgccgccaaccacugcggcaccaucgccaacggcgugcugcagaccuucaugagaauggccuggggcggcagcuacaucgcccuggacagcggcagagacagaugggacugcaucaugaccagcuaccaguaccugaucauccagaacaccaccugggaggaccacugccaguucagcagacccagccccaucggcuaccugggccugcugagccagagaaccagagacaucuacaucagcagaagaagaagaggcaccuucaccuggacccugagcgacagcgagggcaaggacacccccggcggcuacugccugaccagauggaugcugaucgaggccgagcugaagugcuucggcaacaccgccguggccaagugcaacgagaagcacgacgaggaguucugcgacaugcugagacuguucgacuucaacaagcaggccauccagagacugaaggcccccgcccagaugagcauccagcugaucaacaaggccgugaacgcccugaucaacgaccagcugaucaugaagaaccaccugagagacaucaugggcauccccuacugcaacuacagcaaguacugcuaccugaaccacaccaccaccggcaagaccagccugcccaagugcugccuggugagcaacggcagcuaccugaacgagacccacuucagcgacgacaucgagcagcaggccgacaacaugaucaccgagaugcugcagaaggaguacauggagagacagggcaagaccccccugggccugguggaccuguucguguucagcaccagcuucuaccugaucagcaucuuccugcaccuggugaagauccccacccacagacacguggugggcaagagcugccccaagccccacagacugaaccacaugggcaucugcagcugcggccuguacggccagcccggcgugcccgugaaguggaagagaugaggacuagucccuguucccagagcccacuuuuuuuucuuuuuuugaaauaaaauagccugucuuucagaucucaaaggcucuuuucagagccaccaaaaaaaaaaaaaaaaaaaaaaaaaaaaaaaaaaaaaaaaaaaaaaaaaaaaaaaaaaaaaaaaaaaaaaaaaaaaaaaaaaaaaaaaaaaaaaaaaaaaa

SEQ ID NO: 25024 - RNA, 1748 nt, Artificial Sequence
  mRNA product Design a-1 (hSL-A100) comprising derived and/or modified sequence from MOPV/LASV reassortant(IGS-1;Clade IV)__AFY05576__GPCmut3 (opt4)
aggagagucccgcagucggcguccagcggcucugcuuguucgugugugugucguugcaggccuuauucaagcuuaccaugggccagaucgugaccuucuuccaggaggugccccacgugaucgaggaggugaugaacaucgugcugaucgcccugagcgugcuggccgugcugaagggccuguacaacuucgccaccugcggccuggugggccuggugaccuuccugcugcugugcggcagaagcugcaccaccagccuguacaagggcguguacgagcugcagacccuggagcugaacauggagacccugaacaugaccaugccccugagcugcaccaagaacaacagccaccacuacaucauggugggcaacgagaccggccuggagcugacccugaccaacaccagcaucaucaaccacaaguucugcaaccugagcgacgcccacaagaagaaccuguacgaccacgcccugaugagcaucaucagcaccuuccaccugagcauccccaacuucaaccaguacgaggccaugagcugcgacuucaacggcggcaagaucagcgugcaguacaaccugagccacagcuacgccggcgacgccgccaaccacugcggcaccguggccaacggcgugcugcagaccuucaugagaauggccuggggcggcagcuacaucgcccuggacagcggcagaggcaacugggacugcaucaugaccagcuaccaguaccugaucauccagaacaccaccugggaggaccacugccaguucagcagacccagccccaucggcuaccugggccugcugagccagagaaccagagacaucuacaucagcagaagaagaagaggcaccuucaccuggacccugagcgacagcgagggcgaggacacccccggcggcuacugccugaccagauggaugcugaucgaggccgagcugaagugcuucggcaacaccgccguggccaagugcaacgagaagcacgacgaggaguucugcgacaugcugagacuguucgacuucaacaagcaggccauccagagacugaaggcccccgcccagaugagcauccagcugaucaacaaggccgugaacgcccugaucaacgaccagcugaucaugaagaaccaccugagagacaucaugggcauccccuacugcaacuacagcaaguacugcuaccugaaccacaccaccaccggcagaaccagccugcccaagugcugccuggugagcaacggcagcuaccugaacgagacccacuucagcgacgacaucgagcagcaggccgacaacaugaucaccgagaugcugcagaaggaguacauggagagacagggcaagaccccccugggccugguggaccuguucguguucagcaccagcuucuaccugaucagcaucuuccugcaccuggugaagauccccacccacagacacaucgugggcaagagcugccccaagccccacagacugaaccacaugggcaucugcagcugcggccuguacaagcagcccggcgugcccgugaaguggaagagaugaggacuagucccuguucccagagcccacuuuuuuuucuuuuuuugaaauaaaauagccugucuuucagaucucaaaggcucuuuucagagccaccaaaaaaaaaaaaaaaaaaaaaaaaaaaaaaaaaaaaaaaaaaaaaaaaaaaaaaaaaaaaaaaaaaaaaaaaaaaaaaaaaaaaaaaaaaaaaaaaaaaaa

SEQ ID NO: 25025 - RNA, 1748 nt, Artificial Sequence
  mRNA product Design a-1 (hSL-A100) comprising derived and/or modified sequence from LASV(LM765-SLE-2012;Clade IV)__AIT17814__GPCmut3 (opt4)
aggagagucccgcagucggcguccagcggcucugcuuguucgugugugugucguugcaggccuuauucaagcuuaccaugggccagaucgugaccuucuuccaggaggugccccacgugaucgaggaggugaugaacaucgugcugaucgcccugagcauccuggccgugcugaagggccuguacaacuucgccaccugcggccuggugggccuggugaccuuccugcugcugugcggcagaagcugcaccaccagccuguacaagggcguguacgagcugcagacccuggagcugaacauggagacccugaacaugaccaugccccugagcugcaccaagaacaacagccaccacuacaucauggugggcaacgagaccggccuggagcugacccugaccaacaccagcaucaucgaccacaaguucugcaaccugagcgacgcccacagaaagaaccuguacgaccacgcccugaugagcaucaucagcaccuuccaccugagcauccccaacuucaaccaguacgaggccaugagcugcgacuucaacggcggcaagaucagcgugcaguacaaccugagccacagcuacgccaaggacgccgccgaccacugcggcaccguggccaacggcgugcugcagaccuucaugagaauggccuggggcggcagcuacaucgcccuggacagcggcagaggcagaugggacugcaucaugaccagcuaccaguaccugaucauccagaacaccaccugggaggaccacugccaguucagcagacccagccccaucggcuaccugggccugcugagccagagaaccagagacaucuacaucagcagaagaagaagaggcaccuucaccuggacccugagcgacagcgagggcaaggacacccccggcggcuacugccugaccagauggaugcugaucgaggccgagcugaagugcuucggcaacaccgccguggccaagugcaacgagaagcacgacgaggaguucugcgacaugcugagacuguucgacuucaacaagcaggccauccagagacugaaggcccccgcccagaugagcauccagcugaucaacaaggccgugaacgcccugaucaacgaccagcugaucaugaagaaccaccugagagacaucaugggcauccccuacugcaacuacagcaaguacugcuaccugaaccacaccaccaccggcaagaccagccugcccaagugcugccuggugagcaacggcagcuaccugaacgagacccacuucagcgacgacaucgagcagcaggccgacaacaugaucaccgagaugcugcagaaggaguacauggagagacagggcaagaccccccugggccugguggaccuguucguguucagcaccagcuucuaccugaucagcaucuuccugcaccuggugaagauccccacccacagacacaucgugggcaagcccugccccaagccccacagacugaaccacaugggcaucugcagcugcggccuguacaagcagcccggcgugcccgugaaguggaagagaugaggacuagucccuguucccagagcccacuuuuuuuucuuuuuuugaaauaaaauagccugucuuucagaucucaaaggcucuuuucagagccaccaaaaaaaaaaaaaaaaaaaaaaaaaaaaaaaaaaaaaaaaaaaaaaaaaaaaaaaaaaaaaaaaaaaaaaaaaaaaaaaaaaaaaaaaaaaaaaaaaaaaa

SEQ ID NO: 25026 - RNA, 1748 nt, Artificial Sequence
  mRNA product Design a-1 (hSL-A100) comprising derived and/or modified sequence from LASV(LM776-SLE-2012;Clade IV)__AIT17824__GPCmut3 (opt4)
aggagagucccgcagucggcguccagcggcucugcuuguucgugugugugucguugcaggccuuauucaagcuuaccaugggccagaucgugaccuucuuccaggaggugccccacgugaucgaggaggugaugaacaucgugcugaucgcccugagcauccuggccgugcugaagggccuguacaacuucgccaccugcggccuggugggccuggugaccuuccugcugcugugcggcagaagcugcaccaccagcguguacaagggcguguacgagcugcagacccuggagcugaacauggagacccugaacaugaccaugccccugagcugcaccaagaacaacagccaccacuacaucauggugggcaacgagaccggccuggagcugacccugaccaacaccagcaucaucaaccacaaguucugcaaccugagcgacgcccacaagaagaaccuguacgaccacgcccugaugagcaucaucagcaccuuccaccugagcauccccaacuucaaccaguacgaggccaugagcugcgacuucaacggcggcaagaucagcgugcaguacaaccugagccacagcuacgccggcgacgccgccaaccacugcggcaccguggccaacggcgugcugcagaccuucaugagaauggccuggggcggcagcuacaucgcccuggacagcggccacggcaagugggacugcaucaugaccagcuaccaguaccugaucauccagaacaccaccugggaggaccacugccaguucagcagacccagccccaucggcuaccugggccugcugagccagagaaccagagacaucuacaucagcagaagaagaagaggcaccuucaccuggacccugagcgacagcgagggcaaggacacccccggcggcuacugccugaccagauggaugcugaucgaggccgagcugaagugcuucggcaacaccgccguggccaagugcaacgagaagcacgacgaggaguucugcgacaugcugagacuguucgacuucaacaagcaggccauccagagacugaaggcccccgcccagaugagcauccagcugaucaacaaggccgugaacgcccugaucaacgaccagcugaucaugaagaaccaccugagagacaucaugggcauccccuacugcaacuacagcaaguacugcuaccugaaccacaccaccaccggcaagaccagccugcccaagugcugccuggugagcaacggcagcuaccugaacgagacccacuucagcgacgacaucgagcagcaggccgacaacaugaucaccgagaugcugcagaaggaguacauggagagacagggcaagaccccccugggccugguggaccuguucguguucagcaccagcuucuaccugaucagcaucuuccugcaccuggugaagauccccacccacagacacaucgugggcaagagcugccccaagccccacagacugaaccacaugggcaucugcagcugcggccuguacaagcagcccggcgugcccgugagauggaagagaugaggacuagucccuguucccagagcccacuuuuuuuucuuuuuuugaaauaaaauagccugucuuucagaucucaaaggcucuuuucagagccaccaaaaaaaaaaaaaaaaaaaaaaaaaaaaaaaaaaaaaaaaaaaaaaaaaaaaaaaaaaaaaaaaaaaaaaaaaaaaaaaaaaaaaaaaaaaaaaaaaaaaa

SEQ ID NO: 25027 - RNA, 1748 nt, Artificial Sequence
  mRNA product Design a-1 (hSL-A100) comprising derived and/or modified sequence from LASV(Mad39;Clade IV)__ANH09722__GPCmut3 (opt4)
aggagagucccgcagucggcguccagcggcucugcuuguucgugugugugucguugcaggccuuauucaagcuuaccaugggccagaucgugaccuucuuccaggaggugccccacgugaucgaggaggugaugaacaucgugcugaucgcccugagcauccuggccgugcugaagggccuguacaacguggccaccugcggccugaucggccuggugaccuuccugcugcugugcggcagaagcugcaccaccacccuguacaagggcguguacgagcugcaggcccuggagcugaacauggagacccugaacaugaccaugccccugagcugcaccaagaacaacagccaccacuacaucagagugggcaacgagaccggccuggagcugacccugaccaacaccagccugaucaaccacaaguucugcaaccugagcgacgcccacaagaagaaccuguacgaccacgcccugaugagcaucaucagcaccuuccaccugagcauccccaacuucaaccaguacgaggccaugagcugcgacuucaacgacggcaagaucagcgugcaguacaaccugagccacaccuacgccggcgacaccgccaaccacugcggcaccguggccaacggcgugcugcagaccuucaugagaauggccuggggcggcagcuacaucgcccuggacagcggcagaggcggcugggacugcaucaugaccagcuaccaguaccugaucauccagaacaccaccugggaggaccacugccaguucagcagacccagccccaucggcuaccugggccugcugagccagagaaccagagacaucuacaucagcagaagaagaagaggcaccuucaccuggacccugagcgacagcgagggcaaggacacccccggcggcuacugccugaccagauggaugcugaucgaggccgagcugaagugcuucggcaacaccgccguggccaagugcaacgagaagcacgacgaggaguucugcgacaugcugagacuguucgacuucaacaagcaggccauccagagacugaaggcccccgcccagaugagcauccagcugaucaacaaggccgugaacgcccugaucaacgaccagcugaucaugaagaaccaccugagagacaucaugggcauccccuacugcaacuacagcaaguacugcuaccugaaccacaccgugaccggcaagaccagccugcccaagugcugccuggugagcaacggcagcuaccugaacgagacccacuucagcgacgacaucgagcagcaggccgacaacaugaucaccgagaugcugcagaaggaguacauggagagacagggcaagaccccccugggccugguggaccuguucguguucagcaccagcuucuaccugaucagcaucuuccugcaccuggugaagauccccacccacagacacguggugggcaagcccugccccaagccccacagacugaaccacaugggcaucugcagcugcggcuucuacaagcagcccggcgugcccgugagauggaagagaugaggacuagucccuguucccagagcccacuuuuuuuucuuuuuuugaaauaaaauagccugucuuucagaucucaaaggcucuuuucagagccaccaaaaaaaaaaaaaaaaaaaaaaaaaaaaaaaaaaaaaaaaaaaaaaaaaaaaaaaaaaaaaaaaaaaaaaaaaaaaaaaaaaaaaaaaaaaaaaaaaaaaa

SEQ ID NO: 25028 - RNA, 1748 nt, Artificial Sequence
  mRNA product Design a-1 (hSL-A100) comprising derived and/or modified sequence from LASV(Z0947-SLE-2011;Clade IV)__AIT17840__GPCmut3 (opt4)
aggagagucccgcagucggcguccagcggcucugcuuguucgugugugugucguugcaggccuuauucaagcuuaccaugggccagaucgugaccuucuuccaggaggugccccacgugaucgaggaggugaugaacaucgugcugaucgcccugagcauccuggccgugcugaagggccuguacaacuucgccaccugcggccuggugggccuggugaccuuccugcugcugugcggcagaagcugcaccaucagccuguacaagggcguguacgagcugcagacccuggagcugaacauggagacccugaacaugaccaugccccugagcugcaccaagaacaacagccaccacuacaucauggugggcaacgagaccggccuggagcugacccugaccaacaccagcaucaucaaccacaaguucugcaaccugagcgacgcccacaagaagaaccuguacgaccacgcccugaugagcaucaucagcaccuuccaccugagcauccccaacuucaaccaguacgaggccaugagcugcgacuucaacggcggcaagaucagcgugcaguacaaccugagccacagcuacgccggcgacgccgccaaccacugcggcaccguggccaacggcgugcugcagaccuucaugagaauggccuggggcggcagcuacaucgcccuggacagcggcagagacagaugggacugcaucaugaccagcuaccaguaccugaucauccagaacaccaccugggaggaccacugccaguucagcagacccagccccaucggcuaccugggccugcugagccagagaaccagagacaucuacaucagcagaagaagaagaggcaccuucaccuggacccugagcgacagcgagggcaaggacacccccggcggcuacugccugaccagauggaugcugaucgaggccgagcugaagugcuucggcaacaccgccguggccaagugcaacgagaagcacgacgaggaguucugcgacaugcugagacuguucgacuucaacaagcaggccauccagagacugaaggcccccgcccagaugagcauccagcugaucaacaaggccgugaacgcccugaucaacgaccagcugaucaugaagaaccaccugagagacaucaugggcauccccuacugcaacuacagcaaguacugcuaccugaaccacaccaccaccggcaagaccagccugcccaagugcugccuggugagcaacggcagcuaccugaacgagacccacuucagcgacgacaucgagcagcaggccgacaacaugaucaccgagaugcugcagaaggaguacauggagagacagggcaagaccccccugggccugguggaccuguucguguucagcaccagcuucuaccugaucagcaucuuccugcaccuggugaagauccccacccacagacacaucgugggcaagcccugccccaagccccacagacugaaccacaugggcaucugcagcugcggccuguacaagcagcccggcgugcccgugaaguggaagagaugaggacuagucccuguucccagagcccacuuuuuuuucuuuuuuugaaauaaaauagccugucuuucagaucucaaaggcucuuuucagagccaccaaaaaaaaaaaaaaaaaaaaaaaaaaaaaaaaaaaaaaaaaaaaaaaaaaaaaaaaaaaaaaaaaaaaaaaaaaaaaaaaaaaaaaaaaaaaaaaaaaaaa

SEQ ID NO: 25029 - RNA, 1748 nt, Artificial Sequence
  mRNA product Design a-1 (hSL-A100) comprising derived and/or modified sequence from LASV(Josiah;Clade IV)__NP_694870__GPCmut3 (opt5)
aggagagucccgcagucggcguccagcggcucugcuuguucgugugugugucguugcaggccuuauucaagcuuaccaugggccagaucgugaccuucuuucaagaggucccccacguuauugaagaggugaugaacaucgugcugauugcccucagcguccuggcugugcuuaaggggcuguacaauuucgccacaugcggacucguuggccuggugacguuucuucugcucugugggagauccugcaccacaucucuguauaaaggagucuacgaacugcagacccucgagcugaacauggaaacacuuaauaugaccaugccucugagcuguacaaagaacaauucccaucacuauaucauggugggcaacgagaccgggcucgagcugacgcuuaccaauacaucuauuaucaaccauaaauucugcaaucugagcgacgcgcacaagaaaaaccucuacgaucaugcucugauguccaucauuucuaccuuucaccugagcaucccgaauuucaaccaguaugaagccauguccugugacuuuaauggaggcaagauuagcguucaguacaaccucucucacuccuaugccggcgaugcugccaaucauugcgggacaguggcuaacggaguccugcaaaccuucaugcggauggccuggggcgggagcuacaucgcgcuugacucuggacgcggcaacugggauuguauuaugacguccuaccaguaucugaucauucagaauacaaccugggaggaccacugccaguuuagcagacccucuccuaucggguaccucggacugcuuucccaacggacacgcgauaucuauauuagcagacggcgcagaggcaccuucaccuggacacuguccgacucugaaggcaaggauacgcccgggggauacugucucacccgguggaugcugaucgaggccgagcugaaaugcuuuggcaacacagcuguggccaaguguaaugaaaaacaugacgaggaguucugcgauaugcuccgccuguuugacuucaacaagcaggcuauucagagacuuaaagccccugcgcagaugagcauccaacugauuaauaaggccgugaacgcucucaucaaugaucagcugaucaugaagaaccaccuucgggacauuauggggauccccuauugcaauuacuccaaauauuguuaccugaaccacaccacaaccggacgcacgagccucccuaagugcugucuggucucuaauggcuccuaccugaacgaaacacauuucagcgacgauauugaacagcaagccgacaauaugaucaccgagaugcuccagaaagaguauauggaaagacaggggaagaccccgcugggacuuguugaucuguuuguguucucuaccagcuuuuaccucauuuccaucuuccugcaccuggugaaaauccccacacaucggcacauugucggcaagucuugcccuaaaccccaucgccuuaaccacaugggcaucuguagcugcgggcucuauaagcagccuggagugcccguuaaguggaaaagaugaggacuagucccuguucccagagcccacuuuuuuuucuuuuuuugaaauaaaauagccugucuuucagaucucaaaggcucuuuucagagccaccaaaaaaaaaaaaaaaaaaaaaaaaaaaaaaaaaaaaaaaaaaaaaaaaaaaaaaaaaaaaaaaaaaaaaaaaaaaaaaaaaaaaaaaaaaaaaaaaaaaaa

SEQ ID NO: 25030 - RNA, 1745 nt, Artificial Sequence
  mRNA product Design a-1 (hSL-A100) comprising derived and/or modified sequence from LASV(LP;Clade I)__AAF86701__GPCmut3 (opt5)
aggagagucccgcagucggcguccagcggcucugcuuguucgugugugugucguugcaggccuuauucaagcuuaccaugggccagaucauuaccuucuuucaagaggugccccacgucaucgaagagguuaugaacauugugcugaucgcccucagccugcuugcuauucugaaggggcucuacaauaucgccacaugcggaaucauuggccugguggcguuccuuuuucugugugggaaauccugcucucucacgcugaagggaggcuaugaacugcagacccucgagcugaacauggaaacacuuaauaugaccaugccucugagcuguaccaaaaacuccucucaucacuacaucagagucgggaaugagacaggacucgagcugacacuuaccaacacgagcauuaucaaucauaaguucugcaaccuguccgacgcucacaaaaagaaucucuaugaucaugcccugaugucuauuaucagcaccuuucaccuguccauuccgaacuucaaucaguacgaagccaugagcugugacuuuaacggcggcaagaucucugugcaguauaaucucucccacagcuacgcuggggaugccgcugagcauugcggaacaguugccaacggcgugcugcaaaccuucaugcggauggcguggggagggcgcuauaucgcccuugacucuggcaaagggaauugggauuguauuaugacauccuaccaguaccugaucauucagaacaccacgugggaagaccacugccaguuuagcagacccucuccuaucggauaucucggccugcuuucccaacggacacgcgauauuuacaucagcagacggcgcagaggcaccuucacauggacccuguccgacucugaggggaacgagacccccggaggcuauugucucacacgguggaugcugaucgaagcugagcugaagugcuuugggaauacggccgucgcuaaauguaacgaaaagcaugaugaggaguucugcgacaugcuccgccuguuugauuucaauaaacaggccauuagacggcuuaaggcgccugcccagaugagcauccagcugauuaacaaggcugugaaugcccucaucaacgaccaacugauuaugaaaaaucaccuucgcgauaucaugggaauccccuacugcaacuauuccaaguacuguuaucugaaucacaccagcucuggcagaacaucccucccuaaaugcugucugauuagcaacgggucuuaccugaaugaaacccaguucagcgacgacaucgagcagcaagcugauaacaugauuacagaaaugcuccagaaggaguacaucgaacggcagggaaaaaccccgcugggccuuguugacauuuuuaucuucuccacgucuuuuuaucugauuagcaucuuccuccaucugaucaagauucccacacaccgccauaucgugggcaaaccuugccccaagccucacagacugaaucauaugggggucuguuccugcggacuuuacaagcaccccggcgugccgaccaaauggaagcggugaggacuagucccuguucccagagcccacuuuuuuuucuuuuuuugaaauaaaauagccugucuuucagaucucaaaggcucuuuucagagccaccaaaaaaaaaaaaaaaaaaaaaaaaaaaaaaaaaaaaaaaaaaaaaaaaaaaaaaaaaaaaaaaaaaaaaaaaaaaaaaaaaaaaaaaaaaaaaaaaaaaaa

SEQ ID NO: 25031 - RNA, 1745 nt, Artificial Sequence
  mRNA product Design a-1 (hSL-A100) comprising derived and/or modified sequence from LASV(803213;Clade II)__AAF86703__GPCmut3 (opt5)
aggagagucccgcagucggcguccagcggcucugcuuguucgugugugugucguugcaggccuuauucaagcuuaccaugggccagaucauuaccuucuuucaagaggugccccacgucaucgaagagguuaugaacauugugcugaucgcccucagccugcuugcuauucugaaggggaucuacaauguggccacaugcggacucuucggccugaucuccuuucuucugcucugugggagaucuugcagcgucacguauaaaggaguguacgaacugcagacccuggagcucaacauggcgaaucugaacaugacaaugccucuuuccuguaccaagaauaacucucaucacuauauuaugguuggcaaugaaacagggcuggagcucacccugacaaacaccagcaucauuaaucauaaauucugcaaccuuuccgacgcucacaagaaaaaucuguacgaucaugcccucaugucuaucauuagcacguuucaccuguccaucccgaacuucaaucaguaugaggccaugagcugugacuuuaacggaggcaagauuucugugcaguacaaucugucccacagcuucgcugucgaugccgcuaaccauugcggcaccaucgccaacggggugcuccaaacauuuaugcggauggcguggggaggcucuuauaucgcccuggacuccgggaagggaaauugggauuguauuaugaccagcuaccaguaccuuaucauucagaacacaaccugggaagaccacugccaguucucucgccccuccccuaucggcuaucuggggcuccugagccaaagaacgcgggauauuuacaucucccgcagacggcgcggaacauuuaccuggacacuuucugacagcgagggcaaugaagcucccggcggguauugucugaccagauggaugcucaucgaggccgagcugaaaugcuucggaaacaccgcuguugccaaguguaaugaaaaacaugaugaggaauuuugcgacaugcugcgccucuucgauuucaacaagcaggcgauuaaacggcugaagacgccugcccagauguccauccagcuuauuaauaaggcugugaacgcccugaucaaugaccaacucauuaugaaaaaccaccugagagauaucaugggcauccccuacugcaauuauagccgguacuguuaucuuaaccacacagucaccgggaagacaucucugccucgcugcugucucguguccaauggaagcuaccugaacgagacccauuuuucugacgacauugaacagcaggcugauaauaugaucacagagaugcugcaaaaagaguacauggacagacagggcaagaccccgcucgggcugguggaucuuuucgucuuuagcacguccuucuaucugauuucuaucuuucuccaccugguuaaaauucccacacaucggcacaucgugggaaagccuugccccaaaccucaucgccugaaccacaugggcauuuguagcugcggccuuuacaagcaccccggggugccggucaaguggaaaagaugaggacuagucccuguucccagagcccacuuuuuuuucuuuuuuugaaauaaaauagccugucuuucagaucucaaaggcucuuuucagagccaccaaaaaaaaaaaaaaaaaaaaaaaaaaaaaaaaaaaaaaaaaaaaaaaaaaaaaaaaaaaaaaaaaaaaaaaaaaaaaaaaaaaaaaaaaaaaaaaaaaaaa

SEQ ID NO: 25032 - RNA, 1745 nt, Artificial Sequence
  mRNA product Design a-1 (hSL-A100) comprising derived and/or modified sequence from LASV(GA391;Clade III)__CAA36645__GPCmut3 (opt5)
aggagagucccgcagucggcguccagcggcucugcuuguucgugugugugucguugcaggccuuauucaagcuuaccaugggccagaucgugaccuucuuucaagaggucccccacguuauugaagaggugaugaacaucgugcugauugcccucagcauccuggcuauucuuaaggggcuguacaaugucgccacaugcggacucaucggccuggugacguuccuucugcucuccgggagaucuuguagccugaucuauaaaggaaccuacgaacugcagacacucgagcugaacauggaaacccuuaauaugacaaugccucuguccugcaccaagaacaauucucaucacuauauucggguuggcaacgagacagggcucgagcugacccuuacgaauaccagcauccugaaccauaaauuuuguaaucucuccgacgcgcacaagcgcaaccuguacgaucauucucugaugagcauuaucuccacauuccaccucagcauuccgaauuuuaaccaguaugaagcuaugucuugcgacuucaauggaggcaaaaucaccgugcaguacaaccugucccacagcuuugccgucgaugccgcuggccauugugggacacuugccaauggagugcugcaaaccuucaugagaauggcuuggggcgggucuuauauugcccucgacuccggacggggcaacugggauugcaucaugacgagcuaccaguaccugaucauucagaacacaaccugggacgaucacugucaguuuucucgccccuccccuaucggguaucuuggacugcucagccaaagaacacgggacauuuacaucucccgcagacggcgcggcaccuucaccuggacacugucugauagcgagggcaaugaaacgcccgggggauauugccugaccagauggaugcucauugaggcggagcugaaguguuuuggcaacacagccguugcuaagugcaaugaaaaacaugacgaggaguucugugauaugcuucggcuguuugacuucaacaagcaggccauccgcagacucaaaaccccugcucagauguccauccagcugauuaauaaggccgugaacgcgcuuaucaaugaucaacugauuaugaaaaaccaccuccgggacaucauggggauucccuacugcaauuauagccgcuacugcuaucugaaccacacaucuaccggaaagacgucccugccuagauguugccucaucagcaauggcucuuaccugaacgaaacaaaguucagcgacgauaucgaacagcaggccgacaauaugauuaccgagaugcuucaaaaagaguacaucgaucggcaggggaagaccccgcugggacucgucgaccuguuuguguucuccacaucuuuuuaucugauuagcaucuuccuucaucucgugaaaauucccacccacagacauaucgucggcaagccuugucccaaaccucaccgccugaaccauaugggcauuugcuccugugggcuguacaagcagcccggaguuccggugcgguggaaaagaugaggacuagucccuguucccagagcccacuuuuuuuucuuuuuuugaaauaaaauagccugucuuucagaucucaaaggcucuuuucagagccaccaaaaaaaaaaaaaaaaaaaaaaaaaaaaaaaaaaaaaaaaaaaaaaaaaaaaaaaaaaaaaaaaaaaaaaaaaaaaaaaaaaaaaaaaaaaaaaaaaaaaa

SEQ ID NO: 25033 - RNA, 1748 nt, Artificial Sequence
  mRNA product Design a-1 (hSL-A100) comprising derived and/or modified sequence from LASV(AV;Clade V)__CCA30314__GPCmut3 (opt5)
aggagagucccgcagucggcguccagcggcucugcuuguucgugugugugucguugcaggccuuauucaagcuuaccaugggccagaucgugaccuucuuucaagaggucccccacguuauugaagaggugaugaacaucgugcugauugcccucagcauccuggcuguccuuaaggggcuguacaauauugccacaugcggacucaucggccugaucacguuccuucugcucugugggagauccugcucuagcaaccuguauaaaggaguguacgaacugcagucccucgaccugaauauggagacccuuaacaugacaaugccucugucuuguaccaagaauaacagccaucacuauauucggguuggcaaugauacagggcucgaacugacccuuacaaacaccuccauccugaaucauaaauuuugcaaccucucugacgcgcacaagaaagaucuguacgaccaugcucugaugagcauuaucuccacguuccaccucagcauuccgaauuuuaaccaguaugaggccaugucuugugauuucaauggaggcaagaucuccgugcaguacaaccugagccacucuuaugccauugacgcugccaaucauugcggcaccgucgcuaacgggauccuucaaacauuuaugcgcauggccuggggaggcuccuacaucgcgcuggauagcgggagaggaaacugggacuguauuaugaccucuuaccaguaucucaucauucagaauacaaccugggagaaccacugccaguucucccggcccagcccuaucggcuaccuggggcuucugucccaacgcacgagagauauuuauaucucucggcgcagacggggaacauuuaccuggacacucagcgacuccgaaggcaaugccacccccggcggguacugucugacccgcuggaugcugaucgaggcugaacucaagugcuucggaaacacagccguggcuaaauguaaugagaagcaugaugaggaauuuugcgacaugcugagacuuuucgauuuuaacaaacaggccauuagccggcugaagucuccugcgcagauguccauccagcucauuaauaaagccguuaacgcucugaucaaugaccaacuuauuaugaagaaccaucugcgcgacaucaugggcauccccuauugcaauuacagcaaguauuguuaccucaaccacacgauuaccgggaaaacaucucugccuaagugcugucuggugagcaauggauccuaccucaacgagacccacuucucugaugacaucgaacagcaggccgauaauaugauuacagagaugcugcaaaaagaauauauggagagacagggcaagaccccgcuugggcuggucgaccucuucguguuuagcacguccuucuaccugaucagcauuuuucugcggcuugugaaaauccccacacaccgccauauugucggaaagccuugccccaaaccucacagacucaaccauaugggcaucuguucuugcggccuguauaagcagcccgggguuccggugcgguggaagagaugaggacuagucccuguucccagagcccacuuuuuuuucuuuuuuugaaauaaaauagccugucuuucagaucucaaaggcucuuuucagagccaccaaaaaaaaaaaaaaaaaaaaaaaaaaaaaaaaaaaaaaaaaaaaaaaaaaaaaaaaaaaaaaaaaaaaaaaaaaaaaaaaaaaaaaaaaaaaaaaaaaaaa

SEQ ID NO: 25034 - RNA, 1745 nt, Artificial Sequence
  mRNA product Design a-1 (hSL-A100) comprising derived and/or modified sequence from LASV(Togo/2016/7082;Clade VI)__AMR44577__GPCmut3 (opt5)
aggagagucccgcagucggcguccagcggcucugcuuguucgugugugugucguugcaggccuuauucaagcuuaccaugggccagaucauuaccuucuuucaagaggugccccacgucaucgaagagguuaugaacauugugcugaucgcccucagccugcuugcuauucugaaggggguguacaaugucgccacaugcggaaucaucggccucgugacguuccuguuucuuugugggagauccugcucucugauuuauaaaggaagcuacgaacuccagacccuggagcugaacauggaaacacucaauaugaccaugccucuguccuguacaaagaacucuagccaucacuauauccggguuggcaaugagaccgggcuugagcugacacucaccaacacguccauuaucaaucauaaauucugcaaccugucugacgcgcacaagcgcaaucuuuacgaucaugcucugaugagcauucucuccaccuuucaccugagcaucccgaacuucaaucaguaugaagccaugucuugugacuuuaacggaggcaaaauuuccgugcaguacaaucugagccacgccuaugcugucgaugccgcugagcauugcggcacaguggccaacgggguucuccaaaccuucaugagaauggcguggggaggcucuuacaucgcccuggacuccgggcggggaaauugggauuguaucaugacaagcuaccaguaucuuauuauccagaacaccacgugggaagaccacugccaguuuucucgccccuccccuauuggcuaccuggggcuccugagccaaagaacacgggauaucuauauuucccgcagacggcgcggaaccuucacauggacccuuucugacagcgagggcaacgagacccccggcggguacugucugacaagauggaugcucaucgaagcugagcugaagugcuuuggaaauacggccguggcuaaguguaacgaaaaacaugaugaggaguucugcgacaugcugcggcucuuugauuucaauaagcaggccauccagcgccugaaauccccugcgcagaugagcauucaacuuaucaacaaggccgucaaugcucugauuaacgaccagcucaucaugaaaaaucaccugagagauaugaugggcauucccuauugcaacuacucuaaguauuguuaccuuaaucacaccuccagcgggcggacaucucugccuaagugcugucucgugagcaacggauccuaccugaaugaaacccauuucucugacgacaucgagcagcaagccgauaacaugaucacagaaaugcugcagaaagaguauauugaccgccagggcaagaccccgcucgggcugguggaucuuuuugucuucagcacguccuuuuaccugaucagcauuuuccuccaccugaucaaaauucccacacauagacacaucguuggaaagccuugccccaaaccucaucggcugaaucacaugggcauuuguucuugcggccuuuauaagcagcccggggugccgaccagauggaaacgcugaggacuagucccuguucccagagcccacuuuuuuuucuuuuuuugaaauaaaauagccugucuuucagaucucaaaggcucuuuucagagccaccaaaaaaaaaaaaaaaaaaaaaaaaaaaaaaaaaaaaaaaaaaaaaaaaaaaaaaaaaaaaaaaaaaaaaaaaaaaaaaaaaaaaaaaaaaaaaaaaaaaaa

SEQ ID NO: 25035 - RNA, 1745 nt, Artificial Sequence
  mRNA product Design a-1 (hSL-A100) comprising derived and/or modified sequence from LASV(KAK-428;Clade n.d. (VII))__ANH09740__GPCmut3 (opt5)
aggagagucccgcagucggcguccagcggcucugcuuguucgugugugugucguugcaggccuuauucaagcuuaccaugggccagaucgugaccuucuuucaagaggucccccacguuauugaagaggugaugaacaucgugcugauugcccucagccugcuugcuauccugaaggggcucuacaauuucgccacaugcggagucauuggccugaucacguuucuucugcucugugggagauccugcucugcgaccuauaaaggacaguacgaacugcagacacuggagcucaacauggaaagccugaauaugaccaugccucuuuccuguacaaagaacaauucucaucacuauauccgggcuggcaacaauaccgggcuggagcucacacugaccaacacgagcauuaucucccauaaauucugcaaucuuucugacgcccacaagaaaaaccuguacgaucauacccucaugagcauuaucacaaccuuucaccuguccauuccgaauuucaaccaguaugaggccaugagcugugacuuuaauggaggcaagaucucuauucaauacaaccugucccacagcuaugcuggcgaugccgcucagcauugcgggacaguggccaauggaguucuccagaccuucaugcgcauggcguggggcgggucuuaccuggcccuugacuccggaagacggggcugggauuguaucaucagcucuuaccaguaucugauuauccaaaacacgacaugggacgaucacugccaguuuucccgccccagcccuauuggguaccucggauucgugucccagaagaccagagacaucuauauuucucggcgcagacggggcacauuuaccuggacccugagcgauuccgaaggccaugacaugcccgggggauacugucuuacacgcuggaugcugaucgaggcugaucucaaaugcuucggcaacacggccgucgcuaaguguaaugaaaaacacgacgaggaguuuugcgauauguggagacuguucgacuucaacaagcaggccauccaacggcugaaagcgccugcccagaugaauauucagcucaucaacaaggcugugaaugcccugauuaacgaccaacuuaugaugaagaaucaucugcgcgauaucauggggauucccuauugcaacuacagcaaauuuuguuaucucaauaacaccacaaccggaagaacaucucugccucggugcugucuuaucuccaauggcagcuaccugaacgaaacccacuucucugacgauaucgagcagcaggcugacaauaugauuacggaaaugcuccagaaggaguacauggaucgccaagggaaaacaccgcugggacugguugaccucuuuguguucagcaccuccuuuuaucugaucaccauuuuccuucaccuggucaagauccccacacauagacacauugugggcaaaccuugccccaagccucaucggcucaaccacaugggcaucuguucuugcgggcuguacaaacagcccggagugccggucagauggaagcgcugaggacuagucccuguucccagagcccacuuuuuuuucuuuuuuugaaauaaaauagccugucuuucagaucucaaaggcucuuuucagagccaccaaaaaaaaaaaaaaaaaaaaaaaaaaaaaaaaaaaaaaaaaaaaaaaaaaaaaaaaaaaaaaaaaaaaaaaaaaaaaaaaaaaaaaaaaaaaaaaaaaaaa

SEQ ID NO: 25036 - RNA, 1745 nt, Artificial Sequence; identical to SEQ ID NO: 25030
  mRNA product Design a-1 (hSL-A100) comprising derived and/or modified sequence from LASV(Pinneo-NIG-1969;Clade I)__AIT17836__GPCmut3 (opt5)

SEQ ID NO: 25037 - RNA, 1745 nt, Artificial Sequence
  mRNA product Design a-1 (hSL-A100) comprising derived and/or modified sequence from LASV(ISTH0009-NIG-2011;Clade II)__AIT17404__GPCmut3 (opt5)
aggagagucccgcagucggcguccagcggcucugcuuguucgugugugugucguugcaggccuuauucaagcuuaccaugggccagaucauuaccuucuuucaagaggugccccacgucaucgaagagguuaugaacauugugcugaucgcccucagccugcuugcuauucugaaggggaucuacaauguggccacaugcggacucuucggccuggucuccuuucuucugcucugugggagaucuugcagcacgaccuauaaaggaguguacgaacugcagacacuggagcucgacauggcgucccugaacaugaccaugccucuuucuuguacaaagaauaacagccaucacuauaucaugguuggcaaugaaaccgggcuggagcucacacugaccaacacguccauuaucaaucauaaauucugcaaccuuucugaugcucacaagaaaaaucuguacgaccaugcccucaugagcauuaucuccaccuuucaccugagcauuccgaacuucaaucaguaugaggccaugucuugugauuuuaacggaggcaagaucuccgugcaguacaaucugagccacgcuuaugccgucgacgcugccaaccauugcggcacaauugcgaauggggugcuccaaaccuucaugcggauggccuggggaggcucuuacaucgcucuggauuccgggaagggaagcugggacuguaucaugacaucuuaccaguaucuuauuauccagaacaccacgugggaagaucacugccaguuuucccgccccagcccuauuggcuaccuggggcuccugucccaaagaacacgggacaucuauauuucucgcagacggcgcggaaccuucacauggacccuuagcgauuccgagggcaacgaaacccccggcggguacugucugacaagauggaugcucaucgaggccgagcugaaaugcuuuggaaauacggcuguugccaaguguaacgaaaaacaugacgaggaguucugcgauaugcugcggcucuuugacuucaauaagcaggcgauccgcagacugaaaaccccugcccagaugagcauucagcuuaucaacaaggcugugaaugcccugauuaacgaucaacucaucaugaagaaucaucugcgggacauuaugggcauccccuauugcaacuacucuaaauauuguuaccuuaaucacacagucaccgggaagacaucccugccucgcugcugucucgugagcaacggaucuuaccugaaugaaacccacuucagcgacgauaucgaacagcaggcugacaacaugauuacggagcugcuccaaaaagaguauauggauagacagggcaagacaccgcuggggcuuguggaccuguuugucuucuccaccucuuuuuaccucaucagcauuuuccugcaccugaucaaaauucccacccaucggcacaucacaggaaagccuugccccaaaccucaucgccuuaaucacaugggcauuuguuccugcggccucuauaagcaccccgggguuccggugaaguggaaaagaugaggacuagucccuguucccagagcccacuuuuuuuucuuuuuuugaaauaaaauagccugucuuucagaucucaaaggcucuuuucagagccaccaaaaaaaaaaaaaaaaaaaaaaaaaaaaaaaaaaaaaaaaaaaaaaaaaaaaaaaaaaaaaaaaaaaaaaaaaaaaaaaaaaaaaaaaaaaaaaaaaaaaa

SEQ ID NO: 25038 - RNA, 1745 nt, Artificial Sequence
  mRNA product Design a-1 (hSL-A100) comprising derived and/or modified sequence from LASV(ISTH2010-NIG-2012;Clade II)__AIT17482__GPCmut3 (opt5)
aggagagucccgcagucggcguccagcggcucugcuuguucgugugugugucguugcaggccuuauucaagcuuaccaugggccagaucauuaccuucuuucaagaggugccccacgucaucgaagagguuaugaacauugugcugaucgcccucagccugcuugcuauucugaaggggaucuacaauguggccacaugcggacucuucggccuggucuccuuucuucugcucugugggagaucuugcagcacgaccuauaaaggaguguacgaacugcagacacuggagcucgacauggcgucccugaacaugaccaugccucuuucuuguacaaagaauaacagccaucacuauaucaugguuggcaaugaaaccgggcuggagcucacacugaccaacacguccauuaucaaucauaaauucugcaaccuuucugaugcucacaagaaaaaucuguacgaccaugcccucaugagcauuaucuccaccuuucaccugagcauuccgaacuucaaucaguaugaggccaugucuugugauuuuaacggaggcaagaucuccgugcaguacaaucugagccacgcuuaugccgucgacgcugccaaccauugcggcacaauugcgaauggggugcuccaaaccuucaugcggauggccuggggaggcucuuacaucgcucuggauuccgggaagggaagcugggacuguaucaugacaucuuaccaguaucuuauuauccagaacauuaccugggaagaucacugccaguuuucccgccccagcccuaucggcuaccuggggcuccugucccaaagaacgcgggacauuuauaucucucgcagacggcgcggaacauucaccuggacacuuagcgauuccgagggcaacgaaacccccggcggguacugucugaccagauggaugcucaucgaggccgagcugaaaugcuuuggaaauacagcuguugccaaguguaacgaaaaacaugacgaggaguucugcgauaugcugcggcucuuugacuucaauaagcaggcgauucgcagacugaaaacgccugcccagaugagcauccagcuuauuaacaaggcugugaaugcccugaucaacgaucaacucauuaugaagaaucaucugcgggacaucaugggcauccccuauugcaacuacucuaaauauuguuaccuuaaucacaccgucacagggaagaccucccugccucgcugcugucucgugagcaacggaucuuaccugaaugaaacacacuucagcgacgauauugaacagcaggcugacaacaugaucaccgagcugcuccaaaaagaguauauugauagacagggcaagacgccgcuggggcuuguggaccuguuugucuucuccacaucuuuuuaccucaucagcauuuuccugcaccugguuaaaauccccacccaucggcacguggugggaaagccuugccccaaaccucaucgccuuaaucacaugggcauuuguuccugcggccucuauaagcaccccggggucccggugaaguggaaaagaugaggacuagucccuguucccagagcccacuuuuuuuucuuuuuuugaaauaaaauagccugucuuucagaucucaaaggcucuuuucagagccaccaaaaaaaaaaaaaaaaaaaaaaaaaaaaaaaaaaaaaaaaaaaaaaaaaaaaaaaaaaaaaaaaaaaaaaaaaaaaaaaaaaaaaaaaaaaaaaaaaaaaa

SEQ ID NO: 25039 - RNA, 1745 nt, Artificial Sequence
  mRNA product Design a-1 (hSL-A100) comprising derived and/or modified sequence from LASV(Lassa virus/H.sapiens-wt/NGA/2015/ISTH_0543;Clade II)__AVO03639__GPCmut3 (opt5)
aggagagucccgcagucggcguccagcggcucugcuuguucgugugugugucguugcaggccuuauucaagcuuaccaugggccagaucauuaccuucuuucaagaggugccccacgucaucgaagagguuaugaacauugugcugaucgcccucagccugcuugcuauucugaaggggaucuacaauguggccacaugcggacucuucggccuggucuccuuucuucugcucugugggagaucuugcagcacgaccuauaaaggaguguacgaacugcagacacuggagcucgacauggcgaaccugaauaugaccaugccucuuuccuguacaaagaacaauucucaucacuauaucaugguuggcaacgaaaccgggcuggagcucacacugaccaauacgagcauuaucaaccauaaauucugcaaucuuuccgaugcucacaagaaaaaccuguacgaccaugcccucaugucuauuaucagcaccuuucaccuguccauuccgaauuucaaccaguaugaggccaugagcugugauuuuaauggaggcaagaucucugugcaguacaaccugucccacacauaugcugucgacgccgcuaaucauugcggcaccauugccaacggggugcuccaaacauucaugcggauggcguggggaggcagcuacaucgcccuggauucugggaagggauccugggacuguaucaugaccagcuaccaguaucuuguuauucagaacacgacaugggaagaucacugccaguuuucucgccccuccccuaucggcuaccuggggcuccugagccaaagaacccgggacauuuauaucucccgcagacggcgcggaacauucaccuggacccuuucugauagcgagggcaaugaaacacccggcggguacugucugacgagauggaugcucauugaggcugagcugaaaugcuuuggaaacaccgccguggcuaaguguaaugaaaaacaugacgaggaguucugcgauaugcugcggcucuuugacuucaacaagcaggccauccgcagacugaaaaccccugcgcagauguccauccagcuuauuaauaaggccgucaacgcucugaucaaugaucaacucauuaugaagaaccaucugcgggacaucaugggcauucccuauugcaauuacagcaaauauuguuaccuuaaccacacagugacagggaagaccucucugccucgcugcugucucguguccaauggaagcuaccugaacgaaacgcacuucucugacgauaucgaacagcaggccgacaauaugaucacagagcugcuccaaaaagaguauauugauagacagggcaagaccccgcuggggcuugucgaccuguuuguuuucagcaccuccuuuuaccucaucucuauuuuccugcaccuggugaaaauccccacacaucggcacauuaccggaaagccuugccccaaaccucaucgccuuaaccacaugggcaucuguagcugcggccucuauaagcaccccggggugccggucaaguggaaaagaugaggacuagucccuguucccagagcccacuuuuuuuucuuuuuuugaaauaaaauagccugucuuucagaucucaaaggcucuuuucagagccaccaaaaaaaaaaaaaaaaaaaaaaaaaaaaaaaaaaaaaaaaaaaaaaaaaaaaaaaaaaaaaaaaaaaaaaaaaaaaaaaaaaaaaaaaaaaaaaaaaaaaa

SEQ ID NO: 25040 - RNA, 1745 nt, Artificial Sequence
  mRNA product Design a-1 (hSL-A100) comprising derived and/or modified sequence from LASV(Lassa virus/H.sapiens-wt/NGA/2016/ISTH_0009;Clade II)__AVO03571__GPCmut3 (opt5)
aggagagucccgcagucggcguccagcggcucugcuuguucgugugugugucguugcaggccuuauucaagcuuaccaugggccagaucauuaccuucuuucaagaggugccccacgucaucgaagagguuaugaacauugugcugaucgcccucagccugcuugcuauucugaaggggaucuacaauguggccacaugcggacuccugggccuugucuccuuccugcuccugugugggagaucuugcagcacgaccuauaaaggaguguacgaacugcagacacucgagcuggacauggcgucccuuaacaugaccaugccucugucuuguacaaagaauaacagccaucacuauaucaugguuggcaaugaaaccgggcucgagcugacacuuaccaacacguccauuaucaaucauaaauuuugcaaccugucugaugcucacaagaaaaaucucuacgaccaugcccugaugagcauuaucuccaccuuccaccugagcauuccgaacuuuaaucaguaugaggccaugucuugugauuucaacggaggccggaucuccgugcaguacaaucucagccacucuuaugcugucgacgccgcuaaccauugcggcacaauugccaauggggugcugcaaaccuuuaugcgcauggcguggggaggcuccuacaucgcccuugauagcgggaagggaucuugggacuguaucaugacauccuaccaguaucugauuauccagaacaccacgugggaagaucacugccaguucagcagacccuccccuauuggcuaccucgggcugcuuucucaacggacacgcgacaucuauauuagcagacggcgcagaggaaccuuuacauggacccuguccgauagcgagggcaacgaaacccccggcggguacugucucacacgguggaugcugaucgaggcugagcugaagugcuucggaaauacggccguugcuaaauguaacgaaaagcaugacgaggaauuuugcgauaugcuccgccuguucgacuuuaauaaacaggccaucagacggcuuaagaccccugcgcagaugucuauucagcugaucaacaaagccgugaaugcucucauuaacgaucaacugaucaugaagaaucaccuucgcgacauuaugggcauccccuauugcaacuacuccaaguauuguuaccugaaucacacagucaccgggaaaacaagccucccuagaugcugucuggugucuaacggaagcuaccugaaugagacccauuucuccgacgauaucgaacagcaggccgacaacaugauuacggagcuccugcaaaaggaguauaucgaucggcagggcaaaacaccgcuugggcugguggaccucuucgucuuuucuaccagcuucuaccugauuuccaucuuucugcaccuuguuaagauucccacccaucgccacaucacaggaaaaccuugccccaagccucauagacucaaucacaugggcauuuguagcugcggccuguauaaccaccccggggugccggugaaauggaagcggugaggacuagucccuguucccagagcccacuuuuuuuucuuuuuuugaaauaaaauagccugucuuucagaucucaaaggcucuuuucagagccaccaaaaaaaaaaaaaaaaaaaaaaaaaaaaaaaaaaaaaaaaaaaaaaaaaaaaaaaaaaaaaaaaaaaaaaaaaaaaaaaaaaaaaaaaaaaaaaaaaaaaa

SEQ ID NO: 25041 - RNA, 1745 nt, Artificial Sequence
  mRNA product Design a-1 (hSL-A100) comprising derived and/or modified sequence from LASV(Lassa virus/H.sapiens-wt/NGA/2016/ISTH_0017;Clade II)__AVO03567__GPCmut3 (opt5)
aggagagucccgcagucggcguccagcggcucugcuuguucgugugugugucguugcaggccuuauucaagcuuaccaugggccagaucauuaccuucuuucaagaggugccccacgucaucgaagagguuaugaacauugugcugaucgcccucagccugcuugcuauucugaaggggaucuacaauguggccacaugcggacucuucggccuggucuccuuucuucugcucugugggagaucuugcagcacgaccuauaaaggaguguacgaacugcagacacuggagcucgacauggcgucccugaacaugaccaugccucuuucuuguacaaagaauaacagccaucacuauaucaugguuggcaaugaaaccgggcuggagcucacacugaccaacacguccauuaucaaucauaaauucugcaaccuuucugaugcucacaagaaaaaucuguacgaccaugcccucaugagcauuaucuccaccuuucaccugagcauuccgaacuucaaucaguaugaggccaugucuugugauuuuaacggaggcaagaucuccgugcaguacaaucugagccacacauaugcuauugacgccgcuaaccauugcggcaccaucgccaaugggguccuccaaacauucaugcggauggcguggggaggcucuuacaucgcccuggauuccgggaagggaagcugggacuguauuaugaccucuuaccaguaucuuaucauucagaacacgacaugggaagaucacugccaguuuucccgccccagcccuaucggcuaccuggggcuccugucccaaagaacccgggacauuuauaucucucgcagacggcgcggaacauucaccuggacccuuagcgauuccgagggcaacgaaacacccggcggguacugucugacgagauggaugcucaucgaggcugagcugaaaugcuuuggaaauaccgccguggcuaaguguaacgaaaaacaugacgaggaguucugcgauaugcugcggcucuuugacuucaauaagcaggccauucgcagacugaaaaccccugcgcagaugagcauccagcuuauuaacaaggccguuaaugcucugaucaacgaucaacucauuaugaagaaucaucugcgggacaucaugggcauccccuauugcaacuacucuaaauauuguuaccuuaaucacacagugacagggaagaccucccugccucgcugcugucucgucagcaacggaucuuaccugaaugaaacgcacuucagcgacgauauugaacagcaggccgacaacaugaucacagagcugcuccaaaaagaguauauggauagacagggcaagaccccgcuggggcuuguggaccuguuuguguucuccaccucuuuuuaccucauuagcaucuuccugcaccugguccggauucccacacaucgccacguuaucggaaaaccuugccccaagccucauagacuuaaucacaugggcauuuguuccugcggccucuauaaacaccccggggugccggugaaguggaagcggugaggacuagucccuguucccagagcccacuuuuuuuucuuuuuuugaaauaaaauagccugucuuucagaucucaaaggcucuuuucagagccaccaaaaaaaaaaaaaaaaaaaaaaaaaaaaaaaaaaaaaaaaaaaaaaaaaaaaaaaaaaaaaaaaaaaaaaaaaaaaaaaaaaaaaaaaaaaaaaaaaaaaa

SEQ ID NO: 25042 - RNA, 1745 nt, Artificial Sequence
  mRNA product Design a-1 (hSL-A100) comprising derived and/or modified sequence from LASV(Lassa virus/H.sapiens-wt/NGA/2018/ISTH_0959;Clade II)__AVV65099__GPCmut3 (opt5)
aggagagucccgcagucggcguccagcggcucugcuuguucgugugugugucguugcaggccuuauucaagcuuaccaugggccagaucauuaccuucuuucaagaggugccccacgucaucgaagagguuaugaacauugugcugaucgcccucagccugcuugcuauucugaaggggaucuacaauguggucacaugcggacucuucggccugguguccuuucuucugcucugugggagaucuugcagcacgaccuauaaaggaguuuacgaacugcagacacuggagcucgacauggccucccugaacaugaccaugccucuuucuuguacaaagaauaacagccaucacuauaucauggugggcaaugaaaccgggcuggagcucacacugaccaacacguccauuaucaaucauaaauucugcaaccuuucugaugcgcacaagaaaaaucuguacgaccaugcucucaugagcauuaucuccaccuuucaccugagcauuccgaacuucaaucaguaugaggccaugucuugugauuuuaacggaggcaagaucuccguccaguacaaucugagccacgccuaugcuauugacgccgcuaaccauugcggcacaaucgccaauggggugcuccaaaccuucaugcggauggcguggggaggcucuuacaucgcccuggauuccgggaagggaagcugggacuguauuaugacaucuuaccaguaucuuaucauucagaacaccacgugggaagaucacugccaguuuucccgccccagcccuaucggcuaccuggggcuccugucccaaagaacacgggacauuuauaucucucgcagacggcgcggaaccuucacauggacccuuagcgauuccgagggcaacgaaacccccggcggguacugucugacaagauggaugcucaucgaggcugagcugaaaugcuuuggaaauacggccguugcuaaguguaacgaaaaacaugacgaggaguucugcgauaugcugcggcucuuugacuucaauaagcaggccauucgcagacugaaaaccccugcgcagaugagcauccagcuuauuaacaaggccgugaaugcucugaucaacgaucaacucauuaugaagaaucaucugcgggacaucaugggcauccccuauugcaacuacucuaaauauuguuaccuuaaucacacagucaccgggaagacaucccugccucgcugcugucucgugagcaacggaucuuaccugaaugaaacccacuucagcgacgauauugaacagcaggccgacaacaugaucacggagcugcuccaaaaagaguauauugauagacagggcaagacaccgcuggggcuuguggaccuguuugucuucuccaccucuuuuuaccucaucagcauuuuccugcaccugguuaaaauccccacccaucggcacgugauuggaaagccuugccccaaaccucaucgccuuaaucacaugggcaucuguuccugcggccucuauaagcaccccggggugccggucaaguggaaaagaugaggacuagucccuguucccagagcccacuuuuuuuucuuuuuuugaaauaaaauagccugucuuucagaucucaaaggcucuuuucagagccaccaaaaaaaaaaaaaaaaaaaaaaaaaaaaaaaaaaaaaaaaaaaaaaaaaaaaaaaaaaaaaaaaaaaaaaaaaaaaaaaaaaaaaaaaaaaaaaaaaaaaa

SEQ ID NO: 25043 - RNA, 1745 nt, Artificial Sequence
  mRNA product Design a-1 (hSL-A100) comprising derived and/or modified sequence from LASV(LASV003-NIG-2008;Clade II)__AIT17580__GPCmut3 (opt5)
aggagagucccgcagucggcguccagcggcucugcuuguucgugugugugucguugcaggccuuauucaagcuuaccaugggccagaucauuaccuucuuucaagaggugccccacgucaucgaagagguuaugaacauugugcugaucgcccucagccugcuugcuauucugaaggggaucuacaauguggccacaugcggacucuucggccuggucuccuuucuucugcucugugggagaucuugcagcacgaccuauaaaggaguguacgaacugcagacacuggagcucgacauggcgucccugaacaugaccaugccucuuucuuguacaaagaauaacagccaucacuauaucaugguuggcaaugaaaccgggcuggagcucacacugaccaacacguccauuaucaaucauaaauucugcaaccuuucugaugcucacaagaaaaaucuguacgaccaugcccucaugagcauuaucuccaccuuucaccugagcauuccgaacuucaaucaguaugaggccaugucuugugauuuuaacggaggcaagaucuccgugcaguacaaucugagccacacauaugcugucgacgccgcuaaccauugcggcaccauugccaauggggugcuccaaacauucaugcggauggcguggggaggcucuuacaucgcccuggauuccgggaagggaagcugggacuguaucaugaccucuuaccaguaucuuauuauccagaacacgacaugggaagaucacugccaguuuucccgccccagcccuauuggcuaccuggggcuccugucccaaagaacccgggacaucuauauuucucgcagacggcgcggaacauucaccuggacccuuagcgauuccgagagcaacgaaacacccggcggcuacugucugacgagauggaugcucaucgaggcugagcugaaaugcuuugggaauaccgccguugcuaaguguaacgaaaaacaugacgaggaguucugcgauaugcugcggcucuuugacuucaauaagcaggccauccgcagacugaaagcgccugcccagaugucuauucagcuuaucaacaaggcugugaaugcccugauuaacgaucaacucaucaugaagaaucaucugcgggacauuaugggaauccccuauugcaacuacuccaaauauuguuaccuuaaucacacagucaccggccgcacaagccugccuagaugcugucucgugucuaacgggagcuaccugaaugaaacccacuucuccgacgauaucgaacagcaggcugacaacaugauuacggagcugcuccaaaaggaguauauggaucggcagggaaaaacaccgcugggccuuguggaccuguuugucuucucuaccagcuuuuaccucaucuccauuuuccugcaccugguuaagauccccacccaucgccacgugauugggaaaccuugccccaagccucauagacuuaaucacaugggaaucuguagcugcggccucuauaaacaccccggcgugccggucaaguggaagcggugaggacuagucccuguucccagagcccacuuuuuuuucuuuuuuugaaauaaaauagccugucuuucagaucucaaaggcucuuuucagagccaccaaaaaaaaaaaaaaaaaaaaaaaaaaaaaaaaaaaaaaaaaaaaaaaaaaaaaaaaaaaaaaaaaaaaaaaaaaaaaaaaaaaaaaaaaaaaaaaaaaaaa

SEQ ID NO: 25044 - RNA, 1745 nt, Artificial Sequence
  mRNA product Design a-1 (hSL-A100) comprising derived and/or modified sequence from LASV(LASV035-NIG-2009;Clade II)__AIT17588__GPCmut3 (opt5)
aggagagucccgcagucggcguccagcggcucugcuuguucgugugugugucguugcaggccuuauucaagcuuaccaugggccagaucauuaccuucuuucaagaggugccccacgucaucgaagagguuaugaacauugugcugaucgcccucagccugcuugcuauucugaaggggaucuacaauguggccacaugcggacucuucggccuggucuccuuucuucugcucugugggagaucuugcagcacgaccuauaaaggaguguacgaacugcagacacuggagcucgacauggcgucccugaacaugaccaugccucuuucuuguacaaagaauaacagccaucacuauaucaugguuggcaaugaaaccgggcuggagcucacacugaccaacacguccauuaucaaucauaaauucugcaaccuuucugaugcucacaagaaaaaucuguacgaccaugcccucaugagcauuaucuccaccuuucaccugagcauuccgaacuucaaucaguaugaggccaugucuugugauuuuaacggaggcaagaucuccgugcaguacaaucugagccacgcuuaugccgucgacgcugccaaccauugcggcacaauugcgaauggggugcuccaaaccuucaugcggauggccuggggaggcucuuacaucgcucuggauuccgggaagggaagcugggacuguaucaugacaucuuaccaguaucuuauuauccagaacaccacgugggaagaucacugccaguuuucccgccccagcccuauuggcuaccuggggcuccugucccaaagaacacgggacaucuauauuucucgcagacggcgcggaaccuucacauggacccuuagcgauuccgagggcaacgaaacccccggcggguacugucugacaagauggaugcucaucgaggccgagcugaaaugcuuuggaaauacggcuguugccaaguguaacgaaaaacaugacgaggaguucugcgauaugcugcggcucuuugacuucaauaagcaggcgauccgcagacugaaagccccugcucagaugagcauucagcuuaucaacaaggccgugaaugcucugauuaacgaucaacucaucaugaagaaucaucugcgggacauuaugggcauccccuauugcaacuacucuaaauauuguuaccuuaaucacaccgucacagggaagaccucccugccucgcugcugucucgugagcaacggaucuuaccugaaugaaacacacuucagcgacgauaucgaacagcaggccgacaacaugauuaccgagcugcuccaaaaagaguauaucgauagacagggcaagacgccgcuggggcuuguggaccuguuugucuucuccacaucuuuuuaccucauuagcaucuuccugcaccugguuaaaauucccacccaucggcacgugaucggaaagccuugccccaaaccucaucgccuuaaucacaugggcauuuguuccugcggccucuauaagcaccccggggugccggucaaguggaaaagaugaggacuagucccuguucccagagcccacuuuuuuuucuuuuuuugaaauaaaauagccugucuuucagaucucaaaggcucuuuucagagccaccaaaaaaaaaaaaaaaaaaaaaaaaaaaaaaaaaaaaaaaaaaaaaaaaaaaaaaaaaaaaaaaaaaaaaaaaaaaaaaaaaaaaaaaaaaaaaaaaaaaaa

SEQ ID NO: 25045 - RNA, 1745 nt, Artificial Sequence
  mRNA product Design a-1 (hSL-A100) comprising derived and/or modified sequence from LASV(LASV1000-NIG-2009;Clade II)__AIT17782__GPCmut3 (opt5)
aggagagucccgcagucggcguccagcggcucugcuuguucgugugugugucguugcaggccuuauucaagcuuaccaugggccagaucauuaccuucuuucaagaggugccccacgucaucgaagagguuaugaacauugugcugaucgcccucagccugcuugcuauucugaaggggaucuacaauguggccacaugcggacucuucggccuggucuccuuucuucugcucugugggagaucuugcagcacgaccuauaaaggaguguacgaacugcagacacuggagcucgacauggcgucccugaacaugaccaugccucuuucuuguacaaagaauaacagccaucacuauaucaugguuggcaaugaaaccgggcuggagcucacacugaccaacacguccauuaucaaucauaaauucugcaaccuuucugaugcucacaagaaaaaucuguacgaccaugcccucaugagcauuaucuccaccuuucaccugagcauuccgaacuucaaucaguaugaggccaugucuugugauuuuaacggaggcaagaucuccgugcaguacaaucugagccacacauaugcugucgacgccgcuaaccauugcggcaccauugccaauggggugcuccaaacauucaugcggauggcguggggaggcucuuacaucgcccuggauuccgggaagggaagcugggacuguaucaugaccucuuaccaguaucuuauuauccagaacacgacaugggaagaucacugccaguuuucccgccccagcccuauuggcuaccuggggcuccugucccaaagaacccgggacaucuauauuucucgcagacggcgcggaacauucaccuggacccuuagcgauuccgagggcaacgaaacacccggcggguacugucugacgagauggaugcucaucgaggcugagcugaaaugcuuuggaaauaccgccguugcuaaguguaacgaaaaacaugacgaggaguucugcgauaugcugcggcucuuugacuucaauaagcaggccaucaaacgccugaagaccccugcgcagaugagcauucagcuuaucaacaaggccgugaaugcucugauuaacgaucaacucaucaugaaaaaucaccugagagacauuaugggcauccccuauugcaacuacucuaaguauuguuaccuuaaucacacagucacagggaaaaccucccugccucggugcugucucgugagcaacggaucuuaccugaaugaaacgcauuucagcgacgauaucgaacagcaggccgacaacaugauuacagagcugcuccaaaaggaguauaucgaucgccagggcaaaaccccgcuggggcuuguggaccuguuugucuucuccaccucuuuuuaccucauuagcaucuuccugcaccugguuaagauucccacacauagacacguggugggaaaaccuugccccaagccucaucggcuuaaucacaugggcaucuguuccugcggccucuauaagcaccccggggucccggugaaauggaagcgcugaggacuagucccuguucccagagcccacuuuuuuuucuuuuuuugaaauaaaauagccugucuuucagaucucaaaggcucuuuucagagccaccaaaaaaaaaaaaaaaaaaaaaaaaaaaaaaaaaaaaaaaaaaaaaaaaaaaaaaaaaaaaaaaaaaaaaaaaaaaaaaaaaaaaaaaaaaaaaaaaaaaaa

SEQ ID NO: 25046 - RNA, 1745 nt, Artificial Sequence
  mRNA product Design a-1 (hSL-A100) comprising derived and/or modified sequence from LASV(LASV221-NIG-2010;Clade II)__AIT17624__GPCmut3 (opt5)
aggagagucccgcagucggcguccagcggcucugcuuguucgugugugugucguugcaggccuuauucaagcuuaccaugggccagaucauuaccuucuuucaagaggugccccacgucaucgaagagguuaugaacauugugcugaucgcccucagccugcuugcuauucugaaggggaucuacaauguggccacaugcggacucuucggccuggucuccuuucuucugcucugugggagaucuugcagcacgaccuauaaaggaguguacgaacugcagacacuggagcucgacauggcgucccugaacaugaccaugccucuuucuuguacaaagaauaacagccaucacuauaucaugguuggcaaugaaaccgggcuggagcucacacugaccaacacguccauuaucaaucauaaauucugcaaccuuucugaugcucacaagaaaaaucuguacgaccaugcccucaugagcauuaucuccaccuuucaccugagcauuccgaacuucaaucaguaugaggccaugucuugugauuuuaacggaggcaagaucuccgugcaguacaaucugagccacacauaugcuauugacgccgcuaaccauugcggcaccaucgccaaugggguccuccaaacauucaugcggauggcguggggaggcucuuacaucgcccuggauuccgggaagggaagcugggacuguauuaugaccucuuaccaguaucuuaucauucagaacacgacaugggaagaucacugccaguuuucccgccccagcccuaucggcuaccuggggcuccugucccaaagaacccgggacauuuauaucucucgcagacggcgcggaacauucaccuggacccuuagcgauuccgagggcaacgaaacacccggcggguacugucugacgagauggaugcucaucgaggcugagcugaaaugcuuuggaaauaccgccguggcuaaguguaacgaaaaacaugacgaggaguucugcgauaugcugcggcucuuugacuucaauaagcaggccauucgcagacugaaaaccccugcgcagaugagcauccagcuuauuaacaaggccguuaaugcucugaucaacgaucaacucauuaugaagaaucaucugcgggacaucaugggcauccccuauugcaacuacucuaaauauuguuaccuuaaucacacagugacagggaagaccucccugccucgcugcugucucgucagcaacggaucuuaccugaaugaaacgcacuucagcgacgauauugaacagcaggccgacaacaugaucacagagaugcugcaaaaagaguauauggauagacagggcaagaccccgcucgggcugguggaccuuuuuguguucuccaccucuuuuuaccugauuagcaucuuccuccaccuggucaaaauucccacacaucggcacguuaucggaaagccuugccccaaaccucaucgccugaaucacaugggcauuuguuccugcggccuuuauaagcaccccggggugccggugaaguggaaaagaugaggacuagucccuguucccagagcccacuuuuuuuucuuuuuuugaaauaaaauagccugucuuucagaucucaaaggcucuuuucagagccaccaaaaaaaaaaaaaaaaaaaaaaaaaaaaaaaaaaaaaaaaaaaaaaaaaaaaaaaaaaaaaaaaaaaaaaaaaaaaaaaaaaaaaaaaaaaaaaaaaaaaa

SEQ ID NO: 25047 - RNA, 1745 nt, Artificial Sequence
  mRNA product Design a-1 (hSL-A100) comprising derived and/or modified sequence from LASV(LASV237-NIG-2010;Clade II)__AIT17638__GPCmut3 (opt5)
aggagagucccgcagucggcguccagcggcucugcuuguucgugugugugucguugcaggccuuauucaagcuuaccaugggccagaucauuaccuucuuucaagaggugccccacgucaucgaagagguuaugaacauugugcugaucgcccucagccugcuugcuauucugaaggggaucuacaauguggccacaugcggacucuucggccuggucuccuuucuucugcucugugggagaucuugcagcacgaccuauaaaggaguguacgaacugcagacacuggagcucgacauggcgucccugaacaugaccaugccucuuucuuguacaaagaauaacagccaucacuauaucaugguuggcaaugaaaccgggcuggagcucacacugaccaacacguccauuaucaaucauaaauucugcaaccuuucugaugcucacaagaaagaccuguacgaucaugcccucaugagcauuaucuccaccuuucaccugagcauuccgaauuucaaccaguaugaggccaugucuugugacuuuaauggaggcaagaucuccgugcaguacaaccugagccacacauaugcugucgaugccgcuaaucauugcggcaccauugccaacggggugcuccaaacauucaugcggauggcguggggaggcucuuacaucgcccuggacuccgggaagggaagcugggauuguaucaugaccucuuaccaguaucuuauuauccagaauacgacaugggaagaccacugccaguuuucccgccccagcccuauuggcuaccuggggcuccugucccaaagaacccgggauaucuauauuucucgcagacggcgcggaacauucaccuggacccuuagcgacuccgagggcaacgaaacacccggcggguacugucugacgagauggaugcucaucgaggcugagcugaaaugcuuuggaaacaccgccguugcuaaguguaaugaaaaacaugaugaggaguucugcgacaugcugcggcucuuugauuucaacaagcaggccauccgcagacugaaaaccccugcgcagaugagcauucagcuuaucaauaaggccgugaacgcucugauuaaugaccaacucaucaugaagaaccaucugcgggacauuaugggcauccccuauugcaauuacucuaaauauuguuaccuuaaccacacagucacagggaagaccucccugccucgcugcugucucgugagcaauggaucuuaccugaacgaaacgcacuucagcgaugacaucgaacagcaggccgauaauaugauuacagagcugcuccaaaaagaguauauggacagacagggcaagaccccgcuggggcuuguggaucuguuugucuucuccaccucuuuuuaccucaucagcauuuuccugcaccugaucaaaauucccacacaucggcacaucaccggaaagccuugccccaaaccucaucgccuuaaccacaugggcauuuguuccugcggccucuauaagcaccccgggguuccggugaaguggaaaagaugaggacuagucccuguucccagagcccacuuuuuuuucuuuuuuugaaauaaaauagccugucuuucagaucucaaaggcucuuuucagagccaccaaaaaaaaaaaaaaaaaaaaaaaaaaaaaaaaaaaaaaaaaaaaaaaaaaaaaaaaaaaaaaaaaaaaaaaaaaaaaaaaaaaaaaaaaaaaaaaaaaaaa

SEQ ID NO: 25048 - RNA, 1745 nt, Artificial Sequence
  mRNA product Design a-1 (hSL-A100) comprising derived and/or modified sequence from LASV(LASV253-NIG-2011;Clade II)__AIT17670__GPCmut3 (opt5)
aggagagucccgcagucggcguccagcggcucugcuuguucgugugugugucguugcaggccuuauucaagcuuaccaugggccagaucauuaccuucuuucaagaggugccccacgucaucgaagagguuaugaacauugugcugaucgcccucagccugcuugcuauucugaaggggaucuacaauguggccacaugcggacucuucggccuggucuccuuucuucugcucugugggagaucuugcagcacgaccuauaaaggaguguacgaacugcagacacuggagcucgacauggcgucccugaacaugaccaugccucuuucuuguacaaagaauaacagccaucacuauaucaugguuggcaaugaaaccgggcuggagcucacacugaccaacacguccauuaucaaucauaaauucugcaaccuuucugaugcucacaagaaaaaucuguacgaccaugcccucaugagcauuaucuccaccuuucaccugagcauuccgaacuucaaucaguaugaggccaugucuugugauuuuaacggaggcaagaucuccgugcaguacaaucugagccacacauaugcugucgacgccgcuaaccauugcggcaccauugccaauggggugcuccaaacauucaugcggauggcguggggaggcucuuacaucgcccuggauuccgggaagggaagcugggacuguaucaugaccucuuaccaguaucuuauuauccagaacacgacaugggaagaucacugccaguuuucccgccccagcccuauuggcuaccuggggcuccugucccaaagaacccgggacaucuauauuucucgcagacggcgcggaacauucaccuggacccuuagcgauuccgagggcaacgaaacacccggcggguacugucugacgagauggaugcucaucgaggcugagcugaaaugcuuuggaaauaccgccguugcuaaguguaacgaaaaacaugacgaggaguucugcgauaugcugcggcucuuugacuucaauaagcaggccauccgcagacugaaagcgccugcccagaugagcauucagcuuaucaacaaggcugugaaugcccugauuaacgaucaacucaucaugaagaaucaucugcgggacauuaugggcauccccuauugcaacuacucuaaauauuguuaccuuaaucacacagucaccgggcgcacaucccugccuagaugcugucucgugagcaacggaucuuaccugaaugaaacccacuucagcgacgauaucgaacagcaggcugacaacaugauuacggagcugcuccaaaaggaguauaucgaucggcagggcaaaacaccgcuggggcuuguggaccuguuugucuucuccaccucuuuuuaccucauuagcaucuuccugcaccugguuaagauucccacccaucgccacaucauuggaaaaccuugccccaagccucauagacuuaaucacaugggcaucuguuccugcggccucuauaaacaccccggggugccggugaaguggaagcggugaggacuagucccuguucccagagcccacuuuuuuuucuuuuuuugaaauaaaauagccugucuuucagaucucaaaggcucuuuucagagccaccaaaaaaaaaaaaaaaaaaaaaaaaaaaaaaaaaaaaaaaaaaaaaaaaaaaaaaaaaaaaaaaaaaaaaaaaaaaaaaaaaaaaaaaaaaaaaaaaaaaaa

SEQ ID NO: 25049 - RNA, 1745 nt, Artificial Sequence
  mRNA product Design a-1 (hSL-A100) comprising derived and/or modified sequence from LASV(LASV254-NIG-2011;Clade II)__AIT17674__GPCmut3 (opt5)
aggagagucccgcagucggcguccagcggcucugcuuguucgugugugugucguugcaggccuuauucaagcuuaccaugggccagaucauuaccuucuuucaagaggugccccacgucaucgaagagguuaugaacauugugcugaucgcccucagccugcuugcuauucugaaggggaucuacaauguggccacaugcggacucuucggccuggucuccuuucuucugcucugugggagaucuugcagcacgaccuauaaaggaguguacgaacugcagacacuggagcucgacaugaccaaccugaauaugacaaugccucuuuccuguaccaagaacaauucucaucacuauaucaugguuggcaacgaaacagggcuggagcucacccugacgaauaccagcauuaucaaccauaaauucugcaaucuuuccgaugcgcacaagaaaaaccuguacaaucaugcucucaugucuauuaucagcacauuucaccuguccauuccgaacuucaaucaguaugaggccaugagcugugacuuuaacggaggcaagaucucugugcaguacaaucugucccacagcuaugccgucgaugcugccaaccauugcggcaccauugcuaacggggugcuccaaacauucaugcggauggccuggggaggcucuuacaucgcgcuggacuccgggaagggaaauugggauuguaucaugaccagcuaccaguaucuuauuauccagaacacgacaugggaagaccacugccaguuuucucgccccuccccuauuggcuaccuggggcuccugagccaaagaacccgggauaucuauauuucccgcagacggcgcggaacauucaccuggacccuuucugacagcgagggcaaugaaacacccggcggguacugucugacgagauggaugcucaucgaggccgagcugaaaugcuuuggaaacaccgcuguugccaaguguaaugaaaaacaugaugaggaguucugcgacaugcugcggcucuuugauuucaacaagcaggcuauccgcagacugaaaaccccugcccaggcgaauauucagcuuaucaacaaggccgugaaugcucugauuaacgaccaacucaucaugaagaaucaucugcgggauauuaugggcauccccuauugcaacuacuccaaauauuguuaccuuaaucacacagucacagggaagaccagccugccucgcugcugucucgugucuaacggauccuaccugaaugaaacgcacuucagcgacgacaucgaacagcaggccgauaacaugauuacagagcugcuccaaaaagaguauauggacagacagggcaagaccccgcuggggcuuguggaucuguuugucuucucuaccagcuuuuaccucaucuccauuuuccugcaccugguuaaaauccccacacaucggcacgugauuggaaagccuugccccaaaccucaucgccuuaaccacaugggcaucuguucuugcggccucuauaagcaccccggggugccggucaaguggaaaagaugaggacuagucccuguucccagagcccacuuuuuuuucuuuuuuugaaauaaaauagccugucuuucagaucucaaaggcucuuuucagagccaccaaaaaaaaaaaaaaaaaaaaaaaaaaaaaaaaaaaaaaaaaaaaaaaaaaaaaaaaaaaaaaaaaaaaaaaaaaaaaaaaaaaaaaaaaaaaaaaaaaaaa

SEQ ID NO: 25050 - RNA, 1745 nt, Artificial Sequence
  mRNA product Design a-1 (hSL-A100) comprising derived and/or modified sequence from LASV(Nig08-A19;Clade III)__ADU56618__GPCmut3 (opt5)
aggagagucccgcagucggcguccagcggcucugcuuguucgugugugugucguugcaggccuuauucaagcuuaccaugggccagaucgugaccuucuuucaagaggucccccacguuauugaagaggugaugaacaucgugcugauugcccucagcauccuggcuauucuuaaggggcuguacaauaucgccacaugcggacucaucggccuggucacguuccuucugcucuccgggagaucuuguagcaugaccuauaaaggaguguacgaacugcagacacuggagcucaacaugaauacccugaacaugacaaugccucuuuccugcaccaagaauaacucucaucacuauauuaugguuggcaaugaaacagggcuggagcucacccugacgaacaccagccuucugcaucacaaauuuuguaaucucuccgacgcgcauaagaaaaaccuguacgaucacacacugaugucuaucauuagcaccuuccaccucuccaucccgaauuuuaaccaguaugaggcuaugagcugcgacuucaauggaggcaagauuacagugcaguacaaccugucucauuccuaugccaucgaugccgcuaaucacuguggcaccgucgccaacggggugcuucaaacguuuaugcggauggcuuggggaggcagcuacauugcccuggacucugggcgcggaaagugggauugcaucaugacauccuaccaguaucucaucauucagaacaccacaugggaagaccauugucaguucagcagacccucuccuaucggcuaccuggggcuucugucccaacggacccgcgauauuuauaucagcagacggcgcagaggaaccuuuacauggacgcucuccgacucugagggcaaugaaacccccggcggguacugccugacacgguggaugcugauugaggcggagcucaaauguuucggaaacaccgccguugcuaagugcaaugaaaaacacgaugaggaauuuugugacaugcugcgccuuuucgauuuuaacaagcaggccaucagacggcugaaagcuccugcccagaugagcauccagcucauuaauaaggcggugaacgcccugaucaaugaccaacuuauuaugaagaaccaucugcgcgauaucaugggcauucccuauugcaauuacuccaaauauugcuaccucaaccacacaagcaccgggagaacgucucugccucgguguugccuggucuccaauggaagcuaccucaacgagacacacuucucugacgacaucgaacagcaggcugauaauaugaucaccgagaugcugcaaaaggaguaucuugaccgccagggcaaaaccccgcuggggcucguggaucuguucguguuuagcacauccuucuaccugauuucuaucuuucuucaucucgucaagauucccacccacagacauaucguuggaaaaccuugucccaagccucaccggcugaaccacaugggcauuugcagcuguggccuguauaaacagcccggggugccggugagauggaagcgcugaggacuagucccuguucccagagcccacuuuuuuuucuuuuuuugaaauaaaauagccugucuuucagaucucaaaggcucuuuucagagccaccaaaaaaaaaaaaaaaaaaaaaaaaaaaaaaaaaaaaaaaaaaaaaaaaaaaaaaaaaaaaaaaaaaaaaaaaaaaaaaaaaaaaaaaaaaaaaaaaaaaaa

SEQ ID NO: 25051 - RNA, 1748 nt, Artificial Sequence
  mRNA product Design a-1 (hSL-A100) comprising derived and/or modified sequence from LASV(G1180-SLE-2010;Clade IV)__AIT17168__GPCmut3 (opt5)
aggagagucccgcagucggcguccagcggcucugcuuguucgugugugugucguugcaggccuuauucaagcuuaccaugggccagaucgugaccuucuuucaagaggucccccacguuauugaagaggugaugaacaucgugcugauugcccucagcauccuggcuguccuuaaggggcuguacaauuucgccacaugcggacucgugggccugcuuacguuucugcuccugugugggagauccugcaccgcgucucgguauaaaggaguuuacgaacugcagacacucgagcugaacauggaaacccuuaauaugacaaugccucugagcuguaccaagaacaauucccaucacuauauuauggugggcaacgagacagggcucgagcugacccuuacgaauaccucuaucaucaaccauaaauucugcaaucugagcgacgcucacaagaaaaaccucuacgaucaugcccugauguccauuaucucuacauuucaccugagcauuccgaauuucaaccaguaugaagccauguccugugacuuuaauggaggcaagaucagcguccaguacaaccucucucacuccuaugcuggcgaugccgcuaaucauugcgggaccguggccaacggaguucugcaaacauucaugcgcauggcguggggcgggagcuacauugcccuugacucuggacacggcuccugggauuguaucaugaccagcuaccaguaucugauuauccagaacacgacaugggaggaccauugccaguuuucuagacccuccccuaucggguaccucggacugcuuagccaacggacccgcgauauuuauaucuccagacggcgcagaggcacauucaccuggacccugucugacagcgaaggcaaggauacacccgggggauacugucucacgcgguggaugcugauugaggcugagcugaaaugcuuuggcaauaccgccguggcuaaguguaacgaaaaacacgacgaggaguucugcgauaugcuccgccuguuugacuucaauaagcaggccauccagagacuuaaagcgccugcccagauguccauucaacugaucaacaaggcugucaaugcccucaucaacgaucagcugauuaugaagaaucaccuucgggacaucauggggauucccuauugcaacuacagcaaauauuguuaccugaaucauacaaccacaggaaagaccucucucccuaaaugcugucugguguccaacggcagcuaccugaaugaaacgcacuucucugacgauaucgaacagcaagcugacaacaugauuacagagaugcuccagaaggaguauauggaacgccaggggaaaaccccgcugggacuuguggaucuguuugucuucagcaccuccuuuuaccucaucucuaucuuccugcaucugguuaagauucccacacacagacauaucgugggcaaaagcugcccuaagccccaccggcuuaaucacaugggcauuuguuccugcgggcucuauaagcagccuggagugcccgucaaauggaagcgcugaggacuagucccuguucccagagcccacuuuuuuuucuuuuuuugaaauaaaauagccugucuuucagaucucaaaggcucuuuucagagccaccaaaaaaaaaaaaaaaaaaaaaaaaaaaaaaaaaaaaaaaaaaaaaaaaaaaaaaaaaaaaaaaaaaaaaaaaaaaaaaaaaaaaaaaaaaaaaaaaaaaaa

SEQ ID NO: 25052 - RNA, 1748 nt, Artificial Sequence
  mRNA product Design a-1 (hSL-A100) comprising derived and/or modified sequence from LASV(G1442-SLE-2011;Clade IV)__AIT17180__GPCmut3 (opt5)
aggagagucccgcagucggcguccagcggcucugcuuguucgugugugugucguugcaggccuuauucaagcuuaccaugggccagaucgugaccuucuuucaagaggucccccacguuauugaagaggugaugaacaucgugcugauugcccucagcauccuggcuguccuuaaggggcuguacaauguggccacaugcggacucauuggccugguuacguuccuucugcucugugggagauccugcaccacaacccuguauaaaggaguguacgaacugcagacacucgagcugaacauggaaacccuuaauaugacaaugccucugucuuguaccaagaacaauagccaucacuauauccgggucggcaacgagacggggcucgagcugacccuuacaaauaccuccaucauuaaccauaaauuuugcaaucugucugacgcgcacaagaaaaaccucuacgaucaugcucugaugagcaucauuuccacauuccaccugucuaucccgaauuuuaaccaguaugaagccaugagcugugacuucaauggaggcaagauuuccgugcaguacaaccucagccacucuuaugccggcgaugcugccaaucauugcgggaccguugcuaacggagugcugcaaacguuuaugcgcauggccuggggcggguccuacaucgcgcuugacagcggaagaggcaacugggauuguauuaugacaucuuaccaguaucugaucauccagaauaccacaugggacgaucacugccaguucucccggcccagcccuauuggguaccucggacugcuuucucaacgcaccagagacgucuauaucucccggcgcagacggggcaccuuuacauggacgcugagcgauuccgagggcaaggacacccccgggggauacugucucacacgcuggaugcugauugaagccgagcugaaaugcuucggcaacaccgcuguggccaaguguaaugagaaacaugaugaagaguuuugcgacaugcucagacuguucgauuuuaacaagcaggcuauccagcggcuuaaagccccugcgcagaugucuauucaacugaucaauaaggccgugaacgcucucaucaaugaccagcugauuaugaagaaccaccuucgcgacaucauggggauucccuauugcaauuacagcaaauauuguuaccugaacaauacagccaccggaaagacgucccucccuaaaugcugucugaucagcaacggcucuuaccugaaugaaacacacuucuccgaugacauugagcaggaagcugauaacaugaucaccgagaugcuccaaaaggaguauauggaaagacaggggaaaaccccgcugggacuugucgaccuguucguuuuuagcacaucuuucuaccucaucagcauuuuucugcaucuggugaagauccccacccaccggcauauugugggcaaauccugcccuaagccccaccgccuuaaucauaugggcaucuguucuugcgggcucuauaagcagccuggaguccccgugagauggaaacggugaggacuagucccuguucccagagcccacuuuuuuuucuuuuuuugaaauaaaauagccugucuuucagaucucaaaggcucuuuucagagccaccaaaaaaaaaaaaaaaaaaaaaaaaaaaaaaaaaaaaaaaaaaaaaaaaaaaaaaaaaaaaaaaaaaaaaaaaaaaaaaaaaaaaaaaaaaaaaaaaaaaaa

SEQ ID NO: 25053 - RNA, 1748 nt, Artificial Sequence
  mRNA product Design a-1 (hSL-A100) comprising derived and/or modified sequence from LASV(G3010-SLE-2013;Clade IV)__AIT17344__GPCmut3 (opt5)
aggagagucccgcagucggcguccagcggcucugcuuguucgugugugugucguugcaggccuuauucaagcuuaccaugggccagaucgugaccuucuuucaagaggucccccacguuauugaagaggugaugaacaucgugcugauugcccucagcauccuggcuguccuuaaggggcuguacaauuucgccacaugcggacucgugggccugguuacguuucuucugcucugugggagauccugcaccacaucucuguauaaaggaguguacgaacugcagacccucgagcugaacauggaaacacuuaauaugaccaugccucugagcuguacaaagaacaauucccaucacuauauuauggucggcaacgagaccgggcucgagcugacgcuuaccaauacaucuaucaucaaccauaaauucugcaaucugagcgacgcgcacaagaaaaaccucuacaaucaugcucugauguccauuaucucuaccuuucaccugagcauuccgaacuucaaucaguaugaagccauguccugugauuuuaacggaggcaagaucagcgugcaguacaaucucucucacuccuaugccggcgacgcugccagccauugcgggacaguugcuaacggagugcugcaaaccuucaugcggauggccuggggcgggucuuacauugcgcuugauuccggauacggcaagugggacuguaucaugacgagcuaucaguaccugauuauccagaacacaaccugggaggaucacugccaguuuucucgccccuccccuaucggguaucucggacugcuuagccaaagaacacgggacauuuacaucucccgcagacggcgcggcaccuucaccuggacacugucugauagcgaaggcaaagacacgcccgggggauauugucucaccagauggaugcugauugaggccgagcugaagugcuuuggcaauacagcugucgccaaauguaacgaaaagcaugaugaggaguucugcgacaugcuccggcuguuugauuucaauaaacaggcuauccagcgccuuaagaccccugcccagauguccauucaacugaucaacaaggcggugaaugcccucaucaacgaccagcugauuaugaaaaaucaccuuagagauaucauggggauucccuacugcaacuauagcaaguacuguuaccugaaucacacaaccacgggaaaaacaucucucccuaagugcugucugguguccaacggcagcuaucugaaugaaacccauuucucugacgacaucgaacagcaagcugauaacaugauuaccgagaugcuccagaaagaguacauggaacggcaggggaagacaccgcugggacuugucgaccuguuuguuuucagcaccuccuuuuaucucaucucuaucuuccugcaccuggugaaaauucccacacaucgccacaucgugggcaagagcugcccuaagccccauagacuuaaucacaugggcauuuguuccugcgggcucuacaaacagccuggaguccccgugcgguggaagcgcugaggacuagucccuguucccagagcccacuuuuuuuucuuuuuuugaaauaaaauagccugucuuucagaucucaaaggcucuuuucagagccaccaaaaaaaaaaaaaaaaaaaaaaaaaaaaaaaaaaaaaaaaaaaaaaaaaaaaaaaaaaaaaaaaaaaaaaaaaaaaaaaaaaaaaaaaaaaaaaaaaaaaa

SEQ ID NO: 25054 - RNA, 1748 nt, Artificial Sequence
  mRNA product Design a-1 (hSL-A100) comprising derived and/or modified sequence from LASV(G502-SLE-2009;Clade IV)__AIT17126__GPCmut3 (opt5)
aggagagucccgcagucggcguccagcggcucugcuuguucgugugugugucguugcaggccuuauucaagcuuaccaugggccagaucgugaccuucuuucaagaggucccccacguuauugaagaggugaugaacaucgugcugauugcccucagcauccuggcuguccuuaaggggcuguacaauuucgccacaugcggacucgugggccugcuuacguuucugcuccugugugggagauccugcaccacaggacuguauaaaggcguuuacgaacuccagacccuggagcuuaacauggaaacacugaauaugaccaugccucucucuuguacaaagaacaauagccaucacuauauuaugguggggaacgagaccggacuggagcuuacgcugaccaauacauccaucaucaaccauaaauucugcaaucucucugacgcgcacaagaaaaaccuguacgaucaugcucugaugagcauuaucuccaccuuucaccucucuauuccgaauuucaaccaguaugaagccaugagcugugacuuuaauggcggcaagaucuccguccaguacaaccugagccacucuuaugccggggaugcugccgaccauugcggaacaguggcuaauggcguucuucaaaccuucaugcggauggccuggggaggguccuacauugcgcuggauagcggccgcgggagaugggacuguaucaugacgucuuaccaguaucucauuauccagaacacaaccugggaggaucacugccaguuuucccggcccagcccuaucggauaccugggccuucugucucaacgcacaagagacauuuauaucucccggcgcagacggggcaccuucaccuggacacucagcgauuccgaagggaaggacacgcccggaggcuacugucugacccgcuggaugcugauugaggccgagcucaaaugcuuugggaacacagcuguggccaaguguaaugaaaaacaugaugaggaguucugcgacaugcugagacuuuuugauuucaacaagcaggcuauccagcggcugaaagccccugcgcagaugucuauucaacucaucaauaaggccgucaacgcucugaucaaugaccagcuugugaugaagaaccaucugcgcgacauuaugggaauccccuauugcaauuacagcagauauuguuaccucaaccacaccacaaccggccggacgucccugccuaaaugcugucuggugagcaaugggucuuaccucaacgaaacacacuucuccgaugacauugaacagcaagccgauaauaugaucaccgagaugcugcagaaggaguauauggaacgccagggaaaaaccccgcuuggccuggucgaccucuuuguuuucagcacaucuuuuuaccugauuagcaucuuccugcaccuugugaagauccccacccauagacacauugugggcaaauccugcccuaagccccaucggcucaaccacauggggaucuguucuugcggacuguauaaacagccuggcguccccgugaaguggaagagaugaggacuagucccuguucccagagcccacuuuuuuuucuuuuuuugaaauaaaauagccugucuuucagaucucaaaggcucuuuucagagccaccaaaaaaaaaaaaaaaaaaaaaaaaaaaaaaaaaaaaaaaaaaaaaaaaaaaaaaaaaaaaaaaaaaaaaaaaaaaaaaaaaaaaaaaaaaaaaaaaaaaaa

SEQ ID NO: 25055 - RNA, 1748 nt, Artificial Sequence
  mRNA product Design a-1 (hSL-A100) comprising derived and/or modified sequence from LASV(G733-SLE-2010;Clade IV)__AIT17154__GPCmut3 (opt5)
aggagagucccgcagucggcguccagcggcucugcuuguucgugugugugucguugcaggccuuauucaagcuuaccaugggccagaucgugaccuucuuucaagaggucccccacguuauugaagaggugaugaacaucgugcugauugcccucagcauccuggcuguccuuaaggggcuguacaauuucgccacaugcggaauugugggccucguuuccuuucugcuucugugugggagaucuugcacgaccagccucuauaaaggaguguacgaacugcagacacuggagcucaacauggaaacccugaauaugacaaugccucuuuccuguaccaagaacaauucucaucacuauaucauggucggcaacgagacagggcuggagcucacccugacgaauaccagcaucauuaaccauaaauucugcaaucuuuccgacgcgcacaagaaaaaccuguacgaucaugcucucaugucuaucauuagcacauuucaccuguccaucccgaauuucaaccaguaugaagccaugagcugugacuuuaauggaggcaagauuucugugcaguacaaccugucccacagcuaugccggcgaugcugccaaucauugcgggaccaucgcuaacggaguucuccaaacauucaugcggauggccuggggcgggucuuacauugcgcuggacuccggacgcgauagaugggacuguaucaugaccagcuaccaguaucuuaucauucagaacacgacaugggaggaucacugccaguuuucucggcccuccccuaucggcuaccuggggcuccugagccaacgcaccagagacauuuauaucucccggcgcagacggggaacauucaccuggacccuuucugauagcgaaggcaaggacacacccggcggguacugucugacgcgcuggaugcucauugaggccgagcugaaaugcuuuggaaauaccgcuguggccaaguguaacgaaaaacaugaugaggaguucugcgacaugcugagacucuuugauuucaauaagcaggcuauccagcggcugaaagccccugcgcagauguccauccaacuuauuaacaaggccgucaaugcucugaucaacgaccagcucauuaugaagaaucaucugcgcgacaucaugggcauucccuauugcaacuacagcaaauauuguuaccuuaaucacacaaccacagggaagaccucucugccuaaaugcugucucguguccaacggaagcuaccugaaugaaacgcacuucucugaugacaucgaacagcaagccgauaacaugaucacagagaugcugcagaaggaguauauggaaagacagggcaaaaccccgcucgggcugguggaccuuuuugucuucagcaccuccuuuuaccugauuucuaucuuccuccaccugguuaagauucccacacaucggcacguggugggaaaaagcugcccuaagccccaucgccugaaucacaugggcaucuguuccugcggccuuuaugggcagccuggaguccccgugaaguggaaaagaugaggacuagucccuguucccagagcccacuuuuuuuucuuuuuuugaaauaaaauagccugucuuucagaucucaaaggcucuuuucagagccaccaaaaaaaaaaaaaaaaaaaaaaaaaaaaaaaaaaaaaaaaaaaaaaaaaaaaaaaaaaaaaaaaaaaaaaaaaaaaaaaaaaaaaaaaaaaaaaaaaaaaa

SEQ ID NO: 25056 - RNA, 1748 nt, Artificial Sequence
  mRNA product Design a-1 (hSL-A100) comprising derived and/or modified sequence from MOPV/LASV reassortant(IGS-1;Clade IV)__AFY05576__GPCmut3 (opt5)
aggagagucccgcagucggcguccagcggcucugcuuguucgugugugugucguugcaggccuuauucaagcuuaccaugggccagaucgugaccuucuuucaagaggucccccacguuauugaagaggugaugaacaucgugcugauugcccucagcguccuggcugugcuuaaggggcuguacaauuucgccacaugcggacucguuggccuggugacguuucuucugcucugugggagauccugcaccacaucucuguauaaaggagucuacgaacugcagacccucgagcugaacauggaaacacuuaauaugaccaugccucugagcuguacaaagaacaauucccaucacuauaucauggugggcaacgagaccgggcucgagcugacgcuuaccaauacaucuauuaucaaccauaaauucugcaaucugagcgacgcgcacaagaaaaaccucuacgaucaugcucugauguccaucauuucuaccuuucaccugagcaucccgaauuucaaccaguaugaagccauguccugugacuuuaauggaggcaagauuagcguucaguacaaccucucucacuccuaugccggcgaugcugccaaucauugcgggacaguggcuaacggaguccugcaaaccuucaugcggauggccuggggcgggagcuacaucgcgcuugacucuggacgcggcaacugggauuguauuaugacguccuaccaguaucugaucauucagaauacaaccugggaggaccacugccaguuuagcagacccucuccuaucggguaccucggacugcuuucccaacggacacgcgauaucuauauuagcagacggcgcagaggcaccuucaccuggacacuguccgacucugaaggcgaggauacgcccgggggauacugucucacccgguggaugcugaucgaggccgaacugaagugcuuuggcaacacagcuguggccaaauguaaugagaagcaugacgaagaguucugcgauaugcuccgccuguuugacuucaacaaacaggcuauucagagacuuaaggccccugcgcagaugagcauccaacugauuaauaaagccgugaacgcucucaucaaugaucagcugaucaugaagaaccaccuucgggacauuauggggauccccuauugcaauuacuccaaguauuguuaccugaaccacaccacaaccggacgcacgagccucccuaaaugcugucuggucucuaauggcuccuaccugaacgaaacacauuucagcgacgauauugagcagcaagccgacaauaugaucaccgagaugcuccagaaggaauauauggagagacaggggaaaaccccgcugggacuuguugaucuguuuguguucucuaccagcuuuuaccucauuuccaucuuccugcaccuggugaagauccccacacaucggcacauugucggcaaaucuugcccuaagccccaucgccuuaaccacaugggcaucuguagcugcgggcucuauaaacagccuggagugcccguuaaguggaagagaugaggacuagucccuguucccagagcccacuuuuuuuucuuuuuuugaaauaaaauagccugucuuucagaucucaaaggcucuuuucagagccaccaaaaaaaaaaaaaaaaaaaaaaaaaaaaaaaaaaaaaaaaaaaaaaaaaaaaaaaaaaaaaaaaaaaaaaaaaaaaaaaaaaaaaaaaaaaaaaaaaaaaa

SEQ ID NO: 25057 - RNA, 1748 nt, Artificial Sequence
  mRNA product Design a-1 (hSL-A100) comprising derived and/or modified sequence from LASV(LM765-SLE-2012;Clade IV)__AIT17814__GPCmut3 (opt5)
aggagagucccgcagucggcguccagcggcucugcuuguucgugugugugucguugcaggccuuauucaagcuuaccaugggccagaucgugaccuucuuucaagaggucccccacguuauugaagaggugaugaacaucgugcugauugcccucagcauccuggcuguccuuaaggggcuguacaauuucgccacaugcggacucgugggccugguuacguuucuucugcucugugggagauccugcaccacaucucuguauaaaggaguguacgaacugcagacccucgagcugaacauggaaacacuuaauaugaccaugccucugagcuguacaaagaacaauucccaucacuauauuauggucggcaacgagaccgggcucgagcugacgcuuaccaauacaucuaucaucgaccauaaauucugcaaccugagcgaugcgcaccggaagaaucucuacgaccaugcucugauguccauuaucucuaccuuucaccugagcauuccgaacuucaaucaguaugaagccauguccugugauuuuaacggaggcaaaaucagcgugcaguacaaucucucucacuccuaugccaaggacgcugccgaucauugcggcacaguugcuaacggggugcugcaaaccuucaugcgcauggccuggggaggcagcuacauugcgcuugacucugggagaggacggugggauuguaucaugacguccuaccaguaucugauuauccagaauacaaccugggaggaccacugccaguuuagccgccccucuccuaucggcuaccucgggcugcuuucccaaagaacacgggauauuuauaucagccgcagacggcgcggaaccuucaccuggacacuguccgacucugaaggcaaggauacgcccggcggguacugucucaccagauggaugcugauugaggccgagcugaaaugcuuuggaaacacagcugucgccaaguguaacgaaaaacaugacgaggaguucugcgauaugcuccggcuguuugacuucaauaagcaggcuauccagcgccuuaaagccccugcgcagaugagcauucaacugaucaacaaggccgugaaugcucucaucaacgaccagcugauuaugaagaaucaccuuagagauaucaugggcauucccuauugcaacuacuccaaauauuguuaccugaaucacaccacaaccgggaagacgagccucccuaaaugcugucuggugucuaacggauccuaccugaaugaaacacauuucagcgacgauaucgaacagcaagccgacaacaugauuaccgagaugcuccagaaggaguauauggaacggcagggcaaaaccccgcuggggcuugucgaucuguuuguuuucucuaccagcuuuuaccucaucuccaucuuccugcaccuggugaagauucccacacaucgccacaucgugggaaaaccuugccccaagccucauagacuuaaucacaugggcauuuguucuugcggccucuauaagcagcccggggucccggugaaauggaagcggugaggacuagucccuguucccagagcccacuuuuuuuucuuuuuuugaaauaaaauagccugucuuucagaucucaaaggcucuuuucagagccaccaaaaaaaaaaaaaaaaaaaaaaaaaaaaaaaaaaaaaaaaaaaaaaaaaaaaaaaaaaaaaaaaaaaaaaaaaaaaaaaaaaaaaaaaaaaaaaaaaaaaa

SEQ ID NO: 25058 - RNA, 1748 nt, Artificial Sequence
  mRNA product Design a-1 (hSL-A100) comprising derived and/or modified sequence from LASV(LM776-SLE-2012;Clade IV)__AIT17824__GPCmut3 (opt5)
aggagagucccgcagucggcguccagcggcucugcuuguucgugugugugucguugcaggccuuauucaagcuuaccaugggccagaucgugaccuucuuucaagaggucccccacguuauugaagaggugaugaacaucgugcugauugcccucagcauccuggcuguccuuaaggggcuguacaauuucgccacaugcggacucgugggccugguuacguuucuucugcucugugggagauccugcaccacaucuguguauaaaggagucuacgaacugcagacccuggagcucaacauggaaacacugaauaugaccaugccucuuagcuguacaaagaacaauucccaucacuauauuauggugggcaacgagaccgggcuggagcucacgcugaccaauacaucuaucaucaaccauaaauucugcaaucuuagcgacgcgcacaagaaaaaccuguacgaucaugcucucauguccauuaucucuaccuuucaccugagcauuccgaauuucaaccaguaugaagccauguccugugacuuuaauggaggcaagaucagcguucaguacaaccugucucacuccuaugccggcgaugcugccaaucauugcgggacaguggcuaacggaguccuccaaaccuucaugcggauggccuggggcgggagcuacauugcgcuggacucuggacacggcaagugggauuguaucaugacguccuaccaguaucuuauuauccagaacacaaccugggaggaccauugccaguuuagccgccccucuccuaucggguaccugggacuccugucccaaagaacacgggauauuuauaucagccgcagacggcgcggcaccuucaccuggacacuuuccgacucugaaggcaaagauacgcccgggggauacugucugaccagauggaugcucauugaggccgagcugaagugcuuuggcaauacagcuguggccaaauguaacgaaaagcacgacgaggaguucugcgauaugcugcggcucuuugacuucaauaaacaggcuauccagcgccugaaggccccugcgcagaugagcauucaacuuaucaacaaggccgugaaugcucugaucaacgaucagcucauuaugaaaaaucaccugagagacaucauggggauucccuauugcaacuacuccaaguauuguuaccuuaaucauaccacaaccggaaaaacgagccugccuaagugcugucucgucucuaacggcuccuaccugaaugaaacacacuucagcgacgauaucgaacagcaagccgacaacaugauuaccgagaugcugcagaaagaguauauggaacggcaggggaagaccccgcucggacugguugaucuuuuuguguucucuaccagcuuuuaccugaucuccaucuuccuccaucuggugaaaauucccacacaccgccauaucgucggcaagucuugcccuaagccccacagacugaaucacaugggcauuuguagcugcgggcuuuauaaacagccuggagugcccguucgguggaagcgcugaggacuagucccuguucccagagcccacuuuuuuuucuuuuuuugaaauaaaauagccugucuuucagaucucaaaggcucuuuucagagccaccaaaaaaaaaaaaaaaaaaaaaaaaaaaaaaaaaaaaaaaaaaaaaaaaaaaaaaaaaaaaaaaaaaaaaaaaaaaaaaaaaaaaaaaaaaaaaaaaaaaaa

SEQ ID NO: 25059 - RNA, 1748 nt, Artificial Sequence
  mRNA product Design a-1 (hSL-A100) comprising derived and/or modified sequence from LASV(Mad39;Clade IV)__ANH09722__GPCmut3 (opt5)
aggagagucccgcagucggcguccagcggcucugcuuguucgugugugugucguugcaggccuuauucaagcuuaccaugggccagaucgugaccuucuuucaagaggucccccacguuauugaagaggugaugaacaucgugcugauugcccucagcauccuggcuguccuuaaggggcuguacaauguggccacaugcggacucauuggccugguuacguuccuucugcucugugggagauccugcaccacaacccuguauaaaggaguguacgaacugcaggcgcucgagcugaacauggaaacacuuaauaugaccaugccucugucuuguacaaagaacaauagccaucacuauauccgggucggcaacgagaccgggcucgagcugacgcuuaccaauacaucccugaucaaccauaaauuuugcaaucucucugacgcucacaagaaaaaccuguacgaucaugcccugaugagcauuaucuccaccuuccaccucucuauuccgaauuuuaaccaguaugaagccaugagcugugacuucaaugauggaaagaucuccgugcaguacaaccugagccacacauaugcuggcgacaccgccaaucauugcggcacgguugcuaacggggugcuucaaacauuuaugcgcauggccuggggaggcucuuacauugcgcuggauuccgggagaggaggcugggacuguaucaugaccagcuaccaguaucucauuauccagaacacaaccugggaggaucacugccaguucucucggcccuccccuaucggguaccugggacuucugagccaacgcaccagagacauuuauaucucucggcgcagacggggcacauuuacguggacccucuccgauagcgaaggcaaggacacacccgggggauacugucugacccgcuggaugcugauugaggccgagcucaaaugcuucggcaauacagcugucgccaaguguaacgaaaaacaugaugaggaauuuugcgacaugcugagacuuuucgauuuuaauaagcaggcuauccagcggcugaaagccccugcgcagauguccauucaacucaucaacaaggccgugaaugcucugaucaacgaccagcuuauuaugaagaaucaucugcgcgacaucauggggauucccuauugcaacuacucuaaauauuguuaccucaaucacaccgugacgggaaagacaagccugccuaaaugcugucuggucuccaacggcagcuaccucaaugagacccacuucucugaugacaucgaacagcaagccgauaacaugauuaccgagaugcugcagaaggaguauauggaaagacaggggaaaacaccgcuuggacugguugaccucuucguguuuuccaccagcuucuaccugaucucuaucuuucugcaccuugugaagauucccacacaucggcacgucgugggcaaaccuugccccaagccucaucgccucaaucacaugggcaucuguagcugcggguucuauaagcagcccggaguuccggugagauggaaacggugaggacuagucccuguucccagagcccacuuuuuuuucuuuuuuugaaauaaaauagccugucuuucagaucucaaaggcucuuuucagagccaccaaaaaaaaaaaaaaaaaaaaaaaaaaaaaaaaaaaaaaaaaaaaaaaaaaaaaaaaaaaaaaaaaaaaaaaaaaaaaaaaaaaaaaaaaaaaaaaaaaaaa

SEQ ID NO: 25060 - RNA, 1748 nt, Artificial Sequence
  mRNA product Design a-1 (hSL-A100) comprising derived and/or modified sequence from LASV(Z0947-SLE-2011;Clade IV)__AIT17840__GPCmut3 (opt5)
aggagagucccgcagucggcguccagcggcucugcuuguucgugugugugucguugcaggccuuauucaagcuuaccaugggccagaucgugaccuucuuucaagaggucccccacguuauugaagaggugaugaacaucgugcugauugcccucagcauccuggcuguccuuaaggggcuguacaauuucgccacaugcggacucgugggccugguuacguuucuucugcucugugggagauccugcaccauuucucuguauaaaggaguguacgaacugcagacacucgagcugaacauggaaacccuuaauaugacaaugccucugagcuguaccaagaacaauucccaucacuauaucauggucggcaacgagacagggcucgagcugacccuuacgaauaccucuaucauuaaccauaaauucugcaaucugagcgacgcgcacaagaaaaaccucuacgaucaugcucugauguccaucauuucuacauuucaccugagcaucccgaauuucaaccaguaugaagccauguccugugacuuuaauggaggcaagauuagcgugcaguacaaccucucucacuccuaugccggcgaugcugccaaucauugcgggaccguugcuaacggagugcugcaaacauucaugcggauggccuggggcgggagcuacaucgcgcuugacucuggacgcgauagaugggacuguauuaugaccuccuaccaguaucugaucauccagaacacgacaugggaggaucacugccaguuuagccggcccucuccuauuggcuaccucgggcugcuuucccaacgcaccagagacaucuauauuagccggcgcagacggggaacauucaccuggacccuguccgauucugaaggcaaggacacacccggcggguacugucucacgcgcuggaugcugaucgaggccgagcugaaaugcuuuggaaauaccgcugucgccaaguguaacgaaaaacaugaugaggaguucugcgacaugcucagacuguuugauuucaauaagcaggcuauucagcggcuuaaagccccugcgcagaugagcauccaacugaucaacaaggccgugaaugcucucauuaacgaccagcugaucaugaagaaucaccuucgcgacauuaugggcauccccuauugcaacuacuccaaauauuguuaccugaaucacacaaccacagggaagaccagccucccuaaaugcugucuggugucuaacggauccuaccugaaugaaacgcauuucagcgaugacauugaacagcaagccgauaacaugaucacagagaugcuccagaaggaguauauggaaagacagggcaaaaccccgcuggggcuugucgaccuguuuguuuucucuaccagcuuuuaccucaucuccauuuuccugcaccuggugaagauccccacacaucggcacauugugggaaaaccuugccccaagccucaucgccuuaaucacaugggcaucuguucuugcggccucuauaagcagcccggggucccggugaaauggaagagaugaggacuagucccuguucccagagcccacuuuuuuuucuuuuuuugaaauaaaauagccugucuuucagaucucaaaggcucuuuucagagccaccaaaaaaaaaaaaaaaaaaaaaaaaaaaaaaaaaaaaaaaaaaaaaaaaaaaaaaaaaaaaaaaaaaaaaaaaaaaaaaaaaaaaaaaaaaaaaaaaaaaaa

SEQ ID NO: 25061 - RNA, 1724 nt, Artificial Sequence
  mRNA product Design a-1 (A100) comprising derived and/or modified sequence from LASV(Josiah;Clade IV)__NP_694870__GPCmut3 (opt1)
aggagagucccgcagucggcguccagcggcucugcuuguucgugugugugucguugcaggccuuauucaagcuuaccaugggccagaucgugaccuucuuccaggaggucccccacgugaucgaggaggugaugaacaucguccugaucgcccucagcgugcuggccgugcugaaggggcucuacaacuucgcgaccugcggccuggucgggcuggugacguuccuccugcugugcggccgcuccugcaccaccagccucuacaaggggguguacgagcugcagacccuggagcucaacauggagacgcugaacaugaccaugccgcuguccugcaccaagaacaacagccaccacuacaucauggucggcaacgagaccggccucgagcugacgcugaccaacaccuccaucaucaaccacaaguucugcaaccucagcgacgcccacaagaagaaccuguacgaccacgcccugauguccaucaucagcaccuuccaccucuccauccccaacuucaaccaguacgaggccaugagcugcgacuucaacgggggcaagaucuccgugcaguacaaccugagccacuccuacgccggggacgcggccaaccacugcggcacgguggccaacgggguccugcagaccuucaugcggauggccuggggcggcagcuacaucgcgcucgacuccgggcgcggcaacugggacugcaucaugaccagcuaccaguaccugaucauccagaacaccacgugggaggaccacugccaguucucccggcccagccccaucggguaccugggccuccugucccagcgcacccgggacaucuacaucagccgccggcgccggggcaccuucaccuggacgcugagcgacuccgaggggaaggacaccccgggcggguacugccugacccgcuggaugcucaucgaggccgagcugaagugcuucggcaacaccgccguggccaagugcaacgagaagcacgacgaggaguucugcgacaugcugcggcuguucgacuucaacaagcaggccauccagcgccugaaggcgcccgcccagaugagcauccagcugaucaacaaggccgugaacgcccucaucaacgaccagcugaucaugaagaaccaccuccgggacaucauggggauccccuacugcaacuacuccaaguacugcuaccucaaccacacgaccaccggccgcaccagccugcccaagugcugccuggucuccaacggcagcuaccucaacgagacgcacuucuccgacgacaucgagcagcaggccgacaacaugaucaccgagaugcugcagaaggaguacauggagcggcaggggaagacgccccugggccucguggaccuguucguguucagcaccuccuucuaccugaucagcaucuuccugcaccucgucaagaucccgacccaccgccacaucguggggaaguccugccccaagccccaccggcugaaccacaugggcaucugcagcugcgggcuguacaagcagcccggcgugccggucaaguggaagcgcugaggacuagucccuguucccagagcccacuuuuuuuucuuuuuuugaaauaaaauagccugucuuucagaucuaaaaaaaaaaaaaaaaaaaaaaaaaaaaaaaaaaaaaaaaaaaaaaaaaaaaaaaaaaaaaaaaaaaaaaaaaaaaaaaaaaaaaaaaaaaaaaaaaaaa

SEQ ID NO: 25062 - RNA, 1721 nt, Artificial Sequence
  mRNA product Design a-1 (A100) comprising derived and/or modified sequence from LASV(LP;Clade I)__AAF86701__GPCmut3 (opt1)
aggagagucccgcagucggcguccagcggcucugcuuguucgugugugugucguugcaggccuuauucaagcuuaccaugggccagaucaucaccuucuuccaggaggugccccacgucaucgaggaggugaugaacaucgugcugaucgcccucagccugcuggccauccucaaggggcuguacaacaucgcgaccugcggcaucaucgggcuggucgccuuccucuuccugugcggcaaguccugcagccugacgcucaagggcggguacgagcugcagacccuggagcucaacauggagacccugaacaugaccaugccgcuguccugcacgaagaacagcucccaccacuacauccgcgugggcaacgagaccgggcucgagcugacccugaccaacacgagcaucaucaaccacaaguucugcaaccucuccgacgcccacaagaagaaccuguacgaccacgcccugaugagcaucaucuccaccuuccaccucagcauccccaacuucaaccaguacgaggccauguccugcgacuucaacggcgggaagaucagcgugcaguacaaccugucccacagcuacgcgggcgacgccgccgagcacugcgggaccgucgccaacggcgugcugcagaccuucaugcggauggcguggggcgggcgcuacaucgcccucgacuccggcaaggggaacugggacugcaucaugacgagcuaccaguaccugaucauccagaacaccaccugggaggaccacugccaguucucccggcccagccccaucggcuaccugggccuccugucccagcgcacccgggacaucuacaucagccgccggcgccgggggacguucaccuggacccugagcgacuccgagggcaacgagacccccgggggcuacugccugacgcgcuggaugcucaucgaggccgagcugaagugcuucgggaacaccgccguggccaagugcaacgagaagcacgacgaggaguucugcgacaugcugcggcuguucgacuucaacaagcaggcgauccgccggcugaaggcccccgcccagaugagcauccagcugaucaacaaggccgucaacgcccucaucaacgaccagcugaucaugaagaaccaccuccgcgacaucaugggcauccccuacugcaacuacuccaaguacugcuaccucaaccacaccagcuccggccggaccagccugcccaagugcugccugaucuccaacgggagcuaccucaacgagacgcaguucuccgacgacaucgagcagcaggcggacaacaugaucaccgagaugcugcagaaggaguacaucgagcgccagggcaagaccccgcuggggcucguggacaucuucaucuucagcaccuccuucuaccugaucagcaucuuccugcaccugaucaagaucccgacgcaccggcacaucgugggcaagcccugccccaagccccaccgccucaaccacaugggggucugcuccugcggccuguacaagcacccgggcgugcccaccaaguggaagcggugaggacuagucccuguucccagagcccacuuuuuuuucuuuuuuugaaauaaaauagccugucuuucagaucuaaaaaaaaaaaaaaaaaaaaaaaaaaaaaaaaaaaaaaaaaaaaaaaaaaaaaaaaaaaaaaaaaaaaaaaaaaaaaaaaaaaaaaaaaaaaaaaaaaaa

SEQ ID NO: 25063 - RNA, 1721 nt, Artificial Sequence
  mRNA product Design a-1 (A100) comprising derived and/or modified sequence from LASV(803213;Clade II)__AAF86703__GPCmut3 (opt1)
aggagagucccgcagucggcguccagcggcucugcuuguucgugugugugucguugcaggccuuauucaagcuuaccaugggccagaucaucaccuucuuccaggaggugccccacgucaucgaggaggugaugaacaucgugcugaucgcccucagccugcuggccauccucaaggggaucuacaacgucgcgaccugcggccuguucgggcugaucuccuuccuccugcugugcggccgcagcugcuccgugacguacaaggggguguacgagcuccagacccuggagcugaacauggccaaccucaacaugaccaugccgcugagcugcaccaagaacaacucccaccacuacaucauggucggcaacgagacgggccuggagcucacccugaccaacaccagcaucaucaaccacaaguucugcaaccuguccgacgcccacaagaagaaccucuacgaccacgcccugaugagcaucaucuccacguuccaccugagcauccccaacuucaaccaguacgaggccauguccugcgacuucaacgggggcaagaucagcgugcaguacaaccucucccacagcuucgcgguggacgccgccaaccacugcgggaccaucgccaacggcguccugcagaccuucaugcggauggcguggggcggguccuacaucgcccuggacagcggcaaggggaacugggacugcaucaugaccuccuaccaguaccucaucauccagaacacgaccugggaggaccacugccaguucagccgccccucccccaucggcuaccuggggcugcucagccagcggacccgcgacaucuacaucagccggcgccgccggggcaccuucacguggacccucuccgacagcgagggcaacgaggcccccgggggcuacugccugacccgguggaugcugaucgaggccgagcucaagugcuucgggaacaccgccguggcgaagugcaacgagaagcacgacgaggaguucugcgacaugcugcgccuguucgacuucaacaagcaggccaucaagcggcucaagacgcccgcccagauguccauccagcugaucaacaaggccgugaacgcccugaucaacgaccagcucaucaugaagaaccaccuccgcgacaucaugggcauccccuacugcaacuacagccgguacugcuaccugaaccacaccgucaccgggaagaccucccugccccgcugcugccuggugagcaacggcuccuaccugaacgagacgcacuucagcgacgacaucgagcagcaggcggacaacaugaucaccgagaugcuccagaaggaguacauggaccggcagggcaagaccccgcuggggcugguggaccucuucgucuucuccaccagcuucuaccugaucuccaucuuccugcaccuggugaagaucccgacgcaccgccacaucgugggcaagcccugccccaagccccaccggcucaaccacauggggaucugcagcugcggccuguacaagcacccggggguccccgugaaguggaagcgcugaggacuagucccuguucccagagcccacuuuuuuuucuuuuuuugaaauaaaauagccugucuuucagaucuaaaaaaaaaaaaaaaaaaaaaaaaaaaaaaaaaaaaaaaaaaaaaaaaaaaaaaaaaaaaaaaaaaaaaaaaaaaaaaaaaaaaaaaaaaaaaaaaaaaa

SEQ ID NO: 25064 - RNA, 1721 nt, Artificial Sequence
  mRNA product Design a-1 (A100) comprising derived and/or modified sequence from LASV(GA391;Clade III)__CAA36645__GPCmut3 (opt1)
aggagagucccgcagucggcguccagcggcucugcuuguucgugugugugucguugcaggccuuauucaagcuuaccaugggccagaucgugaccuucuuccaggaggucccccacgugaucgaggaggugaugaacaucguccugaucgcccucagcauccuggccauccugaaggggcucuacaacguggcgaccugcggccugaucgggcuggugacguuccuccugcuguccggccgcagcugcucccucaucuacaaggggaccuacgagcugcagacccuggagcucaacauggagacccugaacaugacgaugccgcugagcugcaccaagaacaacucccaccacuacauccgggucggcaacgagaccggccucgagcugacccugacgaacaccagcauccucaaccacaaguucugcaaccuguccgacgcccacaagcgcaaccuguacgaccacagccucauguccaucaucagcaccuuccaccuguccauccccaacuucaaccaguacgaggccaugagcugcgacuucaacgggggcaagaucaccgugcaguacaaccugucccacagcuucgccguggacgccgcggggcacugcggcacgcucgccaacgggguccugcagaccuucaugcggauggccuggggcggcuccuacaucgcccuggacagcgggcgcggcaacugggacugcaucaugaccuccuaccaguaccucaucauccagaacaccacgugggacgaccacugccaguucagccggcccucccccaucggguaccugggccugcucagccagcgcacccgggacaucuacaucagccgccggcgccggggcaccuucaccuggacgcucuccgacagcgaggggaacgagaccccgggcggguacugccugacccgcuggaugcugaucgaggcggagcucaagugcuucggcaacaccgccguggccaagugcaacgagaagcacgacgaggaguucugcgacaugcugcggcuguucgacuucaacaagcaggccauccgccggcucaagacgcccgcccagauguccauccagcugaucaacaaggcggugaacgcccugaucaacgaccagcucaucaugaagaaccaccuccgcgacaucauggggauccccuacugcaacuacagccgguacugcuaccugaaccacaccuccaccggcaagaccagccugccccgcugcugccugaucuccaacggcagcuaccugaacgagacgaaguucuccgacgacaucgagcagcaggccgacaacaugaucaccgagaugcuccagaaggaguacaucgaccggcaggggaagacgccccugggccuggucgaccuguucguguucagcaccuccuucuaccucaucagcaucuuccugcaccuggugaagaucccgacccaccgccacaucgucgggaagcccugccccaagccccaccggcucaaccacaugggcaucugcuccugcgggcuguacaagcagccgggcgugcccgugcgcuggaagcggugaggacuagucccuguucccagagcccacuuuuuuuucuuuuuuugaaauaaaauagccugucuuucagaucuaaaaaaaaaaaaaaaaaaaaaaaaaaaaaaaaaaaaaaaaaaaaaaaaaaaaaaaaaaaaaaaaaaaaaaaaaaaaaaaaaaaaaaaaaaaaaaaaaaaa

SEQ ID NO: 25065 - RNA, 1724 nt, Artificial Sequence
  mRNA product Design a-1 (A100) comprising derived and/or modified sequence from LASV(AV;Clade V)__CCA30314__GPCmut3 (opt1)
aggagagucccgcagucggcguccagcggcucugcuuguucgugugugugucguugcaggccuuauucaagcuuaccaugggccagaucgugaccuucuuccaggaggucccccacgugaucgaggaggugaugaacaucguccugaucgcccucagcauccuggccgugcugaaggggcucuacaacaucgcgaccugcggccugaucgggcugaucacguuccuccugcugugcggccgcuccugcagcuccaaccucuacaaggggguguacgagcugcagagccuggaccucaacauggagacccugaacaugaccaugccgcuguccugcaccaagaacaacagccaccacuacauccgggucggcaacgacacgggccucgagcugacccugaccaacaccuccauccucaaccacaaguucugcaaccugagcgacgcccacaagaaggaccuguacgaccacgcccucauguccaucaucagcacguuccaccuguccauccccaacuucaaccaguacgaggccaugagcugcgacuucaacgggggcaagaucuccgugcaguacaaccugagccacuccuacgccaucgacgcggccaaccacugcgggaccguggccaacggcauccuccagaccuucaugcgcauggccuggggcgggagcuacaucgcgcuggacuccggccgggggaacugggacugcaucaugaccagcuaccaguaccugaucauccagaacacgaccugggagaaccacugccaguucucccgccccagccccaucggcuaccucgggcugcugagccagcggacccgcgacaucuacaucucccggcgccgccggggcaccuucacguggacccugagcgacuccgagggcaacgccacccccgggggcuacugccucacccgguggaugcugaucgaggccgagcugaagugcuucgggaacacggccgucgccaagugcaacgagaagcacgacgaggaguucugcgacaugcuccgccuguucgacuucaacaagcaggcgaucagccggcugaagucccccgcccagaugagcauccagcucaucaacaaggccgugaacgcccugaucaacgaccagcugaucaugaagaaccaccuccgcgacaucaugggcauccccuacugcaacuacuccaaguacugcuaccugaaccacaccaucaccgggaagaccagccugcccaagugcugccucguguccaacggcagcuaccugaacgagacgcacuucuccgacgacaucgagcagcaggccgacaacaugaucaccgagaugcugcagaaggaguacauggagcggcagggcaagaccccgcucgggcuggucgaccuguucguguucagcaccuccuucuaccugaucagcaucuuccuccgccuggugaagaucccgacgcaccggcacaucgucggcaagcccugccccaagccccaccgccugaaccacauggggaucugcuccugcggccucuacaagcagccgggggugcccgugcgguggaagcgcugaggacuagucccuguucccagagcccacuuuuuuuucuuuuuuugaaauaaaauagccugucuuucagaucuaaaaaaaaaaaaaaaaaaaaaaaaaaaaaaaaaaaaaaaaaaaaaaaaaaaaaaaaaaaaaaaaaaaaaaaaaaaaaaaaaaaaaaaaaaaaaaaaaaaa

SEQ ID NO: 25066 - RNA, 1721 nt, Artificial Sequence
  mRNA product Design a-1 (A100) comprising derived and/or modified sequence from LASV(Togo/2016/7082;Clade VI)__AMR44577__GPCmut3 (opt1)
aggagagucccgcagucggcguccagcggcucugcuuguucgugugugugucguugcaggccuuauucaagcuuaccaugggccagaucaucaccuucuuccaggaggugccccacgucaucgaggaggugaugaacaucgugcugaucgcccucagccugcuggccauccucaagggggucuacaacguggcgaccugcggcaucaucgggcuggugacguuccuguuccucugcggccgcuccugcagccugaucuacaagggguccuacgagcugcagacccucgagcugaacauggagacccugaacaugaccaugccgcucagcugcacgaagaacuccagccaccacuacauccgggucggcaacgagaccggccuggagcugacccucaccaacacguccaucaucaaccacaaguucugcaaccugagcgacgcccacaagcgcaaccuguacgaccacgcccucauguccauccugagcaccuuccaccuguccauccccaacuucaaccaguacgaggccaugagcugcgacuucaacgggggcaagaucuccgugcaguacaaccucagccacgccuacgcgguggacgccgccgagcacugcgggaccgucgccaacggcgugcugcagaccuucaugcggauggcguggggcggguccuacaucgcccuggacagcggccgcgggaacugggacugcaucaugacguccuaccaguaccucaucauccagaacaccaccugggaggaccacugccaguucagccggcccucccccaucggcuaccuggggcugcucagccagcgcacccgggacaucuacaucagccgccggcgccggggcacguucaccuggacccucuccgacagcgagggcaacgagacccccgggggcuacugccugacgcgcuggaugcugaucgaggccgagcucaagugcuucgggaacaccgccguggccaagugcaacgagaagcacgacgaggaguucugcgacaugcugcggcuguucgacuucaacaagcaggcgauccagcgccucaagucccccgcccagaugagcauccagcugaucaacaaggccgucaacgcccugaucaacgaccagcucaucaugaagaaccaccuccgggacaugaugggcauccccuacugcaacuacuccaaguacugcuaccugaaccacaccagcuccgggcgcaccagccugcccaagugcugccugguguccaacggcagcuaccugaacgagacgcacuucuccgacgacaucgagcagcaggccgacaacaugaucaccgagaugcuccagaaggaguacaucgaccggcagggcaagaccccgcuggggcugguggaccucuucgucuucagcaccuccuucuaccugaucagcaucuuccugcaccugaucaagaucccgacgcaccgccacaucgugggcaagcccugccccaagccccaccggcucaaccacauggggaucugcuccugcggccuguacaagcagccgggggugcccacccgcuggaagcggugaggacuagucccuguucccagagcccacuuuuuuuucuuuuuuugaaauaaaauagccugucuuucagaucuaaaaaaaaaaaaaaaaaaaaaaaaaaaaaaaaaaaaaaaaaaaaaaaaaaaaaaaaaaaaaaaaaaaaaaaaaaaaaaaaaaaaaaaaaaaaaaaaaaaa

SEQ ID NO: 25067 - RNA, 1721 nt, Artificial Sequence
  mRNA product Design a-1 (A100) comprising derived and/or modified sequence from LASV(KAK-428;Clade n.d. (VII))__ANH09740__GPCmut3 (opt1)
aggagagucccgcagucggcguccagcggcucugcuuguucgugugugugucguugcaggccuuauucaagcuuaccaugggccagaucgugaccuucuuccaggaggucccccacgugaucgaggaggugaugaacaucguccugaucgcccucagccugcuggccauccucaaggggcuguacaacuucgcgaccugcggcgugaucgggcugaucacguuccuccugcugugcggccgcuccugcagcgccaccuacaaggggcaguacgagcuccagacccuggagcugaacauggagucccucaacaugaccaugccgcugagcugcacgaagaacaacucccaccacuacauccgggccggcaacaacaccggccuggagcucacccugaccaacacgagcaucaucucccacaaguucugcaaccugagcgacgcccacaagaagaaccucuacgaccacacccugauguccaucaucaccaccuuccaccugagcauccccaacuucaaccaguacgaggccauguccugcgacuucaacgggggcaagaucagcauccaguacaaccucucccacagcuacgcgggggacgccgcccagcacugcggcacgguggccaacgggguccugcagaccuucaugcgcauggcguggggcggcuccuaccuggcccucgacagcgggcggcgcggcugggacugcaucaucuccagcuaccaguaccugaucauccagaacaccaccugggacgaccacugccaguucucccggcccagccccaucggguaccugggcuucgugagccagaagacgcgcgacaucuacaucucccggcgccgccggggcaccuucaccuggacccugagcgacuccgaggggcacgacaugccgggcggguacugccucacgcgguggaugcugaucgaggccgaccugaagugcuucggcaacaccgccguggccaagugcaacgagaagcacgacgaggaguucugcgacauguggcgccucuucgacuucaacaagcaggcgauccagcggcugaaggcccccgcccagaugaacauccagcugaucaacaaggccgucaacgcccucaucaacgaccagcugaugaugaagaaccaccuccgcgacaucauggggauccccuacugcaacuacagcaaguucugcuaccugaacaacaccaccacgggccggaccucccugccccgcugcugccugaucagcaacggcuccuaccucaacgagacccacuucagcgacgacaucgagcagcaggcggacaacaugaucaccgagaugcugcagaaggaguacauggaccggcaggggaagacgccccugggccucguggaccuguucguguucuccaccagcuucuaccugaucaccaucuuccuccaccuggucaagaucccgacccaccgccacaucguggggaagcccugccccaagccccaccggcugaaccacaugggcaucugcuccugcgggcuguacaagcagccgggcgugcccguccgcuggaagcggugaggacuagucccuguucccagagcccacuuuuuuuucuuuuuuugaaauaaaauagccugucuuucagaucuaaaaaaaaaaaaaaaaaaaaaaaaaaaaaaaaaaaaaaaaaaaaaaaaaaaaaaaaaaaaaaaaaaaaaaaaaaaaaaaaaaaaaaaaaaaaaaaaaaaa

SEQ ID NO: 25068 - RNA, 1721 nt, Artificial Sequence; identical to SEQ ID NO: 25062
  mRNA product Design a-1 (A100) comprising derived and/or modified sequence from LASV(Pinneo-NIG-1969;Clade I)__AIT17836__GPCmut3 (opt1)

SEQ ID NO: 25069 - RNA, 1721 nt, Artificial Sequence
  mRNA product Design a-1 (A100) comprising derived and/or modified sequence from LASV(ISTH0009-NIG-2011;Clade II)__AIT17404__GPCmut3 (opt1)
aggagagucccgcagucggcguccagcggcucugcuuguucgugugugugucguugcaggccuuauucaagcuuaccaugggccagaucaucaccuucuuccaggaggugccccacgucaucgaggaggugaugaacaucgugcugaucgcccucagccugcuggccauccucaaggggaucuacaacgucgcgaccugcggccuguucgggcugguguccuuccuccugcugugcggccgcagcugcuccacgaccuacaaggggguguacgagcuccagacccuggagcuggacauggccagccucaacaugaccaugccgcuguccugcacgaagaacaacagccaccacuacaucauggucggcaacgagaccggccuggagcucacccugaccaacacguccaucaucaaccacaaguucugcaaccugagcgacgcccacaagaagaaccucuacgaccacgcccugauguccaucaucagcaccuuccaccuguccauccccaacuucaaccaguacgaggccaugagcugcgacuucaacgggggcaagaucuccgugcaguacaaccucagccacgcguacgccguggacgccgccaaccacugcgggaccaucgcgaacggcguccugcagaccuucaugcggauggccuggggcggguccuacaucgcccuggacagcggcaagggguccugggacugcaucaugacgagcuaccaguaccucaucauccagaacaccaccugggaggaccacugccaguucucccgccccagccccaucggcuaccuggggcugcucagccagcggacccgcgacaucuacaucucccggcgccgccggggcacguucaccuggacccucagcgacuccgagggcaacgagacccccgggggcuacugccugacgcgguggaugcugaucgaggccgagcucaagugcuucgggaacaccgccguggcgaagugcaacgagaagcacgacgaggaguucugcgacaugcugcgccuguucgacuucaacaagcaggccauccggcgccucaagacccccgcccagaugagcauccagcugaucaacaaggccgugaacgcccugaucaacgaccagcucaucaugaagaaccaccuccgggacaucaugggcaucccguacugcaacuacuccaaguacugcuaccugaaccacaccgucacggggaagaccagccugccccgcugcugccugguguccaacggcagcuaccugaacgagacccacuucuccgacgacaucgagcagcaggcggacaacaugaucaccgagcuccugcagaaggaguacauggaccggcagggcaagacgccccuggggcucguggaccuguucgucuucagcaccuccuucuaccugaucagcaucuuccugcaccucaucaagaucccgacccaccgccacaucaccggcaagcccugccccaagccccaccggcugaaccacauggggaucugcuccugcggccuguacaagcacccgggggugcccgugaaguggaagcgcugaggacuagucccuguucccagagcccacuuuuuuuucuuuuuuugaaauaaaauagccugucuuucagaucuaaaaaaaaaaaaaaaaaaaaaaaaaaaaaaaaaaaaaaaaaaaaaaaaaaaaaaaaaaaaaaaaaaaaaaaaaaaaaaaaaaaaaaaaaaaaaaaaaaaa

SEQ ID NO: 25070 - RNA, 1721 nt, Artificial Sequence
  mRNA product Design a-1 (A100) comprising derived and/or modified sequence from LASV(ISTH2010-NIG-2012;Clade II)__AIT17482__GPCmut3 (opt1)
aggagagucccgcagucggcguccagcggcucugcuuguucgugugugugucguugcaggccuuauucaagcuuaccaugggccagaucaucaccuucuuccaggaggugccccacgucaucgaggaggugaugaacaucgugcugaucgcccucagccugcuggccauccucaaggggaucuacaacgucgcgaccugcggccuguucgggcugguguccuuccuccugcugugcggccgcagcugcuccacgaccuacaaggggguguacgagcuccagacccuggagcuggacauggccagccucaacaugaccaugccgcuguccugcacgaagaacaacagccaccacuacaucauggucggcaacgagaccggccuggagcucacccugaccaacacguccaucaucaaccacaaguucugcaaccugagcgacgcccacaagaagaaccucuacgaccacgcccugauguccaucaucagcaccuuccaccuguccauccccaacuucaaccaguacgaggccaugagcugcgacuucaacgggggcaagaucuccgugcaguacaaccucagccacgcguacgccguggacgccgccaaccacugcgggaccaucgcgaacggcguccugcagaccuucaugcggauggccuggggcggguccuacaucgcccuggacagcggcaagggguccugggacugcaucaugacgagcuaccaguaccucaucauccagaacaucaccugggaggaccacugccaguucucccgccccagccccaucggcuaccuggggcugcucagccagcggacccgcgacaucuacaucucccggcgccgccggggcaccuucacguggacccucagcgacuccgagggcaacgagacccccgggggcuacugccugacccgguggaugcugaucgaggccgagcucaagugcuucgggaacacggccguggcgaagugcaacgagaagcacgacgaggaguucugcgacaugcugcgccuguucgacuucaacaagcaggccauccggcgccucaagacccccgcccagaugagcauccagcugaucaacaaggccgugaacgcccugaucaacgaccagcucaucaugaagaaccaccuccgggacaucaugggcauccccuacugcaacuacuccaaguacugcuaccugaaccacaccgucaccgggaagacgagccugccccgcugcugccugguguccaacggcagcuaccugaacgagacccacuucuccgacgacaucgagcagcaggcggacaacaugaucaccgagcuccugcagaaggaguacaucgaccggcagggcaagaccccgcuggggcucguggaccuguucgucuucagcacguccuucuaccugaucagcaucuuccugcaccucgugaagaucccgacccaccgccacguggucggcaagcccugccccaagccccaccggcugaaccacauggggaucugcuccugcggccuguacaagcacccgggggugcccgugaaguggaagcgcugaggacuagucccuguucccagagcccacuuuuuuuucuuuuuuugaaauaaaauagccugucuuucagaucuaaaaaaaaaaaaaaaaaaaaaaaaaaaaaaaaaaaaaaaaaaaaaaaaaaaaaaaaaaaaaaaaaaaaaaaaaaaaaaaaaaaaaaaaaaaaaaaaaaaa

SEQ ID NO: 25071 - RNA, 1721 nt, Artificial Sequence
  mRNA product Design a-1 (A100) comprising derived and/or modified sequence from LASV(Lassa virus/H.sapiens-wt/NGA/2015/ISTH_0543;Clade II)__AVO03639__GPCmut3 (opt1)
aggagagucccgcagucggcguccagcggcucugcuuguucgugugugugucguugcaggccuuauucaagcuuaccaugggccagaucaucaccuucuuccaggaggugccccacgucaucgaggaggugaugaacaucgugcugaucgcccucagccugcuggccauccucaaggggaucuacaacgucgcgaccugcggccuguucgggcugguguccuuccuccugcugugcggccgcagcugcuccacgaccuacaaggggguguacgagcuccagacccuggagcuggacauggccaaccucaacaugaccaugccgcugagcugcacgaagaacaacucccaccacuacaucauggucggcaacgagaccggccuggagcucacccugaccaacacgagcaucaucaaccacaaguucugcaaccuguccgacgcccacaagaagaaccucuacgaccacgcccugaugagcaucaucuccaccuuccaccugagcauccccaacuucaaccaguacgaggccauguccugcgacuucaacgggggcaagaucagcgugcaguacaaccucucccacaccuacgcgguggacgccgccaaccacugcgggaccaucgccaacggcguccugcagacguucaugcggauggcguggggcgggagcuacaucgcccuggacuccggcaaggggagcugggacugcaucaugaccuccuaccaguaccucgugauccagaacaccaccugggaggaccacugccaguucagccgccccucccccaucggcuaccuggggcugcucagccagcggacgcgcgacaucuacaucagccggcgccgccggggcaccuucaccuggacccucuccgacagcgagggcaacgagacgcccgggggcuacugccugacccgguggaugcugaucgaggccgagcucaagugcuucgggaacaccgccguggccaagugcaacgagaagcacgacgaggaguucugcgacaugcugcgccuguucgacuucaacaagcaggcgauccggcgccucaagacccccgcccagauguccauccagcugaucaacaaggccgucaacgcccugaucaacgaccagcucaucaugaagaaccaccuccgggacaucaugggcauccccuacugcaacuacagcaaguacugcuaccugaaccacacggugaccgggaagaccucccugccccgcugcugccuggugagcaacggcuccuaccugaacgagacccacuucagcgacgacaucgagcagcaggccgacaacaugaucacggagcuccugcagaaggaguacaucgaccggcagggcaagaccccgcuggggcucgucgaccuguucguguucuccaccagcuucuaccugaucuccaucuuccugcaccucgugaagaucccgacccaccgccacaucacgggcaagcccugccccaagccccaccggcugaaccacauggggaucugcagcugcggccuguacaagcacccggggguccccgugaaguggaagcgcugaggacuagucccuguucccagagcccacuuuuuuuucuuuuuuugaaauaaaauagccugucuuucagaucuaaaaaaaaaaaaaaaaaaaaaaaaaaaaaaaaaaaaaaaaaaaaaaaaaaaaaaaaaaaaaaaaaaaaaaaaaaaaaaaaaaaaaaaaaaaaaaaaaaaa

SEQ ID NO: 25072 - RNA, 1721 nt, Artificial Sequence
  mRNA product Design a-1 (A100) comprising derived and/or modified sequence from LASV(Lassa virus/H.sapiens-wt/NGA/2016/ISTH_0009;Clade II)__AVO03571__GPCmut3 (opt1)
aggagagucccgcagucggcguccagcggcucugcuuguucgugugugugucguugcaggccuuauucaagcuuaccaugggccagaucaucaccuucuuccaggaggugccccacgucaucgaggaggugaugaacaucgugcugaucgcccucagccugcuggccauccucaaggggaucuacaacgucgcgaccugcggccugcuggggcucguguccuuccugcugcucugcggccgcagcugcuccacgaccuacaaggggguguacgagcugcagacccuggagcucgacauggccagccugaacaugaccaugccgcuguccugcacgaagaacaacagccaccacuacaucauggucggcaacgagaccggccucgagcugacccugaccaacacguccaucaucaaccacaaguucugcaaccucagcgacgcccacaagaagaaccuguacgaccacgcccugauguccaucaucagcaccuuccaccucuccauccccaacuucaaccaguacgaggccaugagcugcgacuucaacgggggccggaucuccgugcaguacaaccugagccacuccuacgcgguggacgccgccaaccacugcgggaccaucgccaacggcguccugcagaccuucaugcgcauggcguggggcgggagcuacaucgcccucgacuccggcaaggggagcugggacugcaucaugacguccuaccaguaccugaucauccagaacaccaccugggaggaccacugccaguucagccggcccagccccaucggcuaccuggggcuccugucccagcgcacccgggacaucuacaucagccgccggcgccggggcacguucaccuggacccuguccgacagcgagggcaacgagacccccgggggcuacugccugacgcgcuggaugcucaucgaggccgagcugaagugcuucgggaacaccgccguggccaagugcaacgagaagcacgacgaggaguucugcgacaugcugcggcuguucgacuucaacaagcaggcgauccgccggcugaagacccccgcccagauguccauccagcugaucaacaaggccgugaacgcccucaucaacgaccagcugaucaugaagaaccaccuccgcgacaucaugggcaucccguacugcaacuacagcaaguacugcuaccucaaccacaccgucacggggaagaccucccugccccggugcugccuggugagcaacggcuccuaccucaacgagacccacuucagcgacgacaucgagcagcaggccgacaacaugaucaccgagcugcugcagaaggaguacaucgaccgccagggcaagacgccccucgggcugguggaccuguucgucuucuccaccagcuucuaccugaucuccaucuuccuccaccuggugaagaucccgacccaccggcacaucaccggcaagcccugccccaagccccaccgccugaaccacauggggaucugcagcugcggccucuacaaccacccgggggugcccgucaaguggaagcggugaggacuagucccuguucccagagcccacuuuuuuuucuuuuuuugaaauaaaauagccugucuuucagaucuaaaaaaaaaaaaaaaaaaaaaaaaaaaaaaaaaaaaaaaaaaaaaaaaaaaaaaaaaaaaaaaaaaaaaaaaaaaaaaaaaaaaaaaaaaaaaaaaaaaa

SEQ ID NO: 25073 - RNA, 1721 nt, Artificial Sequence
  mRNA product Design a-1 (A100) comprising derived and/or modified sequence from LASV(Lassa virus/H.sapiens-wt/NGA/2016/ISTH_0017;Clade II)__AVO03567__GPCmut3 (opt1)
aggagagucccgcagucggcguccagcggcucugcuuguucgugugugugucguugcaggccuuauucaagcuuaccaugggccagaucaucaccuucuuccaggaggugccccacgucaucgaggaggugaugaacaucgugcugaucgcccucagccugcuggccauccucaaggggaucuacaacgucgcgaccugcggccuguucgggcugguguccuuccuccugcugugcggccgcagcugcuccacgaccuacaaggggguguacgagcuccagacccuggagcuggacauggccagccucaacaugaccaugccgcuguccugcacgaagaacaacagccaccacuacaucauggucggcaacgagaccggccuggagcucacccugaccaacacguccaucaucaaccacaaguucugcaaccugagcgacgcccacaagaagaaccucuacgaccacgcccugauguccaucaucagcaccuuccaccuguccauccccaacuucaaccaguacgaggccaugagcugcgacuucaacgggggcaagaucuccgugcaguacaaccucagccacaccuacgcgaucgacgccgccaaccacugcgggaccaucgccaacggcgugcugcagacguucaugcggauggcguggggcggguccuacaucgcccuggacagcggcaagggguccugggacugcaucaugaccagcuaccaguaccucaucauccagaacaccaccugggaggaccacugccaguucucccgccccagccccaucggcuaccuggggcugcucagccagcggacgcgcgacaucuacaucucccggcgccgccggggcaccuucaccuggacccucagcgacuccgagggcaacgagacgcccgggggcuacugccugacccgguggaugcugaucgaggccgagcucaagugcuucgggaacaccgccgucgccaagugcaacgagaagcacgacgaggaguucugcgacaugcugcgccuguucgacuucaacaagcaggcgauccggcgccucaagacccccgcccagaugagcauccagcugaucaacaaggccgugaacgcccugaucaacgaccagcucaucaugaagaaccaccuccgggacaucaugggcauccccuacugcaacuacuccaaguacugcuaccugaaccacacggugaccgggaagaccagccugccccgcugcugccuggucuccaacggcagcuaccugaacgagacccacuucuccgacgacaucgagcagcaggccgacaacaugaucacggagcuccugcagaaggaguacauggaccggcagggcaagaccccgcuggggcucguggaccuguucguguucagcaccuccuucuaccugaucagcaucuuccugcaccucguccgcaucccgacccaccggcacgugaucggcaagcccugccccaagccccaccgccugaaccacauggggaucugcuccugcggccuguacaagcacccgggggugcccgucaaguggaagcggugaggacuagucccuguucccagagcccacuuuuuuuucuuuuuuugaaauaaaauagccugucuuucagaucuaaaaaaaaaaaaaaaaaaaaaaaaaaaaaaaaaaaaaaaaaaaaaaaaaaaaaaaaaaaaaaaaaaaaaaaaaaaaaaaaaaaaaaaaaaaaaaaaaaaa

SEQ ID NO: 25074 - RNA, 1721 nt, Artificial Sequence
  mRNA product Design a-1 (A100) comprising derived and/or modified sequence from LASV(Lassa virus/H.sapiens-wt/NGA/2018/ISTH_0959;Clade II)__AVV65099__GPCmut3 (opt1)
aggagagucccgcagucggcguccagcggcucugcuuguucgugugugugucguugcaggccuuauucaagcuuaccaugggccagaucaucaccuucuuccaggaggugccccacgucaucgaggaggugaugaacaucgugcugaucgcccucagccugcuggccauccucaaggggaucuacaacgucgugaccugcggccuguucgggcugguguccuuccuccugcugugcggccgcagcugcuccacgaccuacaagggggucuacgagcuccagacccuggagcuggacauggcgagccucaacaugaccaugccgcuguccugcacgaagaacaacagccaccacuacaucauggugggcaacgagaccggccuggagcucacccugaccaacacguccaucaucaaccacaaguucugcaaccugagcgacgcccacaagaagaaccucuacgaccacgcccugauguccaucaucagcaccuuccaccuguccauccccaacuucaaccaguacgaggccaugagcugcgacuucaacgggggcaagaucuccgugcaguacaaccucagccacgccuacgcgaucgacgccgccaaccacugcgggaccaucgccaacggcguccugcagaccuucaugcggauggcguggggcggguccuacaucgcccuggacagcggcaagggguccugggacugcaucaugacgagcuaccaguaccucaucauccagaacaccaccugggaggaccacugccaguucucccgccccagccccaucggcuaccuggggcugcucagccagcggacccgcgacaucuacaucucccggcgccgccggggcacguucaccuggacccucagcgacuccgagggcaacgagacccccgggggcuacugccugacgcgguggaugcugaucgaggccgagcucaagugcuucgggaacaccgccguggccaagugcaacgagaagcacgacgaggaguucugcgacaugcugcgccuguucgacuucaacaagcaggcgauccggcgccucaagacccccgcccagaugagcauccagcugaucaacaaggccgugaacgcccugaucaacgaccagcucaucaugaagaaccaccuccgggacaucaugggcaucccguacugcaacuacuccaaguacugcuaccugaaccacaccgucacggggaagaccagccugccccgcugcugccugguguccaacggcagcuaccugaacgagacccacuucuccgacgacaucgagcagcaggccgacaacaugaucaccgagcuccugcagaaggaguacaucgaccggcagggcaagacgccccuggggcucguggaccuguucgucuucagcaccuccuucuaccugaucagcaucuuccugcaccucgugaagaucccgacccaccgccacgugaucggcaagcccugccccaagccccaccggcugaaccacauggggaucugcuccugcggccuguacaagcacccggggguccccgugaaguggaagcgcugaggacuagucccuguucccagagcccacuuuuuuuucuuuuuuugaaauaaaauagccugucuuucagaucuaaaaaaaaaaaaaaaaaaaaaaaaaaaaaaaaaaaaaaaaaaaaaaaaaaaaaaaaaaaaaaaaaaaaaaaaaaaaaaaaaaaaaaaaaaaaaaaaaaaa

SEQ ID NO: 25075 - RNA, 1721 nt, Artificial Sequence
  mRNA product Design a-1 (A100) comprising derived and/or modified sequence from LASV(LASV003-NIG-2008;Clade II)__AIT17580__GPCmut3 (opt1)
aggagagucccgcagucggcguccagcggcucugcuuguucgugugugugucguugcaggccuuauucaagcuuaccaugggccagaucaucaccuucuuccaggaggugccccacgucaucgaggaggugaugaacaucgugcugaucgcccucagccugcuggccauccucaaggggaucuacaacgucgcgaccugcggccuguucgggcugguguccuuccuccugcugugcggccgcagcugcuccacgaccuacaaggggguguacgagcuccagacccuggagcuggacauggccagccucaacaugaccaugccgcuguccugcacgaagaacaacagccaccacuacaucauggucggcaacgagaccggccuggagcucacccugaccaacacguccaucaucaaccacaaguucugcaaccugagcgacgcccacaagaagaaccucuacgaccacgcccugauguccaucaucagcaccuuccaccuguccauccccaacuucaaccaguacgaggccaugagcugcgacuucaacgggggcaagaucuccgugcaguacaaccucagccacaccuacgcgguggacgccgccaaccacugcgggaccaucgccaacggcguccugcagacguucaugcggauggcguggggcggguccuacaucgcccuggacagcggcaagggguccugggacugcaucaugaccagcuaccaguaccucaucauccagaacaccaccugggaggaccacugccaguucucccgccccagccccaucggcuaccuggggcugcucagccagcggacgcgcgacaucuacaucucccggcgccgccggggcaccuucaccuggacccucagcgacuccgagagcaacgagacgccgggcggguacugccugacccgguggaugcugaucgaggccgagcucaagugcuucggcaacaccgccguggccaagugcaacgagaagcacgacgaggaguucugcgacaugcugcgccuguucgacuucaacaagcaggcgauccggcgccucaaggcccccgcccagauguccauccagcugaucaacaaggccgugaacgcccugaucaacgaccagcucaucaugaagaaccaccuccgggacaucauggggauccccuacugcaacuacagcaaguacugcuaccugaaccacaccgucacgggccgcaccucccugccccggugcugccuggugagcaacggguccuaccugaacgagacccacuucagcgacgacaucgagcagcaggcggacaacaugaucaccgagcuccugcagaaggaguacauggaccgccagggcaagacgccccugggccucguggaccuguucgucuucuccaccagcuucuaccugaucuccaucuuccugcaccucgugaagaucccgacccaccggcacgugaucgggaagcccugccccaagccccaccgccugaaccacaugggcaucugcagcugcgggcuguacaagcacccgggcguccccgugaaguggaagcggugaggacuagucccuguucccagagcccacuuuuuuuucuuuuuuugaaauaaaauagccugucuuucagaucuaaaaaaaaaaaaaaaaaaaaaaaaaaaaaaaaaaaaaaaaaaaaaaaaaaaaaaaaaaaaaaaaaaaaaaaaaaaaaaaaaaaaaaaaaaaaaaaaaaaa

SEQ ID NO: 25076 - RNA, 1721 nt, Artificial Sequence
  mRNA product Design a-1 (A100) comprising derived and/or modified sequence from LASV(LASV035-NIG-2009;Clade II)__AIT17588__GPCmut3 (opt1)
aggagagucccgcagucggcguccagcggcucugcuuguucgugugugugucguugcaggccuuauucaagcuuaccaugggccagaucaucaccuucuuccaggaggugccccacgucaucgaggaggugaugaacaucgugcugaucgcccucagccugcuggccauccucaaggggaucuacaacgucgcgaccugcggccuguucgggcugguguccuuccuccugcugugcggccgcagcugcuccacgaccuacaaggggguguacgagcuccagacccuggagcuggacauggccagccucaacaugaccaugccgcuguccugcacgaagaacaacagccaccacuacaucauggucggcaacgagaccggccuggagcucacccugaccaacacguccaucaucaaccacaaguucugcaaccugagcgacgcccacaagaagaaccucuacgaccacgcccugauguccaucaucagcaccuuccaccuguccauccccaacuucaaccaguacgaggccaugagcugcgacuucaacgggggcaagaucuccgugcaguacaaccucagccacgcguacgccguggacgccgccaaccacugcgggaccaucgcgaacggcguccugcagaccuucaugcggauggccuggggcggguccuacaucgcccuggacagcggcaagggguccugggacugcaucaugacgagcuaccaguaccucaucauccagaacaccaccugggaggaccacugccaguucucccgccccagccccaucggcuaccuggggcugcucagccagcggacccgcgacaucuacaucucccggcgccgccggggcacguucaccuggacccucagcgacuccgagggcaacgagacccccgggggcuacugccugacgcgguggaugcugaucgaggccgagcucaagugcuucgggaacaccgccguggcgaagugcaacgagaagcacgacgaggaguucugcgacaugcugcgccuguucgacuucaacaagcaggccauccggcgccucaaggcccccgcccagaugagcauccagcugaucaacaaggccgugaacgcgcugaucaacgaccagcucaucaugaagaaccaccuccgggacaucaugggcauccccuacugcaacuacuccaaguacugcuaccugaaccacaccgucaccgggaagacgagccugccccgcugcugccugguguccaacggcagcuaccugaacgagacccacuucuccgacgacaucgagcagcaggccgacaacaugaucaccgagcuccugcagaaggaguacaucgaccggcagggcaagaccccgcuggggcucguggaccuguucgucuucagcacguccuucuaccugaucagcaucuuccugcaccucgugaagaucccgacccaccgccacgugaucggcaagcccugccccaagccccaccggcugaaccacauggggaucugcuccugcggccuguacaagcacccggggguccccgugaaguggaagcgcugaggacuagucccuguucccagagcccacuuuuuuuucuuuuuuugaaauaaaauagccugucuuucagaucuaaaaaaaaaaaaaaaaaaaaaaaaaaaaaaaaaaaaaaaaaaaaaaaaaaaaaaaaaaaaaaaaaaaaaaaaaaaaaaaaaaaaaaaaaaaaaaaaaaaa

SEQ ID NO: 25077 - RNA, 1721 nt, Artificial Sequence
  mRNA product Design a-1 (A100) comprising derived and/or modified sequence from LASV(LASV1000-NIG-2009;Clade II)__AIT17782__GPCmut3 (opt1)
aggagagucccgcagucggcguccagcggcucugcuuguucgugugugugucguugcaggccuuauucaagcuuaccaugggccagaucaucaccuucuuccaggaggugccccacgucaucgaggaggugaugaacaucgugcugaucgcccucagccugcuggccauccucaaggggaucuacaacgucgcgaccugcggccuguucgggcugguguccuuccuccugcugugcggccgcagcugcuccacgaccuacaaggggguguacgagcuccagacccuggagcuggacauggccagccucaacaugaccaugccgcuguccugcacgaagaacaacagccaccacuacaucauggucggcaacgagaccggccuggagcucacccugaccaacacguccaucaucaaccacaaguucugcaaccugagcgacgcccacaagaagaaccucuacgaccacgcccugauguccaucaucagcaccuuccaccuguccauccccaacuucaaccaguacgaggccaugagcugcgacuucaacgggggcaagaucuccgugcaguacaaccucagccacaccuacgcgguggacgccgccaaccacugcgggaccaucgccaacggcguccugcagacguucaugcggauggcguggggcggguccuacaucgcccuggacagcggcaagggguccugggacugcaucaugaccagcuaccaguaccucaucauccagaacaccaccugggaggaccacugccaguucucccgccccagccccaucggcuaccuggggcugcucagccagcggacgcgcgacaucuacaucucccggcgccgccggggcaccuucaccuggacccucagcgacuccgagggcaacgagacgcccgggggcuacugccugacccgguggaugcugaucgaggccgagcucaagugcuucgggaacaccgccguggccaagugcaacgagaagcacgacgaggaguucugcgacaugcugcgccuguucgacuucaacaagcaggcgaucaagcggcucaagacccccgcccagaugagcauccagcugaucaacaaggccgugaacgcccugaucaacgaccagcucaucaugaagaaccaccuccgcgacaucaugggcauccccuacugcaacuacuccaaguacugcuaccugaaccacacggucaccgggaagaccagccugccccggugcugccugguguccaacggcagcuaccugaacgagacccacuucuccgacgacaucgagcagcaggccgacaacaugaucacggagcuccugcagaaggaguacaucgaccgccagggcaagaccccgcuggggcucguggaccuguucgucuucagcaccuccuucuaccugaucagcaucuuccugcaccucgugaagaucccgacccaccggcacguggucggcaagcccugccccaagccccaccgccugaaccacauggggaucugcuccugcggccuguacaagcacccgggggugcccgugaaguggaagcggugaggacuagucccuguucccagagcccacuuuuuuuucuuuuuuugaaauaaaauagccugucuuucagaucuaaaaaaaaaaaaaaaaaaaaaaaaaaaaaaaaaaaaaaaaaaaaaaaaaaaaaaaaaaaaaaaaaaaaaaaaaaaaaaaaaaaaaaaaaaaaaaaaaaaa

SEQ ID NO: 25078 - RNA, 1721 nt, Artificial Sequence
  mRNA product Design a-1 (A100) comprising derived and/or modified sequence from LASV(LASV221-NIG-2010;Clade II)__AIT17624__GPCmut3 (opt1)
aggagagucccgcagucggcguccagcggcucugcuuguucgugugugugucguugcaggccuuauucaagcuuaccaugggccagaucaucaccuucuuccaggaggugccccacgucaucgaggaggugaugaacaucgugcugaucgcccucagccugcuggccauccucaaggggaucuacaacgucgcgaccugcggccuguucgggcugguguccuuccuccugcugugcggccgcagcugcuccacgaccuacaaggggguguacgagcuccagacccuggagcuggacauggccagccucaacaugaccaugccgcuguccugcacgaagaacaacagccaccacuacaucauggucggcaacgagaccggccuggagcucacccugaccaacacguccaucaucaaccacaaguucugcaaccugagcgacgcccacaagaagaaccucuacgaccacgcccugauguccaucaucagcaccuuccaccuguccauccccaacuucaaccaguacgaggccaugagcugcgacuucaacgggggcaagaucuccgugcaguacaaccucagccacaccuacgcgaucgacgccgccaaccacugcgggaccaucgccaacggcgugcugcagacguucaugcggauggcguggggcggguccuacaucgcccuggacagcggcaagggguccugggacugcaucaugaccagcuaccaguaccucaucauccagaacaccaccugggaggaccacugccaguucucccgccccagccccaucggcuaccuggggcugcucagccagcggacgcgcgacaucuacaucucccggcgccgccggggcaccuucaccuggacccucagcgacuccgagggcaacgagacgcccgggggcuacugccugacccgguggaugcugaucgaggccgagcucaagugcuucgggaacaccgccgucgccaagugcaacgagaagcacgacgaggaguucugcgacaugcugcgccuguucgacuucaacaagcaggcgauccggcgccucaagacccccgcccagaugagcauccagcugaucaacaaggccgugaacgcccugaucaacgaccagcucaucaugaagaaccaccuccgggacaucaugggcauccccuacugcaacuacuccaaguacugcuaccugaaccacacggugaccgggaagaccagccugccccgcugcugccuggucuccaacggcagcuaccugaacgagacccacuucuccgacgacaucgagcagcaggccgacaacaugaucacggagaugcuccagaaggaguacauggaccggcagggcaagaccccgcuggggcugguggaccucuucguguucagcaccuccuucuaccugaucagcaucuuccugcaccuggucaagaucccgacccaccgccacgugaucggcaagcccugccccaagccccaccggcucaaccacauggggaucugcuccugcggccuguacaagcacccgggggugcccgucaaguggaagcgcugaggacuagucccuguucccagagcccacuuuuuuuucuuuuuuugaaauaaaauagccugucuuucagaucuaaaaaaaaaaaaaaaaaaaaaaaaaaaaaaaaaaaaaaaaaaaaaaaaaaaaaaaaaaaaaaaaaaaaaaaaaaaaaaaaaaaaaaaaaaaaaaaaaaaa

SEQ ID NO: 25079 - RNA, 1721 nt, Artificial Sequence
  mRNA product Design a-1 (A100) comprising derived and/or modified sequence from LASV(LASV237-NIG-2010;Clade II)__AIT17638__GPCmut3 (opt1)
aggagagucccgcagucggcguccagcggcucugcuuguucgugugugugucguugcaggccuuauucaagcuuaccaugggccagaucaucaccuucuuccaggaggugccccacgucaucgaggaggugaugaacaucgugcugaucgcccucagccugcuggccauccucaaggggaucuacaacgucgcgaccugcggccuguucgggcugguguccuuccuccugcugugcggccgcagcugcuccacgaccuacaaggggguguacgagcuccagacccuggagcuggacauggccagccucaacaugaccaugccgcuguccugcacgaagaacaacagccaccacuacaucauggucggcaacgagaccggccuggagcucacccugaccaacacguccaucaucaaccacaaguucugcaaccugagcgacgcccacaagaaggaccucuacgaccacgcccugauguccaucaucagcaccuuccaccuguccauccccaacuucaaccaguacgaggccaugagcugcgacuucaacgggggcaagaucuccgugcaguacaaccucagccacaccuacgcgguggacgccgccaaccacugcgggaccaucgccaacggcguccugcagacguucaugcggauggcguggggcggguccuacaucgcccuggacagcggcaagggguccugggacugcaucaugaccagcuaccaguaccucaucauccagaacaccaccugggaggaccacugccaguucucccgccccagccccaucggcuaccuggggcugcucagccagcggacgcgcgacaucuacaucucccggcgccgccggggcaccuucaccuggacccucagcgacuccgagggcaacgagacgcccgggggcuacugccugacccgguggaugcugaucgaggccgagcucaagugcuucgggaacaccgccguggccaagugcaacgagaagcacgacgaggaguucugcgacaugcugcgccuguucgacuucaacaagcaggcgauccggcgccucaagacccccgcccagaugagcauccagcugaucaacaaggccgugaacgcccugaucaacgaccagcucaucaugaagaaccaccuccgggacaucaugggcauccccuacugcaacuacuccaaguacugcuaccugaaccacacggucaccgggaagaccagccugccccgcugcugccugguguccaacggcagcuaccugaacgagacccacuucuccgacgacaucgagcagcaggccgacaacaugaucacggagcuccugcagaaggaguacauggaccggcagggcaagaccccgcuggggcucguggaccuguucgucuucagcaccuccuucuaccugaucagcaucuuccugcaccucaucaagaucccgacccaccgccacaucacgggcaagcccugccccaagccccaccggcugaaccacauggggaucugcuccugcggccuguacaagcacccgggggugcccgugaaguggaagcgcugaggacuagucccuguucccagagcccacuuuuuuuucuuuuuuugaaauaaaauagccugucuuucagaucuaaaaaaaaaaaaaaaaaaaaaaaaaaaaaaaaaaaaaaaaaaaaaaaaaaaaaaaaaaaaaaaaaaaaaaaaaaaaaaaaaaaaaaaaaaaaaaaaaaaa

SEQ ID NO: 25080 - RNA, 1721 nt, Artificial Sequence
  mRNA product Design a-1 (A100) comprising derived and/or modified sequence from LASV(LASV253-NIG-2011;Clade II)__AIT17670__GPCmut3 (opt1)
aggagagucccgcagucggcguccagcggcucugcuuguucgugugugugucguugcaggccuuauucaagcuuaccaugggccagaucaucaccuucuuccaggaggugccccacgucaucgaggaggugaugaacaucgugcugaucgcccucagccugcuggccauccucaaggggaucuacaacgucgcgaccugcggccuguucgggcugguguccuuccuccugcugugcggccgcagcugcuccacgaccuacaaggggguguacgagcuccagacccuggagcuggacauggccagccucaacaugaccaugccgcuguccugcacgaagaacaacagccaccacuacaucauggucggcaacgagaccggccuggagcucacccugaccaacacguccaucaucaaccacaaguucugcaaccugagcgacgcccacaagaagaaccucuacgaccacgcccugauguccaucaucagcaccuuccaccuguccauccccaacuucaaccaguacgaggccaugagcugcgacuucaacgggggcaagaucuccgugcaguacaaccucagccacaccuacgcgguggacgccgccaaccacugcgggaccaucgccaacggcguccugcagacguucaugcggauggcguggggcggguccuacaucgcccuggacagcggcaagggguccugggacugcaucaugaccagcuaccaguaccucaucauccagaacaccaccugggaggaccacugccaguucucccgccccagccccaucggcuaccuggggcugcucagccagcggacgcgcgacaucuacaucucccggcgccgccggggcaccuucaccuggacccucagcgacuccgagggcaacgagacgcccgggggcuacugccugacccgguggaugcugaucgaggccgagcucaagugcuucgggaacaccgccguggccaagugcaacgagaagcacgacgaggaguucugcgacaugcugcgccuguucgacuucaacaagcaggcgauccggcgccucaaggcccccgcccagaugagcauccagcugaucaacaaggccgugaacgcccugaucaacgaccagcucaucaugaagaaccaccuccgggacaucaugggcaucccguacugcaacuacuccaaguacugcuaccugaaccacaccgucacggggcgcaccagccugccccggugcugccugguguccaacggcagcuaccugaacgagacccacuucuccgacgacaucgagcagcaggcggacaacaugaucaccgagcuccugcagaaggaguacaucgaccgccagggcaagacgccccuggggcucguggaccuguucgucuucagcaccuccuucuaccugaucagcaucuuccugcaccucgugaagaucccgacccaccggcacaucaucggcaagcccugccccaagccccaccgccugaaccacauggggaucugcuccugcggccuguacaagcacccgggggugcccgucaaguggaagcggugaggacuagucccuguucccagagcccacuuuuuuuucuuuuuuugaaauaaaauagccugucuuucagaucuaaaaaaaaaaaaaaaaaaaaaaaaaaaaaaaaaaaaaaaaaaaaaaaaaaaaaaaaaaaaaaaaaaaaaaaaaaaaaaaaaaaaaaaaaaaaaaaaaaaa

SEQ ID NO: 25081 - RNA, 1721 nt, Artificial Sequence
  mRNA product Design a-1 (A100) comprising derived and/or modified sequence from LASV(LASV254-NIG-2011;Clade II)__AIT17674__GPCmut3 (opt1)
aggagagucccgcagucggcguccagcggcucugcuuguucgugugugugucguugcaggccuuauucaagcuuaccaugggccagaucaucaccuucuuccaggaggugccccacgucaucgaggaggugaugaacaucgugcugaucgcccucagccugcuggccauccucaaggggaucuacaacgucgcgaccugcggccuguucgggcugguguccuuccuccugcugugcggccgcagcugcuccacgaccuacaaggggguguacgagcuccagacccuggagcuggacaugaccaaccucaacaugacgaugccgcugagcugcaccaagaacaacucccaccacuacaucauggucggcaacgagaccggccuggagcucacccugacgaacaccagcaucaucaaccacaaguucugcaaccuguccgacgcccacaagaagaaccucuacaaccacgcccugaugagcaucaucuccaccuuccaccugagcauccccaacuucaaccaguacgaggccauguccugcgacuucaacgggggcaagaucagcgugcaguacaaccucucccacagcuacgccguggacgcggccaaccacugcgggaccaucgccaacggcguccugcagacguucaugcggauggccuggggcggguccuacaucgcgcuggacagcggcaaggggaacugggacugcaucaugaccuccuaccaguaccucaucauccagaacaccaccugggaggaccacugccaguucagccgccccucccccaucggcuaccuggggcugcucagccagcggacgcgcgacaucuacaucagccggcgccgccggggcaccuucaccuggacccucuccgacagcgagggcaacgagacgcccgggggcuacugccugacccgguggaugcugaucgaggccgagcucaagugcuucgggaacaccgccguggccaagugcaacgagaagcacgacgaggaguucugcgacaugcugcgccuguucgacuucaacaagcaggccauccggcgccucaagacccccgcgcaggccaacauccagcugaucaacaaggccgugaacgcccugaucaacgaccagcucaucaugaagaaccaccuccgggacaucaugggcauccccuacugcaacuacuccaaguacugcuaccugaaccacacggucaccgggaagaccagccugccccgcugcugccugguguccaacggcagcuaccugaacgagacccacuucuccgacgacaucgagcagcaggccgacaacaugaucacggagcuccugcagaaggaguacauggaccggcagggcaagaccccgcuggggcucguggaccuguucgucuucagcaccuccuucuaccugaucagcaucuuccugcaccucgugaagaucccgacccaccgccacgugaucggcaagcccugccccaagccccaccggcugaaccacauggggaucugcuccugcggccuguacaagcacccggggguccccgugaaguggaagcgcugaggacuagucccuguucccagagcccacuuuuuuuucuuuuuuugaaauaaaauagccugucuuucagaucuaaaaaaaaaaaaaaaaaaaaaaaaaaaaaaaaaaaaaaaaaaaaaaaaaaaaaaaaaaaaaaaaaaaaaaaaaaaaaaaaaaaaaaaaaaaaaaaaaaaa

SEQ ID NO: 25082 - RNA, 1721 nt, Artificial Sequence
  mRNA product Design a-1 (A100) comprising derived and/or modified sequence from LASV(Nig08-A19;Clade III)__ADU56618__GPCmut3 (opt1)
aggagagucccgcagucggcguccagcggcucugcuuguucgugugugugucguugcaggccuuauucaagcuuaccaugggccagaucgugaccuucuuccaggaggucccccacgugaucgaggaggugaugaacaucguccugaucgcccucagcauccuggccauccugaaggggcucuacaacaucgcgaccugcggccugaucgggcuggugacguuccuccugcuguccggccgcagcugcuccaugaccuacaaggggguguacgagcuccagacccuggagcugaacaugaacacccucaacaugacgaugccgcugagcugcaccaagaacaacucccaccacuacaucauggucggcaacgagaccggccuggagcucacccugacgaacaccagccugcuccaccacaaguucugcaaccuguccgacgcccacaagaagaaccuguacgaccacacccucaugagcaucaucuccaccuuccaccugagcauccccaacuucaaccaguacgaggccauguccugcgacuucaacgggggcaagaucacggugcaguacaaccugagccacuccuacgccaucgacgccgcgaaccacugcgggaccguggccaacggcguccuccagaccuucaugcggauggccuggggcgggagcuacaucgcccuggacuccggccgcgggaagugggacugcaucaugaccagcuaccaguaccugaucauccagaacacgaccugggaggaccacugccaguucucccggcccagccccaucggcuaccucgggcugcugucccagcgcacccgggacaucuacaucagccgccggcgccggggcaccuucacguggacccugagcgacuccgagggcaacgagacccccgggggcuacugccucacccgcuggaugcugaucgaggcggagcugaagugcuucgggaacacggccguggccaagugcaacgagaagcacgacgaggaguucugcgacaugcuccggcuguucgacuucaacaagcaggccauccgccggcugaaggcccccgcgcagaugagcauccagcucaucaacaaggccgugaacgcccugaucaacgaccagcugaucaugaagaaccaccuccgcgacaucaugggcauccccuacugcaacuacuccaaguacugcuaccugaaccacaccagcaccgggcggaccucccugccccgcugcugccucgucagcaacggcuccuaccugaacgagacgcacuucagcgacgacaucgagcagcaggccgacaacaugaucaccgagaugcugcagaaggaguaccucgaccggcagggcaagaccccgcuggggcugguggaccuguucguguucuccaccagcuucuaccucaucuccaucuuccugcaccuggucaagaucccgacgcaccgccacaucgugggcaagcccugccccaagccccaccggcucaaccacauggggaucugcagcugcggccuguacaagcagccgggggugcccguccgcuggaagcggugaggacuagucccuguucccagagcccacuuuuuuuucuuuuuuugaaauaaaauagccugucuuucagaucuaaaaaaaaaaaaaaaaaaaaaaaaaaaaaaaaaaaaaaaaaaaaaaaaaaaaaaaaaaaaaaaaaaaaaaaaaaaaaaaaaaaaaaaaaaaaaaaaaaaa

SEQ ID NO: 25083 - RNA, 1724 nt, Artificial Sequence
  mRNA product Design a-1 (A100) comprising derived and/or modified sequence from LASV(G1180-SLE-2010;Clade IV)__AIT17168__GPCmut3 (opt1)
aggagagucccgcagucggcguccagcggcucugcuuguucgugugugugucguugcaggccuuauucaagcuuaccaugggccagaucgugaccuucuuccaggaggucccccacgugaucgaggaggugaugaacaucguccugaucgcccucagcauccuggccgugcugaaggggcucuacaacuucgcgaccugcggccugguggggcugcucaccuuccugcugcucugcggccgcuccugcaccgccagccgguacaagggggucuacgagcugcagacccuggagcucaacauggagacccugaacaugacgaugccgcuguccugcaccaagaacaacagccaccacuacaucauggugggcaacgagaccggccucgagcugacccugacgaacaccuccaucaucaaccacaaguucugcaaccucagcgacgcccacaagaagaaccuguacgaccacgcccugauguccaucaucagcaccuuccaccucuccauccccaacuucaaccaguacgaggccaugagcugcgacuucaacgggggcaagaucuccgugcaguacaaccugagccacuccuacgcgggggacgccgccaaccacugcggcaccgucgccaacggggugcugcagacguucaugcgcauggcguggggcggcagcuacaucgcccucgacuccgggcacggcagcugggacugcaucaugaccuccuaccaguaccugaucauccagaacaccaccugggaggaccacugccaguucagccggcccucccccaucggguaccugggccuccugagccagcgcacgcgggacaucuacaucagccgccggcgccggggcaccuucaccuggacccuguccgacagcgaggggaaggacacgccgggcggguacugccugacccgcuggaugcucaucgaggccgagcugaagugcuucggcaacaccgccguggccaagugcaacgagaagcacgacgaggaguucugcgacaugcugcggcuguucgacuucaacaagcaggcgauccagcgccugaaggcccccgcccagauguccauccagcugaucaacaaggccgucaacgcccucaucaacgaccagcugaucaugaagaaccaccuccgggacaucauggggauccccuacugcaacuacagcaaguacugcuaccucaaccacaccacgaccggcaagaccucccugcccaagugcugccuggugagcaacggcuccuaccucaacgagacccacuucagcgacgacaucgagcagcaggcggacaacaugaucacggagaugcugcagaaggaguacauggagcgccaggggaagacgccccugggccucguggaccuguucgucuucuccaccagcuucuaccugaucuccaucuuccugcaccucgugaagaucccgacccaccggcacaucgugggcaagagcugccccaagccccaccgccugaaccacauggggaucugcuccugcgggcuguacaagcagcccggcgucccggugaaguggaagcggugaggacuagucccuguucccagagcccacuuuuuuuucuuuuuuugaaauaaaauagccugucuuucagaucuaaaaaaaaaaaaaaaaaaaaaaaaaaaaaaaaaaaaaaaaaaaaaaaaaaaaaaaaaaaaaaaaaaaaaaaaaaaaaaaaaaaaaaaaaaaaaaaaaaaa

SEQ ID NO: 25084 - RNA, 1724 nt, Artificial Sequence
  mRNA product Design a-1 (A100) comprising derived and/or modified sequence from LASV(G1442-SLE-2011;Clade IV)__AIT17180__GPCmut3 (opt1)
aggagagucccgcagucggcguccagcggcucugcuuguucgugugugugucguugcaggccuuauucaagcuuaccaugggccagaucgugaccuucuuccaggaggucccccacgugaucgaggaggugaugaacaucguccugaucgcccucagcauccuggccgugcugaaggggcucuacaacguggcgaccugcggccugaucgggcuggucacguuccuccugcugugcggccgcuccugcaccaccacccucuacaaggggguguacgagcugcagacgcuggagcucaacauggagacccugaacaugaccaugccgcugagcugcaccaagaacaacucccaccacuacauccgggugggcaacgagacgggccucgagcugacccugaccaacaccagcaucaucaaccacaaguucugcaaccucuccgacgcccacaagaagaaccuguacgaccacgcccugaugagcaucaucuccacguuccaccucagcauccccaacuucaaccaguacgaggccauguccugcgacuucaacgggggcaagaucagcguccaguacaaccugucccacagcuacgccggggacgcggccaaccacugcggcaccguggccaacggggugcugcagaccuucaugcgcauggccuggggcggcuccuacaucgcgcucgacagcgggcggggcaacugggacugcaucaugaccuccuaccaguaccugaucauccagaacacgaccugggacgaccacugccaguucagccgccccucccccaucggguaccugggccuccugagccagcggacccgcgacgucuacaucucccggcgccgccggggcaccuucacguggacccugagcgacagcgaggggaaggacaccccgggcggguacugccugacccgguggaugcucaucgaggccgagcugaagugcuucggcaacacggccguggccaagugcaacgagaagcacgacgaggaguucugcgacaugcugcgccucuucgacuucaacaagcaggccauccagcggcugaaggcgcccgcccagauguccauccagcugaucaacaaggccgugaacgcccucaucaacgaccagcugaucaugaagaaccaccuccgcgacaucauggggauccccuacugcaacuacagcaaguacugcuaccugaacaacaccgccaccggcaagaccucccugcccaagugcugccugaucagcaacggcuccuaccucaacgagacgcacuucagcgacgacaucgagcaggaggcggacaacaugaucaccgagaugcugcagaaggaguacauggagcggcaggggaagacgccccugggccucgucgaccuguucguguucuccaccagcuucuaccugaucuccaucuuccugcaccucgugaagaucccgacccaccgccacaucgucggcaagagcugccccaagccccaccggcugaaccacauggggaucugcuccugcgggcuguacaagcagcccggcgugccggugcgcuggaagcggugaggacuagucccuguucccagagcccacuuuuuuuucuuuuuuugaaauaaaauagccugucuuucagaucuaaaaaaaaaaaaaaaaaaaaaaaaaaaaaaaaaaaaaaaaaaaaaaaaaaaaaaaaaaaaaaaaaaaaaaaaaaaaaaaaaaaaaaaaaaaaaaaaaaaa

SEQ ID NO: 25085 - RNA, 1724 nt, Artificial Sequence
  mRNA product Design a-1 (A100) comprising derived and/or modified sequence from LASV(G3010-SLE-2013;Clade IV)__AIT17344__GPCmut3 (opt1)
aggagagucccgcagucggcguccagcggcucugcuuguucgugugugugucguugcaggccuuauucaagcuuaccaugggccagaucgugaccuucuuccaggaggucccccacgugaucgaggaggugaugaacaucguccugaucgcccucagcauccuggccgugcugaaggggcucuacaacuucgcgaccugcggccugguggggcuggucacguuccuccugcugugcggccgcuccugcaccaccagccucuacaaggggguguacgagcugcagacccuggagcucaacauggagacgcugaacaugaccaugccgcuguccugcaccaagaacaacagccaccacuacaucauggugggcaacgagaccggccucgagcugacgcugaccaacaccuccaucaucaaccacaaguucugcaaccucagcgacgcccacaagaagaaccuguacaaccacgcccugauguccaucaucagcaccuuccaccucuccauccccaacuucaaccaguacgaggccaugagcugcgacuucaacgggggcaagaucuccguccaguacaaccugagccacuccuacgccggggacgcggccagccacugcggcacgguggccaacggggugcugcagaccuucaugcggauggccuggggcggcuccuacaucgcgcucgacagcggguacggcaagugggacugcaucaugaccuccuaccaguaccugaucauccagaacaccacgugggaggaccacugccaguucagccgccccucccccaucggguaccugggccuccugagccagcggacccgcgacaucuacaucagccggcgccgccggggcaccuucaccuggacgcuguccgacagcgaggggaaggacaccccgggcggguacugccugacccgguggaugcucaucgaggccgagcugaagugcuucggcaacaccgccgucgccaagugcaacgagaagcacgacgaggaguucugcgacaugcugcgccucuucgacuucaacaagcaggccauccagcggcugaagacgcccgcgcagauguccauccagcugaucaacaaggccgugaacgcccucaucaacgaccagcugaucaugaagaaccaccuccgcgacaucauggggauccccuacugcaacuacagcaaguacugcuaccugaaccacaccaccaccggcaagacgucccugcccaagugcugccuggugagcaacggcuccuaccucaacgagacccacuucagcgacgacaucgagcagcaggccgacaacaugaucaccgagaugcugcagaaggaguacauggagcggcaggggaagacgccccugggccucgucgaccuguucguguucuccaccagcuucuaccugaucuccaucuuccugcaccucgugaagaucccgacccaccgccacaucgucggcaagagcugccccaagccccaccggcugaaccacauggggaucugcuccugcgggcuguacaagcagcccggcgugccggugcgcuggaagcggugaggacuagucccuguucccagagcccacuuuuuuuucuuuuuuugaaauaaaauagccugucuuucagaucuaaaaaaaaaaaaaaaaaaaaaaaaaaaaaaaaaaaaaaaaaaaaaaaaaaaaaaaaaaaaaaaaaaaaaaaaaaaaaaaaaaaaaaaaaaaaaaaaaaaa

SEQ ID NO: 25086 - RNA, 1724 nt, Artificial Sequence
  mRNA product Design a-1 (A100) comprising derived and/or modified sequence from LASV(G502-SLE-2009;Clade IV)__AIT17126__GPCmut3 (opt1)
aggagagucccgcagucggcguccagcggcucugcuuguucgugugugugucguugcaggccuuauucaagcuuaccaugggccagaucgugaccuucuuccaggaggucccccacgugaucgaggaggugaugaacaucguccugaucgcccucagcauccuggccgugcugaaggggcucuacaacuucgcgaccugcggccugguggggcugcucacguuccugcugcucugcggccgcuccugcaccaccgggcuguacaagggcgucuacgagcugcagacccucgagcugaacauggagacgcugaacaugaccaugccgcucagcugcaccaagaacaacucccaccacuacaucauggugggcaacgagaccgggcuggagcugacgcucaccaacaccagcaucaucaaccacaaguucugcaaccuguccgacgcccacaagaagaaccuguacgaccacgcccucaugagcaucaucuccaccuuccaccugagcauccccaacuucaaccaguacgaggccauguccugcgacuucaacggcgggaagaucagcgugcaguacaaccugucccacagcuacgccggcgacgcggccgaccacugcgggacggucgccaacggcgugcuccagaccuucaugcggauggccuggggcggguccuacaucgcgcuggacagcggccgcgggcggugggacugcaucaugaccuccuaccaguaccugaucauccagaacaccacgugggaggaccacugccaguucagccgccccucccccaucggcuaccucggccugcugagccagcggacccgcgacaucuacaucucccggcgccgccgggggaccuucaccuggacgcugagcgacagcgagggcaaggacacccccgggggcuacugccucacccgguggaugcugaucgaggccgagcugaagugcuucgggaacaccgccguggccaagugcaacgagaagcacgacgaggaguucugcgacaugcuccgccuguucgacuucaacaagcaggccauccagcggcugaaggcgcccgcccagauguccauccagcucaucaacaaggccgucaacgcccugaucaacgaccagcuggugaugaagaaccaccuccgcgacaucaugggcauccccuacugcaacuacagccgguacugcuaccugaaccacacgaccaccggccgcaccucccugcccaagugcugccucgugagcaacggguccuaccugaacgagacgcacuucagcgacgacaucgagcagcaggccgacaacaugaucaccgagaugcugcagaaggaguacauggagcggcagggcaagaccccgcucgggcuggucgaccuguucguguucuccaccagcuucuaccugaucuccaucuuccuccaccuggugaagaucccgacgcaccgccacaucgucggcaagagcugccccaagccccaccggcugaaccacauggggaucugcuccugcggccucuacaagcagcccggcgugccggugaaguggaagcgcugaggacuagucccuguucccagagcccacuuuuuuuucuuuuuuugaaauaaaauagccugucuuucagaucuaaaaaaaaaaaaaaaaaaaaaaaaaaaaaaaaaaaaaaaaaaaaaaaaaaaaaaaaaaaaaaaaaaaaaaaaaaaaaaaaaaaaaaaaaaaaaaaaaaaa

SEQ ID NO: 25087 - RNA, 1724 nt, Artificial Sequence
  mRNA product Design a-1 (A100) comprising derived and/or modified sequence from LASV(G733-SLE-2010;Clade IV)__AIT17154__GPCmut3 (opt1)
aggagagucccgcagucggcguccagcggcucugcuuguucgugugugugucguugcaggccuuauucaagcuuaccaugggccagaucgugaccuucuuccaggaggucccccacgugaucgaggaggugaugaacaucguccugaucgcccucagcauccuggccgugcugaaggggcucuacaacuucgcgaccugcggcaucguggggcuggucuccuuccugcuccugugcggccgcagcugcacgaccucccuguacaaggggguguacgagcuccagacccuggagcugaacauggagacccucaacaugacgaugccgcugagcugcaccaagaacaacucccaccacuacaucauggugggcaacgagaccggccuggagcucacccugacgaacaccagcaucaucaaccacaaguucugcaaccuguccgacgcccacaagaagaaccucuacgaccacgcccugaugagcaucaucuccaccuuccaccugagcauccccaacuucaaccaguacgaggccauguccugcgacuucaacgggggcaagaucagcguccaguacaaccucucccacagcuacgccggggacgcggccaaccacugcggcaccaucgccaacggggugcugcagacguucaugcggauggccuggggcggcuccuacaucgcgcuggacagcgggcgcgaccggugggacugcaucaugaccuccuaccaguaccucaucauccagaacaccaccugggaggaccacugccaguucagccgccccucccccaucggcuaccuggggcugcucagccagcggacgcgcgacaucuacaucagccggcgccgccggggcaccuucaccuggacccucuccgacagcgagggcaaggacacgcccgggggcuacugccugacccgguggaugcugaucgaggccgagcucaagugcuucgggaacaccgccguggccaagugcaacgagaagcacgacgaggaguucugcgacaugcugcgccuguucgacuucaacaagcaggccauccagcggcucaaggcgcccgcccagauguccauccagcugaucaacaaggccgucaacgcccugaucaacgaccagcucaucaugaagaaccaccuccgcgacaucaugggcauccccuacugcaacuacagcaaguacugcuaccugaaccacaccacgaccgggaagaccucccugcccaagugcugccuggugagcaacggcuccuaccugaacgagacccacuucagcgacgacaucgagcagcaggccgacaacaugaucacggagaugcuccagaaggaguacauggagcggcagggcaagaccccgcuggggcugguggaccucuucgucuucuccaccagcuucuaccugaucuccaucuuccugcaccuggugaagaucccgacccaccgccacguggucggcaagagcugccccaagccccaccggcucaaccacauggggaucugcuccugcggccuguacgggcagcccggcgugccggugaaguggaagcgcugaggacuagucccuguucccagagcccacuuuuuuuucuuuuuuugaaauaaaauagccugucuuucagaucuaaaaaaaaaaaaaaaaaaaaaaaaaaaaaaaaaaaaaaaaaaaaaaaaaaaaaaaaaaaaaaaaaaaaaaaaaaaaaaaaaaaaaaaaaaaaaaaaaaaa

SEQ ID NO: 25088 - RNA, 1724 nt, Artificial Sequence
  mRNA product Design a-1 (A100) comprising derived and/or modified sequence from MOPV/LASV reassortant(IGS-1;Clade IV)__AFY05576__GPCmut3 (opt1)
aggagagucccgcagucggcguccagcggcucugcuuguucgugugugugucguugcaggccuuauucaagcuuaccaugggccagaucgugaccuucuuccaggaggucccccacgugaucgaggaggugaugaacaucguccugaucgcccucagcgugcuggccgugcugaaggggcucuacaacuucgcgaccugcggccuggucgggcuggugacguuccuccugcugugcggccgcuccugcaccaccagccucuacaaggggguguacgagcugcagacccuggagcucaacauggagacgcugaacaugaccaugccgcuguccugcaccaagaacaacagccaccacuacaucauggucggcaacgagaccggccucgagcugacgcugaccaacaccuccaucaucaaccacaaguucugcaaccucagcgacgcccacaagaagaaccuguacgaccacgcccugauguccaucaucagcaccuuccaccucuccauccccaacuucaaccaguacgaggccaugagcugcgacuucaacgggggcaagaucuccgugcaguacaaccugagccacuccuacgccggggacgcggccaaccacugcggcacgguggccaacgggguccugcagaccuucaugcggauggccuggggcggcagcuacaucgcgcucgacuccgggcgcggcaacugggacugcaucaugaccagcuaccaguaccugaucauccagaacaccacgugggaggaccacugccaguucucccggcccagccccaucggguaccugggccuccugucccagcgcacccgggacaucuacaucagccgccggcgccggggcaccuucaccuggacgcugagcgacuccgagggggaggacaccccgggcggguacugccugacccgcuggaugcucaucgaggccgagcugaagugcuucggcaacaccgccguggccaagugcaacgagaagcacgacgaggaguucugcgacaugcugcggcuguucgacuucaacaagcaggccauccagcgccugaaggcgcccgcccagaugagcauccagcugaucaacaaggccgugaacgcccucaucaacgaccagcugaucaugaagaaccaccuccgggacaucauggggauccccuacugcaacuacuccaaguacugcuaccucaaccacacgaccaccggccgcaccagccugcccaagugcugccuggucuccaacggcagcuaccucaacgagacgcacuucuccgacgacaucgagcagcaggccgacaacaugaucaccgagaugcugcagaaggaguacauggagcggcaggggaagacgccccugggccucguggaccuguucguguucagcaccuccuucuaccugaucagcaucuuccugcaccucgucaagaucccgacccaccgccacaucguggggaaguccugccccaagccccaccggcugaaccacaugggcaucugcagcugcgggcuguacaagcagcccggcgugccggucaaguggaagcgcugaggacuagucccuguucccagagcccacuuuuuuuucuuuuuuugaaauaaaauagccugucuuucagaucuaaaaaaaaaaaaaaaaaaaaaaaaaaaaaaaaaaaaaaaaaaaaaaaaaaaaaaaaaaaaaaaaaaaaaaaaaaaaaaaaaaaaaaaaaaaaaaaaaaaa

SEQ ID NO: 25089 - RNA, 1724 nt, Artificial Sequence
  mRNA product Design a-1 (A100) comprising derived and/or modified sequence from LASV(LM765-SLE-2012;Clade IV)__AIT17814__GPCmut3 (opt1)
aggagagucccgcagucggcguccagcggcucugcuuguucgugugugugucguugcaggccuuauucaagcuuaccaugggccagaucgugaccuucuuccaggaggucccccacgugaucgaggaggugaugaacaucguccugaucgcccucagcauccuggccgugcugaaggggcucuacaacuucgcgaccugcggccugguggggcuggucacguuccuccugcugugcggccgcuccugcaccaccagccucuacaaggggguguacgagcugcagacccuggagcucaacauggagacgcugaacaugaccaugccgcuguccugcaccaagaacaacagccaccacuacaucauggugggcaacgagaccggccucgagcugacgcugaccaacaccuccaucaucgaccacaaguucugcaaccucagcgacgcccaccggaagaaccuguacgaccacgcccugauguccaucaucagcaccuuccaccucuccauccccaacuucaaccaguacgaggccaugagcugcgacuucaacgggggcaagaucuccguccaguacaaccugagccacuccuacgccaaggacgcggccgaccacugcgggacgguggccaacggcgugcugcagaccuucaugcgcauggccuggggcgggagcuacaucgcgcucgacuccggccgggggcgcugggacugcaucaugaccagcuaccaguaccugaucauccagaacaccacgugggaggaccacugccaguucucccggcccagccccaucggcuaccuggggcuccugucccagcgcacccgggacaucuacaucagccgccggcgccggggcaccuucaccuggacgcugagcgacuccgagggcaaggacacccccgggggcuacugccugacccgcuggaugcucaucgaggccgagcugaagugcuucgggaacaccgccgucgccaagugcaacgagaagcacgacgaggaguucugcgacaugcugcggcuguucgacuucaacaagcaggccauccagcgccugaaggcgcccgcccagaugagcauccagcugaucaacaaggccgugaacgcccucaucaacgaccagcugaucaugaagaaccaccuccgggacaucaugggcauccccuacugcaacuacuccaaguacugcuaccucaaccacacgaccaccgggaagaccagccugcccaagugcugccugguguccaacggcagcuaccucaacgagacgcacuucuccgacgacaucgagcagcaggccgacaacaugaucaccgagaugcugcagaaggaguacauggagcgccagggcaagaccccgcuggggcucgucgaccuguucguguucagcaccuccuucuaccugaucagcaucuuccugcaccucgugaagaucccgacgcaccggcacaucgucggcaagcccugccccaagccccaccgccugaaccacauggggaucugcuccugcggccuguacaagcagccgggggugcccgugaaguggaagcggugaggacuagucccuguucccagagcccacuuuuuuuucuuuuuuugaaauaaaauagccugucuuucagaucuaaaaaaaaaaaaaaaaaaaaaaaaaaaaaaaaaaaaaaaaaaaaaaaaaaaaaaaaaaaaaaaaaaaaaaaaaaaaaaaaaaaaaaaaaaaaaaaaaaaa

SEQ ID NO: 25090 - RNA, 1724 nt, Artificial Sequence
  mRNA product Design a-1 (A100) comprising derived and/or modified sequence from LASV(LM776-SLE-2012;Clade IV)__AIT17824__GPCmut3 (opt1)
aggagagucccgcagucggcguccagcggcucugcuuguucgugugugugucguugcaggccuuauucaagcuuaccaugggccagaucgugaccuucuuccaggaggucccccacgugaucgaggaggugaugaacaucguccugaucgcccucagcauccuggccgugcugaaggggcucuacaacuucgcgaccugcggccugguggggcuggucacguuccuccugcugugcggccgcuccugcaccaccagcguguacaaggggguguacgagcuccagacccuggagcugaacauggagacgcucaacaugaccaugccgcuguccugcaccaagaacaacagccaccacuacaucauggucggcaacgagaccggccuggagcucacgcugaccaacaccuccaucaucaaccacaaguucugcaaccugagcgacgcccacaagaagaaccucuacgaccacgcccugauguccaucaucagcaccuuccaccuguccauccccaacuucaaccaguacgaggccaugagcugcgacuucaacgggggcaagaucuccgugcaguacaaccucagccacuccuacgccggggacgcggccaaccacugcggcacgguggccaacgggguccugcagaccuucaugcggauggccuggggcggcagcuacaucgcgcuggacuccgggcacggcaagugggacugcaucaugaccagcuaccaguaccucaucauccagaacaccacgugggaggaccacugccaguucucccgccccagccccaucggguaccugggccugcucucccagcggacccgcgacaucuacaucagccggcgccgccggggcaccuucaccuggacgcucagcgacuccgaggggaaggacaccccgggcggguacugccugacccgguggaugcugaucgaggccgagcucaagugcuucggcaacaccgccguggccaagugcaacgagaagcacgacgaggaguucugcgacaugcugcgccuguucgacuucaacaagcaggccauccagcggcucaaggcgcccgcccagaugagcauccagcugaucaacaaggccgugaacgcccugaucaacgaccagcucaucaugaagaaccaccuccgcgacaucauggggauccccuacugcaacuacuccaaguacugcuaccugaaccacacgaccaccggcaagaccagccugcccaagugcugccuggucuccaacggcagcuaccugaacgagacgcacuucuccgacgacaucgagcagcaggccgacaacaugaucaccgagaugcuccagaaggaguacauggagcggcaggggaagacgccccugggccugguggaccucuucguguucagcaccuccuucuaccugaucagcaucuuccugcaccuggucaagaucccgacccaccgccacaucguggggaaguccugccccaagccccaccggcucaaccacaugggcaucugcagcugcgggcuguacaagcagcccggcgugccgguccgcuggaagcggugaggacuagucccuguucccagagcccacuuuuuuuucuuuuuuugaaauaaaauagccugucuuucagaucuaaaaaaaaaaaaaaaaaaaaaaaaaaaaaaaaaaaaaaaaaaaaaaaaaaaaaaaaaaaaaaaaaaaaaaaaaaaaaaaaaaaaaaaaaaaaaaaaaaaa

SEQ ID NO: 25091 - RNA, 1724 nt, Artificial Sequence
  mRNA product Design a-1 (A100) comprising derived and/or modified sequence from LASV(Mad39;Clade IV)__ANH09722__GPCmut3 (opt1)
aggagagucccgcagucggcguccagcggcucugcuuguucgugugugugucguugcaggccuuauucaagcuuaccaugggccagaucgugaccuucuuccaggaggucccccacgugaucgaggaggugaugaacaucguccugaucgcccucagcauccuggccgugcugaaggggcucuacaacguggcgaccugcggccugaucgggcuggucacguuccuccugcugugcggccgcuccugcaccaccacccucuacaaggggguguacgagcugcaggcccuggagcucaacauggagacgcugaacaugaccaugccgcugagcugcaccaagaacaacucccaccacuacauccgggugggcaacgagaccggccucgagcugacgcugaccaacaccagccucaucaaccacaaguucugcaaccuguccgacgcccacaagaagaaccuguacgaccacgcccucaugagcaucaucuccaccuuccaccugagcauccccaacuucaaccaguacgaggccauguccugcgacuucaacgacgggaagaucagcguccaguacaaccugucccacacguacgcgggcgacaccgccaaccacugcgggaccguggccaacggcgugcuccagaccuucaugcgcauggccuggggcgggagcuacaucgcgcuggacuccggccgcgggggcugggacugcaucaugacgagcuaccaguaccugaucauccagaacaccaccugggaggaccacugccaguucucccggcccagccccaucggguaccucggccugcugucccagcggacccgcgacaucuacaucagccggcgccgccggggcacguucaccuggacccuguccgacagcgaggggaaggacaccccgggcggguacugccucacgcgguggaugcugaucgaggccgagcugaagugcuucggcaacaccgccgucgccaagugcaacgagaagcacgacgaggaguucugcgacaugcuccgccuguucgacuucaacaagcaggccauccagcggcugaaggcgcccgcccagaugagcauccagcucaucaacaaggccgugaacgcccugaucaacgaccagcugaucaugaagaaccaccuccgcgacaucauggggauccccuacugcaacuacuccaaguacugcuaccugaaccacaccgugaccggcaagacgagccugcccaagugcugccucgucuccaacggcagcuaccugaacgagacccacuucuccgacgacaucgagcagcaggccgacaacaugaucaccgagaugcugcagaaggaguacauggagcggcaggggaagacgccccucggccugguggaccuguucguguucagcaccuccuucuaccugaucagcaucuuccuccaccuggucaagaucccgacccaccgccacgugguggggaagcccugccccaagccccaccggcugaaccacaugggcaucugcuccugcggguucuacaagcagccgggcguccccgugcgcuggaagcggugaggacuagucccuguucccagagcccacuuuuuuuucuuuuuuugaaauaaaauagccugucuuucagaucuaaaaaaaaaaaaaaaaaaaaaaaaaaaaaaaaaaaaaaaaaaaaaaaaaaaaaaaaaaaaaaaaaaaaaaaaaaaaaaaaaaaaaaaaaaaaaaaaaaaa

SEQ ID NO: 25092 - RNA, 1724 nt, Artificial Sequence
  mRNA product Design a-1 (A100) comprising derived and/or modified sequence from LASV(Z0947-SLE-2011;Clade IV)__AIT17840__GPCmut3 (opt1)
aggagagucccgcagucggcguccagcggcucugcuuguucgugugugugucguugcaggccuuauucaagcuuaccaugggccagaucgugaccuucuuccaggaggucccccacgugaucgaggaggugaugaacaucguccugaucgcccucagcauccuggccgugcugaaggggcucuacaacuucgcgaccugcggccugguggggcuggucacguuccuccugcugugcggccgcuccugcaccaucagccucuacaaggggguguacgagcugcagacccuggagcucaacauggagacccugaacaugacgaugccgcuguccugcaccaagaacaacagccaccacuacaucauggugggcaacgagaccggccucgagcugacccugacgaacaccuccaucaucaaccacaaguucugcaaccucagcgacgcccacaagaagaaccuguacgaccacgcccugauguccaucaucagcaccuuccaccucuccauccccaacuucaaccaguacgaggccaugagcugcgacuucaacgggggcaagaucuccguccaguacaaccugagccacuccuacgccggggacgcggccaaccacugcggcaccguggccaacggggugcugcagacguucaugcggauggccuggggcggcagcuacaucgcgcucgacuccgggcgcgaccggugggacugcaucaugaccagcuaccaguaccugaucauccagaacaccaccugggaggaccacugccaguucucccgccccagccccaucggcuaccuggggcuccugucccagcggacgcgcgacaucuacaucagccggcgccgccggggcaccuucaccuggacccugagcgacuccgagggcaaggacacgcccgggggcuacugccugacccgguggaugcucaucgaggccgagcugaagugcuucgggaacaccgccgucgccaagugcaacgagaagcacgacgaggaguucugcgacaugcugcgccucuucgacuucaacaagcaggccauccagcggcugaaggcgcccgcccagaugagcauccagcugaucaacaaggccgugaacgcccucaucaacgaccagcugaucaugaagaaccaccuccgcgacaucaugggcauccccuacugcaacuacuccaaguacugcuaccugaaccacaccacgaccgggaagaccagccugcccaagugcugccugguguccaacggcagcuaccucaacgagacccacuucuccgacgacaucgagcagcaggccgacaacaugaucacggagaugcugcagaaggaguacauggagcggcagggcaagaccccgcuggggcucgucgaccuguucguguucagcaccuccuucuaccugaucagcaucuuccugcaccucgugaagaucccgacccaccgccacaucgucggcaagcccugccccaagccccaccggcugaaccacauggggaucugcuccugcggccuguacaagcagccgggggugcccgugaaguggaagcgcugaggacuagucccuguucccagagcccacuuuuuuuucuuuuuuugaaauaaaauagccugucuuucagaucuaaaaaaaaaaaaaaaaaaaaaaaaaaaaaaaaaaaaaaaaaaaaaaaaaaaaaaaaaaaaaaaaaaaaaaaaaaaaaaaaaaaaaaaaaaaaaaaaaaaa

SEQ ID NO: 25093 - RNA, 1724 nt, Artificial Sequence
  mRNA product Design a-1 (A100) comprising derived and/or modified sequence from LASV(Josiah;Clade IV)__NP_694870__GPCmut3 (opt1)
aggagagucccgcagucggcguccagcggcucugcuuguucgugugugugucguugcaggccuuauucaagcuuaccaugggccagaucgugaccuucuuccaggaggucccccacgugaucgaggaggugaugaacaucguccugaucgcccucagcgugcuggccgugcugaaggggcucuacaacuucgcgaccugcggccuggucgggcuggugacguuccuccugcugugcggccgcuccugcaccaccagccucuacaaggggguguacgagcugcagacccuggagcucaacauggagacgcugaacaugaccaugccgcuguccugcaccaagaacaacagccaccacuacaucauggucggcaacgagaccggccucgagcugacgcugaccaacaccuccaucaucaaccacaaguucugcaaccucagcgacgcccacaagaagaaccuguacgaccacgcccugauguccaucaucagcaccuuccaccucuccauccccaacuucaaccaguacgaggccaugagcugcgacuucaacgggggcaagaucuccgugcaguacaaccugagccacuccuacgccggggacgcggccaaccacugcggcacgguggccaacgggguccugcagaccuucaugcggauggccuggggcggcagcuacaucgcgcucgacuccgggcgcggcaacugggacugcaucaugaccagcuaccaguaccugaucauccagaacaccacgugggaggaccacugccaguucucccggcccagccccaucggguaccugggccuccugucccagcgcacccgggacaucuacaucagccgccggcgccggggcaccuucaccuggacgcugagcgacuccgaggggaaggacaccccgggcggguacugccucacccgcuggaugcugaucgaggccgagcugaagugcuucggcaacaccgccguggccaagugcaacgagaagcacgacgaggaguucugcgacaugcuccggcuguucgacuucaacaagcaggccauccagcgccugaaggcgcccgcccagaugagcauccagcucaucaacaaggccgugaacgcccugaucaacgaccagcugaucaugaagaaccaccuccgggacaucauggggauccccuacugcaacuacuccaaguacugcuaccugaaccacacgaccaccggccgcaccagccugcccaagugcugccucgucuccaacggcagcuaccugaacgagacgcacuucuccgacgacaucgagcagcaggccgacaacaugaucaccgagaugcugcagaaggaguacauggagcggcaggggaagaccccgcucggccugguggaccuguucguguucagcaccuccuucuaccugaucagcaucuuccuccaccuggucaagauccccacgcaccgccacaucguggggaaguccugccccaagccccaccggcugaaccacaugggcaucugcagcugcgggcucuacaagcagccgggcgugcccgucaaguggaagcgcugaggacuagucccuguucccagagcccacuuuuuuuucuuuuuuugaaauaaaauagccugucuuucagaucuaaaaaaaaaaaaaaaaaaaaaaaaaaaaaaaaaaaaaaaaaaaaaaaaaaaaaaaaaaaaaaaaaaaaaaaaaaaaaaaaaaaaaaaaaaaaaaaaaaaa

SEQ ID NO: 25094 - RNA, 1721 nt, Artificial Sequence
  mRNA product Design a-1 (A100) comprising derived and/or modified sequence from LASV(LP;Clade I)__AAF86701__GPCmut3 (opt1)
aggagagucccgcagucggcguccagcggcucugcuuguucgugugugugucguugcaggccuuauucaagcuuaccaugggccagaucaucaccuucuuccaggaggugccccacgucaucgaggaggugaugaacaucgugcugaucgcccucagccugcuggccauccucaaggggcuguacaacaucgcgaccugcggcaucaucgggcuggucgccuuccucuuccugugcggcaaguccugcagccugacgcucaagggcggguacgagcugcagacccuggagcucaacauggagacccugaacaugaccaugccgcuguccugcacgaagaacagcucccaccacuacauccgcgugggcaacgagaccgggcucgagcugacccugaccaacacgagcaucaucaaccacaaguucugcaaccucuccgacgcccacaagaagaaccuguacgaccacgcccugaugagcaucaucuccaccuuccaccucagcauccccaacuucaaccaguacgaggccauguccugcgacuucaacggcgggaagaucagcgugcaguacaaccugucccacagcuacgcgggcgacgccgccgagcacugcgggaccgucgccaacggcgugcugcagaccuucaugcggauggcguggggcgggcgcuacaucgcccucgacuccggcaaggggaacugggacugcaucaugacgagcuaccaguaccugaucauccagaacaccaccugggaggaccacugccaguucucccggcccagccccaucggcuaccugggccuccugucccagcgcacccgggacaucuacaucagccgccggcgccgggggacguucaccuggacccugagcgacuccgagggcaacgagacccccgggggcuacugccucacgcgcuggaugcugaucgaggccgagcugaagugcuucgggaacaccgccguggccaagugcaacgagaagcacgacgaggaguucugcgacaugcuccggcuguucgacuucaacaagcaggcgauccgccggcugaaggccccggcccagaugagcauccagcucaucaacaaggccgucaacgcccugaucaacgaccagcugaucaugaagaaccaccuccgcgacaucaugggcauccccuacugcaacuacuccaaguacugcuaccugaaccacaccagcuccggccggaccagccugcccaagugcugccucaucuccaacgggagcuaccugaacgagacgcaguucuccgacgacaucgagcagcaggcggacaacaugaucaccgagaugcugcagaaggaguacaucgagcgccagggcaagaccccgcucgggcugguggacaucuucaucuucagcaccuccuucuaccugaucagcaucuuccugcaccucaucaagauccccacgcaccggcacaucgugggcaagcccugccccaagccgcaccgccugaaccacaugggggucugcuccugcggccuguacaagcaccccggcgugcccaccaaguggaagcggugaggacuagucccuguucccagagcccacuuuuuuuucuuuuuuugaaauaaaauagccugucuuucagaucuaaaaaaaaaaaaaaaaaaaaaaaaaaaaaaaaaaaaaaaaaaaaaaaaaaaaaaaaaaaaaaaaaaaaaaaaaaaaaaaaaaaaaaaaaaaaaaaaaaaa

SEQ ID NO: 25095 - RNA, 1721 nt, Artificial Sequence
  mRNA product Design a-1 (A100) comprising derived and/or modified sequence from LASV(803213;Clade II)__AAF86703__GPCmut3 (opt1)
aggagagucccgcagucggcguccagcggcucugcuuguucgugugugugucguugcaggccuuauucaagcuuaccaugggccagaucaucaccuucuuccaggaggugccccacgucaucgaggaggugaugaacaucgugcugaucgcccucagccugcuggccauccucaaggggaucuacaacgucgcgaccugcggccuguucgggcugaucuccuuccuccugcugugcggccgcagcugcuccgugacguacaaggggguguacgagcuccagacccuggagcugaacauggccaaccucaacaugaccaugccgcugagcugcaccaagaacaacucccaccacuacaucauggucggcaacgagacgggccuggagcucacccugaccaacaccagcaucaucaaccacaaguucugcaaccuguccgacgcccacaagaagaaccucuacgaccacgcccugaugagcaucaucuccacguuccaccugagcauccccaacuucaaccaguacgaggccauguccugcgacuucaacgggggcaagaucagcgugcaguacaaccucucccacagcuucgcgguggacgccgccaaccacugcgggaccaucgccaacggcguccugcagaccuucaugcggauggcguggggcggguccuacaucgcccuggacagcggcaaggggaacugggacugcaucaugaccuccuaccaguaccucaucauccagaacacgaccugggaggaccacugccaguucagccgccccucccccaucggcuaccuggggcugcucagccagcggacccgcgacaucuacaucagccggcgccggcgcggcaccuucacguggacccuguccgacagcgagggcaacgaggcccccgggggcuacugccugacccgguggaugcucaucgaggccgagcugaagugcuucgggaacaccgccguggcgaagugcaacgagaagcacgacgaggaguucugcgacaugcugcgccucuucgacuucaacaagcaggccaucaagcggcugaagacgccggcccagauguccauccagcugaucaacaaggccgugaacgcccucaucaacgaccagcugaucaugaagaaccaccuccgcgacaucaugggcauccccuacugcaacuacagccgguacugcuaccugaaccacaccgucaccgggaagaccucccugccccgcugcugccuggugagcaacggcuccuaccucaacgagacgcacuucagcgacgacaucgagcagcaggcggacaacaugaucaccgagaugcugcagaaggaguacauggaccggcagggcaagaccccgcuggggcucguggaccuguucgucuucuccaccagcuucuaccugaucuccaucuuccugcaccucgugaagauccccacgcaccgccacaucgugggcaagcccugccccaagccgcaccggcugaaccacauggggaucugcagcugcggccuguacaagcaccccgggguccccgugaaguggaagcgcugaggacuagucccuguucccagagcccacuuuuuuuucuuuuuuugaaauaaaauagccugucuuucagaucuaaaaaaaaaaaaaaaaaaaaaaaaaaaaaaaaaaaaaaaaaaaaaaaaaaaaaaaaaaaaaaaaaaaaaaaaaaaaaaaaaaaaaaaaaaaaaaaaaaaa

SEQ ID NO: 25096 - RNA, 1721 nt, Artificial Sequence
  mRNA product Design a-1 (A100) comprising derived and/or modified sequence from LASV(GA391;Clade III)__CAA36645__GPCmut3 (opt1)
aggagagucccgcagucggcguccagcggcucugcuuguucgugugugugucguugcaggccuuauucaagcuuaccaugggccagaucgugaccuucuuccaggaggucccccacgugaucgaggaggugaugaacaucguccugaucgcccucagcauccuggccauccugaaggggcucuacaacguggcgaccugcggccugaucgggcuggugacguuccuccugcuguccggccgcagcugcucccucaucuacaaggggaccuacgagcugcagacccuggagcucaacauggagacccugaacaugacgaugccgcugagcugcaccaagaacaacucccaccacuacauccgggucggcaacgagaccggccucgagcugacccugacgaacaccagcauccucaaccacaaguucugcaaccuguccgacgcccacaagcgcaaccuguacgaccacagccucauguccaucaucagcaccuuccaccuguccauccccaacuucaaccaguacgaggccaugagcugcgacuucaacgggggcaagaucaccgugcaguacaaccugucccacagcuucgccguggacgccgcggggcacugcggcacgcucgccaacgggguccugcagaccuucaugcggauggccuggggcggcuccuacaucgcccuggacagcgggcgcggcaacugggacugcaucaugaccuccuaccaguaccucaucauccagaacaccacgugggacgaccacugccaguucagccggcccucccccaucggguaccugggccugcucagccagcgcacccgggacaucuacaucagccgccggcgccggggcaccuucaccuggacgcuguccgacagcgaggggaacgagaccccgggcggguacugccugacccgcuggaugcucaucgaggcggagcugaagugcuucggcaacaccgccguggccaagugcaacgagaagcacgacgaggaguucugcgacaugcugcggcuguucgacuucaacaagcaggccauccgccggcugaagacgcccgcccagauguccauccagcugaucaacaaggcggugaacgcccucaucaacgaccagcugaucaugaagaaccaccuccgcgacaucauggggauccccuacugcaacuacagccgguacugcuaccucaaccacaccuccaccggcaagaccagccugccccgcugcugccugaucuccaacggcagcuaccucaacgagacgaaguucuccgacgacaucgagcagcaggccgacaacaugaucaccgagaugcugcagaaggaguacaucgaccggcaggggaagaccccgcugggccuggucgaccucuucguguucagcaccuccuucuaccugaucagcaucuuccugcaccucgugaagauccccacgcaccgccacaucgucgggaagcccugccccaagccgcaccggcugaaccacaugggcaucugcuccugcgggcuguacaagcagcccggcgugcccgugcgcuggaagcgcugaggacuagucccuguucccagagcccacuuuuuuuucuuuuuuugaaauaaaauagccugucuuucagaucuaaaaaaaaaaaaaaaaaaaaaaaaaaaaaaaaaaaaaaaaaaaaaaaaaaaaaaaaaaaaaaaaaaaaaaaaaaaaaaaaaaaaaaaaaaaaaaaaaaaa

SEQ ID NO: 25097 - RNA, 1724 nt, Artificial Sequence
  mRNA product Design a-1 (A100) comprising derived and/or modified sequence from LASV(AV;Clade V)__CCA30314__GPCmut3 (opt1)
aggagagucccgcagucggcguccagcggcucugcuuguucgugugugugucguugcaggccuuauucaagcuuaccaugggccagaucgugaccuucuuccaggaggucccccacgugaucgaggaggugaugaacaucguccugaucgcccucagcauccuggccgugcugaaggggcucuacaacaucgcgaccugcggccugaucgggcugaucacguuccuccugcugugcggccgcuccugcagcuccaaccucuacaaggggguguacgagcugcagagccuggaccucaacauggagacccugaacaugaccaugccgcuguccugcaccaagaacaacagccaccacuacauccgggucggcaacgacacgggccucgagcugacccugaccaacaccuccauccucaaccacaaguucugcaaccugagcgacgcccacaagaaggaccuguacgaccacgcccucauguccaucaucagcacguuccaccuguccauccccaacuucaaccaguacgaggccaugagcugcgacuucaacgggggcaagaucuccgugcaguacaaccugagccacuccuacgccaucgacgcggccaaccacugcgggaccguggccaacggcauccuccagaccuucaugcgcauggccuggggcgggagcuacaucgcgcuggacuccggccgggggaacugggacugcaucaugaccagcuaccaguaccugaucauccagaacacgaccugggagaaccacugccaguucucccgccccagccccaucggcuaccucgggcugcugagccagcggacccgcgacaucuacaucucccggcgccggcgcggcaccuucacguggacccucagcgacuccgagggcaacgccacccccgggggcuacugccugacccgguggaugcugaucgaggccgagcucaagugcuucgggaacacggccgucgccaagugcaacgagaagcacgacgaggaguucugcgacaugcugcgccuguucgacuucaacaagcaggcgaucagccggcucaaguccccggcccagaugagcauccagcugaucaacaaggccgugaacgcccugaucaacgaccagcucaucaugaagaaccaccuccgcgacaucaugggcauccccuacugcaacuacuccaaguacugcuaccugaaccacaccaucaccgggaagaccagccugcccaagugcugccugguguccaacggcagcuaccugaacgagacgcacuucuccgacgacaucgagcagcaggccgacaacaugaucaccgagaugcuccagaaggaguacauggagcggcagggcaagaccccgcuggggcuggucgaccuguucguguucagcaccuccuucuaccucaucagcaucuuccugcgccuggugaagauccccacgcaccggcacaucgucggcaagcccugccccaagccgcaccgccucaaccacauggggaucugcuccugcggccuguacaagcagcccggggugcccgugcgguggaagcgcugaggacuagucccuguucccagagcccacuuuuuuuucuuuuuuugaaauaaaauagccugucuuucagaucuaaaaaaaaaaaaaaaaaaaaaaaaaaaaaaaaaaaaaaaaaaaaaaaaaaaaaaaaaaaaaaaaaaaaaaaaaaaaaaaaaaaaaaaaaaaaaaaaaaaa

SEQ ID NO: 25098 - RNA, 1721 nt, Artificial Sequence
  mRNA product Design a-1 (A100) comprising derived and/or modified sequence from LASV(Togo/2016/7082;Clade VI)__AMR44577__GPCmut3 (opt1)
aggagagucccgcagucggcguccagcggcucugcuuguucgugugugugucguugcaggccuuauucaagcuuaccaugggccagaucaucaccuucuuccaggaggugccccacgucaucgaggaggugaugaacaucgugcugaucgcccucagccugcuggccauccucaagggggucuacaacguggcgaccugcggcaucaucgggcuggugacguuccuguuccucugcggccgcuccugcagccugaucuacaagggguccuacgagcugcagacccucgagcugaacauggagacccugaacaugaccaugccgcucagcugcacgaagaacuccagccaccacuacauccgggucggcaacgagaccggccuggagcugacccucaccaacacguccaucaucaaccacaaguucugcaaccugagcgacgcccacaagcgcaaccuguacgaccacgcccucauguccauccugagcaccuuccaccuguccauccccaacuucaaccaguacgaggccaugagcugcgacuucaacgggggcaagaucuccgugcaguacaaccucagccacgccuacgcgguggacgccgccgagcacugcgggaccgucgccaacggcgugcugcagaccuucaugcggauggcguggggcggguccuacaucgcccuggacagcggccgcgggaacugggacugcaucaugacguccuaccaguaccucaucauccagaacaccaccugggaggaccacugccaguucagccggcccucccccaucggcuaccuggggcugcucagccagcgcacccgggacaucuacaucagccgccggcgccggggcacguucaccuggacccuguccgacagcgagggcaacgagacccccgggggcuacugccugacgcgcuggaugcucaucgaggccgagcugaagugcuucgggaacaccgccguggccaagugcaacgagaagcacgacgaggaguucugcgacaugcugcggcuguucgacuucaacaagcaggcgauccagcgccugaaguccccggcccagaugagcauccagcugaucaacaaggccgucaacgcccucaucaacgaccagcugaucaugaagaaccaccuccgggacaugaugggcauccccuacugcaacuacuccaaguacugcuaccucaaccacaccagcuccgggcgcaccagccugcccaagugcugccugguguccaacggcagcuaccucaacgagacgcacuucuccgacgacaucgagcagcaggccgacaacaugaucaccgagaugcugcagaaggaguacaucgaccggcagggcaagaccccgcuggggcucguggaccuguucgucuucagcaccuccuucuaccugaucagcaucuuccugcaccucaucaagauccccacgcaccgccacaucgugggcaagcccugccccaagccgcaccggcugaaccacauggggaucugcuccugcggccuguacaagcagcccggggugcccacccgcuggaagcggugaggacuagucccuguucccagagcccacuuuuuuuucuuuuuuugaaauaaaauagccugucuuucagaucuaaaaaaaaaaaaaaaaaaaaaaaaaaaaaaaaaaaaaaaaaaaaaaaaaaaaaaaaaaaaaaaaaaaaaaaaaaaaaaaaaaaaaaaaaaaaaaaaaaaa

SEQ ID NO: 25099 - RNA, 1721 nt, Artificial Sequence
  mRNA product Design a-1 (A100) comprising derived and/or modified sequence from LASV(KAK-428;Clade n.d. (VII))__ANH09740__GPCmut3 (opt1)
aggagagucccgcagucggcguccagcggcucugcuuguucgugugugugucguugcaggccuuauucaagcuuaccaugggccagaucgugaccuucuuccaggaggucccccacgugaucgaggaggugaugaacaucguccugaucgcccucagccugcuggccauccucaaggggcuguacaacuucgcgaccugcggcgugaucgggcugaucacguuccuccugcugugcggccgcuccugcagcgccaccuacaaggggcaguacgagcuccagacccuggagcugaacauggagucccucaacaugaccaugccgcugagcugcacgaagaacaacucccaccacuacauccgggccggcaacaacaccggccuggagcucacccugaccaacacgagcaucaucucccacaaguucugcaaccugagcgacgcccacaagaagaaccucuacgaccacacccugauguccaucaucaccaccuuccaccugagcauccccaacuucaaccaguacgaggccauguccugcgacuucaacgggggcaagaucagcauccaguacaaccucucccacagcuacgcgggggacgccgcccagcacugcggcacgguggccaacgggguccugcagaccuucaugcgcauggcguggggcggcuccuaccuggcccucgacagcgggcggcgcggcugggacugcaucaucuccagcuaccaguaccugaucauccagaacaccaccugggacgaccacugccaguucucccggcccagccccaucggguaccugggcuucgugagccagaagacgcgcgacaucuacaucucccggcgccggcgcggcaccuucaccuggacccucagcgacuccgaggggcacgacaugccgggcggguacugccugacgcgguggaugcugaucgaggccgaccucaagugcuucggcaacaccgccguggccaagugcaacgagaagcacgacgaggaguucugcgacauguggcgccuguucgacuucaacaagcaggcgauccagcggcugaaggcccccgcccagaugaacauccagcucaucaacaaggccgucaacgcccugaucaacgaccagcugaugaugaagaaccaccuccgcgacaucauggggauccccuacugcaacuacagcaaguucugcuaccugaacaacaccaccacgggccggaccucccugccccgcugcugccucaucagcaacggcuccuaccugaacgagacccacuucagcgacgacaucgagcagcaggcggacaacaugaucaccgagaugcugcagaaggaguacauggaccggcaggggaagacgccgcucggccugguggaccuguucguguucuccaccagcuucuaccucaucaccaucuuccugcaccuggucaagauccccacccaccgccacaucguggggaagcccugccccaagccgcaccggcugaaccacaugggcaucugcuccugcgggcucuacaagcagcccggcgugcccguccgcuggaagcggugaggacuagucccuguucccagagcccacuuuuuuuucuuuuuuugaaauaaaauagccugucuuucagaucuaaaaaaaaaaaaaaaaaaaaaaaaaaaaaaaaaaaaaaaaaaaaaaaaaaaaaaaaaaaaaaaaaaaaaaaaaaaaaaaaaaaaaaaaaaaaaaaaaaaa

SEQ ID NO: 25100 - RNA, 1721 nt, Artificial Sequence; identical to SEQ ID NO: 25094
  mRNA product Design a-1 (A100) comprising derived and/or modified sequence from LASV(Pinneo-NIG-1969;Clade I)__AIT17836__GPCmut3 (opt1)

SEQ ID NO: 25101 - RNA, 1721 nt, Artificial Sequence
  mRNA product Design a-1 (A100) comprising derived and/or modified sequence from LASV(ISTH0009-NIG-2011;Clade II)__AIT17404__GPCmut3 (opt1)
aggagagucccgcagucggcguccagcggcucugcuuguucgugugugugucguugcaggccuuauucaagcuuaccaugggccagaucaucaccuucuuccaggaggugccccacgucaucgaggaggugaugaacaucgugcugaucgcccucagccugcuggccauccucaaggggaucuacaacgucgcgaccugcggccuguucgggcugguguccuuccuccugcugugcggccgcagcugcuccacgaccuacaaggggguguacgagcuccagacccuggagcuggacauggccagccucaacaugaccaugccgcuguccugcacgaagaacaacagccaccacuacaucauggucggcaacgagaccggccuggagcucacccugaccaacacguccaucaucaaccacaaguucugcaaccugagcgacgcccacaagaagaaccucuacgaccacgcccugauguccaucaucagcaccuuccaccuguccauccccaacuucaaccaguacgaggccaugagcugcgacuucaacgggggcaagaucuccgugcaguacaaccucagccacgcguacgccguggacgccgccaaccacugcgggaccaucgcgaacggcguccugcagaccuucaugcggauggccuggggcggguccuacaucgcccuggacagcggcaagggguccugggacugcaucaugacgagcuaccaguaccucaucauccagaacaccaccugggaggaccacugccaguucucccgccccagccccaucggcuaccuggggcugcucagccagcggacccgcgacaucuacaucucccggcgccggcgcggcacguucaccuggacccugagcgacuccgagggcaacgagacccccgggggcuacugccugacgcgguggaugcucaucgaggccgagcugaagugcuucgggaacaccgccguggcgaagugcaacgagaagcacgacgaggaguucugcgacaugcugcgccucuucgacuucaacaagcaggccauccggcgccugaagaccccggcccagaugagcauccagcugaucaacaaggccgugaacgcccucaucaacgaccagcugaucaugaagaaccaccuccgggacaucaugggcauccccuacugcaacuacuccaaguacugcuaccugaaccacaccgucacggggaagaccagccugccccgcugcugccugguguccaacggcagcuaccucaacgagacccacuucuccgacgacaucgagcagcaggcggacaacaugaucaccgagcugcugcagaaggaguacauggaccggcagggcaagacgccgcucgggcugguggaccuguucgucuucagcaccuccuucuaccugaucagcaucuuccuccaccugaucaagauccccacccaccgccacaucaccggcaagcccugccccaagccgcaccggcugaaccacauggggaucugcuccugcggccucuacaagcaccccggggugcccgugaaguggaagcgcugaggacuagucccuguucccagagcccacuuuuuuuucuuuuuuugaaauaaaauagccugucuuucagaucuaaaaaaaaaaaaaaaaaaaaaaaaaaaaaaaaaaaaaaaaaaaaaaaaaaaaaaaaaaaaaaaaaaaaaaaaaaaaaaaaaaaaaaaaaaaaaaaaaaaa

SEQ ID NO: 25102 - RNA, 1721 nt, Artificial Sequence
  mRNA product Design a-1 (A100) comprising derived and/or modified sequence from LASV(ISTH2010-NIG-2012;Clade II)__AIT17482__GPCmut3 (opt1)
aggagagucccgcagucggcguccagcggcucugcuuguucgugugugugucguugcaggccuuauucaagcuuaccaugggccagaucaucaccuucuuccaggaggugccccacgucaucgaggaggugaugaacaucgugcugaucgcccucagccugcuggccauccucaaggggaucuacaacgucgcgaccugcggccuguucgggcugguguccuuccuccugcugugcggccgcagcugcuccacgaccuacaaggggguguacgagcuccagacccuggagcuggacauggccagccucaacaugaccaugccgcuguccugcacgaagaacaacagccaccacuacaucauggucggcaacgagaccggccuggagcucacccugaccaacacguccaucaucaaccacaaguucugcaaccugagcgacgcccacaagaagaaccucuacgaccacgcccugauguccaucaucagcaccuuccaccuguccauccccaacuucaaccaguacgaggccaugagcugcgacuucaacgggggcaagaucuccgugcaguacaaccucagccacgcguacgccguggacgccgccaaccacugcgggaccaucgcgaacggcguccugcagaccuucaugcggauggccuggggcggguccuacaucgcccuggacagcggcaagggguccugggacugcaucaugacgagcuaccaguaccucaucauccagaacaucaccugggaggaccacugccaguucucccgccccagccccaucggcuaccuggggcugcucagccagcggacccgcgacaucuacaucucccggcgccggcgcggcaccuucacguggacccugagcgacuccgagggcaacgagacccccgggggcuacugccugacccgguggaugcucaucgaggccgagcugaagugcuucgggaacacggccguggcgaagugcaacgagaagcacgacgaggaguucugcgacaugcugcgccucuucgacuucaacaagcaggccauccggcgccugaagaccccggcccagaugagcauccagcugaucaacaaggccgugaacgcccucaucaacgaccagcugaucaugaagaaccaccuccgggacaucaugggcauccccuacugcaacuacuccaaguacugcuaccugaaccacaccgucaccgggaagacgagccugccccgcugcugccugguguccaacggcagcuaccucaacgagacccacuucuccgacgacaucgagcagcaggcggacaacaugaucaccgagcugcugcagaaggaguacaucgaccggcagggcaagaccccgcucgggcugguggaccuguucgucuucagcacguccuucuaccugaucagcaucuuccuccaccuggugaagauccccacccaccgccacguggucggcaagcccugccccaagccgcaccggcugaaccacauggggaucugcuccugcggccucuacaagcaccccggggugcccgugaaguggaagcgcugaggacuagucccuguucccagagcccacuuuuuuuucuuuuuuugaaauaaaauagccugucuuucagaucuaaaaaaaaaaaaaaaaaaaaaaaaaaaaaaaaaaaaaaaaaaaaaaaaaaaaaaaaaaaaaaaaaaaaaaaaaaaaaaaaaaaaaaaaaaaaaaaaaaaa

SEQ ID NO: 25103 - RNA, 1721 nt, Artificial Sequence
  mRNA product Design a-1 (A100) comprising derived and/or modified sequence from LASV(Lassa virus/H.sapiens-wt/NGA/2015/ISTH_0543;Clade II)__AVO03639__GPCmut3 (opt1)
aggagagucccgcagucggcguccagcggcucugcuuguucgugugugugucguugcaggccuuauucaagcuuaccaugggccagaucaucaccuucuuccaggaggugccccacgucaucgaggaggugaugaacaucgugcugaucgcccucagccugcuggccauccucaaggggaucuacaacgucgcgaccugcggccuguucgggcugguguccuuccuccugcugugcggccgcagcugcuccacgaccuacaaggggguguacgagcuccagacccuggagcuggacauggccaaccucaacaugaccaugccgcugagcugcacgaagaacaacucccaccacuacaucauggucggcaacgagaccggccuggagcucacccugaccaacacgagcaucaucaaccacaaguucugcaaccuguccgacgcccacaagaagaaccucuacgaccacgcccugaugagcaucaucuccaccuuccaccugagcauccccaacuucaaccaguacgaggccauguccugcgacuucaacgggggcaagaucagcgugcaguacaaccucucccacaccuacgcgguggacgccgccaaccacugcgggaccaucgccaacggcguccugcagacguucaugcggauggcguggggcgggagcuacaucgcccuggacuccggcaaggggagcugggacugcaucaugaccuccuaccaguaccucgugauccagaacaccaccugggaggaccacugccaguucagccgccccucccccaucggcuaccuggggcugcucagccagcggacgcgcgacaucuacaucagccggcgccggcgcggcaccuucaccuggacccuguccgacagcgagggcaacgagacgcccgggggcuacugccugacccgguggaugcucaucgaggccgagcugaagugcuucgggaacaccgccguggccaagugcaacgagaagcacgacgaggaguucugcgacaugcugcgccucuucgacuucaacaagcaggcgauccggcgccugaagaccccggcccagauguccauccagcugaucaacaaggccgucaacgcccucaucaacgaccagcugaucaugaagaaccaccuccgggacaucaugggcauccccuacugcaacuacagcaaguacugcuaccugaaccacacggugaccgggaagaccucccugccccgcugcugccuggugagcaacggcuccuaccucaacgagacccacuucagcgacgacaucgagcagcaggccgacaacaugaucacggagcugcugcagaaggaguacaucgaccggcagggcaagaccccgcucgggcuggucgaccuguucguguucuccaccagcuucuaccugaucuccaucuuccuccaccuggugaagauccccacccaccgccacaucacgggcaagcccugccccaagccgcaccggcugaaccacauggggaucugcagcugcggccucuacaagcaccccgggguccccgugaaguggaagcgcugaggacuagucccuguucccagagcccacuuuuuuuucuuuuuuugaaauaaaauagccugucuuucagaucuaaaaaaaaaaaaaaaaaaaaaaaaaaaaaaaaaaaaaaaaaaaaaaaaaaaaaaaaaaaaaaaaaaaaaaaaaaaaaaaaaaaaaaaaaaaaaaaaaaaa

SEQ ID NO: 25104 - RNA, 1721 nt, Artificial Sequence
  mRNA product Design a-1 (A100) comprising derived and/or modified sequence from LASV(Lassa virus/H.sapiens-wt/NGA/2016/ISTH_0009;Clade II)__AVO03571__GPCmut3 (opt1)
aggagagucccgcagucggcguccagcggcucugcuuguucgugugugugucguugcaggccuuauucaagcuuaccaugggccagaucaucaccuucuuccaggaggugccccacgucaucgaggaggugaugaacaucgugcugaucgcccucagccugcuggccauccucaaggggaucuacaacgucgcgaccugcggccugcuggggcucguguccuuccugcugcucugcggccgcagcugcuccacgaccuacaaggggguguacgagcugcagacccuggagcucgacauggccagccugaacaugaccaugccgcuguccugcacgaagaacaacagccaccacuacaucauggucggcaacgagaccggccucgagcugacccugaccaacacguccaucaucaaccacaaguucugcaaccucagcgacgcccacaagaagaaccuguacgaccacgcccugauguccaucaucagcaccuuccaccucuccauccccaacuucaaccaguacgaggccaugagcugcgacuucaacgggggccggaucuccgugcaguacaaccugagccacuccuacgcgguggacgccgccaaccacugcgggaccaucgccaacggcguccugcagaccuucaugcgcauggcguggggcgggagcuacaucgcccucgacuccggcaaggggagcugggacugcaucaugacguccuaccaguaccugaucauccagaacaccaccugggaggaccacugccaguucagccggcccagccccaucggcuaccuggggcuccugucccagcgcacccgggacaucuacaucagccgccggcgccggggcacguucaccuggacccuguccgacagcgagggcaacgagacccccgggggcuacugccucacgcgcuggaugcugaucgaggccgagcugaagugcuucgggaacaccgccguggccaagugcaacgagaagcacgacgaggaguucugcgacaugcuccggcuguucgacuucaacaagcaggcgauccgccggcugaagaccccggcccagauguccauccagcucaucaacaaggccgugaacgcccugaucaacgaccagcugaucaugaagaaccaccuccgcgacaucaugggcauccccuacugcaacuacagcaaguacugcuaccugaaccacaccgucacggggaagaccucccugccccggugcugccucgugagcaacggcuccuaccugaacgagacccacuucagcgacgacaucgagcagcaggccgacaacaugaucaccgagcugcuccagaaggaguacaucgaccgccagggcaagacgccgcuggggcugguggaccuguucgucuucuccaccagcuucuaccucaucuccaucuuccugcaccuggugaagauccccacccaccggcacaucaccggcaagcccugccccaagccgcaccgccucaaccacauggggaucugcagcugcggccuguacaaccaccccggggugcccgucaaguggaagcggugaggacuagucccuguucccagagcccacuuuuuuuucuuuuuuugaaauaaaauagccugucuuucagaucuaaaaaaaaaaaaaaaaaaaaaaaaaaaaaaaaaaaaaaaaaaaaaaaaaaaaaaaaaaaaaaaaaaaaaaaaaaaaaaaaaaaaaaaaaaaaaaaaaaaa

SEQ ID NO: 25105 - RNA, 1721 nt, Artificial Sequence
  mRNA product Design a-1 (A100) comprising derived and/or modified sequence from LASV(Lassa virus/H.sapiens-wt/NGA/2016/ISTH_0017;Clade II)__AVO03567__GPCmut3 (opt1)
aggagagucccgcagucggcguccagcggcucugcuuguucgugugugugucguugcaggccuuauucaagcuuaccaugggccagaucaucaccuucuuccaggaggugccccacgucaucgaggaggugaugaacaucgugcugaucgcccucagccugcuggccauccucaaggggaucuacaacgucgcgaccugcggccuguucgggcugguguccuuccuccugcugugcggccgcagcugcuccacgaccuacaaggggguguacgagcuccagacccuggagcuggacauggccagccucaacaugaccaugccgcuguccugcacgaagaacaacagccaccacuacaucauggucggcaacgagaccggccuggagcucacccugaccaacacguccaucaucaaccacaaguucugcaaccugagcgacgcccacaagaagaaccucuacgaccacgcccugauguccaucaucagcaccuuccaccuguccauccccaacuucaaccaguacgaggccaugagcugcgacuucaacgggggcaagaucuccgugcaguacaaccucagccacaccuacgcgaucgacgccgccaaccacugcgggaccaucgccaacggcgugcugcagacguucaugcggauggcguggggcggguccuacaucgcccuggacagcggcaagggguccugggacugcaucaugaccagcuaccaguaccucaucauccagaacaccaccugggaggaccacugccaguucucccgccccagccccaucggcuaccuggggcugcucagccagcggacgcgcgacaucuacaucucccggcgccggcgcggcaccuucaccuggacccugagcgacuccgagggcaacgagacgcccgggggcuacugccugacccgguggaugcucaucgaggccgagcugaagugcuucgggaacaccgccgucgccaagugcaacgagaagcacgacgaggaguucugcgacaugcugcgccucuucgacuucaacaagcaggcgauccggcgccugaagaccccggcccagaugagcauccagcugaucaacaaggccgugaacgcccucaucaacgaccagcugaucaugaagaaccaccuccgggacaucaugggcauccccuacugcaacuacuccaaguacugcuaccugaaccacacggugaccgggaagaccagccugccccgcugcugccuggucuccaacggcagcuaccucaacgagacccacuucuccgacgacaucgagcagcaggccgacaacaugaucacggagcugcugcagaaggaguacauggaccggcagggcaagaccccgcucgggcugguggaccuguucguguucagcaccuccuucuaccugaucagcaucuuccuccaccugguccgcauccccacccaccggcacgugaucggcaagcccugccccaagccgcaccgccugaaccacauggggaucugcuccugcggccucuacaagcaccccggggugcccgucaaguggaagcggugaggacuagucccuguucccagagcccacuuuuuuuucuuuuuuugaaauaaaauagccugucuuucagaucuaaaaaaaaaaaaaaaaaaaaaaaaaaaaaaaaaaaaaaaaaaaaaaaaaaaaaaaaaaaaaaaaaaaaaaaaaaaaaaaaaaaaaaaaaaaaaaaaaaaa

SEQ ID NO: 25106 - RNA, 1721 nt, Artificial Sequence
  mRNA product Design a-1 (A100) comprising derived and/or modified sequence from LASV(Lassa virus/H.sapiens-wt/NGA/2018/ISTH_0959;Clade II)__AVV65099__GPCmut3 (opt1)
aggagagucccgcagucggcguccagcggcucugcuuguucgugugugugucguugcaggccuuauucaagcuuaccaugggccagaucaucaccuucuuccaggaggugccccacgucaucgaggaggugaugaacaucgugcugaucgcccucagccugcuggccauccucaaggggaucuacaacgucgugaccugcggccuguucgggcugguguccuuccuccugcugugcggccgcagcugcuccacgaccuacaagggggucuacgagcuccagacccuggagcuggacauggcgagccucaacaugaccaugccgcuguccugcacgaagaacaacagccaccacuacaucauggugggcaacgagaccggccuggagcucacccugaccaacacguccaucaucaaccacaaguucugcaaccugagcgacgcccacaagaagaaccucuacgaccacgcccugauguccaucaucagcaccuuccaccuguccauccccaacuucaaccaguacgaggccaugagcugcgacuucaacgggggcaagaucuccgugcaguacaaccucagccacgccuacgcgaucgacgccgccaaccacugcgggaccaucgccaacggcguccugcagaccuucaugcggauggcguggggcggguccuacaucgcccuggacagcggcaagggguccugggacugcaucaugacgagcuaccaguaccucaucauccagaacaccaccugggaggaccacugccaguucucccgccccagccccaucggcuaccuggggcugcucagccagcggacccgcgacaucuacaucucccggcgccggcgcggcacguucaccuggacccugagcgacuccgagggcaacgagacccccgggggcuacugccugacgcgguggaugcucaucgaggccgagcugaagugcuucgggaacaccgccguggccaagugcaacgagaagcacgacgaggaguucugcgacaugcugcgccucuucgacuucaacaagcaggcgauccggcgccugaagaccccggcccagaugagcauccagcugaucaacaaggccgugaacgcccucaucaacgaccagcugaucaugaagaaccaccuccgggacaucaugggcauccccuacugcaacuacuccaaguacugcuaccugaaccacaccgucacggggaagaccagccugccccgcugcugccugguguccaacggcagcuaccucaacgagacccacuucuccgacgacaucgagcagcaggccgacaacaugaucaccgagcugcugcagaaggaguacaucgaccggcagggcaagacgccgcucgggcugguggaccuguucgucuucagcaccuccuucuaccugaucagcaucuuccuccaccuggugaagauccccacccaccgccacgugaucggcaagcccugccccaagccgcaccggcugaaccacauggggaucugcuccugcggccucuacaagcaccccgggguccccgugaaguggaagcgcugaggacuagucccuguucccagagcccacuuuuuuuucuuuuuuugaaauaaaauagccugucuuucagaucuaaaaaaaaaaaaaaaaaaaaaaaaaaaaaaaaaaaaaaaaaaaaaaaaaaaaaaaaaaaaaaaaaaaaaaaaaaaaaaaaaaaaaaaaaaaaaaaaaaaa

SEQ ID NO: 25107 - RNA, 1721 nt, Artificial Sequence
  mRNA product Design a-1 (A100) comprising derived and/or modified sequence from LASV(LASV003-NIG-2008;Clade II)__AIT17580__GPCmut3 (opt1)
aggagagucccgcagucggcguccagcggcucugcuuguucgugugugugucguugcaggccuuauucaagcuuaccaugggccagaucaucaccuucuuccaggaggugccccacgucaucgaggaggugaugaacaucgugcugaucgcccucagccugcuggccauccucaaggggaucuacaacgucgcgaccugcggccuguucgggcugguguccuuccuccugcugugcggccgcagcugcuccacgaccuacaaggggguguacgagcuccagacccuggagcuggacauggccagccucaacaugaccaugccgcuguccugcacgaagaacaacagccaccacuacaucauggucggcaacgagaccggccuggagcucacccugaccaacacguccaucaucaaccacaaguucugcaaccugagcgacgcccacaagaagaaccucuacgaccacgcccugauguccaucaucagcaccuuccaccuguccauccccaacuucaaccaguacgaggccaugagcugcgacuucaacgggggcaagaucuccgugcaguacaaccucagccacaccuacgcgguggacgccgccaaccacugcgggaccaucgccaacggcguccugcagacguucaugcggauggcguggggcggguccuacaucgcccuggacagcggcaagggguccugggacugcaucaugaccagcuaccaguaccucaucauccagaacaccaccugggaggaccacugccaguucucccgccccagccccaucggcuaccuggggcugcucagccagcggacgcgcgacaucuacaucucccggcgccggcgcggcaccuucaccuggacccugagcgacuccgagagcaacgagacgccgggcggguacugccugacccgguggaugcucaucgaggccgagcugaagugcuucggcaacaccgccguggccaagugcaacgagaagcacgacgaggaguucugcgacaugcugcgccucuucgacuucaacaagcaggcgauccggcgccugaaggcccccgcccagauguccauccagcugaucaacaaggccgugaacgcccucaucaacgaccagcugaucaugaagaaccaccuccgggacaucauggggauccccuacugcaacuacagcaaguacugcuaccugaaccacaccgucacgggccgcaccucccugccccggugcugccuggugagcaacggguccuaccucaacgagacccacuucagcgacgacaucgagcagcaggcggacaacaugaucaccgagcugcugcagaaggaguacauggaccgccagggcaagacgccgcucggccugguggaccuguucgucuucuccaccagcuucuaccugaucuccaucuuccuccaccuggugaagauccccacccaccggcacgugaucgggaagcccugccccaagccgcaccgccugaaccacaugggcaucugcagcugcgggcucuacaagcaccccggcguccccgugaaguggaagcggugaggacuagucccuguucccagagcccacuuuuuuuucuuuuuuugaaauaaaauagccugucuuucagaucuaaaaaaaaaaaaaaaaaaaaaaaaaaaaaaaaaaaaaaaaaaaaaaaaaaaaaaaaaaaaaaaaaaaaaaaaaaaaaaaaaaaaaaaaaaaaaaaaaaaa

SEQ ID NO: 25108 - RNA, 1721 nt, Artificial Sequence
  mRNA product Design a-1 (A100) comprising derived and/or modified sequence from LASV(LASV035-NIG-2009;Clade II)__AIT17588__GPCmut3 (opt1)
aggagagucccgcagucggcguccagcggcucugcuuguucgugugugugucguugcaggccuuauucaagcuuaccaugggccagaucaucaccuucuuccaggaggugccccacgucaucgaggaggugaugaacaucgugcugaucgcccucagccugcuggccauccucaaggggaucuacaacgucgcgaccugcggccuguucgggcugguguccuuccuccugcugugcggccgcagcugcuccacgaccuacaaggggguguacgagcuccagacccuggagcuggacauggccagccucaacaugaccaugccgcuguccugcacgaagaacaacagccaccacuacaucauggucggcaacgagaccggccuggagcucacccugaccaacacguccaucaucaaccacaaguucugcaaccugagcgacgcccacaagaagaaccucuacgaccacgcccugauguccaucaucagcaccuuccaccuguccauccccaacuucaaccaguacgaggccaugagcugcgacuucaacgggggcaagaucuccgugcaguacaaccucagccacgcguacgccguggacgccgccaaccacugcgggaccaucgcgaacggcguccugcagaccuucaugcggauggccuggggcggguccuacaucgcccuggacagcggcaagggguccugggacugcaucaugacgagcuaccaguaccucaucauccagaacaccaccugggaggaccacugccaguucucccgccccagccccaucggcuaccuggggcugcucagccagcggacccgcgacaucuacaucucccggcgccggcgcggcacguucaccuggacccugagcgacuccgagggcaacgagacccccgggggcuacugccugacgcgguggaugcucaucgaggccgagcugaagugcuucgggaacaccgccguggcgaagugcaacgagaagcacgacgaggaguucugcgacaugcugcgccucuucgacuucaacaagcaggccauccggcgccugaaggccccggcccagaugagcauccagcugaucaacaaggccgugaacgcgcucaucaacgaccagcugaucaugaagaaccaccuccgggacaucaugggcauccccuacugcaacuacuccaaguacugcuaccugaaccacaccgucaccgggaagacgagccugccccgcugcugccugguguccaacggcagcuaccucaacgagacccacuucuccgacgacaucgagcagcaggccgacaacaugaucaccgagcugcugcagaaggaguacaucgaccggcagggcaagaccccgcucgggcugguggaccuguucgucuucagcacguccuucuaccugaucagcaucuuccuccaccuggugaagauccccacccaccgccacgugaucggcaagcccugccccaagccgcaccggcugaaccacauggggaucugcuccugcggccucuacaagcaccccgggguccccgugaaguggaagcgcugaggacuagucccuguucccagagcccacuuuuuuuucuuuuuuugaaauaaaauagccugucuuucagaucuaaaaaaaaaaaaaaaaaaaaaaaaaaaaaaaaaaaaaaaaaaaaaaaaaaaaaaaaaaaaaaaaaaaaaaaaaaaaaaaaaaaaaaaaaaaaaaaaaaaa

SEQ ID NO: 25109 - RNA, 1721 nt, Artificial Sequence
  mRNA product Design a-1 (A100) comprising derived and/or modified sequence from LASV(LASV1000-NIG-2009;Clade II)__AIT17782__GPCmut3 (opt1)
aggagagucccgcagucggcguccagcggcucugcuuguucgugugugugucguugcaggccuuauucaagcuuaccaugggccagaucaucaccuucuuccaggaggugccccacgucaucgaggaggugaugaacaucgugcugaucgcccucagccugcuggccauccucaaggggaucuacaacgucgcgaccugcggccuguucgggcugguguccuuccuccugcugugcggccgcagcugcuccacgaccuacaaggggguguacgagcuccagacccuggagcuggacauggccagccucaacaugaccaugccgcuguccugcacgaagaacaacagccaccacuacaucauggucggcaacgagaccggccuggagcucacccugaccaacacguccaucaucaaccacaaguucugcaaccugagcgacgcccacaagaagaaccucuacgaccacgcccugauguccaucaucagcaccuuccaccuguccauccccaacuucaaccaguacgaggccaugagcugcgacuucaacgggggcaagaucuccgugcaguacaaccucagccacaccuacgcgguggacgccgccaaccacugcgggaccaucgccaacggcguccugcagacguucaugcggauggcguggggcggguccuacaucgcccuggacagcggcaagggguccugggacugcaucaugaccagcuaccaguaccucaucauccagaacaccaccugggaggaccacugccaguucucccgccccagccccaucggcuaccuggggcugcucagccagcggacgcgcgacaucuacaucucccggcgccggcgcggcaccuucaccuggacccugagcgacuccgagggcaacgagacgcccgggggcuacugccugacccgguggaugcucaucgaggccgagcugaagugcuucgggaacaccgccguggccaagugcaacgagaagcacgacgaggaguucugcgacaugcugcgccucuucgacuucaacaagcaggcgaucaagcggcugaagaccccggcccagaugagcauccagcugaucaacaaggccgugaacgcccucaucaacgaccagcugaucaugaagaaccaccuccgcgacaucaugggcauccccuacugcaacuacuccaaguacugcuaccugaaccacacggucaccgggaagaccagccugccccggugcugccugguguccaacggcagcuaccucaacgagacccacuucuccgacgacaucgagcagcaggccgacaacaugaucacggagcugcugcagaaggaguacaucgaccgccagggcaagaccccgcucgggcugguggaccuguucgucuucagcaccuccuucuaccugaucagcaucuuccuccaccuggugaagauccccacccaccggcacguggucggcaagcccugccccaagccgcaccgccugaaccacauggggaucugcuccugcggccucuacaagcaccccggggugcccgugaaguggaagcggugaggacuagucccuguucccagagcccacuuuuuuuucuuuuuuugaaauaaaauagccugucuuucagaucuaaaaaaaaaaaaaaaaaaaaaaaaaaaaaaaaaaaaaaaaaaaaaaaaaaaaaaaaaaaaaaaaaaaaaaaaaaaaaaaaaaaaaaaaaaaaaaaaaaaa

SEQ ID NO: 25110 - RNA, 1721 nt, Artificial Sequence
  mRNA product Design a-1 (A100) comprising derived and/or modified sequence from LASV(LASV221-NIG-2010;Clade II)__AIT17624__GPCmut3 (opt1)
aggagagucccgcagucggcguccagcggcucugcuuguucgugugugugucguugcaggccuuauucaagcuuaccaugggccagaucaucaccuucuuccaggaggugccccacgucaucgaggaggugaugaacaucgugcugaucgcccucagccugcuggccauccucaaggggaucuacaacgucgcgaccugcggccuguucgggcugguguccuuccuccugcugugcggccgcagcugcuccacgaccuacaaggggguguacgagcuccagacccuggagcuggacauggccagccucaacaugaccaugccgcuguccugcacgaagaacaacagccaccacuacaucauggucggcaacgagaccggccuggagcucacccugaccaacacguccaucaucaaccacaaguucugcaaccugagcgacgcccacaagaagaaccucuacgaccacgcccugauguccaucaucagcaccuuccaccuguccauccccaacuucaaccaguacgaggccaugagcugcgacuucaacgggggcaagaucuccgugcaguacaaccucagccacaccuacgcgaucgacgccgccaaccacugcgggaccaucgccaacggcgugcugcagacguucaugcggauggcguggggcggguccuacaucgcccuggacagcggcaagggguccugggacugcaucaugaccagcuaccaguaccucaucauccagaacaccaccugggaggaccacugccaguucucccgccccagccccaucggcuaccuggggcugcucagccagcggacgcgcgacaucuacaucucccggcgccggcgcggcaccuucaccuggacccugagcgacuccgagggcaacgagacgcccgggggcuacugccugacccgguggaugcucaucgaggccgagcugaagugcuucgggaacaccgccgucgccaagugcaacgagaagcacgacgaggaguucugcgacaugcugcgccucuucgacuucaacaagcaggcgauccggcgccugaagaccccggcccagaugagcauccagcugaucaacaaggccgugaacgcccucaucaacgaccagcugaucaugaagaaccaccuccgggacaucaugggcauccccuacugcaacuacuccaaguacugcuaccugaaccacacggugaccgggaagaccagccugccccgcugcugccuggucuccaacggcagcuaccucaacgagacccacuucuccgacgacaucgagcagcaggccgacaacaugaucacggagaugcugcagaaggaguacauggaccggcagggcaagaccccgcuggggcucguggaccuguucguguucagcaccuccuucuaccugaucagcaucuuccugcaccucgucaagauccccacccaccgccacgugaucggcaagcccugccccaagccgcaccggcugaaccacauggggaucugcuccugcggccuguacaagcaccccggggugcccgucaaguggaagcgcugaggacuagucccuguucccagagcccacuuuuuuuucuuuuuuugaaauaaaauagccugucuuucagaucuaaaaaaaaaaaaaaaaaaaaaaaaaaaaaaaaaaaaaaaaaaaaaaaaaaaaaaaaaaaaaaaaaaaaaaaaaaaaaaaaaaaaaaaaaaaaaaaaaaaa

SEQ ID NO: 25111 - RNA, 1721 nt, Artificial Sequence
  mRNA product Design a-1 (A100) comprising derived and/or modified sequence from LASV(LASV237-NIG-2010;Clade II)__AIT17638__GPCmut3 (opt1)
aggagagucccgcagucggcguccagcggcucugcuuguucgugugugugucguugcaggccuuauucaagcuuaccaugggccagaucaucaccuucuuccaggaggugccccacgucaucgaggaggugaugaacaucgugcugaucgcccucagccugcuggccauccucaaggggaucuacaacgucgcgaccugcggccuguucgggcugguguccuuccuccugcugugcggccgcagcugcuccacgaccuacaaggggguguacgagcuccagacccuggagcuggacauggccagccucaacaugaccaugccgcuguccugcacgaagaacaacagccaccacuacaucauggucggcaacgagaccggccuggagcucacccugaccaacacguccaucaucaaccacaaguucugcaaccugagcgacgcccacaagaaggaccucuacgaccacgcccugauguccaucaucagcaccuuccaccuguccauccccaacuucaaccaguacgaggccaugagcugcgacuucaacgggggcaagaucuccgugcaguacaaccucagccacaccuacgcgguggacgccgccaaccacugcgggaccaucgccaacggcguccugcagacguucaugcggauggcguggggcggguccuacaucgcccuggacagcggcaagggguccugggacugcaucaugaccagcuaccaguaccucaucauccagaacaccaccugggaggaccacugccaguucucccgccccagccccaucggcuaccuggggcugcucagccagcggacgcgcgacaucuacaucucccggcgccggcgcggcaccuucaccuggacccugagcgacuccgagggcaacgagacgcccgggggcuacugccugacccgguggaugcucaucgaggccgagcugaagugcuucgggaacaccgccguggccaagugcaacgagaagcacgacgaggaguucugcgacaugcugcgccucuucgacuucaacaagcaggcgauccggcgccugaagaccccggcccagaugagcauccagcugaucaacaaggccgugaacgcccucaucaacgaccagcugaucaugaagaaccaccuccgggacaucaugggcauccccuacugcaacuacuccaaguacugcuaccugaaccacacggucaccgggaagaccagccugccccgcugcugccugguguccaacggcagcuaccucaacgagacccacuucuccgacgacaucgagcagcaggccgacaacaugaucacggagcugcugcagaaggaguacauggaccggcagggcaagaccccgcucgggcugguggaccuguucgucuucagcaccuccuucuaccugaucagcaucuuccuccaccugaucaagauccccacccaccgccacaucacgggcaagcccugccccaagccgcaccggcugaaccacauggggaucugcuccugcggccucuacaagcaccccggggugcccgugaaguggaagcgcugaggacuagucccuguucccagagcccacuuuuuuuucuuuuuuugaaauaaaauagccugucuuucagaucuaaaaaaaaaaaaaaaaaaaaaaaaaaaaaaaaaaaaaaaaaaaaaaaaaaaaaaaaaaaaaaaaaaaaaaaaaaaaaaaaaaaaaaaaaaaaaaaaaaaa

SEQ ID NO: 25112 - RNA, 1721 nt, Artificial Sequence
  mRNA product Design a-1 (A100) comprising derived and/or modified sequence from LASV(LASV253-NIG-2011;Clade II)__AIT17670__GPCmut3 (opt1)
aggagagucccgcagucggcguccagcggcucugcuuguucgugugugugucguugcaggccuuauucaagcuuaccaugggccagaucaucaccuucuuccaggaggugccccacgucaucgaggaggugaugaacaucgugcugaucgcccucagccugcuggccauccucaaggggaucuacaacgucgcgaccugcggccuguucgggcugguguccuuccuccugcugugcggccgcagcugcuccacgaccuacaaggggguguacgagcuccagacccuggagcuggacauggccagccucaacaugaccaugccgcuguccugcacgaagaacaacagccaccacuacaucauggucggcaacgagaccggccuggagcucacccugaccaacacguccaucaucaaccacaaguucugcaaccugagcgacgcccacaagaagaaccucuacgaccacgcccugauguccaucaucagcaccuuccaccuguccauccccaacuucaaccaguacgaggccaugagcugcgacuucaacgggggcaagaucuccgugcaguacaaccucagccacaccuacgcgguggacgccgccaaccacugcgggaccaucgccaacggcguccugcagacguucaugcggauggcguggggcggguccuacaucgcccuggacagcggcaagggguccugggacugcaucaugaccagcuaccaguaccucaucauccagaacaccaccugggaggaccacugccaguucucccgccccagccccaucggcuaccuggggcugcucagccagcggacgcgcgacaucuacaucucccggcgccggcgcggcaccuucaccuggacccugagcgacuccgagggcaacgagacgcccgggggcuacugccugacccgguggaugcucaucgaggccgagcugaagugcuucgggaacaccgccguggccaagugcaacgagaagcacgacgaggaguucugcgacaugcugcgccucuucgacuucaacaagcaggcgauccggcgccugaaggccccggcccagaugagcauccagcugaucaacaaggccgugaacgcccucaucaacgaccagcugaucaugaagaaccaccuccgggacaucaugggcauccccuacugcaacuacuccaaguacugcuaccugaaccacaccgucacggggcgcaccagccugccccggugcugccugguguccaacggcagcuaccucaacgagacccacuucuccgacgacaucgagcagcaggcggacaacaugaucaccgagcugcugcagaaggaguacaucgaccgccagggcaagacgccgcucgggcugguggaccuguucgucuucagcaccuccuucuaccugaucagcaucuuccuccaccuggugaagauccccacccaccggcacaucaucggcaagcccugccccaagccgcaccgccugaaccacauggggaucugcuccugcggccucuacaagcaccccggggugcccgucaaguggaagcggugaggacuagucccuguucccagagcccacuuuuuuuucuuuuuuugaaauaaaauagccugucuuucagaucuaaaaaaaaaaaaaaaaaaaaaaaaaaaaaaaaaaaaaaaaaaaaaaaaaaaaaaaaaaaaaaaaaaaaaaaaaaaaaaaaaaaaaaaaaaaaaaaaaaaa

SEQ ID NO: 25113 - RNA, 1721 nt, Artificial Sequence
  mRNA product Design a-1 (A100) comprising derived and/or modified sequence from LASV(LASV254-NIG-2011;Clade II)__AIT17674__GPCmut3 (opt1)
aggagagucccgcagucggcguccagcggcucugcuuguucgugugugugucguugcaggccuuauucaagcuuaccaugggccagaucaucaccuucuuccaggaggugccccacgucaucgaggaggugaugaacaucgugcugaucgcccucagccugcuggccauccucaaggggaucuacaacgucgcgaccugcggccuguucgggcugguguccuuccuccugcugugcggccgcagcugcuccacgaccuacaaggggguguacgagcuccagacccuggagcuggacaugaccaaccucaacaugacgaugccgcugagcugcaccaagaacaacucccaccacuacaucauggucggcaacgagaccggccuggagcucacccugacgaacaccagcaucaucaaccacaaguucugcaaccuguccgacgcccacaagaagaaccucuacaaccacgcccugaugagcaucaucuccaccuuccaccugagcauccccaacuucaaccaguacgaggccauguccugcgacuucaacgggggcaagaucagcgugcaguacaaccucucccacagcuacgccguggacgcggccaaccacugcgggaccaucgccaacggcguccugcagacguucaugcggauggccuggggcggguccuacaucgcgcuggacagcggcaaggggaacugggacugcaucaugaccuccuaccaguaccucaucauccagaacaccaccugggaggaccacugccaguucagccgccccucccccaucggcuaccuggggcugcucagccagcggacgcgcgacaucuacaucagccggcgccggcgcggcaccuucaccuggacccuguccgacagcgagggcaacgagacgcccgggggcuacugccugacccgguggaugcucaucgaggccgagcugaagugcuucgggaacaccgccguggccaagugcaacgagaagcacgacgaggaguucugcgacaugcugcgccucuucgacuucaacaagcaggccauccggcgccugaagaccccggcgcaggccaacauccagcugaucaacaaggccgugaacgcccucaucaacgaccagcugaucaugaagaaccaccuccgggacaucaugggcauccccuacugcaacuacuccaaguacugcuaccugaaccacacggucaccgggaagaccagccugccccgcugcugccugguguccaacggcagcuaccucaacgagacccacuucuccgacgacaucgagcagcaggccgacaacaugaucacggagcugcugcagaaggaguacauggaccggcagggcaagaccccgcucgggcugguggaccuguucgucuucagcaccuccuucuaccugaucagcaucuuccuccaccuggugaagauccccacccaccgccacgugaucggcaagcccugccccaagccgcaccggcugaaccacauggggaucugcuccugcggccucuacaagcaccccgggguccccgugaaguggaagcgcugaggacuagucccuguucccagagcccacuuuuuuuucuuuuuuugaaauaaaauagccugucuuucagaucuaaaaaaaaaaaaaaaaaaaaaaaaaaaaaaaaaaaaaaaaaaaaaaaaaaaaaaaaaaaaaaaaaaaaaaaaaaaaaaaaaaaaaaaaaaaaaaaaaaaa

SEQ ID NO: 25114 - RNA, 1721 nt, Artificial Sequence
  mRNA product Design a-1 (A100) comprising derived and/or modified sequence from LASV(Nig08-A19;Clade III)__ADU56618__GPCmut3 (opt1)
aggagagucccgcagucggcguccagcggcucugcuuguucgugugugugucguugcaggccuuauucaagcuuaccaugggccagaucgugaccuucuuccaggaggucccccacgugaucgaggaggugaugaacaucguccugaucgcccucagcauccuggccauccugaaggggcucuacaacaucgcgaccugcggccugaucgggcuggugacguuccuccugcuguccggccgcagcugcuccaugaccuacaaggggguguacgagcuccagacccuggagcugaacaugaacacccucaacaugacgaugccgcugagcugcaccaagaacaacucccaccacuacaucauggucggcaacgagaccggccuggagcucacccugacgaacaccagccugcuccaccacaaguucugcaaccuguccgacgcccacaagaagaaccuguacgaccacacccucaugagcaucaucuccaccuuccaccugagcauccccaacuucaaccaguacgaggccauguccugcgacuucaacgggggcaagaucacggugcaguacaaccugagccacuccuacgccaucgacgccgcgaaccacugcgggaccguggccaacggcguccuccagaccuucaugcggauggccuggggcgggagcuacaucgcccuggacuccggccgcgggaagugggacugcaucaugaccagcuaccaguaccugaucauccagaacacgaccugggaggaccacugccaguucucccggcccagccccaucggcuaccucgggcugcugucccagcgcacccgggacaucuacaucagccgccggcgccggggcaccuucacguggacccucagcgacuccgagggcaacgagacccccgggggcuacugccugacccgcuggaugcugaucgaggcggagcucaagugcuucgggaacacggccguggccaagugcaacgagaagcacgacgaggaguucugcgacaugcugcggcuguucgacuucaacaagcaggccauccgccggcucaaggccccggcgcagaugagcauccagcugaucaacaaggccgugaacgcccugaucaacgaccagcucaucaugaagaaccaccuccgcgacaucaugggcauccccuacugcaacuacuccaaguacugcuaccugaaccacaccagcaccgggcggaccucccugccccgcugcugccuggucagcaacggcuccuaccugaacgagacgcacuucagcgacgacaucgagcagcaggccgacaacaugaucaccgagaugcuccagaaggaguaccuggaccggcagggcaagaccccgcuggggcugguggaccucuucguguucuccaccagcuucuaccugaucuccaucuuccugcaccucgucaagauccccacgcaccgccacaucgugggcaagcccugccccaagccgcaccggcugaaccacauggggaucugcagcugcggccuguacaagcagcccggggugcccguccgcuggaagcggugaggacuagucccuguucccagagcccacuuuuuuuucuuuuuuugaaauaaaauagccugucuuucagaucuaaaaaaaaaaaaaaaaaaaaaaaaaaaaaaaaaaaaaaaaaaaaaaaaaaaaaaaaaaaaaaaaaaaaaaaaaaaaaaaaaaaaaaaaaaaaaaaaaaaa

SEQ ID NO: 25115 - RNA, 1724 nt, Artificial Sequence
  mRNA product Design a-1 (A100) comprising derived and/or modified sequence from LASV(G1180-SLE-2010;Clade IV)__AIT17168__GPCmut3 (opt1)
aggagagucccgcagucggcguccagcggcucugcuuguucgugugugugucguugcaggccuuauucaagcuuaccaugggccagaucgugaccuucuuccaggaggucccccacgugaucgaggaggugaugaacaucguccugaucgcccucagcauccuggccgugcugaaggggcucuacaacuucgcgaccugcggccugguggggcugcucacguuccugcugcucugcggccgcuccugcaccgccagccgguacaagggggucuacgagcugcagacccuggagcucaacauggagacccugaacaugacgaugccgcuguccugcaccaagaacaacagccaccacuacaucauggugggcaacgagaccggccucgagcugacccugacgaacaccuccaucaucaaccacaaguucugcaaccucagcgacgcccacaagaagaaccuguacgaccacgcccugauguccaucaucagcaccuuccaccucuccauccccaacuucaaccaguacgaggccaugagcugcgacuucaacgggggcaagaucuccgugcaguacaaccugagccacuccuacgcgggggacgccgccaaccacugcggcaccgucgccaacggggugcugcagacguucaugcgcauggcguggggcggcagcuacaucgcccucgacuccgggcacggcagcugggacugcaucaugaccuccuaccaguaccugaucauccagaacaccaccugggaggaccacugccaguucagccggcccucccccaucggguaccugggccuccugagccagcgcacgcgggacaucuacaucagccgccggcgccggggcaccuucaccuggacccuguccgacagcgaggggaaggacacgccgggcggguacugccucacccgcuggaugcugaucgaggccgagcugaagugcuucggcaacaccgccguggccaagugcaacgagaagcacgacgaggaguucugcgacaugcuccggcuguucgacuucaacaagcaggcgauccagcgccugaaggcccccgcccagauguccauccagcucaucaacaaggccgucaacgcccugaucaacgaccagcugaucaugaagaaccaccuccgggacaucauggggauccccuacugcaacuacagcaaguacugcuaccugaaccacaccacgaccggcaagaccucccugcccaagugcugccucgugagcaacggcuccuaccugaacgagacccacuucagcgacgacaucgagcagcaggcggacaacaugaucacggagaugcugcagaaggaguacauggagcgccaggggaagaccccgcucggccugguggaccuguucgucuucuccaccagcuucuaccugaucuccaucuuccuccaccuggugaagauccccacccaccggcacaucgugggcaagagcugccccaagccccaccgccugaaccacauggggaucugcuccugcgggcucuacaagcagccgggcguccccgugaaguggaagcggugaggacuagucccuguucccagagcccacuuuuuuuucuuuuuuugaaauaaaauagccugucuuucagaucuaaaaaaaaaaaaaaaaaaaaaaaaaaaaaaaaaaaaaaaaaaaaaaaaaaaaaaaaaaaaaaaaaaaaaaaaaaaaaaaaaaaaaaaaaaaaaaaaaaaa

SEQ ID NO: 25116 - RNA, 1724 nt, Artificial Sequence
  mRNA product Design a-1 (A100) comprising derived and/or modified sequence from LASV(G1442-SLE-2011;Clade IV)__AIT17180__GPCmut3 (opt1)
aggagagucccgcagucggcguccagcggcucugcuuguucgugugugugucguugcaggccuuauucaagcuuaccaugggccagaucgugaccuucuuccaggaggucccccacgugaucgaggaggugaugaacaucguccugaucgcccucagcauccuggccgugcugaaggggcucuacaacguggcgaccugcggccugaucgggcuggucacguuccuccugcugugcggccgcuccugcaccaccacccucuacaaggggguguacgagcugcagacgcuggagcucaacauggagacccugaacaugaccaugccgcugagcugcaccaagaacaacucccaccacuacauccgggugggcaacgagacgggccucgagcugacccugaccaacaccagcaucaucaaccacaaguucugcaaccucuccgacgcccacaagaagaaccuguacgaccacgcccugaugagcaucaucuccacguuccaccucagcauccccaacuucaaccaguacgaggccauguccugcgacuucaacgggggcaagaucagcguccaguacaaccugucccacagcuacgccggggacgcggccaaccacugcggcaccguggccaacggggugcugcagaccuucaugcgcauggccuggggcggcuccuacaucgcgcucgacagcgggcggggcaacugggacugcaucaugaccuccuaccaguaccugaucauccagaacacgaccugggacgaccacugccaguucagccgccccucccccaucggguaccugggccuccugagccagcggacccgcgacgucuacaucucccggcgccggcgcggcaccuucacguggacccugagcgacagcgaggggaaggacaccccgggcggguacugccucacccgguggaugcugaucgaggccgagcugaagugcuucggcaacacggccguggccaagugcaacgagaagcacgacgaggaguucugcgacaugcuccgccuguucgacuucaacaagcaggccauccagcggcugaaggcgcccgcccagauguccauccagcucaucaacaaggccgugaacgcccugaucaacgaccagcugaucaugaagaaccaccuccgcgacaucauggggauccccuacugcaacuacagcaaguacugcuaccugaacaacaccgccaccggcaagaccucccugcccaagugcugccucaucagcaacggcuccuaccugaacgagacgcacuucagcgacgacaucgagcaggaggcggacaacaugaucaccgagaugcugcagaaggaguacauggagcggcaggggaagaccccgcucggccuggucgaccuguucguguucuccaccagcuucuaccugaucuccaucuuccuccaccuggugaagauccccacgcaccgccacaucgucggcaagagcugccccaagccccaccggcugaaccacauggggaucugcuccugcgggcucuacaagcagccgggcgugcccgugcgcuggaagcggugaggacuagucccuguucccagagcccacuuuuuuuucuuuuuuugaaauaaaauagccugucuuucagaucuaaaaaaaaaaaaaaaaaaaaaaaaaaaaaaaaaaaaaaaaaaaaaaaaaaaaaaaaaaaaaaaaaaaaaaaaaaaaaaaaaaaaaaaaaaaaaaaaaaaa

SEQ ID NO: 25117 - RNA, 1724 nt, Artificial Sequence
  mRNA product Design a-1 (A100) comprising derived and/or modified sequence from LASV(G3010-SLE-2013;Clade IV)__AIT17344__GPCmut3 (opt1)
aggagagucccgcagucggcguccagcggcucugcuuguucgugugugugucguugcaggccuuauucaagcuuaccaugggccagaucgugaccuucuuccaggaggucccccacgugaucgaggaggugaugaacaucguccugaucgcccucagcauccuggccgugcugaaggggcucuacaacuucgcgaccugcggccugguggggcuggucacguuccuccugcugugcggccgcuccugcaccaccagccucuacaaggggguguacgagcugcagacccuggagcucaacauggagacgcugaacaugaccaugccgcuguccugcaccaagaacaacagccaccacuacaucauggugggcaacgagaccggccucgagcugacgcugaccaacaccuccaucaucaaccacaaguucugcaaccucagcgacgcccacaagaagaaccuguacaaccacgcccugauguccaucaucagcaccuuccaccucuccauccccaacuucaaccaguacgaggccaugagcugcgacuucaacgggggcaagaucuccguccaguacaaccugagccacuccuacgccggggacgcggccagccacugcggcacgguggccaacggggugcugcagaccuucaugcggauggccuggggcggcuccuacaucgcgcucgacagcggguacggcaagugggacugcaucaugaccuccuaccaguaccugaucauccagaacaccacgugggaggaccacugccaguucagccgccccucccccaucggguaccugggccuccugagccagcggacccgcgacaucuacaucagccggcgccggcgcggcaccuucaccuggacgcuguccgacagcgaggggaaggacaccccgggcggguacugccucacccgguggaugcugaucgaggccgagcugaagugcuucggcaacaccgccgucgccaagugcaacgagaagcacgacgaggaguucugcgacaugcuccgccuguucgacuucaacaagcaggccauccagcggcugaagacgcccgcgcagauguccauccagcucaucaacaaggccgugaacgcccugaucaacgaccagcugaucaugaagaaccaccuccgcgacaucauggggauccccuacugcaacuacagcaaguacugcuaccugaaccacaccaccaccggcaagacgucccugcccaagugcugccucgugagcaacggcuccuaccugaacgagacccacuucagcgacgacaucgagcagcaggccgacaacaugaucaccgagaugcugcagaaggaguacauggagcggcaggggaagaccccgcucggccuggucgaccuguucguguucuccacgagcuucuaccugaucuccaucuuccuccaccuggugaagauccccacccaccgccacaucgucggcaagagcugccccaagccccaccggcugaaccacauggggaucugcuccugcgggcucuacaagcagccgggcgugcccgugcgcuggaagcggugaggacuagucccuguucccagagcccacuuuuuuuucuuuuuuugaaauaaaauagccugucuuucagaucuaaaaaaaaaaaaaaaaaaaaaaaaaaaaaaaaaaaaaaaaaaaaaaaaaaaaaaaaaaaaaaaaaaaaaaaaaaaaaaaaaaaaaaaaaaaaaaaaaaaa

SEQ ID NO: 25118 - RNA, 1724 nt, Artificial Sequence
  mRNA product Design a-1 (A100) comprising derived and/or modified sequence from LASV(G502-SLE-2009;Clade IV)__AIT17126__GPCmut3 (opt1)
aggagagucccgcagucggcguccagcggcucugcuuguucgugugugugucguugcaggccuuauucaagcuuaccaugggccagaucgugaccuucuuccaggaggucccccacgugaucgaggaggugaugaacaucguccugaucgcccucagcauccuggccgugcugaaggggcucuacaacuucgcgaccugcggccugguggggcugcucacguuccugcugcucugcggccgcuccugcaccaccgggcuguacaagggcgucuacgagcugcagacccucgagcugaacauggagacgcugaacaugaccaugccgcucagcugcaccaagaacaacucccaccacuacaucauggugggcaacgagaccgggcuggagcugacgcucaccaacaccagcaucaucaaccacaaguucugcaaccuguccgacgcccacaagaagaaccuguacgaccacgcccucaugagcaucaucuccaccuuccaccugagcauccccaacuucaaccaguacgaggccauguccugcgacuucaacggcgggaagaucagcgugcaguacaaccugucccacagcuacgccggcgacgcggccgaccacugcgggacggucgccaacggcgugcuccagaccuucaugcggauggccuggggcggguccuacaucgcgcuggacagcggccgcgggcggugggacugcaucaugaccuccuaccaguaccugaucauccagaacaccacgugggaggaccacugccaguucagccgccccucccccaucggcuaccucggccugcugagccagcggacccgcgacaucuacaucucccggcgccggcgcgggaccuucaccuggacgcucagcgacagcgagggcaaggacacccccgggggcuacugccugacccgguggaugcugaucgaggccgagcucaagugcuucgggaacaccgccguggccaagugcaacgagaagcacgacgaggaguucugcgacaugcugcgccuguucgacuucaacaagcaggccauccagcggcucaaggcgccggcccagauguccauccagcugaucaacaaggccgucaacgcccugaucaacgaccagcucgugaugaagaaccaccuccgcgacaucaugggcauccccuacugcaacuacagccgguacugcuaccugaaccacacgaccaccggccgcaccucccugcccaagugcugccuggugagcaacggguccuaccugaacgagacgcacuucagcgacgacaucgagcagcaggccgacaacaugaucaccgagaugcuccagaaggaguacauggagcggcagggcaagaccccgcuggggcuggucgaccuguucguguucuccaccagcuucuaccucaucuccaucuuccugcaccuggugaagauccccacgcaccgccacaucgucggcaagagcugccccaagccccaccggcucaaccacauggggaucugcuccugcggccuguacaagcagccgggcgugcccgugaaguggaagcgcugaggacuagucccuguucccagagcccacuuuuuuuucuuuuuuugaaauaaaauagccugucuuucagaucuaaaaaaaaaaaaaaaaaaaaaaaaaaaaaaaaaaaaaaaaaaaaaaaaaaaaaaaaaaaaaaaaaaaaaaaaaaaaaaaaaaaaaaaaaaaaaaaaaaaa

SEQ ID NO: 25119 - RNA, 1724 nt, Artificial Sequence
  mRNA product Design a-1 (A100) comprising derived and/or modified sequence from LASV(G733-SLE-2010;Clade IV)__AIT17154__GPCmut3 (opt1)
aggagagucccgcagucggcguccagcggcucugcuuguucgugugugugucguugcaggccuuauucaagcuuaccaugggccagaucgugaccuucuuccaggaggucccccacgugaucgaggaggugaugaacaucguccugaucgcccucagcauccuggccgugcugaaggggcucuacaacuucgcgaccugcggcaucguggggcuggucuccuuccugcuccugugcggccgcagcugcacgaccucccuguacaaggggguguacgagcuccagacccuggagcugaacauggagacccucaacaugacgaugccgcugagcugcaccaagaacaacucccaccacuacaucauggugggcaacgagaccggccuggagcucacccugacgaacaccagcaucaucaaccacaaguucugcaaccuguccgacgcccacaagaagaaccucuacgaccacgcccugaugagcaucaucuccaccuuccaccugagcauccccaacuucaaccaguacgaggccauguccugcgacuucaacgggggcaagaucagcguccaguacaaccucucccacagcuacgccggggacgcggccaaccacugcggcaccaucgccaacggggugcugcagacguucaugcggauggccuggggcggcuccuacaucgcgcuggacagcgggcgcgaccggugggacugcaucaugaccuccuaccaguaccucaucauccagaacaccaccugggaggaccacugccaguucagccgccccucccccaucggcuaccuggggcugcucagccagcggacgcgcgacaucuacaucagccggcgccggcgcggcaccuucaccuggacccuguccgacagcgagggcaaggacacgcccgggggcuacugccugacccgguggaugcucaucgaggccgagcugaagugcuucgggaacaccgccguggccaagugcaacgagaagcacgacgaggaguucugcgacaugcugcgccucuucgacuucaacaagcaggccauccagcggcugaaggcgccggcccagauguccauccagcugaucaacaaggccgucaacgcccucaucaacgaccagcugaucaugaagaaccaccuccgcgacaucaugggcauccccuacugcaacuacagcaaguacugcuaccugaaccacaccacgaccgggaagaccucccugcccaagugcugccuggugagcaacggcuccuaccucaacgagacccacuucagcgacgacaucgagcagcaggccgacaacaugaucacggagaugcugcagaaggaguacauggagcggcagggcaagaccccgcuggggcucguggaccuguucgucuucuccaccagcuucuaccugaucuccaucuuccugcaccucgugaagauccccacccaccgccacguggucggcaagagcugccccaagccccaccggcugaaccacauggggaucugcuccugcggccuguacgggcagccgggcgugcccgugaaguggaagcgcugaggacuagucccuguucccagagcccacuuuuuuuucuuuuuuugaaauaaaauagccugucuuucagaucuaaaaaaaaaaaaaaaaaaaaaaaaaaaaaaaaaaaaaaaaaaaaaaaaaaaaaaaaaaaaaaaaaaaaaaaaaaaaaaaaaaaaaaaaaaaaaaaaaaaa

SEQ ID NO: 25120 - RNA, 1724 nt, Artificial Sequence
  mRNA product Design a-1 (A100) comprising derived and/or modified sequence from MOPV/LASV reassortant(IGS-1;Clade IV)__AFY05576__GPCmut3 (opt1)
aggagagucccgcagucggcguccagcggcucugcuuguucgugugugugucguugcaggccuuauucaagcuuaccaugggccagaucgugaccuucuuccaggaggucccccacgugaucgaggaggugaugaacaucguccugaucgcccucagcgugcuggccgugcugaaggggcucuacaacuucgcgaccugcggccuggucgggcuggugacguuccuccugcugugcggccgcuccugcaccaccagccucuacaaggggguguacgagcugcagacccuggagcucaacauggagacgcugaacaugaccaugccgcuguccugcaccaagaacaacagccaccacuacaucauggucggcaacgagaccggccucgagcugacgcugaccaacaccuccaucaucaaccacaaguucugcaaccucagcgacgcccacaagaagaaccuguacgaccacgcccugauguccaucaucagcaccuuccaccucuccauccccaacuucaaccaguacgaggccaugagcugcgacuucaacgggggcaagaucuccgugcaguacaaccugagccacuccuacgccggggacgcggccaaccacugcggcacgguggccaacgggguccugcagaccuucaugcggauggccuggggcggcagcuacaucgcgcucgacuccgggcgcggcaacugggacugcaucaugaccagcuaccaguaccugaucauccagaacaccacgugggaggaccacugccaguucucccggcccagccccaucggguaccugggccuccugucccagcgcacccgggacaucuacaucagccgccggcgccggggcaccuucaccuggacgcugagcgacuccgagggggaggacaccccgggcggguacugccucacccgcuggaugcugaucgaggccgagcugaagugcuucggcaacaccgccguggccaagugcaacgagaagcacgacgaggaguucugcgacaugcuccggcuguucgacuucaacaagcaggccauccagcgccugaaggcgcccgcccagaugagcauccagcucaucaacaaggccgugaacgcccugaucaacgaccagcugaucaugaagaaccaccuccgggacaucauggggauccccuacugcaacuacuccaaguacugcuaccugaaccacacgaccaccggccgcaccagccugcccaagugcugccucgucuccaacggcagcuaccugaacgagacgcacuucuccgacgacaucgagcagcaggccgacaacaugaucaccgagaugcugcagaaggaguacauggagcggcaggggaagaccccgcucggccugguggaccuguucguguucagcaccuccuucuaccugaucagcaucuuccuccaccuggucaagauccccacgcaccgccacaucguggggaaguccugccccaagccccaccggcugaaccacaugggcaucugcagcugcgggcucuacaagcagccgggcgugcccgucaaguggaagcgcugaggacuagucccuguucccagagcccacuuuuuuuucuuuuuuugaaauaaaauagccugucuuucagaucuaaaaaaaaaaaaaaaaaaaaaaaaaaaaaaaaaaaaaaaaaaaaaaaaaaaaaaaaaaaaaaaaaaaaaaaaaaaaaaaaaaaaaaaaaaaaaaaaaaaa

SEQ ID NO: 25121 - RNA, 1724 nt, Artificial Sequence
  mRNA product Design a-1 (A100) comprising derived and/or modified sequence from LASV(LM765-SLE-2012;Clade IV)__AIT17814__GPCmut3 (opt1)
aggagagucccgcagucggcguccagcggcucugcuuguucgugugugugucguugcaggccuuauucaagcuuaccaugggccagaucgugaccuucuuccaggaggucccccacgugaucgaggaggugaugaacaucguccugaucgcccucagcauccuggccgugcugaaggggcucuacaacuucgcgaccugcggccugguggggcuggucacguuccuccugcugugcggccgcuccugcaccaccagccucuacaaggggguguacgagcugcagacccuggagcucaacauggagacgcugaacaugaccaugccgcuguccugcaccaagaacaacagccaccacuacaucauggugggcaacgagaccggccucgagcugacgcugaccaacaccuccaucaucgaccacaaguucugcaaccucagcgacgcccaccggaagaaccuguacgaccacgcccugauguccaucaucagcaccuuccaccucuccauccccaacuucaaccaguacgaggccaugagcugcgacuucaacgggggcaagaucuccguccaguacaaccugagccacuccuacgccaaggacgcggccgaccacugcgggacgguggccaacggcgugcugcagaccuucaugcgcauggccuggggcgggagcuacaucgcgcucgacuccggccgggggcgcugggacugcaucaugaccagcuaccaguaccugaucauccagaacaccacgugggaggaccacugccaguucucccggcccagccccaucggcuaccuggggcuccugucccagcgcacccgggacaucuacaucagccgccggcgccggggcaccuucaccuggacgcugagcgacuccgagggcaaggacacccccgggggcuacugccucacccgcuggaugcugaucgaggccgagcugaagugcuucgggaacaccgccgucgccaagugcaacgagaagcacgacgaggaguucugcgacaugcuccggcuguucgacuucaacaagcaggccauccagcgccugaaggcgccggcccagaugagcauccagcucaucaacaaggccgugaacgcccugaucaacgaccagcugaucaugaagaaccaccuccgggacaucaugggcauccccuacugcaacuacuccaaguacugcuaccugaaccacacgaccaccgggaagaccagccugcccaagugcugccucguguccaacggcagcuaccugaacgagacgcacuucuccgacgacaucgagcagcaggccgacaacaugaucaccgagaugcugcagaaggaguacauggagcgccagggcaagaccccgcucgggcuggucgaccuguucguguucagcaccuccuucuaccugaucagcaucuuccuccaccuggugaagauccccacgcaccggcacaucgucggcaagcccugccccaagccgcaccgccugaaccacauggggaucugcuccugcggccucuacaagcagcccggggugcccgugaaguggaagcggugaggacuagucccuguucccagagcccacuuuuuuuucuuuuuuugaaauaaaauagccugucuuucagaucuaaaaaaaaaaaaaaaaaaaaaaaaaaaaaaaaaaaaaaaaaaaaaaaaaaaaaaaaaaaaaaaaaaaaaaaaaaaaaaaaaaaaaaaaaaaaaaaaaaaa

SEQ ID NO: 25122 - RNA, 1724 nt, Artificial Sequence
  mRNA product Design a-1 (A100) comprising derived and/or modified sequence from LASV(LM776-SLE-2012;Clade IV)__AIT17824__GPCmut3 (opt1)
aggagagucccgcagucggcguccagcggcucugcuuguucgugugugugucguugcaggccuuauucaagcuuaccaugggccagaucgugaccuucuuccaggaggucccccacgugaucgaggaggugaugaacaucguccugaucgcccucagcauccuggccgugcugaaggggcucuacaacuucgcgaccugcggccugguggggcuggucacguuccuccugcugugcggccgcuccugcaccaccagcguguacaaggggguguacgagcuccagacccuggagcugaacauggagacgcucaacaugaccaugccgcuguccugcaccaagaacaacagccaccacuacaucauggucggcaacgagaccggccuggagcucacgcugaccaacaccuccaucaucaaccacaaguucugcaaccugagcgacgcccacaagaagaaccucuacgaccacgcccugauguccaucaucagcaccuuccaccuguccauccccaacuucaaccaguacgaggccaugagcugcgacuucaacgggggcaagaucuccgugcaguacaaccucagccacuccuacgccggggacgcggccaaccacugcggcacgguggccaacgggguccugcagaccuucaugcggauggccuggggcggcagcuacaucgcgcuggacuccgggcacggcaagugggacugcaucaugaccagcuaccaguaccucaucauccagaacaccacgugggaggaccacugccaguucucccgccccagccccaucggguaccugggccugcucucccagcggacccgcgacaucuacaucagccggcgccggcgcggcaccuucaccuggacgcugagcgacuccgaggggaaggacaccccgggcggguacugccugacccgguggaugcucaucgaggccgagcugaagugcuucggcaacaccgccguggccaagugcaacgagaagcacgacgaggaguucugcgacaugcugcgccucuucgacuucaacaagcaggccauccagcggcugaaggcgcccgcccagaugagcauccagcugaucaacaaggccgugaacgcccucaucaacgaccagcugaucaugaagaaccaccuccgcgacaucauggggauccccuacugcaacuacuccaaguacugcuaccugaaccacacgaccaccggcaagaccagccugcccaagugcugccuggucuccaacggcagcuaccucaacgagacgcacuucuccgacgacaucgagcagcaggccgacaacaugaucaccgagaugcugcagaaggaguacauggagcggcaggggaagaccccgcugggccucguggaccuguucguguucagcaccuccuucuaccugaucagcaucuuccugcaccucgucaagauccccacgcaccgccacaucguggggaaguccugccccaagccccaccggcugaaccacaugggcaucugcagcugcgggcuguacaagcagccgggcgugcccguccgcuggaagcggugaggacuagucccuguucccagagcccacuuuuuuuucuuuuuuugaaauaaaauagccugucuuucagaucuaaaaaaaaaaaaaaaaaaaaaaaaaaaaaaaaaaaaaaaaaaaaaaaaaaaaaaaaaaaaaaaaaaaaaaaaaaaaaaaaaaaaaaaaaaaaaaaaaaaa

SEQ ID NO: 25123 - RNA, 1724 nt, Artificial Sequence
  mRNA product Design a-1 (A100) comprising derived and/or modified sequence from LASV(Mad39;Clade IV)__ANH09722__GPCmut3 (opt1)
aggagagucccgcagucggcguccagcggcucugcuuguucgugugugugucguugcaggccuuauucaagcuuaccaugggccagaucgugaccuucuuccaggaggucccccacgugaucgaggaggugaugaacaucguccugaucgcccucagcauccuggccgugcugaaggggcucuacaacguggcgaccugcggccugaucgggcuggucacguuccuccugcugugcggccgcuccugcaccaccacccucuacaaggggguguacgagcugcaggcccuggagcucaacauggagacgcugaacaugaccaugccgcugagcugcaccaagaacaacucccaccacuacauccgggugggcaacgagaccggccucgagcugacgcugaccaacaccagccucaucaaccacaaguucugcaaccuguccgacgcccacaagaagaaccuguacgaccacgcccucaugagcaucaucuccaccuuccaccugagcauccccaacuucaaccaguacgaggccauguccugcgacuucaacgacgggaagaucagcguccaguacaaccugucccacacguacgcgggcgacaccgccaaccacugcgggaccguggccaacggcgugcuccagaccuucaugcgcauggccuggggcgggagcuacaucgcgcuggacuccggccgcgggggcugggacugcaucaugacgagcuaccaguaccugaucauccagaacaccaccugggaggaccacugccaguucucccggcccagccccaucggguaccucggccugcugucccagcggacccgcgacaucuacaucagccggcgccggcgcggcacguucaccuggacccucuccgacagcgaggggaaggacaccccgggcggguacugccugacgcgguggaugcugaucgaggccgagcucaagugcuucggcaacaccgccgucgccaagugcaacgagaagcacgacgaggaguucugcgacaugcugcgccuguucgacuucaacaagcaggccauccagcggcucaaggcgcccgcccagaugagcauccagcugaucaacaaggccgugaacgcccugaucaacgaccagcucaucaugaagaaccaccuccgcgacaucauggggauccccuacugcaacuacuccaaguacugcuaccugaaccacaccgugaccggcaagacgagccugcccaagugcugccuggucuccaacggcagcuaccugaacgagacccacuucuccgacgacaucgagcagcaggccgacaacaugaucaccgagaugcuccagaaggaguacauggagcggcaggggaagaccccgcugggccugguggaccuguucguguucagcacguccuucuaccucaucagcaucuuccugcaccuggucaagauccccacccaccgccacgugguggggaagcccugccccaagccgcaccggcucaaccacaugggcaucugcuccugcggguucuacaagcagcccggcguccccgugcgcuggaagcggugaggacuagucccuguucccagagcccacuuuuuuuucuuuuuuugaaauaaaauagccugucuuucagaucuaaaaaaaaaaaaaaaaaaaaaaaaaaaaaaaaaaaaaaaaaaaaaaaaaaaaaaaaaaaaaaaaaaaaaaaaaaaaaaaaaaaaaaaaaaaaaaaaaaaa

SEQ ID NO: 25124 - RNA, 1724 nt, Artificial Sequence
  mRNA product Design a-1 (A100) comprising derived and/or modified sequence from LASV(Z0947-SLE-2011;Clade IV)__AIT17840__GPCmut3 (opt1)
aggagagucccgcagucggcguccagcggcucugcuuguucgugugugugucguugcaggccuuauucaagcuuaccaugggccagaucgugaccuucuuccaggaggucccccacgugaucgaggaggugaugaacaucguccugaucgcccucagcauccuggccgugcugaaggggcucuacaacuucgcgaccugcggccugguggggcuggucacguuccuccugcugugcggccgcuccugcaccaucagccucuacaaggggguguacgagcugcagacccuggagcucaacauggagacccugaacaugacgaugccgcuguccugcaccaagaacaacagccaccacuacaucauggugggcaacgagaccggccucgagcugacccugacgaacaccuccaucaucaaccacaaguucugcaaccucagcgacgcccacaagaagaaccuguacgaccacgcccugauguccaucaucagcaccuuccaccucuccauccccaacuucaaccaguacgaggccaugagcugcgacuucaacgggggcaagaucuccguccaguacaaccugagccacuccuacgccggggacgcggccaaccacugcggcaccguggccaacggggugcugcagacguucaugcggauggccuggggcggcagcuacaucgcgcucgacuccgggcgcgaccggugggacugcaucaugaccagcuaccaguaccugaucauccagaacaccaccugggaggaccacugccaguucucccgccccagccccaucggcuaccuggggcuccugucccagcggacgcgcgacaucuacaucagccggcgccggcgcggcaccuucaccuggacccugagcgacuccgagggcaaggacacgcccgggggcuacugccucacccgguggaugcugaucgaggccgagcugaagugcuucgggaacaccgccgucgccaagugcaacgagaagcacgacgaggaguucugcgacaugcuccgccuguucgacuucaacaagcaggccauccagcggcugaaggcgccggcccagaugagcauccagcucaucaacaaggccgugaacgcccugaucaacgaccagcugaucaugaagaaccaccuccgcgacaucaugggcauccccuacugcaacuacuccaaguacugcuaccugaaccacaccacgaccgggaagaccagccugcccaagugcugccucguguccaacggcagcuaccugaacgagacccacuucuccgacgacaucgagcagcaggccgacaacaugaucacggagaugcugcagaaggaguacauggagcggcagggcaagaccccgcucgggcuggucgaccuguucguguucagcaccuccuucuaccugaucagcaucuuccuccaccuggugaagauccccacccaccgccacaucgucggcaagcccugccccaagccgcaccggcugaaccacauggggaucugcuccugcggccucuacaagcagcccggggugcccgugaaguggaagcgcugaggacuagucccuguucccagagcccacuuuuuuuucuuuuuuugaaauaaaauagccugucuuucagaucuaaaaaaaaaaaaaaaaaaaaaaaaaaaaaaaaaaaaaaaaaaaaaaaaaaaaaaaaaaaaaaaaaaaaaaaaaaaaaaaaaaaaaaaaaaaaaaaaaaaa

SEQ ID NO: 25125 - RNA, 1724 nt, Artificial Sequence
  mRNA product Design a-1 (A100) comprising derived and/or modified sequence from LASV(Josiah;Clade IV)__NP_694870__GPCmut3 (opt4)
aggagagucccgcagucggcguccagcggcucugcuuguucgugugugugucguugcaggccuuauucaagcuuaccaugggccagaucgugaccuucuuccaggaggugccccacgugaucgaggaggugaugaacaucgugcugaucgcccugagcgugcuggccgugcugaagggccuguacaacuucgccaccugcggccuggugggccuggugaccuuccugcugcugugcggcagaagcugcaccaccagccuguacaagggcguguacgagcugcagacccuggagcugaacauggagacccugaacaugaccaugccccugagcugcaccaagaacaacagccaccacuacaucauggugggcaacgagaccggccuggagcugacccugaccaacaccagcaucaucaaccacaaguucugcaaccugagcgacgcccacaagaagaaccuguacgaccacgcccugaugagcaucaucagcaccuuccaccugagcauccccaacuucaaccaguacgaggccaugagcugcgacuucaacggcggcaagaucagcgugcaguacaaccugagccacagcuacgccggcgacgccgccaaccacugcggcaccguggccaacggcgugcugcagaccuucaugagaauggccuggggcggcagcuacaucgcccuggacagcggcagaggcaacugggacugcaucaugaccagcuaccaguaccugaucauccagaacaccaccugggaggaccacugccaguucagcagacccagccccaucggcuaccugggccugcugagccagagaaccagagacaucuacaucagcagaagaagaagaggcaccuucaccuggacccugagcgacagcgagggcaaggacacccccggcggcuacugccugaccagauggaugcugaucgaggccgagcugaagugcuucggcaacaccgccguggccaagugcaacgagaagcacgacgaggaguucugcgacaugcugagacuguucgacuucaacaagcaggccauccagagacugaaggcccccgcccagaugagcauccagcugaucaacaaggccgugaacgcccugaucaacgaccagcugaucaugaagaaccaccugagagacaucaugggcauccccuacugcaacuacagcaaguacugcuaccugaaccacaccaccaccggcagaaccagccugcccaagugcugccuggugagcaacggcagcuaccugaacgagacccacuucagcgacgacaucgagcagcaggccgacaacaugaucaccgagaugcugcagaaggaguacauggagagacagggcaagaccccccugggccugguggaccuguucguguucagcaccagcuucuaccugaucagcaucuuccugcaccuggugaagauccccacccacagacacaucgugggcaagagcugccccaagccccacagacugaaccacaugggcaucugcagcugcggccuguacaagcagcccggcgugcccgugaaguggaagagaugaggacuagucccuguucccagagcccacuuuuuuuucuuuuuuugaaauaaaauagccugucuuucagaucuaaaaaaaaaaaaaaaaaaaaaaaaaaaaaaaaaaaaaaaaaaaaaaaaaaaaaaaaaaaaaaaaaaaaaaaaaaaaaaaaaaaaaaaaaaaaaaaaaaaa

SEQ ID NO: 25126 - RNA, 1721 nt, Artificial Sequence
  mRNA product Design a-1 (A100) comprising derived and/or modified sequence from LASV(LP;Clade I)__AAF86701__GPCmut3 (opt4)
aggagagucccgcagucggcguccagcggcucugcuuguucgugugugugucguugcaggccuuauucaagcuuaccaugggccagaucaucaccuucuuccaggaggugccccacgugaucgaggaggugaugaacaucgugcugaucgcccugagccugcuggccauccugaagggccuguacaacaucgccaccugcggcaucaucggccugguggccuuccuguuccugugcggcaagagcugcagccugacccugaagggcggcuacgagcugcagacccuggagcugaacauggagacccugaacaugaccaugccccugagcugcaccaagaacagcagccaccacuacaucagagugggcaacgagaccggccuggagcugacccugaccaacaccagcaucaucaaccacaaguucugcaaccugagcgacgcccacaagaagaaccuguacgaccacgcccugaugagcaucaucagcaccuuccaccugagcauccccaacuucaaccaguacgaggccaugagcugcgacuucaacggcggcaagaucagcgugcaguacaaccugagccacagcuacgccggcgacgccgccgagcacugcggcaccguggccaacggcgugcugcagaccuucaugagaauggccuggggcggcagauacaucgcccuggacagcggcaagggcaacugggacugcaucaugaccagcuaccaguaccugaucauccagaacaccaccugggaggaccacugccaguucagcagacccagccccaucggcuaccugggccugcugagccagagaaccagagacaucuacaucagcagaagaagaagaggcaccuucaccuggacccugagcgacagcgagggcaacgagacccccggcggcuacugccugaccagauggaugcugaucgaggccgagcugaagugcuucggcaacaccgccguggccaagugcaacgagaagcacgacgaggaguucugcgacaugcugagacuguucgacuucaacaagcaggccaucagaagacugaaggcccccgcccagaugagcauccagcugaucaacaaggccgugaacgcccugaucaacgaccagcugaucaugaagaaccaccugagagacaucaugggcauccccuacugcaacuacagcaaguacugcuaccugaaccacaccagcagcggcagaaccagccugcccaagugcugccugaucagcaacggcagcuaccugaacgagacccaguucagcgacgacaucgagcagcaggccgacaacaugaucaccgagaugcugcagaaggaguacaucgagagacagggcaagaccccccugggccugguggacaucuucaucuucagcaccagcuucuaccugaucagcaucuuccugcaccugaucaagauccccacccacagacacaucgugggcaagcccugccccaagccccacagacugaaccacaugggcgugugcagcugcggccuguacaagcaccccggcgugcccaccaaguggaagagaugaggacuagucccuguucccagagcccacuuuuuuuucuuuuuuugaaauaaaauagccugucuuucagaucuaaaaaaaaaaaaaaaaaaaaaaaaaaaaaaaaaaaaaaaaaaaaaaaaaaaaaaaaaaaaaaaaaaaaaaaaaaaaaaaaaaaaaaaaaaaaaaaaaaaa

SEQ ID NO: 25127 - RNA, 1721 nt, Artificial Sequence
  mRNA product Design a-1 (A100) comprising derived and/or modified sequence from LASV(803213;Clade II)__AAF86703__GPCmut3 (opt4)
aggagagucccgcagucggcguccagcggcucugcuuguucgugugugugucguugcaggccuuauucaagcuuaccaugggccagaucaucaccuucuuccaggaggugccccacgugaucgaggaggugaugaacaucgugcugaucgcccugagccugcuggccauccugaagggcaucuacaacguggccaccugcggccuguucggccugaucagcuuccugcugcugugcggcagaagcugcagcgugaccuacaagggcguguacgagcugcagacccuggagcugaacauggccaaccugaacaugaccaugccccugagcugcaccaagaacaacagccaccacuacaucauggugggcaacgagaccggccuggagcugacccugaccaacaccagcaucaucaaccacaaguucugcaaccugagcgacgcccacaagaagaaccuguacgaccacgcccugaugagcaucaucagcaccuuccaccugagcauccccaacuucaaccaguacgaggccaugagcugcgacuucaacggcggcaagaucagcgugcaguacaaccugagccacagcuucgccguggacgccgccaaccacugcggcaccaucgccaacggcgugcugcagaccuucaugagaauggccuggggcggcagcuacaucgcccuggacagcggcaagggcaacugggacugcaucaugaccagcuaccaguaccugaucauccagaacaccaccugggaggaccacugccaguucagcagacccagccccaucggcuaccugggccugcugagccagagaaccagagacaucuacaucagcagaagaagaagaggcaccuucaccuggacccugagcgacagcgagggcaacgaggcccccggcggcuacugccugaccagauggaugcugaucgaggccgagcugaagugcuucggcaacaccgccguggccaagugcaacgagaagcacgacgaggaguucugcgacaugcugagacuguucgacuucaacaagcaggccaucaagagacugaagacccccgcccagaugagcauccagcugaucaacaaggccgugaacgcccugaucaacgaccagcugaucaugaagaaccaccugagagacaucaugggcauccccuacugcaacuacagcagauacugcuaccugaaccacaccgugaccggcaagaccagccugcccagaugcugccuggugagcaacggcagcuaccugaacgagacccacuucagcgacgacaucgagcagcaggccgacaacaugaucaccgagaugcugcagaaggaguacauggacagacagggcaagaccccccugggccugguggaccuguucguguucagcaccagcuucuaccugaucagcaucuuccugcaccuggugaagauccccacccacagacacaucgugggcaagcccugccccaagccccacagacugaaccacaugggcaucugcagcugcggccuguacaagcaccccggcgugcccgugaaguggaagagaugaggacuagucccuguucccagagcccacuuuuuuuucuuuuuuugaaauaaaauagccugucuuucagaucuaaaaaaaaaaaaaaaaaaaaaaaaaaaaaaaaaaaaaaaaaaaaaaaaaaaaaaaaaaaaaaaaaaaaaaaaaaaaaaaaaaaaaaaaaaaaaaaaaaaa

SEQ ID NO: 25128 - RNA, 1721 nt, Artificial Sequence
  mRNA product Design a-1 (A100) comprising derived and/or modified sequence from LASV(GA391;Clade III)__CAA36645__GPCmut3 (opt4)
aggagagucccgcagucggcguccagcggcucugcuuguucgugugugugucguugcaggccuuauucaagcuuaccaugggccagaucgugaccuucuuccaggaggugccccacgugaucgaggaggugaugaacaucgugcugaucgcccugagcauccuggccauccugaagggccuguacaacguggccaccugcggccugaucggccuggugaccuuccugcugcugagcggcagaagcugcagccugaucuacaagggcaccuacgagcugcagacccuggagcugaacauggagacccugaacaugaccaugccccugagcugcaccaagaacaacagccaccacuacaucagagugggcaacgagaccggccuggagcugacccugaccaacaccagcauccugaaccacaaguucugcaaccugagcgacgcccacaagagaaaccuguacgaccacagccugaugagcaucaucagcaccuuccaccugagcauccccaacuucaaccaguacgaggccaugagcugcgacuucaacggcggcaagaucaccgugcaguacaaccugagccacagcuucgccguggacgccgccggccacugcggcacccuggccaacggcgugcugcagaccuucaugagaauggccuggggcggcagcuacaucgcccuggacagcggcagaggcaacugggacugcaucaugaccagcuaccaguaccugaucauccagaacaccaccugggacgaccacugccaguucagcagacccagccccaucggcuaccugggccugcugagccagagaaccagagacaucuacaucagcagaagaagaagaggcaccuucaccuggacccugagcgacagcgagggcaacgagacccccggcggcuacugccugaccagauggaugcugaucgaggccgagcugaagugcuucggcaacaccgccguggccaagugcaacgagaagcacgacgaggaguucugcgacaugcugagacuguucgacuucaacaagcaggccaucagaagacugaagacccccgcccagaugagcauccagcugaucaacaaggccgugaacgcccugaucaacgaccagcugaucaugaagaaccaccugagagacaucaugggcauccccuacugcaacuacagcagauacugcuaccugaaccacaccagcaccggcaagaccagccugcccagaugcugccugaucagcaacggcagcuaccugaacgagaccaaguucagcgacgacaucgagcagcaggccgacaacaugaucaccgagaugcugcagaaggaguacaucgacagacagggcaagaccccccugggccugguggaccuguucguguucagcaccagcuucuaccugaucagcaucuuccugcaccuggugaagauccccacccacagacacaucgugggcaagcccugccccaagccccacagacugaaccacaugggcaucugcagcugcggccuguacaagcagcccggcgugcccgugagauggaagagaugaggacuagucccuguucccagagcccacuuuuuuuucuuuuuuugaaauaaaauagccugucuuucagaucuaaaaaaaaaaaaaaaaaaaaaaaaaaaaaaaaaaaaaaaaaaaaaaaaaaaaaaaaaaaaaaaaaaaaaaaaaaaaaaaaaaaaaaaaaaaaaaaaaaaa

SEQ ID NO: 25129 - RNA, 1724 nt, Artificial Sequence
  mRNA product Design a-1 (A100) comprising derived and/or modified sequence from LASV(AV;Clade V)__CCA30314__GPCmut3 (opt4)
aggagagucccgcagucggcguccagcggcucugcuuguucgugugugugucguugcaggccuuauucaagcuuaccaugggccagaucgugaccuucuuccaggaggugccccacgugaucgaggaggugaugaacaucgugcugaucgcccugagcauccuggccgugcugaagggccuguacaacaucgccaccugcggccugaucggccugaucaccuuccugcugcugugcggcagaagcugcagcagcaaccuguacaagggcguguacgagcugcagagccuggaccugaacauggagacccugaacaugaccaugccccugagcugcaccaagaacaacagccaccacuacaucagagugggcaacgacaccggccuggagcugacccugaccaacaccagcauccugaaccacaaguucugcaaccugagcgacgcccacaagaaggaccuguacgaccacgcccugaugagcaucaucagcaccuuccaccugagcauccccaacuucaaccaguacgaggccaugagcugcgacuucaacggcggcaagaucagcgugcaguacaaccugagccacagcuacgccaucgacgccgccaaccacugcggcaccguggccaacggcauccugcagaccuucaugagaauggccuggggcggcagcuacaucgcccuggacagcggcagaggcaacugggacugcaucaugaccagcuaccaguaccugaucauccagaacaccaccugggagaaccacugccaguucagcagacccagccccaucggcuaccugggccugcugagccagagaaccagagacaucuacaucagcagaagaagaagaggcaccuucaccuggacccugagcgacagcgagggcaacgccacccccggcggcuacugccugaccagauggaugcugaucgaggccgagcugaagugcuucggcaacaccgccguggccaagugcaacgagaagcacgacgaggaguucugcgacaugcugagacuguucgacuucaacaagcaggccaucagcagacugaagagccccgcccagaugagcauccagcugaucaacaaggccgugaacgcccugaucaacgaccagcugaucaugaagaaccaccugagagacaucaugggcauccccuacugcaacuacagcaaguacugcuaccugaaccacaccaucaccggcaagaccagccugcccaagugcugccuggugagcaacggcagcuaccugaacgagacccacuucagcgacgacaucgagcagcaggccgacaacaugaucaccgagaugcugcagaaggaguacauggagagacagggcaagaccccccugggccugguggaccuguucguguucagcaccagcuucuaccugaucagcaucuuccugagacuggugaagauccccacccacagacacaucgugggcaagcccugccccaagccccacagacugaaccacaugggcaucugcagcugcggccuguacaagcagcccggcgugcccgugagauggaagagaugaggacuagucccuguucccagagcccacuuuuuuuucuuuuuuugaaauaaaauagccugucuuucagaucuaaaaaaaaaaaaaaaaaaaaaaaaaaaaaaaaaaaaaaaaaaaaaaaaaaaaaaaaaaaaaaaaaaaaaaaaaaaaaaaaaaaaaaaaaaaaaaaaaaaa

SEQ ID NO: 25130 - RNA, 1721 nt, Artificial Sequence
  mRNA product Design a-1 (A100) comprising derived and/or modified sequence from LASV(Togo/2016/7082;Clade VI)__AMR44577__GPCmut3 (opt4)
aggagagucccgcagucggcguccagcggcucugcuuguucgugugugugucguugcaggccuuauucaagcuuaccaugggccagaucaucaccuucuuccaggaggugccccacgugaucgaggaggugaugaacaucgugcugaucgcccugagccugcuggccauccugaagggcguguacaacguggccaccugcggcaucaucggccuggugaccuuccuguuccugugcggcagaagcugcagccugaucuacaagggcagcuacgagcugcagacccuggagcugaacauggagacccugaacaugaccaugccccugagcugcaccaagaacagcagccaccacuacaucagagugggcaacgagaccggccuggagcugacccugaccaacaccagcaucaucaaccacaaguucugcaaccugagcgacgcccacaagagaaaccuguacgaccacgcccugaugagcauccugagcaccuuccaccugagcauccccaacuucaaccaguacgaggccaugagcugcgacuucaacggcggcaagaucagcgugcaguacaaccugagccacgccuacgccguggacgccgccgagcacugcggcaccguggccaacggcgugcugcagaccuucaugagaauggccuggggcggcagcuacaucgcccuggacagcggcagaggcaacugggacugcaucaugaccagcuaccaguaccugaucauccagaacaccaccugggaggaccacugccaguucagcagacccagccccaucggcuaccugggccugcugagccagagaaccagagacaucuacaucagcagaagaagaagaggcaccuucaccuggacccugagcgacagcgagggcaacgagacccccggcggcuacugccugaccagauggaugcugaucgaggccgagcugaagugcuucggcaacaccgccguggccaagugcaacgagaagcacgacgaggaguucugcgacaugcugagacuguucgacuucaacaagcaggccauccagagacugaagagccccgcccagaugagcauccagcugaucaacaaggccgugaacgcccugaucaacgaccagcugaucaugaagaaccaccugagagacaugaugggcauccccuacugcaacuacagcaaguacugcuaccugaaccacaccagcagcggcagaaccagccugcccaagugcugccuggugagcaacggcagcuaccugaacgagacccacuucagcgacgacaucgagcagcaggccgacaacaugaucaccgagaugcugcagaaggaguacaucgacagacagggcaagaccccccugggccugguggaccuguucguguucagcaccagcuucuaccugaucagcaucuuccugcaccugaucaagauccccacccacagacacaucgugggcaagcccugccccaagccccacagacugaaccacaugggcaucugcagcugcggccuguacaagcagcccggcgugcccaccagauggaagagaugaggacuagucccuguucccagagcccacuuuuuuuucuuuuuuugaaauaaaauagccugucuuucagaucuaaaaaaaaaaaaaaaaaaaaaaaaaaaaaaaaaaaaaaaaaaaaaaaaaaaaaaaaaaaaaaaaaaaaaaaaaaaaaaaaaaaaaaaaaaaaaaaaaaaa

SEQ ID NO: 25131 - RNA, 1721 nt, Artificial Sequence
  mRNA product Design a-1 (A100) comprising derived and/or modified sequence from LASV(KAK-428;Clade n.d. (VII))__ANH09740__GPCmut3 (opt4)
aggagagucccgcagucggcguccagcggcucugcuuguucgugugugugucguugcaggccuuauucaagcuuaccaugggccagaucgugaccuucuuccaggaggugccccacgugaucgaggaggugaugaacaucgugcugaucgcccugagccugcuggccauccugaagggccuguacaacuucgccaccugcggcgugaucggccugaucaccuuccugcugcugugcggcagaagcugcagcgccaccuacaagggccaguacgagcugcagacccuggagcugaacauggagagccugaacaugaccaugccccugagcugcaccaagaacaacagccaccacuacaucagagccggcaacaacaccggccuggagcugacccugaccaacaccagcaucaucagccacaaguucugcaaccugagcgacgcccacaagaagaaccuguacgaccacacccugaugagcaucaucaccaccuuccaccugagcauccccaacuucaaccaguacgaggccaugagcugcgacuucaacggcggcaagaucagcauccaguacaaccugagccacagcuacgccggcgacgccgcccagcacugcggcaccguggccaacggcgugcugcagaccuucaugagaauggccuggggcggcagcuaccuggcccuggacagcggcagaagaggcugggacugcaucaucagcagcuaccaguaccugaucauccagaacaccaccugggacgaccacugccaguucagcagacccagccccaucggcuaccugggcuucgugagccagaagaccagagacaucuacaucagcagaagaagaagaggcaccuucaccuggacccugagcgacagcgagggccacgacaugcccggcggcuacugccugaccagauggaugcugaucgaggccgaccugaagugcuucggcaacaccgccguggccaagugcaacgagaagcacgacgaggaguucugcgacauguggagacuguucgacuucaacaagcaggccauccagagacugaaggcccccgcccagaugaacauccagcugaucaacaaggccgugaacgcccugaucaacgaccagcugaugaugaagaaccaccugagagacaucaugggcauccccuacugcaacuacagcaaguucugcuaccugaacaacaccaccaccggcagaaccagccugcccagaugcugccugaucagcaacggcagcuaccugaacgagacccacuucagcgacgacaucgagcagcaggccgacaacaugaucaccgagaugcugcagaaggaguacauggacagacagggcaagaccccccugggccugguggaccuguucguguucagcaccagcuucuaccugaucaccaucuuccugcaccuggugaagauccccacccacagacacaucgugggcaagcccugccccaagccccacagacugaaccacaugggcaucugcagcugcggccuguacaagcagcccggcgugcccgugagauggaagagaugaggacuagucccuguucccagagcccacuuuuuuuucuuuuuuugaaauaaaauagccugucuuucagaucuaaaaaaaaaaaaaaaaaaaaaaaaaaaaaaaaaaaaaaaaaaaaaaaaaaaaaaaaaaaaaaaaaaaaaaaaaaaaaaaaaaaaaaaaaaaaaaaaaaaa

SEQ ID NO: 25132 - RNA, 1721 nt, Artificial Sequence; identical to SEQ ID NO: 25126
  mRNA product Design a-1 (A100) comprising derived and/or modified sequence from LASV(Pinneo-NIG-1969;Clade I)__AIT17836__GPCmut3 (opt4)

SEQ ID NO: 25133 - RNA, 1721 nt, Artificial Sequence
  mRNA product Design a-1 (A100) comprising derived and/or modified sequence from LASV(ISTH0009-NIG-2011;Clade II)__AIT17404__GPCmut3 (opt4)
aggagagucccgcagucggcguccagcggcucugcuuguucgugugugugucguugcaggccuuauucaagcuuaccaugggccagaucaucaccuucuuccaggaggugccccacgugaucgaggaggugaugaacaucgugcugaucgcccugagccugcuggccauccugaagggcaucuacaacguggccaccugcggccuguucggccuggugagcuuccugcugcugugcggcagaagcugcagcaccaccuacaagggcguguacgagcugcagacccuggagcuggacauggccagccugaacaugaccaugccccugagcugcaccaagaacaacagccaccacuacaucauggugggcaacgagaccggccuggagcugacccugaccaacaccagcaucaucaaccacaaguucugcaaccugagcgacgcccacaagaagaaccuguacgaccacgcccugaugagcaucaucagcaccuuccaccugagcauccccaacuucaaccaguacgaggccaugagcugcgacuucaacggcggcaagaucagcgugcaguacaaccugagccacgccuacgccguggacgccgccaaccacugcggcaccaucgccaacggcgugcugcagaccuucaugagaauggccuggggcggcagcuacaucgcccuggacagcggcaagggcagcugggacugcaucaugaccagcuaccaguaccugaucauccagaacaccaccugggaggaccacugccaguucagcagacccagccccaucggcuaccugggccugcugagccagagaaccagagacaucuacaucagcagaagaagaagaggcaccuucaccuggacccugagcgacagcgagggcaacgagacccccggcggcuacugccugaccagauggaugcugaucgaggccgagcugaagugcuucggcaacaccgccguggccaagugcaacgagaagcacgacgaggaguucugcgacaugcugagacuguucgacuucaacaagcaggccaucagaagacugaagacccccgcccagaugagcauccagcugaucaacaaggccgugaacgcccugaucaacgaccagcugaucaugaagaaccaccugagagacaucaugggcauccccuacugcaacuacagcaaguacugcuaccugaaccacaccgugaccggcaagaccagccugcccagaugcugccuggugagcaacggcagcuaccugaacgagacccacuucagcgacgacaucgagcagcaggccgacaacaugaucaccgagcugcugcagaaggaguacauggacagacagggcaagaccccccugggccugguggaccuguucguguucagcaccagcuucuaccugaucagcaucuuccugcaccugaucaagauccccacccacagacacaucaccggcaagcccugccccaagccccacagacugaaccacaugggcaucugcagcugcggccuguacaagcaccccggcgugcccgugaaguggaagagaugaggacuagucccuguucccagagcccacuuuuuuuucuuuuuuugaaauaaaauagccugucuuucagaucuaaaaaaaaaaaaaaaaaaaaaaaaaaaaaaaaaaaaaaaaaaaaaaaaaaaaaaaaaaaaaaaaaaaaaaaaaaaaaaaaaaaaaaaaaaaaaaaaaaaa

SEQ ID NO: 25134 - RNA, 1721 nt, Artificial Sequence
  mRNA product Design a-1 (A100) comprising derived and/or modified sequence from LASV(ISTH2010-NIG-2012;Clade II)__AIT17482__GPCmut3 (opt4)
aggagagucccgcagucggcguccagcggcucugcuuguucgugugugugucguugcaggccuuauucaagcuuaccaugggccagaucaucaccuucuuccaggaggugccccacgugaucgaggaggugaugaacaucgugcugaucgcccugagccugcuggccauccugaagggcaucuacaacguggccaccugcggccuguucggccuggugagcuuccugcugcugugcggcagaagcugcagcaccaccuacaagggcguguacgagcugcagacccuggagcuggacauggccagccugaacaugaccaugccccugagcugcaccaagaacaacagccaccacuacaucauggugggcaacgagaccggccuggagcugacccugaccaacaccagcaucaucaaccacaaguucugcaaccugagcgacgcccacaagaagaaccuguacgaccacgcccugaugagcaucaucagcaccuuccaccugagcauccccaacuucaaccaguacgaggccaugagcugcgacuucaacggcggcaagaucagcgugcaguacaaccugagccacgccuacgccguggacgccgccaaccacugcggcaccaucgccaacggcgugcugcagaccuucaugagaauggccuggggcggcagcuacaucgcccuggacagcggcaagggcagcugggacugcaucaugaccagcuaccaguaccugaucauccagaacaucaccugggaggaccacugccaguucagcagacccagccccaucggcuaccugggccugcugagccagagaaccagagacaucuacaucagcagaagaagaagaggcaccuucaccuggacccugagcgacagcgagggcaacgagacccccggcggcuacugccugaccagauggaugcugaucgaggccgagcugaagugcuucggcaacaccgccguggccaagugcaacgagaagcacgacgaggaguucugcgacaugcugagacuguucgacuucaacaagcaggccaucagaagacugaagacccccgcccagaugagcauccagcugaucaacaaggccgugaacgcccugaucaacgaccagcugaucaugaagaaccaccugagagacaucaugggcauccccuacugcaacuacagcaaguacugcuaccugaaccacaccgugaccggcaagaccagccugcccagaugcugccuggugagcaacggcagcuaccugaacgagacccacuucagcgacgacaucgagcagcaggccgacaacaugaucaccgagcugcugcagaaggaguacaucgacagacagggcaagaccccccugggccugguggaccuguucguguucagcaccagcuucuaccugaucagcaucuuccugcaccuggugaagauccccacccacagacacguggugggcaagcccugccccaagccccacagacugaaccacaugggcaucugcagcugcggccuguacaagcaccccggcgugcccgugaaguggaagagaugaggacuagucccuguucccagagcccacuuuuuuuucuuuuuuugaaauaaaauagccugucuuucagaucuaaaaaaaaaaaaaaaaaaaaaaaaaaaaaaaaaaaaaaaaaaaaaaaaaaaaaaaaaaaaaaaaaaaaaaaaaaaaaaaaaaaaaaaaaaaaaaaaaaaa

SEQ ID NO: 25135 - RNA, 1721 nt, Artificial Sequence
  mRNA product Design a-1 (A100) comprising derived and/or modified sequence from LASV(Lassa virus/H.sapiens-wt/NGA/2015/ISTH_0543;Clade II)__AVO03639__GPCmut3 (opt4)
aggagagucccgcagucggcguccagcggcucugcuuguucgugugugugucguugcaggccuuauucaagcuuaccaugggccagaucaucaccuucuuccaggaggugccccacgugaucgaggaggugaugaacaucgugcugaucgcccugagccugcuggccauccugaagggcaucuacaacguggccaccugcggccuguucggccuggugagcuuccugcugcugugcggcagaagcugcagcaccaccuacaagggcguguacgagcugcagacccuggagcuggacauggccaaccugaacaugaccaugccccugagcugcaccaagaacaacagccaccacuacaucauggugggcaacgagaccggccuggagcugacccugaccaacaccagcaucaucaaccacaaguucugcaaccugagcgacgcccacaagaagaaccuguacgaccacgcccugaugagcaucaucagcaccuuccaccugagcauccccaacuucaaccaguacgaggccaugagcugcgacuucaacggcggcaagaucagcgugcaguacaaccugagccacaccuacgccguggacgccgccaaccacugcggcaccaucgccaacggcgugcugcagaccuucaugagaauggccuggggcggcagcuacaucgcccuggacagcggcaagggcagcugggacugcaucaugaccagcuaccaguaccuggugauccagaacaccaccugggaggaccacugccaguucagcagacccagccccaucggcuaccugggccugcugagccagagaaccagagacaucuacaucagcagaagaagaagaggcaccuucaccuggacccugagcgacagcgagggcaacgagacccccggcggcuacugccugaccagauggaugcugaucgaggccgagcugaagugcuucggcaacaccgccguggccaagugcaacgagaagcacgacgaggaguucugcgacaugcugagacuguucgacuucaacaagcaggccaucagaagacugaagacccccgcccagaugagcauccagcugaucaacaaggccgugaacgcccugaucaacgaccagcugaucaugaagaaccaccugagagacaucaugggcauccccuacugcaacuacagcaaguacugcuaccugaaccacaccgugaccggcaagaccagccugcccagaugcugccuggugagcaacggcagcuaccugaacgagacccacuucagcgacgacaucgagcagcaggccgacaacaugaucaccgagcugcugcagaaggaguacaucgacagacagggcaagaccccccugggccugguggaccuguucguguucagcaccagcuucuaccugaucagcaucuuccugcaccuggugaagauccccacccacagacacaucaccggcaagcccugccccaagccccacagacugaaccacaugggcaucugcagcugcggccuguacaagcaccccggcgugcccgugaaguggaagagaugaggacuagucccuguucccagagcccacuuuuuuuucuuuuuuugaaauaaaauagccugucuuucagaucuaaaaaaaaaaaaaaaaaaaaaaaaaaaaaaaaaaaaaaaaaaaaaaaaaaaaaaaaaaaaaaaaaaaaaaaaaaaaaaaaaaaaaaaaaaaaaaaaaaaa

SEQ ID NO: 25136 - RNA, 1721 nt, Artificial Sequence
  mRNA product Design a-1 (A100) comprising derived and/or modified sequence from LASV(Lassa virus/H.sapiens-wt/NGA/2016/ISTH_0009;Clade II)__AVO03571__GPCmut3 (opt4)
aggagagucccgcagucggcguccagcggcucugcuuguucgugugugugucguugcaggccuuauucaagcuuaccaugggccagaucaucaccuucuuccaggaggugccccacgugaucgaggaggugaugaacaucgugcugaucgcccugagccugcuggccauccugaagggcaucuacaacguggccaccugcggccugcugggccuggugagcuuccugcugcugugcggcagaagcugcagcaccaccuacaagggcguguacgagcugcagacccuggagcuggacauggccagccugaacaugaccaugccccugagcugcaccaagaacaacagccaccacuacaucauggugggcaacgagaccggccuggagcugacccugaccaacaccagcaucaucaaccacaaguucugcaaccugagcgacgcccacaagaagaaccuguacgaccacgcccugaugagcaucaucagcaccuuccaccugagcauccccaacuucaaccaguacgaggccaugagcugcgacuucaacggcggcagaaucagcgugcaguacaaccugagccacagcuacgccguggacgccgccaaccacugcggcaccaucgccaacggcgugcugcagaccuucaugagaauggccuggggcggcagcuacaucgcccuggacagcggcaagggcagcugggacugcaucaugaccagcuaccaguaccugaucauccagaacaccaccugggaggaccacugccaguucagcagacccagccccaucggcuaccugggccugcugagccagagaaccagagacaucuacaucagcagaagaagaagaggcaccuucaccuggacccugagcgacagcgagggcaacgagacccccggcggcuacugccugaccagauggaugcugaucgaggccgagcugaagugcuucggcaacaccgccguggccaagugcaacgagaagcacgacgaggaguucugcgacaugcugagacuguucgacuucaacaagcaggccaucagaagacugaagacccccgcccagaugagcauccagcugaucaacaaggccgugaacgcccugaucaacgaccagcugaucaugaagaaccaccugagagacaucaugggcauccccuacugcaacuacagcaaguacugcuaccugaaccacaccgugaccggcaagaccagccugcccagaugcugccuggugagcaacggcagcuaccugaacgagacccacuucagcgacgacaucgagcagcaggccgacaacaugaucaccgagcugcugcagaaggaguacaucgacagacagggcaagaccccccugggccugguggaccuguucguguucagcaccagcuucuaccugaucagcaucuuccugcaccuggugaagauccccacccacagacacaucaccggcaagcccugccccaagccccacagacugaaccacaugggcaucugcagcugcggccuguacaaccaccccggcgugcccgugaaguggaagagaugaggacuagucccuguucccagagcccacuuuuuuuucuuuuuuugaaauaaaauagccugucuuucagaucuaaaaaaaaaaaaaaaaaaaaaaaaaaaaaaaaaaaaaaaaaaaaaaaaaaaaaaaaaaaaaaaaaaaaaaaaaaaaaaaaaaaaaaaaaaaaaaaaaaaa

SEQ ID NO: 25137 - RNA, 1721 nt, Artificial Sequence
  mRNA product Design a-1 (A100) comprising derived and/or modified sequence from LASV(Lassa virus/H.sapiens-wt/NGA/2016/ISTH_0017;Clade II)__AVO03567__GPCmut3 (opt4)
aggagagucccgcagucggcguccagcggcucugcuuguucgugugugugucguugcaggccuuauucaagcuuaccaugggccagaucaucaccuucuuccaggaggugccccacgugaucgaggaggugaugaacaucgugcugaucgcccugagccugcuggccauccugaagggcaucuacaacguggccaccugcggccuguucggccuggugagcuuccugcugcugugcggcagaagcugcagcaccaccuacaagggcguguacgagcugcagacccuggagcuggacauggccagccugaacaugaccaugccccugagcugcaccaagaacaacagccaccacuacaucauggugggcaacgagaccggccuggagcugacccugaccaacaccagcaucaucaaccacaaguucugcaaccugagcgacgcccacaagaagaaccuguacgaccacgcccugaugagcaucaucagcaccuuccaccugagcauccccaacuucaaccaguacgaggccaugagcugcgacuucaacggcggcaagaucagcgugcaguacaaccugagccacaccuacgccaucgacgccgccaaccacugcggcaccaucgccaacggcgugcugcagaccuucaugagaauggccuggggcggcagcuacaucgcccuggacagcggcaagggcagcugggacugcaucaugaccagcuaccaguaccugaucauccagaacaccaccugggaggaccacugccaguucagcagacccagccccaucggcuaccugggccugcugagccagagaaccagagacaucuacaucagcagaagaagaagaggcaccuucaccuggacccugagcgacagcgagggcaacgagacccccggcggcuacugccugaccagauggaugcugaucgaggccgagcugaagugcuucggcaacaccgccguggccaagugcaacgagaagcacgacgaggaguucugcgacaugcugagacuguucgacuucaacaagcaggccaucagaagacugaagacccccgcccagaugagcauccagcugaucaacaaggccgugaacgcccugaucaacgaccagcugaucaugaagaaccaccugagagacaucaugggcauccccuacugcaacuacagcaaguacugcuaccugaaccacaccgugaccggcaagaccagccugcccagaugcugccuggugagcaacggcagcuaccugaacgagacccacuucagcgacgacaucgagcagcaggccgacaacaugaucaccgagcugcugcagaaggaguacauggacagacagggcaagaccccccugggccugguggaccuguucguguucagcaccagcuucuaccugaucagcaucuuccugcaccuggugagaauccccacccacagacacgugaucggcaagcccugccccaagccccacagacugaaccacaugggcaucugcagcugcggccuguacaagcaccccggcgugcccgugaaguggaagagaugaggacuagucccuguucccagagcccacuuuuuuuucuuuuuuugaaauaaaauagccugucuuucagaucuaaaaaaaaaaaaaaaaaaaaaaaaaaaaaaaaaaaaaaaaaaaaaaaaaaaaaaaaaaaaaaaaaaaaaaaaaaaaaaaaaaaaaaaaaaaaaaaaaaaa

SEQ ID NO: 25138 - RNA, 1721 nt, Artificial Sequence
  mRNA product Design a-1 (A100) comprising derived and/or modified sequence from LASV(Lassa virus/H.sapiens-wt/NGA/2018/ISTH_0959;Clade II)__AVV65099__GPCmut3 (opt4)
aggagagucccgcagucggcguccagcggcucugcuuguucgugugugugucguugcaggccuuauucaagcuuaccaugggccagaucaucaccuucuuccaggaggugccccacgugaucgaggaggugaugaacaucgugcugaucgcccugagccugcuggccauccugaagggcaucuacaacguggugaccugcggccuguucggccuggugagcuuccugcugcugugcggcagaagcugcagcaccaccuacaagggcguguacgagcugcagacccuggagcuggacauggccagccugaacaugaccaugccccugagcugcaccaagaacaacagccaccacuacaucauggugggcaacgagaccggccuggagcugacccugaccaacaccagcaucaucaaccacaaguucugcaaccugagcgacgcccacaagaagaaccuguacgaccacgcccugaugagcaucaucagcaccuuccaccugagcauccccaacuucaaccaguacgaggccaugagcugcgacuucaacggcggcaagaucagcgugcaguacaaccugagccacgccuacgccaucgacgccgccaaccacugcggcaccaucgccaacggcgugcugcagaccuucaugagaauggccuggggcggcagcuacaucgcccuggacagcggcaagggcagcugggacugcaucaugaccagcuaccaguaccugaucauccagaacaccaccugggaggaccacugccaguucagcagacccagccccaucggcuaccugggccugcugagccagagaaccagagacaucuacaucagcagaagaagaagaggcaccuucaccuggacccugagcgacagcgagggcaacgagacccccggcggcuacugccugaccagauggaugcugaucgaggccgagcugaagugcuucggcaacaccgccguggccaagugcaacgagaagcacgacgaggaguucugcgacaugcugagacuguucgacuucaacaagcaggccaucagaagacugaagacccccgcccagaugagcauccagcugaucaacaaggccgugaacgcccugaucaacgaccagcugaucaugaagaaccaccugagagacaucaugggcauccccuacugcaacuacagcaaguacugcuaccugaaccacaccgugaccggcaagaccagccugcccagaugcugccuggugagcaacggcagcuaccugaacgagacccacuucagcgacgacaucgagcagcaggccgacaacaugaucaccgagcugcugcagaaggaguacaucgacagacagggcaagaccccccugggccugguggaccuguucguguucagcaccagcuucuaccugaucagcaucuuccugcaccuggugaagauccccacccacagacacgugaucggcaagcccugccccaagccccacagacugaaccacaugggcaucugcagcugcggccuguacaagcaccccggcgugcccgugaaguggaagagaugaggacuagucccuguucccagagcccacuuuuuuuucuuuuuuugaaauaaaauagccugucuuucagaucuaaaaaaaaaaaaaaaaaaaaaaaaaaaaaaaaaaaaaaaaaaaaaaaaaaaaaaaaaaaaaaaaaaaaaaaaaaaaaaaaaaaaaaaaaaaaaaaaaaaa

SEQ ID NO: 25139 - RNA, 1721 nt, Artificial Sequence
  mRNA product Design a-1 (A100) comprising derived and/or modified sequence from LASV(LASV003-NIG-2008;Clade II)__AIT17580__GPCmut3 (opt4)
aggagagucccgcagucggcguccagcggcucugcuuguucgugugugugucguugcaggccuuauucaagcuuaccaugggccagaucaucaccuucuuccaggaggugccccacgugaucgaggaggugaugaacaucgugcugaucgcccugagccugcuggccauccugaagggcaucuacaacguggccaccugcggccuguucggccuggugagcuuccugcugcugugcggcagaagcugcagcaccaccuacaagggcguguacgagcugcagacccuggagcuggacauggccagccugaacaugaccaugccccugagcugcaccaagaacaacagccaccacuacaucauggugggcaacgagaccggccuggagcugacccugaccaacaccagcaucaucaaccacaaguucugcaaccugagcgacgcccacaagaagaaccuguacgaccacgcccugaugagcaucaucagcaccuuccaccugagcauccccaacuucaaccaguacgaggccaugagcugcgacuucaacggcggcaagaucagcgugcaguacaaccugagccacaccuacgccguggacgccgccaaccacugcggcaccaucgccaacggcgugcugcagaccuucaugagaauggccuggggcggcagcuacaucgcccuggacagcggcaagggcagcugggacugcaucaugaccagcuaccaguaccugaucauccagaacaccaccugggaggaccacugccaguucagcagacccagccccaucggcuaccugggccugcugagccagagaaccagagacaucuacaucagcagaagaagaagaggcaccuucaccuggacccugagcgacagcgagagcaacgagacccccggcggcuacugccugaccagauggaugcugaucgaggccgagcugaagugcuucggcaacaccgccguggccaagugcaacgagaagcacgacgaggaguucugcgacaugcugagacuguucgacuucaacaagcaggccaucagaagacugaaggcccccgcccagaugagcauccagcugaucaacaaggccgugaacgcccugaucaacgaccagcugaucaugaagaaccaccugagagacaucaugggcauccccuacugcaacuacagcaaguacugcuaccugaaccacaccgugaccggcagaaccagccugcccagaugcugccuggugagcaacggcagcuaccugaacgagacccacuucagcgacgacaucgagcagcaggccgacaacaugaucaccgagcugcugcagaaggaguacauggacagacagggcaagaccccccugggccugguggaccuguucguguucagcaccagcuucuaccugaucagcaucuuccugcaccuggugaagauccccacccacagacacgugaucggcaagcccugccccaagccccacagacugaaccacaugggcaucugcagcugcggccuguacaagcaccccggcgugcccgugaaguggaagagaugaggacuagucccuguucccagagcccacuuuuuuuucuuuuuuugaaauaaaauagccugucuuucagaucuaaaaaaaaaaaaaaaaaaaaaaaaaaaaaaaaaaaaaaaaaaaaaaaaaaaaaaaaaaaaaaaaaaaaaaaaaaaaaaaaaaaaaaaaaaaaaaaaaaaa

SEQ ID NO: 25140 - RNA, 1721 nt, Artificial Sequence
  mRNA product Design a-1 (A100) comprising derived and/or modified sequence from LASV(LASV035-NIG-2009;Clade II)__AIT17588__GPCmut3 (opt4)
aggagagucccgcagucggcguccagcggcucugcuuguucgugugugugucguugcaggccuuauucaagcuuaccaugggccagaucaucaccuucuuccaggaggugccccacgugaucgaggaggugaugaacaucgugcugaucgcccugagccugcuggccauccugaagggcaucuacaacguggccaccugcggccuguucggccuggugagcuuccugcugcugugcggcagaagcugcagcaccaccuacaagggcguguacgagcugcagacccuggagcuggacauggccagccugaacaugaccaugccccugagcugcaccaagaacaacagccaccacuacaucauggugggcaacgagaccggccuggagcugacccugaccaacaccagcaucaucaaccacaaguucugcaaccugagcgacgcccacaagaagaaccuguacgaccacgcccugaugagcaucaucagcaccuuccaccugagcauccccaacuucaaccaguacgaggccaugagcugcgacuucaacggcggcaagaucagcgugcaguacaaccugagccacgccuacgccguggacgccgccaaccacugcggcaccaucgccaacggcgugcugcagaccuucaugagaauggccuggggcggcagcuacaucgcccuggacagcggcaagggcagcugggacugcaucaugaccagcuaccaguaccugaucauccagaacaccaccugggaggaccacugccaguucagcagacccagccccaucggcuaccugggccugcugagccagagaaccagagacaucuacaucagcagaagaagaagaggcaccuucaccuggacccugagcgacagcgagggcaacgagacccccggcggcuacugccugaccagauggaugcugaucgaggccgagcugaagugcuucggcaacaccgccguggccaagugcaacgagaagcacgacgaggaguucugcgacaugcugagacuguucgacuucaacaagcaggccaucagaagacugaaggcccccgcccagaugagcauccagcugaucaacaaggccgugaacgcccugaucaacgaccagcugaucaugaagaaccaccugagagacaucaugggcauccccuacugcaacuacagcaaguacugcuaccugaaccacaccgugaccggcaagaccagccugcccagaugcugccuggugagcaacggcagcuaccugaacgagacccacuucagcgacgacaucgagcagcaggccgacaacaugaucaccgagcugcugcagaaggaguacaucgacagacagggcaagaccccccugggccugguggaccuguucguguucagcaccagcuucuaccugaucagcaucuuccugcaccuggugaagauccccacccacagacacgugaucggcaagcccugccccaagccccacagacugaaccacaugggcaucugcagcugcggccuguacaagcaccccggcgugcccgugaaguggaagagaugaggacuagucccuguucccagagcccacuuuuuuuucuuuuuuugaaauaaaauagccugucuuucagaucuaaaaaaaaaaaaaaaaaaaaaaaaaaaaaaaaaaaaaaaaaaaaaaaaaaaaaaaaaaaaaaaaaaaaaaaaaaaaaaaaaaaaaaaaaaaaaaaaaaaa

SEQ ID NO: 25141 - RNA, 1721 nt, Artificial Sequence
  mRNA product Design a-1 (A100) comprising derived and/or modified sequence from LASV(LASV1000-NIG-2009;Clade II)__AIT17782__GPCmut3 (opt4)
aggagagucccgcagucggcguccagcggcucugcuuguucgugugugugucguugcaggccuuauucaagcuuaccaugggccagaucaucaccuucuuccaggaggugccccacgugaucgaggaggugaugaacaucgugcugaucgcccugagccugcuggccauccugaagggcaucuacaacguggccaccugcggccuguucggccuggugagcuuccugcugcugugcggcagaagcugcagcaccaccuacaagggcguguacgagcugcagacccuggagcuggacauggccagccugaacaugaccaugccccugagcugcaccaagaacaacagccaccacuacaucauggugggcaacgagaccggccuggagcugacccugaccaacaccagcaucaucaaccacaaguucugcaaccugagcgacgcccacaagaagaaccuguacgaccacgcccugaugagcaucaucagcaccuuccaccugagcauccccaacuucaaccaguacgaggccaugagcugcgacuucaacggcggcaagaucagcgugcaguacaaccugagccacaccuacgccguggacgccgccaaccacugcggcaccaucgccaacggcgugcugcagaccuucaugagaauggccuggggcggcagcuacaucgcccuggacagcggcaagggcagcugggacugcaucaugaccagcuaccaguaccugaucauccagaacaccaccugggaggaccacugccaguucagcagacccagccccaucggcuaccugggccugcugagccagagaaccagagacaucuacaucagcagaagaagaagaggcaccuucaccuggacccugagcgacagcgagggcaacgagacccccggcggcuacugccugaccagauggaugcugaucgaggccgagcugaagugcuucggcaacaccgccguggccaagugcaacgagaagcacgacgaggaguucugcgacaugcugagacuguucgacuucaacaagcaggccaucaagagacugaagacccccgcccagaugagcauccagcugaucaacaaggccgugaacgcccugaucaacgaccagcugaucaugaagaaccaccugagagacaucaugggcauccccuacugcaacuacagcaaguacugcuaccugaaccacaccgugaccggcaagaccagccugcccagaugcugccuggugagcaacggcagcuaccugaacgagacccacuucagcgacgacaucgagcagcaggccgacaacaugaucaccgagcugcugcagaaggaguacaucgacagacagggcaagaccccccugggccugguggaccuguucguguucagcaccagcuucuaccugaucagcaucuuccugcaccuggugaagauccccacccacagacacguggugggcaagcccugccccaagccccacagacugaaccacaugggcaucugcagcugcggccuguacaagcaccccggcgugcccgugaaguggaagagaugaggacuagucccuguucccagagcccacuuuuuuuucuuuuuuugaaauaaaauagccugucuuucagaucuaaaaaaaaaaaaaaaaaaaaaaaaaaaaaaaaaaaaaaaaaaaaaaaaaaaaaaaaaaaaaaaaaaaaaaaaaaaaaaaaaaaaaaaaaaaaaaaaaaaa

SEQ ID NO: 25142 - RNA, 1721 nt, Artificial Sequence
  mRNA product Design a-1 (A100) comprising derived and/or modified sequence from LASV(LASV221-NIG-2010;Clade II)__AIT17624__GPCmut3 (opt4)
aggagagucccgcagucggcguccagcggcucugcuuguucgugugugugucguugcaggccuuauucaagcuuaccaugggccagaucaucaccuucuuccaggaggugccccacgugaucgaggaggugaugaacaucgugcugaucgcccugagccugcuggccauccugaagggcaucuacaacguggccaccugcggccuguucggccuggugagcuuccugcugcugugcggcagaagcugcagcaccaccuacaagggcguguacgagcugcagacccuggagcuggacauggccagccugaacaugaccaugccccugagcugcaccaagaacaacagccaccacuacaucauggugggcaacgagaccggccuggagcugacccugaccaacaccagcaucaucaaccacaaguucugcaaccugagcgacgcccacaagaagaaccuguacgaccacgcccugaugagcaucaucagcaccuuccaccugagcauccccaacuucaaccaguacgaggccaugagcugcgacuucaacggcggcaagaucagcgugcaguacaaccugagccacaccuacgccaucgacgccgccaaccacugcggcaccaucgccaacggcgugcugcagaccuucaugagaauggccuggggcggcagcuacaucgcccuggacagcggcaagggcagcugggacugcaucaugaccagcuaccaguaccugaucauccagaacaccaccugggaggaccacugccaguucagcagacccagccccaucggcuaccugggccugcugagccagagaaccagagacaucuacaucagcagaagaagaagaggcaccuucaccuggacccugagcgacagcgagggcaacgagacccccggcggcuacugccugaccagauggaugcugaucgaggccgagcugaagugcuucggcaacaccgccguggccaagugcaacgagaagcacgacgaggaguucugcgacaugcugagacuguucgacuucaacaagcaggccaucagaagacugaagacccccgcccagaugagcauccagcugaucaacaaggccgugaacgcccugaucaacgaccagcugaucaugaagaaccaccugagagacaucaugggcauccccuacugcaacuacagcaaguacugcuaccugaaccacaccgugaccggcaagaccagccugcccagaugcugccuggugagcaacggcagcuaccugaacgagacccacuucagcgacgacaucgagcagcaggccgacaacaugaucaccgagaugcugcagaaggaguacauggacagacagggcaagaccccccugggccugguggaccuguucguguucagcaccagcuucuaccugaucagcaucuuccugcaccuggugaagauccccacccacagacacgugaucggcaagcccugccccaagccccacagacugaaccacaugggcaucugcagcugcggccuguacaagcaccccggcgugcccgugaaguggaagagaugaggacuagucccuguucccagagcccacuuuuuuuucuuuuuuugaaauaaaauagccugucuuucagaucuaaaaaaaaaaaaaaaaaaaaaaaaaaaaaaaaaaaaaaaaaaaaaaaaaaaaaaaaaaaaaaaaaaaaaaaaaaaaaaaaaaaaaaaaaaaaaaaaaaaa

SEQ ID NO: 25143 - RNA, 1721 nt, Artificial Sequence
  mRNA product Design a-1 (A100) comprising derived and/or modified sequence from LASV(LASV237-NIG-2010;Clade II)__AIT17638__GPCmut3 (opt4)
aggagagucccgcagucggcguccagcggcucugcuuguucgugugugugucguugcaggccuuauucaagcuuaccaugggccagaucaucaccuucuuccaggaggugccccacgugaucgaggaggugaugaacaucgugcugaucgcccugagccugcuggccauccugaagggcaucuacaacguggccaccugcggccuguucggccuggugagcuuccugcugcugugcggcagaagcugcagcaccaccuacaagggcguguacgagcugcagacccuggagcuggacauggccagccugaacaugaccaugccccugagcugcaccaagaacaacagccaccacuacaucauggugggcaacgagaccggccuggagcugacccugaccaacaccagcaucaucaaccacaaguucugcaaccugagcgacgcccacaagaaggaccuguacgaccacgcccugaugagcaucaucagcaccuuccaccugagcauccccaacuucaaccaguacgaggccaugagcugcgacuucaacggcggcaagaucagcgugcaguacaaccugagccacaccuacgccguggacgccgccaaccacugcggcaccaucgccaacggcgugcugcagaccuucaugagaauggccuggggcggcagcuacaucgcccuggacagcggcaagggcagcugggacugcaucaugaccagcuaccaguaccugaucauccagaacaccaccugggaggaccacugccaguucagcagacccagccccaucggcuaccugggccugcugagccagagaaccagagacaucuacaucagcagaagaagaagaggcaccuucaccuggacccugagcgacagcgagggcaacgagacccccggcggcuacugccugaccagauggaugcugaucgaggccgagcugaagugcuucggcaacaccgccguggccaagugcaacgagaagcacgacgaggaguucugcgacaugcugagacuguucgacuucaacaagcaggccaucagaagacugaagacccccgcccagaugagcauccagcugaucaacaaggccgugaacgcccugaucaacgaccagcugaucaugaagaaccaccugagagacaucaugggcauccccuacugcaacuacagcaaguacugcuaccugaaccacaccgugaccggcaagaccagccugcccagaugcugccuggugagcaacggcagcuaccugaacgagacccacuucagcgacgacaucgagcagcaggccgacaacaugaucaccgagcugcugcagaaggaguacauggacagacagggcaagaccccccugggccugguggaccuguucguguucagcaccagcuucuaccugaucagcaucuuccugcaccugaucaagauccccacccacagacacaucaccggcaagcccugccccaagccccacagacugaaccacaugggcaucugcagcugcggccuguacaagcaccccggcgugcccgugaaguggaagagaugaggacuagucccuguucccagagcccacuuuuuuuucuuuuuuugaaauaaaauagccugucuuucagaucuaaaaaaaaaaaaaaaaaaaaaaaaaaaaaaaaaaaaaaaaaaaaaaaaaaaaaaaaaaaaaaaaaaaaaaaaaaaaaaaaaaaaaaaaaaaaaaaaaaaa

SEQ ID NO: 25144 - RNA, 1721 nt, Artificial Sequence
  mRNA product Design a-1 (A100) comprising derived and/or modified sequence from LASV(LASV253-NIG-2011;Clade II)__AIT17670__GPCmut3 (opt4)
aggagagucccgcagucggcguccagcggcucugcuuguucgugugugugucguugcaggccuuauucaagcuuaccaugggccagaucaucaccuucuuccaggaggugccccacgugaucgaggaggugaugaacaucgugcugaucgcccugagccugcuggccauccugaagggcaucuacaacguggccaccugcggccuguucggccuggugagcuuccugcugcugugcggcagaagcugcagcaccaccuacaagggcguguacgagcugcagacccuggagcuggacauggccagccugaacaugaccaugccccugagcugcaccaagaacaacagccaccacuacaucauggugggcaacgagaccggccuggagcugacccugaccaacaccagcaucaucaaccacaaguucugcaaccugagcgacgcccacaagaagaaccuguacgaccacgcccugaugagcaucaucagcaccuuccaccugagcauccccaacuucaaccaguacgaggccaugagcugcgacuucaacggcggcaagaucagcgugcaguacaaccugagccacaccuacgccguggacgccgccaaccacugcggcaccaucgccaacggcgugcugcagaccuucaugagaauggccuggggcggcagcuacaucgcccuggacagcggcaagggcagcugggacugcaucaugaccagcuaccaguaccugaucauccagaacaccaccugggaggaccacugccaguucagcagacccagccccaucggcuaccugggccugcugagccagagaaccagagacaucuacaucagcagaagaagaagaggcaccuucaccuggacccugagcgacagcgagggcaacgagacccccggcggcuacugccugaccagauggaugcugaucgaggccgagcugaagugcuucggcaacaccgccguggccaagugcaacgagaagcacgacgaggaguucugcgacaugcugagacuguucgacuucaacaagcaggccaucagaagacugaaggcccccgcccagaugagcauccagcugaucaacaaggccgugaacgcccugaucaacgaccagcugaucaugaagaaccaccugagagacaucaugggcauccccuacugcaacuacagcaaguacugcuaccugaaccacaccgugaccggcagaaccagccugcccagaugcugccuggugagcaacggcagcuaccugaacgagacccacuucagcgacgacaucgagcagcaggccgacaacaugaucaccgagcugcugcagaaggaguacaucgacagacagggcaagaccccccugggccugguggaccuguucguguucagcaccagcuucuaccugaucagcaucuuccugcaccuggugaagauccccacccacagacacaucaucggcaagcccugccccaagccccacagacugaaccacaugggcaucugcagcugcggccuguacaagcaccccggcgugcccgugaaguggaagagaugaggacuagucccuguucccagagcccacuuuuuuuucuuuuuuugaaauaaaauagccugucuuucagaucuaaaaaaaaaaaaaaaaaaaaaaaaaaaaaaaaaaaaaaaaaaaaaaaaaaaaaaaaaaaaaaaaaaaaaaaaaaaaaaaaaaaaaaaaaaaaaaaaaaaa

SEQ ID NO: 25145 - RNA, 1721 nt, Artificial Sequence
  mRNA product Design a-1 (A100) comprising derived and/or modified sequence from LASV(LASV254-NIG-2011;Clade II)__AIT17674__GPCmut3 (opt4)
aggagagucccgcagucggcguccagcggcucugcuuguucgugugugugucguugcaggccuuauucaagcuuaccaugggccagaucaucaccuucuuccaggaggugccccacgugaucgaggaggugaugaacaucgugcugaucgcccugagccugcuggccauccugaagggcaucuacaacguggccaccugcggccuguucggccuggugagcuuccugcugcugugcggcagaagcugcagcaccaccuacaagggcguguacgagcugcagacccuggagcuggacaugaccaaccugaacaugaccaugccccugagcugcaccaagaacaacagccaccacuacaucauggugggcaacgagaccggccuggagcugacccugaccaacaccagcaucaucaaccacaaguucugcaaccugagcgacgcccacaagaagaaccuguacaaccacgcccugaugagcaucaucagcaccuuccaccugagcauccccaacuucaaccaguacgaggccaugagcugcgacuucaacggcggcaagaucagcgugcaguacaaccugagccacagcuacgccguggacgccgccaaccacugcggcaccaucgccaacggcgugcugcagaccuucaugagaauggccuggggcggcagcuacaucgcccuggacagcggcaagggcaacugggacugcaucaugaccagcuaccaguaccugaucauccagaacaccaccugggaggaccacugccaguucagcagacccagccccaucggcuaccugggccugcugagccagagaaccagagacaucuacaucagcagaagaagaagaggcaccuucaccuggacccugagcgacagcgagggcaacgagacccccggcggcuacugccugaccagauggaugcugaucgaggccgagcugaagugcuucggcaacaccgccguggccaagugcaacgagaagcacgacgaggaguucugcgacaugcugagacuguucgacuucaacaagcaggccaucagaagacugaagacccccgcccaggccaacauccagcugaucaacaaggccgugaacgcccugaucaacgaccagcugaucaugaagaaccaccugagagacaucaugggcauccccuacugcaacuacagcaaguacugcuaccugaaccacaccgugaccggcaagaccagccugcccagaugcugccuggugagcaacggcagcuaccugaacgagacccacuucagcgacgacaucgagcagcaggccgacaacaugaucaccgagcugcugcagaaggaguacauggacagacagggcaagaccccccugggccugguggaccuguucguguucagcaccagcuucuaccugaucagcaucuuccugcaccuggugaagauccccacccacagacacgugaucggcaagcccugccccaagccccacagacugaaccacaugggcaucugcagcugcggccuguacaagcaccccggcgugcccgugaaguggaagagaugaggacuagucccuguucccagagcccacuuuuuuuucuuuuuuugaaauaaaauagccugucuuucagaucuaaaaaaaaaaaaaaaaaaaaaaaaaaaaaaaaaaaaaaaaaaaaaaaaaaaaaaaaaaaaaaaaaaaaaaaaaaaaaaaaaaaaaaaaaaaaaaaaaaaa

SEQ ID NO: 25146 - RNA, 1721 nt, Artificial Sequence
  mRNA product Design a-1 (A100) comprising derived and/or modified sequence from LASV(Nig08-A19;Clade III)__ADU56618__GPCmut3 (opt4)
aggagagucccgcagucggcguccagcggcucugcuuguucgugugugugucguugcaggccuuauucaagcuuaccaugggccagaucgugaccuucuuccaggaggugccccacgugaucgaggaggugaugaacaucgugcugaucgcccugagcauccuggccauccugaagggccuguacaacaucgccaccugcggccugaucggccuggugaccuuccugcugcugagcggcagaagcugcagcaugaccuacaagggcguguacgagcugcagacccuggagcugaacaugaacacccugaacaugaccaugccccugagcugcaccaagaacaacagccaccacuacaucauggugggcaacgagaccggccuggagcugacccugaccaacaccagccugcugcaccacaaguucugcaaccugagcgacgcccacaagaagaaccuguacgaccacacccugaugagcaucaucagcaccuuccaccugagcauccccaacuucaaccaguacgaggccaugagcugcgacuucaacggcggcaagaucaccgugcaguacaaccugagccacagcuacgccaucgacgccgccaaccacugcggcaccguggccaacggcgugcugcagaccuucaugagaauggccuggggcggcagcuacaucgcccuggacagcggcagaggcaagugggacugcaucaugaccagcuaccaguaccugaucauccagaacaccaccugggaggaccacugccaguucagcagacccagccccaucggcuaccugggccugcugagccagagaaccagagacaucuacaucagcagaagaagaagaggcaccuucaccuggacccugagcgacagcgagggcaacgagacccccggcggcuacugccugaccagauggaugcugaucgaggccgagcugaagugcuucggcaacaccgccguggccaagugcaacgagaagcacgacgaggaguucugcgacaugcugagacuguucgacuucaacaagcaggccaucagaagacugaaggcccccgcccagaugagcauccagcugaucaacaaggccgugaacgcccugaucaacgaccagcugaucaugaagaaccaccugagagacaucaugggcauccccuacugcaacuacagcaaguacugcuaccugaaccacaccagcaccggcagaaccagccugcccagaugcugccuggugagcaacggcagcuaccugaacgagacccacuucagcgacgacaucgagcagcaggccgacaacaugaucaccgagaugcugcagaaggaguaccuggacagacagggcaagaccccccugggccugguggaccuguucguguucagcaccagcuucuaccugaucagcaucuuccugcaccuggugaagauccccacccacagacacaucgugggcaagcccugccccaagccccacagacugaaccacaugggcaucugcagcugcggccuguacaagcagcccggcgugcccgugagauggaagagaugaggacuagucccuguucccagagcccacuuuuuuuucuuuuuuugaaauaaaauagccugucuuucagaucuaaaaaaaaaaaaaaaaaaaaaaaaaaaaaaaaaaaaaaaaaaaaaaaaaaaaaaaaaaaaaaaaaaaaaaaaaaaaaaaaaaaaaaaaaaaaaaaaaaaa

SEQ ID NO: 25147 - RNA, 1724 nt, Artificial Sequence
  mRNA product Design a-1 (A100) comprising derived and/or modified sequence from LASV(G1180-SLE-2010;Clade IV)__AIT17168__GPCmut3 (opt4)
aggagagucccgcagucggcguccagcggcucugcuuguucgugugugugucguugcaggccuuauucaagcuuaccaugggccagaucgugaccuucuuccaggaggugccccacgugaucgaggaggugaugaacaucgugcugaucgcccugagcauccuggccgugcugaagggccuguacaacuucgccaccugcggccuggugggccugcugaccuuccugcugcugugcggcagaagcugcaccgccagcagauacaagggcguguacgagcugcagacccuggagcugaacauggagacccugaacaugaccaugccccugagcugcaccaagaacaacagccaccacuacaucauggugggcaacgagaccggccuggagcugacccugaccaacaccagcaucaucaaccacaaguucugcaaccugagcgacgcccacaagaagaaccuguacgaccacgcccugaugagcaucaucagcaccuuccaccugagcauccccaacuucaaccaguacgaggccaugagcugcgacuucaacggcggcaagaucagcgugcaguacaaccugagccacagcuacgccggcgacgccgccaaccacugcggcaccguggccaacggcgugcugcagaccuucaugagaauggccuggggcggcagcuacaucgcccuggacagcggccacggcagcugggacugcaucaugaccagcuaccaguaccugaucauccagaacaccaccugggaggaccacugccaguucagcagacccagccccaucggcuaccugggccugcugagccagagaaccagagacaucuacaucagcagaagaagaagaggcaccuucaccuggacccugagcgacagcgagggcaaggacacccccggcggcuacugccugaccagauggaugcugaucgaggccgagcugaagugcuucggcaacaccgccguggccaagugcaacgagaagcacgacgaggaguucugcgacaugcugagacuguucgacuucaacaagcaggccauccagagacugaaggcccccgcccagaugagcauccagcugaucaacaaggccgugaacgcccugaucaacgaccagcugaucaugaagaaccaccugagagacaucaugggcauccccuacugcaacuacagcaaguacugcuaccugaaccacaccaccaccggcaagaccagccugcccaagugcugccuggugagcaacggcagcuaccugaacgagacccacuucagcgacgacaucgagcagcaggccgacaacaugaucaccgagaugcugcagaaggaguacauggagagacagggcaagaccccccugggccugguggaccuguucguguucagcaccagcuucuaccugaucagcaucuuccugcaccuggugaagauccccacccacagacacaucgugggcaagagcugccccaagccccacagacugaaccacaugggcaucugcagcugcggccuguacaagcagcccggcgugcccgugaaguggaagagaugaggacuagucccuguucccagagcccacuuuuuuuucuuuuuuugaaauaaaauagccugucuuucagaucuaaaaaaaaaaaaaaaaaaaaaaaaaaaaaaaaaaaaaaaaaaaaaaaaaaaaaaaaaaaaaaaaaaaaaaaaaaaaaaaaaaaaaaaaaaaaaaaaaaaa

SEQ ID NO: 25148 - RNA, 1724 nt, Artificial Sequence
  mRNA product Design a-1 (A100) comprising derived and/or modified sequence from LASV(G1442-SLE-2011;Clade IV)__AIT17180__GPCmut3 (opt4)
aggagagucccgcagucggcguccagcggcucugcuuguucgugugugugucguugcaggccuuauucaagcuuaccaugggccagaucgugaccuucuuccaggaggugccccacgugaucgaggaggugaugaacaucgugcugaucgcccugagcauccuggccgugcugaagggccuguacaacguggccaccugcggccugaucggccuggugaccuuccugcugcugugcggcagaagcugcaccaccacccuguacaagggcguguacgagcugcagacccuggagcugaacauggagacccugaacaugaccaugccccugagcugcaccaagaacaacagccaccacuacaucagagugggcaacgagaccggccuggagcugacccugaccaacaccagcaucaucaaccacaaguucugcaaccugagcgacgcccacaagaagaaccuguacgaccacgcccugaugagcaucaucagcaccuuccaccugagcauccccaacuucaaccaguacgaggccaugagcugcgacuucaacggcggcaagaucagcgugcaguacaaccugagccacagcuacgccggcgacgccgccaaccacugcggcaccguggccaacggcgugcugcagaccuucaugagaauggccuggggcggcagcuacaucgcccuggacagcggcagaggcaacugggacugcaucaugaccagcuaccaguaccugaucauccagaacaccaccugggacgaccacugccaguucagcagacccagccccaucggcuaccugggccugcugagccagagaaccagagacguguacaucagcagaagaagaagaggcaccuucaccuggacccugagcgacagcgagggcaaggacacccccggcggcuacugccugaccagauggaugcugaucgaggccgagcugaagugcuucggcaacaccgccguggccaagugcaacgagaagcacgacgaggaguucugcgacaugcugagacuguucgacuucaacaagcaggccauccagagacugaaggcccccgcccagaugagcauccagcugaucaacaaggccgugaacgcccugaucaacgaccagcugaucaugaagaaccaccugagagacaucaugggcauccccuacugcaacuacagcaaguacugcuaccugaacaacaccgccaccggcaagaccagccugcccaagugcugccugaucagcaacggcagcuaccugaacgagacccacuucagcgacgacaucgagcaggaggccgacaacaugaucaccgagaugcugcagaaggaguacauggagagacagggcaagaccccccugggccugguggaccuguucguguucagcaccagcuucuaccugaucagcaucuuccugcaccuggugaagauccccacccacagacacaucgugggcaagagcugccccaagccccacagacugaaccacaugggcaucugcagcugcggccuguacaagcagcccggcgugcccgugagauggaagagaugaggacuagucccuguucccagagcccacuuuuuuuucuuuuuuugaaauaaaauagccugucuuucagaucuaaaaaaaaaaaaaaaaaaaaaaaaaaaaaaaaaaaaaaaaaaaaaaaaaaaaaaaaaaaaaaaaaaaaaaaaaaaaaaaaaaaaaaaaaaaaaaaaaaaa

SEQ ID NO: 25149 - RNA, 1724 nt, Artificial Sequence
  mRNA product Design a-1 (A100) comprising derived and/or modified sequence from LASV(G3010-SLE-2013;Clade IV)__AIT17344__GPCmut3 (opt4)
aggagagucccgcagucggcguccagcggcucugcuuguucgugugugugucguugcaggccuuauucaagcuuaccaugggccagaucgugaccuucuuccaggaggugccccacgugaucgaggaggugaugaacaucgugcugaucgcccugagcauccuggccgugcugaagggccuguacaacuucgccaccugcggccuggugggccuggugaccuuccugcugcugugcggcagaagcugcaccaccagccuguacaagggcguguacgagcugcagacccuggagcugaacauggagacccugaacaugaccaugccccugagcugcaccaagaacaacagccaccacuacaucauggugggcaacgagaccggccuggagcugacccugaccaacaccagcaucaucaaccacaaguucugcaaccugagcgacgcccacaagaagaaccuguacaaccacgcccugaugagcaucaucagcaccuuccaccugagcauccccaacuucaaccaguacgaggccaugagcugcgacuucaacggcggcaagaucagcgugcaguacaaccugagccacagcuacgccggcgacgccgccagccacugcggcaccguggccaacggcgugcugcagaccuucaugagaauggccuggggcggcagcuacaucgcccuggacagcggcuacggcaagugggacugcaucaugaccagcuaccaguaccugaucauccagaacaccaccugggaggaccacugccaguucagcagacccagccccaucggcuaccugggccugcugagccagagaaccagagacaucuacaucagcagaagaagaagaggcaccuucaccuggacccugagcgacagcgagggcaaggacacccccggcggcuacugccugaccagauggaugcugaucgaggccgagcugaagugcuucggcaacaccgccguggccaagugcaacgagaagcacgacgaggaguucugcgacaugcugagacuguucgacuucaacaagcaggccauccagagacugaagacccccgcccagaugagcauccagcugaucaacaaggccgugaacgcccugaucaacgaccagcugaucaugaagaaccaccugagagacaucaugggcauccccuacugcaacuacagcaaguacugcuaccugaaccacaccaccaccggcaagaccagccugcccaagugcugccuggugagcaacggcagcuaccugaacgagacccacuucagcgacgacaucgagcagcaggccgacaacaugaucaccgagaugcugcagaaggaguacauggagagacagggcaagaccccccugggccugguggaccuguucguguucagcaccagcuucuaccugaucagcaucuuccugcaccuggugaagauccccacccacagacacaucgugggcaagagcugccccaagccccacagacugaaccacaugggcaucugcagcugcggccuguacaagcagcccggcgugcccgugagauggaagagaugaggacuagucccuguucccagagcccacuuuuuuuucuuuuuuugaaauaaaauagccugucuuucagaucuaaaaaaaaaaaaaaaaaaaaaaaaaaaaaaaaaaaaaaaaaaaaaaaaaaaaaaaaaaaaaaaaaaaaaaaaaaaaaaaaaaaaaaaaaaaaaaaaaaaa

SEQ ID NO: 25150 - RNA, 1724 nt, Artificial Sequence
  mRNA product Design a-1 (A100) comprising derived and/or modified sequence from LASV(G502-SLE-2009;Clade IV)__AIT17126__GPCmut3 (opt4)
aggagagucccgcagucggcguccagcggcucugcuuguucgugugugugucguugcaggccuuauucaagcuuaccaugggccagaucgugaccuucuuccaggaggugccccacgugaucgaggaggugaugaacaucgugcugaucgcccugagcauccuggccgugcugaagggccuguacaacuucgccaccugcggccuggugggccugcugaccuuccugcugcugugcggcagaagcugcaccaccggccuguacaagggcguguacgagcugcagacccuggagcugaacauggagacccugaacaugaccaugccccugagcugcaccaagaacaacagccaccacuacaucauggugggcaacgagaccggccuggagcugacccugaccaacaccagcaucaucaaccacaaguucugcaaccugagcgacgcccacaagaagaaccuguacgaccacgcccugaugagcaucaucagcaccuuccaccugagcauccccaacuucaaccaguacgaggccaugagcugcgacuucaacggcggcaagaucagcgugcaguacaaccugagccacagcuacgccggcgacgccgccgaccacugcggcaccguggccaacggcgugcugcagaccuucaugagaauggccuggggcggcagcuacaucgcccuggacagcggcagaggcagaugggacugcaucaugaccagcuaccaguaccugaucauccagaacaccaccugggaggaccacugccaguucagcagacccagccccaucggcuaccugggccugcugagccagagaaccagagacaucuacaucagcagaagaagaagaggcaccuucaccuggacccugagcgacagcgagggcaaggacacccccggcggcuacugccugaccagauggaugcugaucgaggccgagcugaagugcuucggcaacaccgccguggccaagugcaacgagaagcacgacgaggaguucugcgacaugcugagacuguucgacuucaacaagcaggccauccagagacugaaggcccccgcccagaugagcauccagcugaucaacaaggccgugaacgcccugaucaacgaccagcuggugaugaagaaccaccugagagacaucaugggcauccccuacugcaacuacagcagauacugcuaccugaaccacaccaccaccggcagaaccagccugcccaagugcugccuggugagcaacggcagcuaccugaacgagacccacuucagcgacgacaucgagcagcaggccgacaacaugaucaccgagaugcugcagaaggaguacauggagagacagggcaagaccccccugggccugguggaccuguucguguucagcaccagcuucuaccugaucagcaucuuccugcaccuggugaagauccccacccacagacacaucgugggcaagagcugccccaagccccacagacugaaccacaugggcaucugcagcugcggccuguacaagcagcccggcgugcccgugaaguggaagagaugaggacuagucccuguucccagagcccacuuuuuuuucuuuuuuugaaauaaaauagccugucuuucagaucuaaaaaaaaaaaaaaaaaaaaaaaaaaaaaaaaaaaaaaaaaaaaaaaaaaaaaaaaaaaaaaaaaaaaaaaaaaaaaaaaaaaaaaaaaaaaaaaaaaaa

SEQ ID NO: 25151 - RNA, 1724 nt, Artificial Sequence
  mRNA product Design a-1 (A100) comprising derived and/or modified sequence from LASV(G733-SLE-2010;Clade IV)__AIT17154__GPCmut3 (opt4)
aggagagucccgcagucggcguccagcggcucugcuuguucgugugugugucguugcaggccuuauucaagcuuaccaugggccagaucgugaccuucuuccaggaggugccccacgugaucgaggaggugaugaacaucgugcugaucgcccugagcauccuggccgugcugaagggccuguacaacuucgccaccugcggcaucgugggccuggugagcuuccugcugcugugcggcagaagcugcaccaccagccuguacaagggcguguacgagcugcagacccuggagcugaacauggagacccugaacaugaccaugccccugagcugcaccaagaacaacagccaccacuacaucauggugggcaacgagaccggccuggagcugacccugaccaacaccagcaucaucaaccacaaguucugcaaccugagcgacgcccacaagaagaaccuguacgaccacgcccugaugagcaucaucagcaccuuccaccugagcauccccaacuucaaccaguacgaggccaugagcugcgacuucaacggcggcaagaucagcgugcaguacaaccugagccacagcuacgccggcgacgccgccaaccacugcggcaccaucgccaacggcgugcugcagaccuucaugagaauggccuggggcggcagcuacaucgcccuggacagcggcagagacagaugggacugcaucaugaccagcuaccaguaccugaucauccagaacaccaccugggaggaccacugccaguucagcagacccagccccaucggcuaccugggccugcugagccagagaaccagagacaucuacaucagcagaagaagaagaggcaccuucaccuggacccugagcgacagcgagggcaaggacacccccggcggcuacugccugaccagauggaugcugaucgaggccgagcugaagugcuucggcaacaccgccguggccaagugcaacgagaagcacgacgaggaguucugcgacaugcugagacuguucgacuucaacaagcaggccauccagagacugaaggcccccgcccagaugagcauccagcugaucaacaaggccgugaacgcccugaucaacgaccagcugaucaugaagaaccaccugagagacaucaugggcauccccuacugcaacuacagcaaguacugcuaccugaaccacaccaccaccggcaagaccagccugcccaagugcugccuggugagcaacggcagcuaccugaacgagacccacuucagcgacgacaucgagcagcaggccgacaacaugaucaccgagaugcugcagaaggaguacauggagagacagggcaagaccccccugggccugguggaccuguucguguucagcaccagcuucuaccugaucagcaucuuccugcaccuggugaagauccccacccacagacacguggugggcaagagcugccccaagccccacagacugaaccacaugggcaucugcagcugcggccuguacggccagcccggcgugcccgugaaguggaagagaugaggacuagucccuguucccagagcccacuuuuuuuucuuuuuuugaaauaaaauagccugucuuucagaucuaaaaaaaaaaaaaaaaaaaaaaaaaaaaaaaaaaaaaaaaaaaaaaaaaaaaaaaaaaaaaaaaaaaaaaaaaaaaaaaaaaaaaaaaaaaaaaaaaaaa

SEQ ID NO: 25152 - RNA, 1724 nt, Artificial Sequence
  mRNA product Design a-1 (A100) comprising derived and/or modified sequence from MOPV/LASV reassortant(IGS-1;Clade IV)__AFY05576__GPCmut3 (opt4)
aggagagucccgcagucggcguccagcggcucugcuuguucgugugugugucguugcaggccuuauucaagcuuaccaugggccagaucgugaccuucuuccaggaggugccccacgugaucgaggaggugaugaacaucgugcugaucgcccugagcgugcuggccgugcugaagggccuguacaacuucgccaccugcggccuggugggccuggugaccuuccugcugcugugcggcagaagcugcaccaccagccuguacaagggcguguacgagcugcagacccuggagcugaacauggagacccugaacaugaccaugccccugagcugcaccaagaacaacagccaccacuacaucauggugggcaacgagaccggccuggagcugacccugaccaacaccagcaucaucaaccacaaguucugcaaccugagcgacgcccacaagaagaaccuguacgaccacgcccugaugagcaucaucagcaccuuccaccugagcauccccaacuucaaccaguacgaggccaugagcugcgacuucaacggcggcaagaucagcgugcaguacaaccugagccacagcuacgccggcgacgccgccaaccacugcggcaccguggccaacggcgugcugcagaccuucaugagaauggccuggggcggcagcuacaucgcccuggacagcggcagaggcaacugggacugcaucaugaccagcuaccaguaccugaucauccagaacaccaccugggaggaccacugccaguucagcagacccagccccaucggcuaccugggccugcugagccagagaaccagagacaucuacaucagcagaagaagaagaggcaccuucaccuggacccugagcgacagcgagggcgaggacacccccggcggcuacugccugaccagauggaugcugaucgaggccgagcugaagugcuucggcaacaccgccguggccaagugcaacgagaagcacgacgaggaguucugcgacaugcugagacuguucgacuucaacaagcaggccauccagagacugaaggcccccgcccagaugagcauccagcugaucaacaaggccgugaacgcccugaucaacgaccagcugaucaugaagaaccaccugagagacaucaugggcauccccuacugcaacuacagcaaguacugcuaccugaaccacaccaccaccggcagaaccagccugcccaagugcugccuggugagcaacggcagcuaccugaacgagacccacuucagcgacgacaucgagcagcaggccgacaacaugaucaccgagaugcugcagaaggaguacauggagagacagggcaagaccccccugggccugguggaccuguucguguucagcaccagcuucuaccugaucagcaucuuccugcaccuggugaagauccccacccacagacacaucgugggcaagagcugccccaagccccacagacugaaccacaugggcaucugcagcugcggccuguacaagcagcccggcgugcccgugaaguggaagagaugaggacuagucccuguucccagagcccacuuuuuuuucuuuuuuugaaauaaaauagccugucuuucagaucuaaaaaaaaaaaaaaaaaaaaaaaaaaaaaaaaaaaaaaaaaaaaaaaaaaaaaaaaaaaaaaaaaaaaaaaaaaaaaaaaaaaaaaaaaaaaaaaaaaaa

SEQ ID NO: 25153 - RNA, 1724 nt, Artificial Sequence
  mRNA product Design a-1 (A100) comprising derived and/or modified sequence from LASV(LM765-SLE-2012;Clade IV)__AIT17814__GPCmut3 (opt4)
aggagagucccgcagucggcguccagcggcucugcuuguucgugugugugucguugcaggccuuauucaagcuuaccaugggccagaucgugaccuucuuccaggaggugccccacgugaucgaggaggugaugaacaucgugcugaucgcccugagcauccuggccgugcugaagggccuguacaacuucgccaccugcggccuggugggccuggugaccuuccugcugcugugcggcagaagcugcaccaccagccuguacaagggcguguacgagcugcagacccuggagcugaacauggagacccugaacaugaccaugccccugagcugcaccaagaacaacagccaccacuacaucauggugggcaacgagaccggccuggagcugacccugaccaacaccagcaucaucgaccacaaguucugcaaccugagcgacgcccacagaaagaaccuguacgaccacgcccugaugagcaucaucagcaccuuccaccugagcauccccaacuucaaccaguacgaggccaugagcugcgacuucaacggcggcaagaucagcgugcaguacaaccugagccacagcuacgccaaggacgccgccgaccacugcggcaccguggccaacggcgugcugcagaccuucaugagaauggccuggggcggcagcuacaucgcccuggacagcggcagaggcagaugggacugcaucaugaccagcuaccaguaccugaucauccagaacaccaccugggaggaccacugccaguucagcagacccagccccaucggcuaccugggccugcugagccagagaaccagagacaucuacaucagcagaagaagaagaggcaccuucaccuggacccugagcgacagcgagggcaaggacacccccggcggcuacugccugaccagauggaugcugaucgaggccgagcugaagugcuucggcaacaccgccguggccaagugcaacgagaagcacgacgaggaguucugcgacaugcugagacuguucgacuucaacaagcaggccauccagagacugaaggcccccgcccagaugagcauccagcugaucaacaaggccgugaacgcccugaucaacgaccagcugaucaugaagaaccaccugagagacaucaugggcauccccuacugcaacuacagcaaguacugcuaccugaaccacaccaccaccggcaagaccagccugcccaagugcugccuggugagcaacggcagcuaccugaacgagacccacuucagcgacgacaucgagcagcaggccgacaacaugaucaccgagaugcugcagaaggaguacauggagagacagggcaagaccccccugggccugguggaccuguucguguucagcaccagcuucuaccugaucagcaucuuccugcaccuggugaagauccccacccacagacacaucgugggcaagcccugccccaagccccacagacugaaccacaugggcaucugcagcugcggccuguacaagcagcccggcgugcccgugaaguggaagagaugaggacuagucccuguucccagagcccacuuuuuuuucuuuuuuugaaauaaaauagccugucuuucagaucuaaaaaaaaaaaaaaaaaaaaaaaaaaaaaaaaaaaaaaaaaaaaaaaaaaaaaaaaaaaaaaaaaaaaaaaaaaaaaaaaaaaaaaaaaaaaaaaaaaaa

SEQ ID NO: 25154 - RNA, 1724 nt, Artificial Sequence
  mRNA product Design a-1 (A100) comprising derived and/or modified sequence from LASV(LM776-SLE-2012;Clade IV)__AIT17824__GPCmut3 (opt4)
aggagagucccgcagucggcguccagcggcucugcuuguucgugugugugucguugcaggccuuauucaagcuuaccaugggccagaucgugaccuucuuccaggaggugccccacgugaucgaggaggugaugaacaucgugcugaucgcccugagcauccuggccgugcugaagggccuguacaacuucgccaccugcggccuggugggccuggugaccuuccugcugcugugcggcagaagcugcaccaccagcguguacaagggcguguacgagcugcagacccuggagcugaacauggagacccugaacaugaccaugccccugagcugcaccaagaacaacagccaccacuacaucauggugggcaacgagaccggccuggagcugacccugaccaacaccagcaucaucaaccacaaguucugcaaccugagcgacgcccacaagaagaaccuguacgaccacgcccugaugagcaucaucagcaccuuccaccugagcauccccaacuucaaccaguacgaggccaugagcugcgacuucaacggcggcaagaucagcgugcaguacaaccugagccacagcuacgccggcgacgccgccaaccacugcggcaccguggccaacggcgugcugcagaccuucaugagaauggccuggggcggcagcuacaucgcccuggacagcggccacggcaagugggacugcaucaugaccagcuaccaguaccugaucauccagaacaccaccugggaggaccacugccaguucagcagacccagccccaucggcuaccugggccugcugagccagagaaccagagacaucuacaucagcagaagaagaagaggcaccuucaccuggacccugagcgacagcgagggcaaggacacccccggcggcuacugccugaccagauggaugcugaucgaggccgagcugaagugcuucggcaacaccgccguggccaagugcaacgagaagcacgacgaggaguucugcgacaugcugagacuguucgacuucaacaagcaggccauccagagacugaaggcccccgcccagaugagcauccagcugaucaacaaggccgugaacgcccugaucaacgaccagcugaucaugaagaaccaccugagagacaucaugggcauccccuacugcaacuacagcaaguacugcuaccugaaccacaccaccaccggcaagaccagccugcccaagugcugccuggugagcaacggcagcuaccugaacgagacccacuucagcgacgacaucgagcagcaggccgacaacaugaucaccgagaugcugcagaaggaguacauggagagacagggcaagaccccccugggccugguggaccuguucguguucagcaccagcuucuaccugaucagcaucuuccugcaccuggugaagauccccacccacagacacaucgugggcaagagcugccccaagccccacagacugaaccacaugggcaucugcagcugcggccuguacaagcagcccggcgugcccgugagauggaagagaugaggacuagucccuguucccagagcccacuuuuuuuucuuuuuuugaaauaaaauagccugucuuucagaucuaaaaaaaaaaaaaaaaaaaaaaaaaaaaaaaaaaaaaaaaaaaaaaaaaaaaaaaaaaaaaaaaaaaaaaaaaaaaaaaaaaaaaaaaaaaaaaaaaaaa

SEQ ID NO: 25155 - RNA, 1724 nt, Artificial Sequence
  mRNA product Design a-1 (A100) comprising derived and/or modified sequence from LASV(Mad39;Clade IV)__ANH09722__GPCmut3 (opt4)
aggagagucccgcagucggcguccagcggcucugcuuguucgugugugugucguugcaggccuuauucaagcuuaccaugggccagaucgugaccuucuuccaggaggugccccacgugaucgaggaggugaugaacaucgugcugaucgcccugagcauccuggccgugcugaagggccuguacaacguggccaccugcggccugaucggccuggugaccuuccugcugcugugcggcagaagcugcaccaccacccuguacaagggcguguacgagcugcaggcccuggagcugaacauggagacccugaacaugaccaugccccugagcugcaccaagaacaacagccaccacuacaucagagugggcaacgagaccggccuggagcugacccugaccaacaccagccugaucaaccacaaguucugcaaccugagcgacgcccacaagaagaaccuguacgaccacgcccugaugagcaucaucagcaccuuccaccugagcauccccaacuucaaccaguacgaggccaugagcugcgacuucaacgacggcaagaucagcgugcaguacaaccugagccacaccuacgccggcgacaccgccaaccacugcggcaccguggccaacggcgugcugcagaccuucaugagaauggccuggggcggcagcuacaucgcccuggacagcggcagaggcggcugggacugcaucaugaccagcuaccaguaccugaucauccagaacaccaccugggaggaccacugccaguucagcagacccagccccaucggcuaccugggccugcugagccagagaaccagagacaucuacaucagcagaagaagaagaggcaccuucaccuggacccugagcgacagcgagggcaaggacacccccggcggcuacugccugaccagauggaugcugaucgaggccgagcugaagugcuucggcaacaccgccguggccaagugcaacgagaagcacgacgaggaguucugcgacaugcugagacuguucgacuucaacaagcaggccauccagagacugaaggcccccgcccagaugagcauccagcugaucaacaaggccgugaacgcccugaucaacgaccagcugaucaugaagaaccaccugagagacaucaugggcauccccuacugcaacuacagcaaguacugcuaccugaaccacaccgugaccggcaagaccagccugcccaagugcugccuggugagcaacggcagcuaccugaacgagacccacuucagcgacgacaucgagcagcaggccgacaacaugaucaccgagaugcugcagaaggaguacauggagagacagggcaagaccccccugggccugguggaccuguucguguucagcaccagcuucuaccugaucagcaucuuccugcaccuggugaagauccccacccacagacacguggugggcaagcccugccccaagccccacagacugaaccacaugggcaucugcagcugcggcuucuacaagcagcccggcgugcccgugagauggaagagaugaggacuagucccuguucccagagcccacuuuuuuuucuuuuuuugaaauaaaauagccugucuuucagaucuaaaaaaaaaaaaaaaaaaaaaaaaaaaaaaaaaaaaaaaaaaaaaaaaaaaaaaaaaaaaaaaaaaaaaaaaaaaaaaaaaaaaaaaaaaaaaaaaaaaa

SEQ ID NO: 25156 - RNA, 1724 nt, Artificial Sequence
  mRNA product Design a-1 (A100) comprising derived and/or modified sequence from LASV(Z0947-SLE-2011;Clade IV)__AIT17840__GPCmut3 (opt4)
aggagagucccgcagucggcguccagcggcucugcuuguucgugugugugucguugcaggccuuauucaagcuuaccaugggccagaucgugaccuucuuccaggaggugccccacgugaucgaggaggugaugaacaucgugcugaucgcccugagcauccuggccgugcugaagggccuguacaacuucgccaccugcggccuggugggccuggugaccuuccugcugcugugcggcagaagcugcaccaucagccuguacaagggcguguacgagcugcagacccuggagcugaacauggagacccugaacaugaccaugccccugagcugcaccaagaacaacagccaccacuacaucauggugggcaacgagaccggccuggagcugacccugaccaacaccagcaucaucaaccacaaguucugcaaccugagcgacgcccacaagaagaaccuguacgaccacgcccugaugagcaucaucagcaccuuccaccugagcauccccaacuucaaccaguacgaggccaugagcugcgacuucaacggcggcaagaucagcgugcaguacaaccugagccacagcuacgccggcgacgccgccaaccacugcggcaccguggccaacggcgugcugcagaccuucaugagaauggccuggggcggcagcuacaucgcccuggacagcggcagagacagaugggacugcaucaugaccagcuaccaguaccugaucauccagaacaccaccugggaggaccacugccaguucagcagacccagccccaucggcuaccugggccugcugagccagagaaccagagacaucuacaucagcagaagaagaagaggcaccuucaccuggacccugagcgacagcgagggcaaggacacccccggcggcuacugccugaccagauggaugcugaucgaggccgagcugaagugcuucggcaacaccgccguggccaagugcaacgagaagcacgacgaggaguucugcgacaugcugagacuguucgacuucaacaagcaggccauccagagacugaaggcccccgcccagaugagcauccagcugaucaacaaggccgugaacgcccugaucaacgaccagcugaucaugaagaaccaccugagagacaucaugggcauccccuacugcaacuacagcaaguacugcuaccugaaccacaccaccaccggcaagaccagccugcccaagugcugccuggugagcaacggcagcuaccugaacgagacccacuucagcgacgacaucgagcagcaggccgacaacaugaucaccgagaugcugcagaaggaguacauggagagacagggcaagaccccccugggccugguggaccuguucguguucagcaccagcuucuaccugaucagcaucuuccugcaccuggugaagauccccacccacagacacaucgugggcaagcccugccccaagccccacagacugaaccacaugggcaucugcagcugcggccuguacaagcagcccggcgugcccgugaaguggaagagaugaggacuagucccuguucccagagcccacuuuuuuuucuuuuuuugaaauaaaauagccugucuuucagaucuaaaaaaaaaaaaaaaaaaaaaaaaaaaaaaaaaaaaaaaaaaaaaaaaaaaaaaaaaaaaaaaaaaaaaaaaaaaaaaaaaaaaaaaaaaaaaaaaaaaa

SEQ ID NO: 25157 - RNA, 1724 nt, Artificial Sequence
  mRNA product Design a-1 (A100) comprising derived and/or modified sequence from LASV(Josiah;Clade IV)__NP_694870__GPCmut3 (opt5)
aggagagucccgcagucggcguccagcggcucugcuuguucgugugugugucguugcaggccuuauucaagcuuaccaugggccagaucgugaccuucuuucaagaggucccccacguuauugaagaggugaugaacaucgugcugauugcccucagcguccuggcugugcuuaaggggcuguacaauuucgccacaugcggacucguuggccuggugacguuucuucugcucugugggagauccugcaccacaucucuguauaaaggagucuacgaacugcagacccucgagcugaacauggaaacacuuaauaugaccaugccucugagcuguacaaagaacaauucccaucacuauaucauggugggcaacgagaccgggcucgagcugacgcuuaccaauacaucuauuaucaaccauaaauucugcaaucugagcgacgcgcacaagaaaaaccucuacgaucaugcucugauguccaucauuucuaccuuucaccugagcaucccgaauuucaaccaguaugaagccauguccugugacuuuaauggaggcaagauuagcguucaguacaaccucucucacuccuaugccggcgaugcugccaaucauugcgggacaguggcuaacggaguccugcaaaccuucaugcggauggccuggggcgggagcuacaucgcgcuugacucuggacgcggcaacugggauuguauuaugacguccuaccaguaucugaucauucagaauacaaccugggaggaccacugccaguuuagcagacccucuccuaucggguaccucggacugcuuucccaacggacacgcgauaucuauauuagcagacggcgcagaggcaccuucaccuggacacuguccgacucugaaggcaaggauacgcccgggggauacugucucacccgguggaugcugaucgaggccgagcugaaaugcuuuggcaacacagcuguggccaaguguaaugaaaaacaugacgaggaguucugcgauaugcuccgccuguuugacuucaacaagcaggcuauucagagacuuaaagccccugcgcagaugagcauccaacugauuaauaaggccgugaacgcucucaucaaugaucagcugaucaugaagaaccaccuucgggacauuauggggauccccuauugcaauuacuccaaauauuguuaccugaaccacaccacaaccggacgcacgagccucccuaagugcugucuggucucuaauggcuccuaccugaacgaaacacauuucagcgacgauauugaacagcaagccgacaauaugaucaccgagaugcuccagaaagaguauauggaaagacaggggaagaccccgcugggacuuguugaucuguuuguguucucuaccagcuuuuaccucauuuccaucuuccugcaccuggugaaaauccccacacaucggcacauugucggcaagucuugcccuaaaccccaucgccuuaaccacaugggcaucuguagcugcgggcucuauaagcagccuggagugcccguuaaguggaaaagaugaggacuagucccuguucccagagcccacuuuuuuuucuuuuuuugaaauaaaauagccugucuuucagaucuaaaaaaaaaaaaaaaaaaaaaaaaaaaaaaaaaaaaaaaaaaaaaaaaaaaaaaaaaaaaaaaaaaaaaaaaaaaaaaaaaaaaaaaaaaaaaaaaaaaa

SEQ ID NO: 25158 - RNA, 1721 nt, Artificial Sequence
  mRNA product Design a-1 (A100) comprising derived and/or modified sequence from LASV(LP;Clade I)__AAF86701__GPCmut3 (opt5)
aggagagucccgcagucggcguccagcggcucugcuuguucgugugugugucguugcaggccuuauucaagcuuaccaugggccagaucauuaccuucuuucaagaggugccccacgucaucgaagagguuaugaacauugugcugaucgcccucagccugcuugcuauucugaaggggcucuacaauaucgccacaugcggaaucauuggccugguggcguuccuuuuucugugugggaaauccugcucucucacgcugaagggaggcuaugaacugcagacccucgagcugaacauggaaacacuuaauaugaccaugccucugagcuguaccaaaaacuccucucaucacuacaucagagucgggaaugagacaggacucgagcugacacuuaccaacacgagcauuaucaaucauaaguucugcaaccuguccgacgcucacaaaaagaaucucuaugaucaugcccugaugucuauuaucagcaccuuucaccuguccauuccgaacuucaaucaguacgaagccaugagcugugacuuuaacggcggcaagaucucugugcaguauaaucucucccacagcuacgcuggggaugccgcugagcauugcggaacaguugccaacggcgugcugcaaaccuucaugcggauggcguggggagggcgcuauaucgcccuugacucuggcaaagggaauugggauuguauuaugacauccuaccaguaccugaucauucagaacaccacgugggaagaccacugccaguuuagcagacccucuccuaucggauaucucggccugcuuucccaacggacacgcgauauuuacaucagcagacggcgcagaggcaccuucacauggacccuguccgacucugaggggaacgagacccccggaggcuauugucucacacgguggaugcugaucgaagcugagcugaagugcuuugggaauacggccgucgcuaaauguaacgaaaagcaugaugaggaguucugcgacaugcuccgccuguuugauuucaauaaacaggccauuagacggcuuaaggcgccugcccagaugagcauccagcugauuaacaaggcugugaaugcccucaucaacgaccaacugauuaugaaaaaucaccuucgcgauaucaugggaauccccuacugcaacuauuccaaguacuguuaucugaaucacaccagcucuggcagaacaucccucccuaaaugcugucugauuagcaacgggucuuaccugaaugaaacccaguucagcgacgacaucgagcagcaagcugauaacaugauuacagaaaugcuccagaaggaguacaucgaacggcagggaaaaaccccgcugggccuuguugacauuuuuaucuucuccacgucuuuuuaucugauuagcaucuuccuccaucugaucaagauucccacacaccgccauaucgugggcaaaccuugccccaagccucacagacugaaucauaugggggucuguuccugcggacuuuacaagcaccccggcgugccgaccaaauggaagcggugaggacuagucccuguucccagagcccacuuuuuuuucuuuuuuugaaauaaaauagccugucuuucagaucuaaaaaaaaaaaaaaaaaaaaaaaaaaaaaaaaaaaaaaaaaaaaaaaaaaaaaaaaaaaaaaaaaaaaaaaaaaaaaaaaaaaaaaaaaaaaaaaaaaaa

SEQ ID NO: 25159 - RNA, 1721 nt, Artificial Sequence
  mRNA product Design a-1 (A100) comprising derived and/or modified sequence from LASV(803213;Clade II)__AAF86703__GPCmut3 (opt5)
aggagagucccgcagucggcguccagcggcucugcuuguucgugugugugucguugcaggccuuauucaagcuuaccaugggccagaucauuaccuucuuucaagaggugccccacgucaucgaagagguuaugaacauugugcugaucgcccucagccugcuugcuauucugaaggggaucuacaauguggccacaugcggacucuucggccugaucuccuuucuucugcucugugggagaucuugcagcgucacguauaaaggaguguacgaacugcagacccuggagcucaacauggcgaaucugaacaugacaaugccucuuuccuguaccaagaauaacucucaucacuauauuaugguuggcaaugaaacagggcuggagcucacccugacaaacaccagcaucauuaaucauaaauucugcaaccuuuccgacgcucacaagaaaaaucuguacgaucaugcccucaugucuaucauuagcacguuucaccuguccaucccgaacuucaaucaguaugaggccaugagcugugacuuuaacggaggcaagauuucugugcaguacaaucugucccacagcuucgcugucgaugccgcuaaccauugcggcaccaucgccaacggggugcuccaaacauuuaugcggauggcguggggaggcucuuauaucgcccuggacuccgggaagggaaauugggauuguauuaugaccagcuaccaguaccuuaucauucagaacacaaccugggaagaccacugccaguucucucgccccuccccuaucggcuaucuggggcuccugagccaaagaacgcgggauauuuacaucucccgcagacggcgcggaacauuuaccuggacacuuucugacagcgagggcaaugaagcucccggcggguauugucugaccagauggaugcucaucgaggccgagcugaaaugcuucggaaacaccgcuguugccaaguguaaugaaaaacaugaugaggaauuuugcgacaugcugcgccucuucgauuucaacaagcaggcgauuaaacggcugaagacgccugcccagauguccauccagcuuauuaauaaggcugugaacgcccugaucaaugaccaacucauuaugaaaaaccaccugagagauaucaugggcauccccuacugcaauuauagccgguacuguuaucuuaaccacacagucaccgggaagacaucucugccucgcugcugucucguguccaauggaagcuaccugaacgagacccauuuuucugacgacauugaacagcaggcugauaauaugaucacagagaugcugcaaaaagaguacauggacagacagggcaagaccccgcucgggcugguggaucuuuucgucuuuagcacguccuucuaucugauuucuaucuuucuccaccugguuaaaauucccacacaucggcacaucgugggaaagccuugccccaaaccucaucgccugaaccacaugggcauuuguagcugcggccuuuacaagcaccccggggugccggucaaguggaaaagaugaggacuagucccuguucccagagcccacuuuuuuuucuuuuuuugaaauaaaauagccugucuuucagaucuaaaaaaaaaaaaaaaaaaaaaaaaaaaaaaaaaaaaaaaaaaaaaaaaaaaaaaaaaaaaaaaaaaaaaaaaaaaaaaaaaaaaaaaaaaaaaaaaaaaa

SEQ ID NO: 25160 - RNA, 1721 nt, Artificial Sequence
  mRNA product Design a-1 (A100) comprising derived and/or modified sequence from LASV(GA391;Clade III)__CAA36645__GPCmut3 (opt5)
aggagagucccgcagucggcguccagcggcucugcuuguucgugugugugucguugcaggccuuauucaagcuuaccaugggccagaucgugaccuucuuucaagaggucccccacguuauugaagaggugaugaacaucgugcugauugcccucagcauccuggcuauucuuaaggggcuguacaaugucgccacaugcggacucaucggccuggugacguuccuucugcucuccgggagaucuuguagccugaucuauaaaggaaccuacgaacugcagacacucgagcugaacauggaaacccuuaauaugacaaugccucuguccugcaccaagaacaauucucaucacuauauucggguuggcaacgagacagggcucgagcugacccuuacgaauaccagcauccugaaccauaaauuuuguaaucucuccgacgcgcacaagcgcaaccuguacgaucauucucugaugagcauuaucuccacauuccaccucagcauuccgaauuuuaaccaguaugaagcuaugucuugcgacuucaauggaggcaaaaucaccgugcaguacaaccugucccacagcuuugccgucgaugccgcuggccauugugggacacuugccaauggagugcugcaaaccuucaugagaauggcuuggggcgggucuuauauugcccucgacuccggacggggcaacugggauugcaucaugacgagcuaccaguaccugaucauucagaacacaaccugggacgaucacugucaguuuucucgccccuccccuaucggguaucuuggacugcucagccaaagaacacgggacauuuacaucucccgcagacggcgcggcaccuucaccuggacacugucugauagcgagggcaaugaaacgcccgggggauauugccugaccagauggaugcucauugaggcggagcugaaguguuuuggcaacacagccguugcuaagugcaaugaaaaacaugacgaggaguucugugauaugcuucggcuguuugacuucaacaagcaggccauccgcagacucaaaaccccugcucagauguccauccagcugauuaauaaggccgugaacgcgcuuaucaaugaucaacugauuaugaaaaaccaccuccgggacaucauggggauucccuacugcaauuauagccgcuacugcuaucugaaccacacaucuaccggaaagacgucccugccuagauguugccucaucagcaauggcucuuaccugaacgaaacaaaguucagcgacgauaucgaacagcaggccgacaauaugauuaccgagaugcuucaaaaagaguacaucgaucggcaggggaagaccccgcugggacucgucgaccuguuuguguucuccacaucuuuuuaucugauuagcaucuuccuucaucucgugaaaauucccacccacagacauaucgucggcaagccuugucccaaaccucaccgccugaaccauaugggcauuugcuccugugggcuguacaagcagcccggaguuccggugcgguggaaaagaugaggacuagucccuguucccagagcccacuuuuuuuucuuuuuuugaaauaaaauagccugucuuucagaucuaaaaaaaaaaaaaaaaaaaaaaaaaaaaaaaaaaaaaaaaaaaaaaaaaaaaaaaaaaaaaaaaaaaaaaaaaaaaaaaaaaaaaaaaaaaaaaaaaaaa

SEQ ID NO: 25161 - RNA, 1724 nt, Artificial Sequence
  mRNA product Design a-1 (A100) comprising derived and/or modified sequence from LASV(AV;Clade V)__CCA30314__GPCmut3 (opt5)
aggagagucccgcagucggcguccagcggcucugcuuguucgugugugugucguugcaggccuuauucaagcuuaccaugggccagaucgugaccuucuuucaagaggucccccacguuauugaagaggugaugaacaucgugcugauugcccucagcauccuggcuguccuuaaggggcuguacaauauugccacaugcggacucaucggccugaucacguuccuucugcucugugggagauccugcucuagcaaccuguauaaaggaguguacgaacugcagucccucgaccugaauauggagacccuuaacaugacaaugccucugucuuguaccaagaauaacagccaucacuauauucggguuggcaaugauacagggcucgaacugacccuuacaaacaccuccauccugaaucauaaauuuugcaaccucucugacgcgcacaagaaagaucuguacgaccaugcucugaugagcauuaucuccacguuccaccucagcauuccgaauuuuaaccaguaugaggccaugucuugugauuucaauggaggcaagaucuccgugcaguacaaccugagccacucuuaugccauugacgcugccaaucauugcggcaccgucgcuaacgggauccuucaaacauuuaugcgcauggccuggggaggcuccuacaucgcgcuggauagcgggagaggaaacugggacuguauuaugaccucuuaccaguaucucaucauucagaauacaaccugggagaaccacugccaguucucccggcccagcccuaucggcuaccuggggcuucugucccaacgcacgagagauauuuauaucucucggcgcagacggggaacauuuaccuggacacucagcgacuccgaaggcaaugccacccccggcggguacugucugacccgcuggaugcugaucgaggcugaacucaagugcuucggaaacacagccguggcuaaauguaaugagaagcaugaugaggaauuuugcgacaugcugagacuuuucgauuuuaacaaacaggccauuagccggcugaagucuccugcgcagauguccauccagcucauuaauaaagccguuaacgcucugaucaaugaccaacuuauuaugaagaaccaucugcgcgacaucaugggcauccccuauugcaauuacagcaaguauuguuaccucaaccacacgauuaccgggaaaacaucucugccuaagugcugucuggugagcaauggauccuaccucaacgagacccacuucucugaugacaucgaacagcaggccgauaauaugauuacagagaugcugcaaaaagaauauauggagagacagggcaagaccccgcuugggcuggucgaccucuucguguuuagcacguccuucuaccugaucagcauuuuucugcggcuugugaaaauccccacacaccgccauauugucggaaagccuugccccaaaccucacagacucaaccauaugggcaucuguucuugcggccuguauaagcagcccgggguuccggugcgguggaagagaugaggacuagucccuguucccagagcccacuuuuuuuucuuuuuuugaaauaaaauagccugucuuucagaucuaaaaaaaaaaaaaaaaaaaaaaaaaaaaaaaaaaaaaaaaaaaaaaaaaaaaaaaaaaaaaaaaaaaaaaaaaaaaaaaaaaaaaaaaaaaaaaaaaaaa

SEQ ID NO: 25162 - RNA, 1721 nt, Artificial Sequence
  mRNA product Design a-1 (A100) comprising derived and/or modified sequence from LASV(Togo/2016/7082;Clade VI)__AMR44577__GPCmut3 (opt5)
aggagagucccgcagucggcguccagcggcucugcuuguucgugugugugucguugcaggccuuauucaagcuuaccaugggccagaucauuaccuucuuucaagaggugccccacgucaucgaagagguuaugaacauugugcugaucgcccucagccugcuugcuauucugaaggggguguacaaugucgccacaugcggaaucaucggccucgugacguuccuguuucuuugugggagauccugcucucugauuuauaaaggaagcuacgaacuccagacccuggagcugaacauggaaacacucaauaugaccaugccucuguccuguacaaagaacucuagccaucacuauauccggguuggcaaugagaccgggcuugagcugacacucaccaacacguccauuaucaaucauaaauucugcaaccugucugacgcgcacaagcgcaaucuuuacgaucaugcucugaugagcauucucuccaccuuucaccugagcaucccgaacuucaaucaguaugaagccaugucuugugacuuuaacggaggcaaaauuuccgugcaguacaaucugagccacgccuaugcugucgaugccgcugagcauugcggcacaguggccaacgggguucuccaaaccuucaugagaauggcguggggaggcucuuacaucgcccuggacuccgggcggggaaauugggauuguaucaugacaagcuaccaguaucuuauuauccagaacaccacgugggaagaccacugccaguuuucucgccccuccccuauuggcuaccuggggcuccugagccaaagaacacgggauaucuauauuucccgcagacggcgcggaaccuucacauggacccuuucugacagcgagggcaacgagacccccggcggguacugucugacaagauggaugcucaucgaagcugagcugaagugcuuuggaaauacggccguggcuaaguguaacgaaaaacaugaugaggaguucugcgacaugcugcggcucuuugauuucaauaagcaggccauccagcgccugaaauccccugcgcagaugagcauucaacuuaucaacaaggccgucaaugcucugauuaacgaccagcucaucaugaaaaaucaccugagagauaugaugggcauucccuauugcaacuacucuaaguauuguuaccuuaaucacaccuccagcgggcggacaucucugccuaagugcugucucgugagcaacggauccuaccugaaugaaacccauuucucugacgacaucgagcagcaagccgauaacaugaucacagaaaugcugcagaaagaguauauugaccgccagggcaagaccccgcucgggcugguggaucuuuuugucuucagcacguccuuuuaccugaucagcauuuuccuccaccugaucaaaauucccacacauagacacaucguuggaaagccuugccccaaaccucaucggcugaaucacaugggcauuuguucuugcggccuuuauaagcagcccggggugccgaccagauggaaacgcugaggacuagucccuguucccagagcccacuuuuuuuucuuuuuuugaaauaaaauagccugucuuucagaucuaaaaaaaaaaaaaaaaaaaaaaaaaaaaaaaaaaaaaaaaaaaaaaaaaaaaaaaaaaaaaaaaaaaaaaaaaaaaaaaaaaaaaaaaaaaaaaaaaaaa

SEQ ID NO: 25163 - RNA, 1721 nt, Artificial Sequence
  mRNA product Design a-1 (A100) comprising derived and/or modified sequence from LASV(KAK-428;Clade n.d. (VII))__ANH09740__GPCmut3 (opt5)
aggagagucccgcagucggcguccagcggcucugcuuguucgugugugugucguugcaggccuuauucaagcuuaccaugggccagaucgugaccuucuuucaagaggucccccacguuauugaagaggugaugaacaucgugcugauugcccucagccugcuugcuauccugaaggggcucuacaauuucgccacaugcggagucauuggccugaucacguuucuucugcucugugggagauccugcucugcgaccuauaaaggacaguacgaacugcagacacuggagcucaacauggaaagccugaauaugaccaugccucuuuccuguacaaagaacaauucucaucacuauauccgggcuggcaacaauaccgggcuggagcucacacugaccaacacgagcauuaucucccauaaauucugcaaucuuucugacgcccacaagaaaaaccuguacgaucauacccucaugagcauuaucacaaccuuucaccuguccauuccgaauuucaaccaguaugaggccaugagcugugacuuuaauggaggcaagaucucuauucaauacaaccugucccacagcuaugcuggcgaugccgcucagcauugcgggacaguggccaauggaguucuccagaccuucaugcgcauggcguggggcgggucuuaccuggcccuugacuccggaagacggggcugggauuguaucaucagcucuuaccaguaucugauuauccaaaacacgacaugggacgaucacugccaguuuucccgccccagcccuauuggguaccucggauucgugucccagaagaccagagacaucuauauuucucggcgcagacggggcacauuuaccuggacccugagcgauuccgaaggccaugacaugcccgggggauacugucuuacacgcuggaugcugaucgaggcugaucucaaaugcuucggcaacacggccgucgcuaaguguaaugaaaaacacgacgaggaguuuugcgauauguggagacuguucgacuucaacaagcaggccauccaacggcugaaagcgccugcccagaugaauauucagcucaucaacaaggcugugaaugcccugauuaacgaccaacuuaugaugaagaaucaucugcgcgauaucauggggauucccuauugcaacuacagcaaauuuuguuaucucaauaacaccacaaccggaagaacaucucugccucggugcugucuuaucuccaauggcagcuaccugaacgaaacccacuucucugacgauaucgagcagcaggcugacaauaugauuacggaaaugcuccagaaggaguacauggaucgccaagggaaaacaccgcugggacugguugaccucuuuguguucagcaccuccuuuuaucugaucaccauuuuccuucaccuggucaagauccccacacauagacacauugugggcaaaccuugccccaagccucaucggcucaaccacaugggcaucuguucuugcgggcuguacaaacagcccggagugccggucagauggaagcgcugaggacuagucccuguucccagagcccacuuuuuuuucuuuuuuugaaauaaaauagccugucuuucagaucuaaaaaaaaaaaaaaaaaaaaaaaaaaaaaaaaaaaaaaaaaaaaaaaaaaaaaaaaaaaaaaaaaaaaaaaaaaaaaaaaaaaaaaaaaaaaaaaaaaaa

SEQ ID NO: 25164 - RNA, 1721 nt, Artificial Sequence; identical to SEQ ID NO: 25158
  mRNA product Design a-1 (A100) comprising derived and/or modified sequence from LASV(Pinneo-NIG-1969;Clade I)__AIT17836__GPCmut3 (opt5)

SEQ ID NO: 25165 - RNA, 1721 nt, Artificial Sequence
  mRNA product Design a-1 (A100) comprising derived and/or modified sequence from LASV(ISTH0009-NIG-2011;Clade II)__AIT17404__GPCmut3 (opt5)
aggagagucccgcagucggcguccagcggcucugcuuguucgugugugugucguugcaggccuuauucaagcuuaccaugggccagaucauuaccuucuuucaagaggugccccacgucaucgaagagguuaugaacauugugcugaucgcccucagccugcuugcuauucugaaggggaucuacaauguggccacaugcggacucuucggccuggucuccuuucuucugcucugugggagaucuugcagcacgaccuauaaaggaguguacgaacugcagacacuggagcucgacauggcgucccugaacaugaccaugccucuuucuuguacaaagaauaacagccaucacuauaucaugguuggcaaugaaaccgggcuggagcucacacugaccaacacguccauuaucaaucauaaauucugcaaccuuucugaugcucacaagaaaaaucuguacgaccaugcccucaugagcauuaucuccaccuuucaccugagcauuccgaacuucaaucaguaugaggccaugucuugugauuuuaacggaggcaagaucuccgugcaguacaaucugagccacgcuuaugccgucgacgcugccaaccauugcggcacaauugcgaauggggugcuccaaaccuucaugcggauggccuggggaggcucuuacaucgcucuggauuccgggaagggaagcugggacuguaucaugacaucuuaccaguaucuuauuauccagaacaccacgugggaagaucacugccaguuuucccgccccagcccuauuggcuaccuggggcuccugucccaaagaacacgggacaucuauauuucucgcagacggcgcggaaccuucacauggacccuuagcgauuccgagggcaacgaaacccccggcggguacugucugacaagauggaugcucaucgaggccgagcugaaaugcuuuggaaauacggcuguugccaaguguaacgaaaaacaugacgaggaguucugcgauaugcugcggcucuuugacuucaauaagcaggcgauccgcagacugaaaaccccugcccagaugagcauucagcuuaucaacaaggcugugaaugcccugauuaacgaucaacucaucaugaagaaucaucugcgggacauuaugggcauccccuauugcaacuacucuaaauauuguuaccuuaaucacacagucaccgggaagacaucccugccucgcugcugucucgugagcaacggaucuuaccugaaugaaacccacuucagcgacgauaucgaacagcaggcugacaacaugauuacggagcugcuccaaaaagaguauauggauagacagggcaagacaccgcuggggcuuguggaccuguuugucuucuccaccucuuuuuaccucaucagcauuuuccugcaccugaucaaaauucccacccaucggcacaucacaggaaagccuugccccaaaccucaucgccuuaaucacaugggcauuuguuccugcggccucuauaagcaccccgggguuccggugaaguggaaaagaugaggacuagucccuguucccagagcccacuuuuuuuucuuuuuuugaaauaaaauagccugucuuucagaucuaaaaaaaaaaaaaaaaaaaaaaaaaaaaaaaaaaaaaaaaaaaaaaaaaaaaaaaaaaaaaaaaaaaaaaaaaaaaaaaaaaaaaaaaaaaaaaaaaaaa

SEQ ID NO: 25166 - RNA, 1721 nt, Artificial Sequence
  mRNA product Design a-1 (A100) comprising derived and/or modified sequence from LASV(ISTH2010-NIG-2012;Clade II)__AIT17482__GPCmut3 (opt5)
aggagagucccgcagucggcguccagcggcucugcuuguucgugugugugucguugcaggccuuauucaagcuuaccaugggccagaucauuaccuucuuucaagaggugccccacgucaucgaagagguuaugaacauugugcugaucgcccucagccugcuugcuauucugaaggggaucuacaauguggccacaugcggacucuucggccuggucuccuuucuucugcucugugggagaucuugcagcacgaccuauaaaggaguguacgaacugcagacacuggagcucgacauggcgucccugaacaugaccaugccucuuucuuguacaaagaauaacagccaucacuauaucaugguuggcaaugaaaccgggcuggagcucacacugaccaacacguccauuaucaaucauaaauucugcaaccuuucugaugcucacaagaaaaaucuguacgaccaugcccucaugagcauuaucuccaccuuucaccugagcauuccgaacuucaaucaguaugaggccaugucuugugauuuuaacggaggcaagaucuccgugcaguacaaucugagccacgcuuaugccgucgacgcugccaaccauugcggcacaauugcgaauggggugcuccaaaccuucaugcggauggccuggggaggcucuuacaucgcucuggauuccgggaagggaagcugggacuguaucaugacaucuuaccaguaucuuauuauccagaacauuaccugggaagaucacugccaguuuucccgccccagcccuaucggcuaccuggggcuccugucccaaagaacgcgggacauuuauaucucucgcagacggcgcggaacauucaccuggacacuuagcgauuccgagggcaacgaaacccccggcggguacugucugaccagauggaugcucaucgaggccgagcugaaaugcuuuggaaauacagcuguugccaaguguaacgaaaaacaugacgaggaguucugcgauaugcugcggcucuuugacuucaauaagcaggcgauucgcagacugaaaacgccugcccagaugagcauccagcuuauuaacaaggcugugaaugcccugaucaacgaucaacucauuaugaagaaucaucugcgggacaucaugggcauccccuauugcaacuacucuaaauauuguuaccuuaaucacaccgucacagggaagaccucccugccucgcugcugucucgugagcaacggaucuuaccugaaugaaacacacuucagcgacgauauugaacagcaggcugacaacaugaucaccgagcugcuccaaaaagaguauauugauagacagggcaagacgccgcuggggcuuguggaccuguuugucuucuccacaucuuuuuaccucaucagcauuuuccugcaccugguuaaaauccccacccaucggcacguggugggaaagccuugccccaaaccucaucgccuuaaucacaugggcauuuguuccugcggccucuauaagcaccccggggucccggugaaguggaaaagaugaggacuagucccuguucccagagcccacuuuuuuuucuuuuuuugaaauaaaauagccugucuuucagaucuaaaaaaaaaaaaaaaaaaaaaaaaaaaaaaaaaaaaaaaaaaaaaaaaaaaaaaaaaaaaaaaaaaaaaaaaaaaaaaaaaaaaaaaaaaaaaaaaaaaa

SEQ ID NO: 25167 - RNA, 1721 nt, Artificial Sequence
  mRNA product Design a-1 (A100) comprising derived and/or modified sequence from LASV(Lassa virus/H.sapiens-wt/NGA/2015/ISTH_0543;Clade II)__AVO03639__GPCmut3 (opt5)
aggagagucccgcagucggcguccagcggcucugcuuguucgugugugugucguugcaggccuuauucaagcuuaccaugggccagaucauuaccuucuuucaagaggugccccacgucaucgaagagguuaugaacauugugcugaucgcccucagccugcuugcuauucugaaggggaucuacaauguggccacaugcggacucuucggccuggucuccuuucuucugcucugugggagaucuugcagcacgaccuauaaaggaguguacgaacugcagacacuggagcucgacauggcgaaccugaauaugaccaugccucuuuccuguacaaagaacaauucucaucacuauaucaugguuggcaacgaaaccgggcuggagcucacacugaccaauacgagcauuaucaaccauaaauucugcaaucuuuccgaugcucacaagaaaaaccuguacgaccaugcccucaugucuauuaucagcaccuuucaccuguccauuccgaauuucaaccaguaugaggccaugagcugugauuuuaauggaggcaagaucucugugcaguacaaccugucccacacauaugcugucgacgccgcuaaucauugcggcaccauugccaacggggugcuccaaacauucaugcggauggcguggggaggcagcuacaucgcccuggauucugggaagggauccugggacuguaucaugaccagcuaccaguaucuuguuauucagaacacgacaugggaagaucacugccaguuuucucgccccuccccuaucggcuaccuggggcuccugagccaaagaacccgggacauuuauaucucccgcagacggcgcggaacauucaccuggacccuuucugauagcgagggcaaugaaacacccggcggguacugucugacgagauggaugcucauugaggcugagcugaaaugcuuuggaaacaccgccguggcuaaguguaaugaaaaacaugacgaggaguucugcgauaugcugcggcucuuugacuucaacaagcaggccauccgcagacugaaaaccccugcgcagauguccauccagcuuauuaauaaggccgucaacgcucugaucaaugaucaacucauuaugaagaaccaucugcgggacaucaugggcauucccuauugcaauuacagcaaauauuguuaccuuaaccacacagugacagggaagaccucucugccucgcugcugucucguguccaauggaagcuaccugaacgaaacgcacuucucugacgauaucgaacagcaggccgacaauaugaucacagagcugcuccaaaaagaguauauugauagacagggcaagaccccgcuggggcuugucgaccuguuuguuuucagcaccuccuuuuaccucaucucuauuuuccugcaccuggugaaaauccccacacaucggcacauuaccggaaagccuugccccaaaccucaucgccuuaaccacaugggcaucuguagcugcggccucuauaagcaccccggggugccggucaaguggaaaagaugaggacuagucccuguucccagagcccacuuuuuuuucuuuuuuugaaauaaaauagccugucuuucagaucuaaaaaaaaaaaaaaaaaaaaaaaaaaaaaaaaaaaaaaaaaaaaaaaaaaaaaaaaaaaaaaaaaaaaaaaaaaaaaaaaaaaaaaaaaaaaaaaaaaaa

SEQ ID NO: 25168 - RNA, 1721 nt, Artificial Sequence
  mRNA product Design a-1 (A100) comprising derived and/or modified sequence from LASV(Lassa virus/H.sapiens-wt/NGA/2016/ISTH_0009;Clade II)__AVO03571__GPCmut3 (opt5)
aggagagucccgcagucggcguccagcggcucugcuuguucgugugugugucguugcaggccuuauucaagcuuaccaugggccagaucauuaccuucuuucaagaggugccccacgucaucgaagagguuaugaacauugugcugaucgcccucagccugcuugcuauucugaaggggaucuacaauguggccacaugcggacuccugggccuugucuccuuccugcuccugugugggagaucuugcagcacgaccuauaaaggaguguacgaacugcagacacucgagcuggacauggcgucccuuaacaugaccaugccucugucuuguacaaagaauaacagccaucacuauaucaugguuggcaaugaaaccgggcucgagcugacacuuaccaacacguccauuaucaaucauaaauuuugcaaccugucugaugcucacaagaaaaaucucuacgaccaugcccugaugagcauuaucuccaccuuccaccugagcauuccgaacuuuaaucaguaugaggccaugucuugugauuucaacggaggccggaucuccgugcaguacaaucucagccacucuuaugcugucgacgccgcuaaccauugcggcacaauugccaauggggugcugcaaaccuuuaugcgcauggcguggggaggcuccuacaucgcccuugauagcgggaagggaucuugggacuguaucaugacauccuaccaguaucugauuauccagaacaccacgugggaagaucacugccaguucagcagacccuccccuauuggcuaccucgggcugcuuucucaacggacacgcgacaucuauauuagcagacggcgcagaggaaccuuuacauggacccuguccgauagcgagggcaacgaaacccccggcggguacugucucacacgguggaugcugaucgaggcugagcugaagugcuucggaaauacggccguugcuaaauguaacgaaaagcaugacgaggaauuuugcgauaugcuccgccuguucgacuuuaauaaacaggccaucagacggcuuaagaccccugcgcagaugucuauucagcugaucaacaaagccgugaaugcucucauuaacgaucaacugaucaugaagaaucaccuucgcgacauuaugggcauccccuauugcaacuacuccaaguauuguuaccugaaucacacagucaccgggaaaacaagccucccuagaugcugucuggugucuaacggaagcuaccugaaugagacccauuucuccgacgauaucgaacagcaggccgacaacaugauuacggagcuccugcaaaaggaguauaucgaucggcagggcaaaacaccgcuugggcugguggaccucuucgucuuuucuaccagcuucuaccugauuuccaucuuucugcaccuuguuaagauucccacccaucgccacaucacaggaaaaccuugccccaagccucauagacucaaucacaugggcauuuguagcugcggccuguauaaccaccccggggugccggugaaauggaagcggugaggacuagucccuguucccagagcccacuuuuuuuucuuuuuuugaaauaaaauagccugucuuucagaucuaaaaaaaaaaaaaaaaaaaaaaaaaaaaaaaaaaaaaaaaaaaaaaaaaaaaaaaaaaaaaaaaaaaaaaaaaaaaaaaaaaaaaaaaaaaaaaaaaaaa

SEQ ID NO: 25169 - RNA, 1721 nt, Artificial Sequence
  mRNA product Design a-1 (A100) comprising derived and/or modified sequence from LASV(Lassa virus/H.sapiens-wt/NGA/2016/ISTH_0017;Clade II)__AVO03567__GPCmut3 (opt5)
aggagagucccgcagucggcguccagcggcucugcuuguucgugugugugucguugcaggccuuauucaagcuuaccaugggccagaucauuaccuucuuucaagaggugccccacgucaucgaagagguuaugaacauugugcugaucgcccucagccugcuugcuauucugaaggggaucuacaauguggccacaugcggacucuucggccuggucuccuuucuucugcucugugggagaucuugcagcacgaccuauaaaggaguguacgaacugcagacacuggagcucgacauggcgucccugaacaugaccaugccucuuucuuguacaaagaauaacagccaucacuauaucaugguuggcaaugaaaccgggcuggagcucacacugaccaacacguccauuaucaaucauaaauucugcaaccuuucugaugcucacaagaaaaaucuguacgaccaugcccucaugagcauuaucuccaccuuucaccugagcauuccgaacuucaaucaguaugaggccaugucuugugauuuuaacggaggcaagaucuccgugcaguacaaucugagccacacauaugcuauugacgccgcuaaccauugcggcaccaucgccaaugggguccuccaaacauucaugcggauggcguggggaggcucuuacaucgcccuggauuccgggaagggaagcugggacuguauuaugaccucuuaccaguaucuuaucauucagaacacgacaugggaagaucacugccaguuuucccgccccagcccuaucggcuaccuggggcuccugucccaaagaacccgggacauuuauaucucucgcagacggcgcggaacauucaccuggacccuuagcgauuccgagggcaacgaaacacccggcggguacugucugacgagauggaugcucaucgaggcugagcugaaaugcuuuggaaauaccgccguggcuaaguguaacgaaaaacaugacgaggaguucugcgauaugcugcggcucuuugacuucaauaagcaggccauucgcagacugaaaaccccugcgcagaugagcauccagcuuauuaacaaggccguuaaugcucugaucaacgaucaacucauuaugaagaaucaucugcgggacaucaugggcauccccuauugcaacuacucuaaauauuguuaccuuaaucacacagugacagggaagaccucccugccucgcugcugucucgucagcaacggaucuuaccugaaugaaacgcacuucagcgacgauauugaacagcaggccgacaacaugaucacagagcugcuccaaaaagaguauauggauagacagggcaagaccccgcuggggcuuguggaccuguuuguguucuccaccucuuuuuaccucauuagcaucuuccugcaccugguccggauucccacacaucgccacguuaucggaaaaccuugccccaagccucauagacuuaaucacaugggcauuuguuccugcggccucuauaaacaccccggggugccggugaaguggaagcggugaggacuagucccuguucccagagcccacuuuuuuuucuuuuuuugaaauaaaauagccugucuuucagaucuaaaaaaaaaaaaaaaaaaaaaaaaaaaaaaaaaaaaaaaaaaaaaaaaaaaaaaaaaaaaaaaaaaaaaaaaaaaaaaaaaaaaaaaaaaaaaaaaaaaa

SEQ ID NO: 25170 - RNA, 1721 nt, Artificial Sequence
  mRNA product Design a-1 (A100) comprising derived and/or modified sequence from LASV(Lassa virus/H.sapiens-wt/NGA/2018/ISTH_0959;Clade II)__AVV65099__GPCmut3 (opt5)
aggagagucccgcagucggcguccagcggcucugcuuguucgugugugugucguugcaggccuuauucaagcuuaccaugggccagaucauuaccuucuuucaagaggugccccacgucaucgaagagguuaugaacauugugcugaucgcccucagccugcuugcuauucugaaggggaucuacaauguggucacaugcggacucuucggccugguguccuuucuucugcucugugggagaucuugcagcacgaccuauaaaggaguuuacgaacugcagacacuggagcucgacauggccucccugaacaugaccaugccucuuucuuguacaaagaauaacagccaucacuauaucauggugggcaaugaaaccgggcuggagcucacacugaccaacacguccauuaucaaucauaaauucugcaaccuuucugaugcgcacaagaaaaaucuguacgaccaugcucucaugagcauuaucuccaccuuucaccugagcauuccgaacuucaaucaguaugaggccaugucuugugauuuuaacggaggcaagaucuccguccaguacaaucugagccacgccuaugcuauugacgccgcuaaccauugcggcacaaucgccaauggggugcuccaaaccuucaugcggauggcguggggaggcucuuacaucgcccuggauuccgggaagggaagcugggacuguauuaugacaucuuaccaguaucuuaucauucagaacaccacgugggaagaucacugccaguuuucccgccccagcccuaucggcuaccuggggcuccugucccaaagaacacgggacauuuauaucucucgcagacggcgcggaaccuucacauggacccuuagcgauuccgagggcaacgaaacccccggcggguacugucugacaagauggaugcucaucgaggcugagcugaaaugcuuuggaaauacggccguugcuaaguguaacgaaaaacaugacgaggaguucugcgauaugcugcggcucuuugacuucaauaagcaggccauucgcagacugaaaaccccugcgcagaugagcauccagcuuauuaacaaggccgugaaugcucugaucaacgaucaacucauuaugaagaaucaucugcgggacaucaugggcauccccuauugcaacuacucuaaauauuguuaccuuaaucacacagucaccgggaagacaucccugccucgcugcugucucgugagcaacggaucuuaccugaaugaaacccacuucagcgacgauauugaacagcaggccgacaacaugaucacggagcugcuccaaaaagaguauauugauagacagggcaagacaccgcuggggcuuguggaccuguuugucuucuccaccucuuuuuaccucaucagcauuuuccugcaccugguuaaaauccccacccaucggcacgugauuggaaagccuugccccaaaccucaucgccuuaaucacaugggcaucuguuccugcggccucuauaagcaccccggggugccggucaaguggaaaagaugaggacuagucccuguucccagagcccacuuuuuuuucuuuuuuugaaauaaaauagccugucuuucagaucuaaaaaaaaaaaaaaaaaaaaaaaaaaaaaaaaaaaaaaaaaaaaaaaaaaaaaaaaaaaaaaaaaaaaaaaaaaaaaaaaaaaaaaaaaaaaaaaaaaaa

SEQ ID NO: 25171 - RNA, 1721 nt, Artificial Sequence
  mRNA product Design a-1 (A100) comprising derived and/or modified sequence from LASV(LASV003-NIG-2008;Clade II)__AIT17580__GPCmut3 (opt5)
aggagagucccgcagucggcguccagcggcucugcuuguucgugugugugucguugcaggccuuauucaagcuuaccaugggccagaucauuaccuucuuucaagaggugccccacgucaucgaagagguuaugaacauugugcugaucgcccucagccugcuugcuauucugaaggggaucuacaauguggccacaugcggacucuucggccuggucuccuuucuucugcucugugggagaucuugcagcacgaccuauaaaggaguguacgaacugcagacacuggagcucgacauggcgucccugaacaugaccaugccucuuucuuguacaaagaauaacagccaucacuauaucaugguuggcaaugaaaccgggcuggagcucacacugaccaacacguccauuaucaaucauaaauucugcaaccuuucugaugcucacaagaaaaaucuguacgaccaugcccucaugagcauuaucuccaccuuucaccugagcauuccgaacuucaaucaguaugaggccaugucuugugauuuuaacggaggcaagaucuccgugcaguacaaucugagccacacauaugcugucgacgccgcuaaccauugcggcaccauugccaauggggugcuccaaacauucaugcggauggcguggggaggcucuuacaucgcccuggauuccgggaagggaagcugggacuguaucaugaccucuuaccaguaucuuauuauccagaacacgacaugggaagaucacugccaguuuucccgccccagcccuauuggcuaccuggggcuccugucccaaagaacccgggacaucuauauuucucgcagacggcgcggaacauucaccuggacccuuagcgauuccgagagcaacgaaacacccggcggcuacugucugacgagauggaugcucaucgaggcugagcugaaaugcuuugggaauaccgccguugcuaaguguaacgaaaaacaugacgaggaguucugcgauaugcugcggcucuuugacuucaauaagcaggccauccgcagacugaaagcgccugcccagaugucuauucagcuuaucaacaaggcugugaaugcccugauuaacgaucaacucaucaugaagaaucaucugcgggacauuaugggaauccccuauugcaacuacuccaaauauuguuaccuuaaucacacagucaccggccgcacaagccugccuagaugcugucucgugucuaacgggagcuaccugaaugaaacccacuucuccgacgauaucgaacagcaggcugacaacaugauuacggagcugcuccaaaaggaguauauggaucggcagggaaaaacaccgcugggccuuguggaccuguuugucuucucuaccagcuuuuaccucaucuccauuuuccugcaccugguuaagauccccacccaucgccacgugauugggaaaccuugccccaagccucauagacuuaaucacaugggaaucuguagcugcggccucuauaaacaccccggcgugccggucaaguggaagcggugaggacuagucccuguucccagagcccacuuuuuuuucuuuuuuugaaauaaaauagccugucuuucagaucuaaaaaaaaaaaaaaaaaaaaaaaaaaaaaaaaaaaaaaaaaaaaaaaaaaaaaaaaaaaaaaaaaaaaaaaaaaaaaaaaaaaaaaaaaaaaaaaaaaaa

SEQ ID NO: 25172 - RNA, 1721 nt, Artificial Sequence
  mRNA product Design a-1 (A100) comprising derived and/or modified sequence from LASV(LASV035-NIG-2009;Clade II)__AIT17588__GPCmut3 (opt5)
aggagagucccgcagucggcguccagcggcucugcuuguucgugugugugucguugcaggccuuauucaagcuuaccaugggccagaucauuaccuucuuucaagaggugccccacgucaucgaagagguuaugaacauugugcugaucgcccucagccugcuugcuauucugaaggggaucuacaauguggccacaugcggacucuucggccuggucuccuuucuucugcucugugggagaucuugcagcacgaccuauaaaggaguguacgaacugcagacacuggagcucgacauggcgucccugaacaugaccaugccucuuucuuguacaaagaauaacagccaucacuauaucaugguuggcaaugaaaccgggcuggagcucacacugaccaacacguccauuaucaaucauaaauucugcaaccuuucugaugcucacaagaaaaaucuguacgaccaugcccucaugagcauuaucuccaccuuucaccugagcauuccgaacuucaaucaguaugaggccaugucuugugauuuuaacggaggcaagaucuccgugcaguacaaucugagccacgcuuaugccgucgacgcugccaaccauugcggcacaauugcgaauggggugcuccaaaccuucaugcggauggccuggggaggcucuuacaucgcucuggauuccgggaagggaagcugggacuguaucaugacaucuuaccaguaucuuauuauccagaacaccacgugggaagaucacugccaguuuucccgccccagcccuauuggcuaccuggggcuccugucccaaagaacacgggacaucuauauuucucgcagacggcgcggaaccuucacauggacccuuagcgauuccgagggcaacgaaacccccggcggguacugucugacaagauggaugcucaucgaggccgagcugaaaugcuuuggaaauacggcuguugccaaguguaacgaaaaacaugacgaggaguucugcgauaugcugcggcucuuugacuucaauaagcaggcgauccgcagacugaaagccccugcucagaugagcauucagcuuaucaacaaggccgugaaugcucugauuaacgaucaacucaucaugaagaaucaucugcgggacauuaugggcauccccuauugcaacuacucuaaauauuguuaccuuaaucacaccgucacagggaagaccucccugccucgcugcugucucgugagcaacggaucuuaccugaaugaaacacacuucagcgacgauaucgaacagcaggccgacaacaugauuaccgagcugcuccaaaaagaguauaucgauagacagggcaagacgccgcuggggcuuguggaccuguuugucuucuccacaucuuuuuaccucauuagcaucuuccugcaccugguuaaaauucccacccaucggcacgugaucggaaagccuugccccaaaccucaucgccuuaaucacaugggcauuuguuccugcggccucuauaagcaccccggggugccggucaaguggaaaagaugaggacuagucccuguucccagagcccacuuuuuuuucuuuuuuugaaauaaaauagccugucuuucagaucuaaaaaaaaaaaaaaaaaaaaaaaaaaaaaaaaaaaaaaaaaaaaaaaaaaaaaaaaaaaaaaaaaaaaaaaaaaaaaaaaaaaaaaaaaaaaaaaaaaaa

SEQ ID NO: 25173 - RNA, 1721 nt, Artificial Sequence
  mRNA product Design a-1 (A100) comprising derived and/or modified sequence from LASV(LASV1000-NIG-2009;Clade II)__AIT17782__GPCmut3 (opt5)
aggagagucccgcagucggcguccagcggcucugcuuguucgugugugugucguugcaggccuuauucaagcuuaccaugggccagaucauuaccuucuuucaagaggugccccacgucaucgaagagguuaugaacauugugcugaucgcccucagccugcuugcuauucugaaggggaucuacaauguggccacaugcggacucuucggccuggucuccuuucuucugcucugugggagaucuugcagcacgaccuauaaaggaguguacgaacugcagacacuggagcucgacauggcgucccugaacaugaccaugccucuuucuuguacaaagaauaacagccaucacuauaucaugguuggcaaugaaaccgggcuggagcucacacugaccaacacguccauuaucaaucauaaauucugcaaccuuucugaugcucacaagaaaaaucuguacgaccaugcccucaugagcauuaucuccaccuuucaccugagcauuccgaacuucaaucaguaugaggccaugucuugugauuuuaacggaggcaagaucuccgugcaguacaaucugagccacacauaugcugucgacgccgcuaaccauugcggcaccauugccaauggggugcuccaaacauucaugcggauggcguggggaggcucuuacaucgcccuggauuccgggaagggaagcugggacuguaucaugaccucuuaccaguaucuuauuauccagaacacgacaugggaagaucacugccaguuuucccgccccagcccuauuggcuaccuggggcuccugucccaaagaacccgggacaucuauauuucucgcagacggcgcggaacauucaccuggacccuuagcgauuccgagggcaacgaaacacccggcggguacugucugacgagauggaugcucaucgaggcugagcugaaaugcuuuggaaauaccgccguugcuaaguguaacgaaaaacaugacgaggaguucugcgauaugcugcggcucuuugacuucaauaagcaggccaucaaacgccugaagaccccugcgcagaugagcauucagcuuaucaacaaggccgugaaugcucugauuaacgaucaacucaucaugaaaaaucaccugagagacauuaugggcauccccuauugcaacuacucuaaguauuguuaccuuaaucacacagucacagggaaaaccucccugccucggugcugucucgugagcaacggaucuuaccugaaugaaacgcauuucagcgacgauaucgaacagcaggccgacaacaugauuacagagcugcuccaaaaggaguauaucgaucgccagggcaaaaccccgcuggggcuuguggaccuguuugucuucuccaccucuuuuuaccucauuagcaucuuccugcaccugguuaagauucccacacauagacacguggugggaaaaccuugccccaagccucaucggcuuaaucacaugggcaucuguuccugcggccucuauaagcaccccggggucccggugaaauggaagcgcugaggacuagucccuguucccagagcccacuuuuuuuucuuuuuuugaaauaaaauagccugucuuucagaucuaaaaaaaaaaaaaaaaaaaaaaaaaaaaaaaaaaaaaaaaaaaaaaaaaaaaaaaaaaaaaaaaaaaaaaaaaaaaaaaaaaaaaaaaaaaaaaaaaaaa

SEQ ID NO: 25174 - RNA, 1721 nt, Artificial Sequence
  mRNA product Design a-1 (A100) comprising derived and/or modified sequence from LASV(LASV221-NIG-2010;Clade II)__AIT17624__GPCmut3 (opt5)
aggagagucccgcagucggcguccagcggcucugcuuguucgugugugugucguugcaggccuuauucaagcuuaccaugggccagaucauuaccuucuuucaagaggugccccacgucaucgaagagguuaugaacauugugcugaucgcccucagccugcuugcuauucugaaggggaucuacaauguggccacaugcggacucuucggccuggucuccuuucuucugcucugugggagaucuugcagcacgaccuauaaaggaguguacgaacugcagacacuggagcucgacauggcgucccugaacaugaccaugccucuuucuuguacaaagaauaacagccaucacuauaucaugguuggcaaugaaaccgggcuggagcucacacugaccaacacguccauuaucaaucauaaauucugcaaccuuucugaugcucacaagaaaaaucuguacgaccaugcccucaugagcauuaucuccaccuuucaccugagcauuccgaacuucaaucaguaugaggccaugucuugugauuuuaacggaggcaagaucuccgugcaguacaaucugagccacacauaugcuauugacgccgcuaaccauugcggcaccaucgccaaugggguccuccaaacauucaugcggauggcguggggaggcucuuacaucgcccuggauuccgggaagggaagcugggacuguauuaugaccucuuaccaguaucuuaucauucagaacacgacaugggaagaucacugccaguuuucccgccccagcccuaucggcuaccuggggcuccugucccaaagaacccgggacauuuauaucucucgcagacggcgcggaacauucaccuggacccuuagcgauuccgagggcaacgaaacacccggcggguacugucugacgagauggaugcucaucgaggcugagcugaaaugcuuuggaaauaccgccguggcuaaguguaacgaaaaacaugacgaggaguucugcgauaugcugcggcucuuugacuucaauaagcaggccauucgcagacugaaaaccccugcgcagaugagcauccagcuuauuaacaaggccguuaaugcucugaucaacgaucaacucauuaugaagaaucaucugcgggacaucaugggcauccccuauugcaacuacucuaaauauuguuaccuuaaucacacagugacagggaagaccucccugccucgcugcugucucgucagcaacggaucuuaccugaaugaaacgcacuucagcgacgauauugaacagcaggccgacaacaugaucacagagaugcugcaaaaagaguauauggauagacagggcaagaccccgcucgggcugguggaccuuuuuguguucuccaccucuuuuuaccugauuagcaucuuccuccaccuggucaaaauucccacacaucggcacguuaucggaaagccuugccccaaaccucaucgccugaaucacaugggcauuuguuccugcggccuuuauaagcaccccggggugccggugaaguggaaaagaugaggacuagucccuguucccagagcccacuuuuuuuucuuuuuuugaaauaaaauagccugucuuucagaucuaaaaaaaaaaaaaaaaaaaaaaaaaaaaaaaaaaaaaaaaaaaaaaaaaaaaaaaaaaaaaaaaaaaaaaaaaaaaaaaaaaaaaaaaaaaaaaaaaaaa

SEQ ID NO: 25175 - RNA, 1721 nt, Artificial Sequence
  mRNA product Design a-1 (A100) comprising derived and/or modified sequence from LASV(LASV237-NIG-2010;Clade II)__AIT17638__GPCmut3 (opt5)
aggagagucccgcagucggcguccagcggcucugcuuguucgugugugugucguugcaggccuuauucaagcuuaccaugggccagaucauuaccuucuuucaagaggugccccacgucaucgaagagguuaugaacauugugcugaucgcccucagccugcuugcuauucugaaggggaucuacaauguggccacaugcggacucuucggccuggucuccuuucuucugcucugugggagaucuugcagcacgaccuauaaaggaguguacgaacugcagacacuggagcucgacauggcgucccugaacaugaccaugccucuuucuuguacaaagaauaacagccaucacuauaucaugguuggcaaugaaaccgggcuggagcucacacugaccaacacguccauuaucaaucauaaauucugcaaccuuucugaugcucacaagaaagaccuguacgaucaugcccucaugagcauuaucuccaccuuucaccugagcauuccgaauuucaaccaguaugaggccaugucuugugacuuuaauggaggcaagaucuccgugcaguacaaccugagccacacauaugcugucgaugccgcuaaucauugcggcaccauugccaacggggugcuccaaacauucaugcggauggcguggggaggcucuuacaucgcccuggacuccgggaagggaagcugggauuguaucaugaccucuuaccaguaucuuauuauccagaauacgacaugggaagaccacugccaguuuucccgccccagcccuauuggcuaccuggggcuccugucccaaagaacccgggauaucuauauuucucgcagacggcgcggaacauucaccuggacccuuagcgacuccgagggcaacgaaacacccggcggguacugucugacgagauggaugcucaucgaggcugagcugaaaugcuuuggaaacaccgccguugcuaaguguaaugaaaaacaugaugaggaguucugcgacaugcugcggcucuuugauuucaacaagcaggccauccgcagacugaaaaccccugcgcagaugagcauucagcuuaucaauaaggccgugaacgcucugauuaaugaccaacucaucaugaagaaccaucugcgggacauuaugggcauccccuauugcaauuacucuaaauauuguuaccuuaaccacacagucacagggaagaccucccugccucgcugcugucucgugagcaauggaucuuaccugaacgaaacgcacuucagcgaugacaucgaacagcaggccgauaauaugauuacagagcugcuccaaaaagaguauauggacagacagggcaagaccccgcuggggcuuguggaucuguuugucuucuccaccucuuuuuaccucaucagcauuuuccugcaccugaucaaaauucccacacaucggcacaucaccggaaagccuugccccaaaccucaucgccuuaaccacaugggcauuuguuccugcggccucuauaagcaccccgggguuccggugaaguggaaaagaugaggacuagucccuguucccagagcccacuuuuuuuucuuuuuuugaaauaaaauagccugucuuucagaucuaaaaaaaaaaaaaaaaaaaaaaaaaaaaaaaaaaaaaaaaaaaaaaaaaaaaaaaaaaaaaaaaaaaaaaaaaaaaaaaaaaaaaaaaaaaaaaaaaaaa

SEQ ID NO: 25176 - RNA, 1721 nt, Artificial Sequence
  mRNA product Design a-1 (A100) comprising derived and/or modified sequence from LASV(LASV253-NIG-2011;Clade II)__AIT17670__GPCmut3 (opt5)
aggagagucccgcagucggcguccagcggcucugcuuguucgugugugugucguugcaggccuuauucaagcuuaccaugggccagaucauuaccuucuuucaagaggugccccacgucaucgaagagguuaugaacauugugcugaucgcccucagccugcuugcuauucugaaggggaucuacaauguggccacaugcggacucuucggccuggucuccuuucuucugcucugugggagaucuugcagcacgaccuauaaaggaguguacgaacugcagacacuggagcucgacauggcgucccugaacaugaccaugccucuuucuuguacaaagaauaacagccaucacuauaucaugguuggcaaugaaaccgggcuggagcucacacugaccaacacguccauuaucaaucauaaauucugcaaccuuucugaugcucacaagaaaaaucuguacgaccaugcccucaugagcauuaucuccaccuuucaccugagcauuccgaacuucaaucaguaugaggccaugucuugugauuuuaacggaggcaagaucuccgugcaguacaaucugagccacacauaugcugucgacgccgcuaaccauugcggcaccauugccaauggggugcuccaaacauucaugcggauggcguggggaggcucuuacaucgcccuggauuccgggaagggaagcugggacuguaucaugaccucuuaccaguaucuuauuauccagaacacgacaugggaagaucacugccaguuuucccgccccagcccuauuggcuaccuggggcuccugucccaaagaacccgggacaucuauauuucucgcagacggcgcggaacauucaccuggacccuuagcgauuccgagggcaacgaaacacccggcggguacugucugacgagauggaugcucaucgaggcugagcugaaaugcuuuggaaauaccgccguugcuaaguguaacgaaaaacaugacgaggaguucugcgauaugcugcggcucuuugacuucaauaagcaggccauccgcagacugaaagcgccugcccagaugagcauucagcuuaucaacaaggcugugaaugcccugauuaacgaucaacucaucaugaagaaucaucugcgggacauuaugggcauccccuauugcaacuacucuaaauauuguuaccuuaaucacacagucaccgggcgcacaucccugccuagaugcugucucgugagcaacggaucuuaccugaaugaaacccacuucagcgacgauaucgaacagcaggcugacaacaugauuacggagcugcuccaaaaggaguauaucgaucggcagggcaaaacaccgcuggggcuuguggaccuguuugucuucuccaccucuuuuuaccucauuagcaucuuccugcaccugguuaagauucccacccaucgccacaucauuggaaaaccuugccccaagccucauagacuuaaucacaugggcaucuguuccugcggccucuauaaacaccccggggugccggugaaguggaagcggugaggacuagucccuguucccagagcccacuuuuuuuucuuuuuuugaaauaaaauagccugucuuucagaucuaaaaaaaaaaaaaaaaaaaaaaaaaaaaaaaaaaaaaaaaaaaaaaaaaaaaaaaaaaaaaaaaaaaaaaaaaaaaaaaaaaaaaaaaaaaaaaaaaaaa

SEQ ID NO: 25177 - RNA, 1721 nt, Artificial Sequence
  mRNA product Design a-1 (A100) comprising derived and/or modified sequence from LASV(LASV254-NIG-2011;Clade II)__AIT17674__GPCmut3 (opt5)
aggagagucccgcagucggcguccagcggcucugcuuguucgugugugugucguugcaggccuuauucaagcuuaccaugggccagaucauuaccuucuuucaagaggugccccacgucaucgaagagguuaugaacauugugcugaucgcccucagccugcuugcuauucugaaggggaucuacaauguggccacaugcggacucuucggccuggucuccuuucuucugcucugugggagaucuugcagcacgaccuauaaaggaguguacgaacugcagacacuggagcucgacaugaccaaccugaauaugacaaugccucuuuccuguaccaagaacaauucucaucacuauaucaugguuggcaacgaaacagggcuggagcucacccugacgaauaccagcauuaucaaccauaaauucugcaaucuuuccgaugcgcacaagaaaaaccuguacaaucaugcucucaugucuauuaucagcacauuucaccuguccauuccgaacuucaaucaguaugaggccaugagcugugacuuuaacggaggcaagaucucugugcaguacaaucugucccacagcuaugccgucgaugcugccaaccauugcggcaccauugcuaacggggugcuccaaacauucaugcggauggccuggggaggcucuuacaucgcgcuggacuccgggaagggaaauugggauuguaucaugaccagcuaccaguaucuuauuauccagaacacgacaugggaagaccacugccaguuuucucgccccuccccuauuggcuaccuggggcuccugagccaaagaacccgggauaucuauauuucccgcagacggcgcggaacauucaccuggacccuuucugacagcgagggcaaugaaacacccggcggguacugucugacgagauggaugcucaucgaggccgagcugaaaugcuuuggaaacaccgcuguugccaaguguaaugaaaaacaugaugaggaguucugcgacaugcugcggcucuuugauuucaacaagcaggcuauccgcagacugaaaaccccugcccaggcgaauauucagcuuaucaacaaggccgugaaugcucugauuaacgaccaacucaucaugaagaaucaucugcgggauauuaugggcauccccuauugcaacuacuccaaauauuguuaccuuaaucacacagucacagggaagaccagccugccucgcugcugucucgugucuaacggauccuaccugaaugaaacgcacuucagcgacgacaucgaacagcaggccgauaacaugauuacagagcugcuccaaaaagaguauauggacagacagggcaagaccccgcuggggcuuguggaucuguuugucuucucuaccagcuuuuaccucaucuccauuuuccugcaccugguuaaaauccccacacaucggcacgugauuggaaagccuugccccaaaccucaucgccuuaaccacaugggcaucuguucuugcggccucuauaagcaccccggggugccggucaaguggaaaagaugaggacuagucccuguucccagagcccacuuuuuuuucuuuuuuugaaauaaaauagccugucuuucagaucuaaaaaaaaaaaaaaaaaaaaaaaaaaaaaaaaaaaaaaaaaaaaaaaaaaaaaaaaaaaaaaaaaaaaaaaaaaaaaaaaaaaaaaaaaaaaaaaaaaaa

SEQ ID NO: 25178 - RNA, 1721 nt, Artificial Sequence
  mRNA product Design a-1 (A100) comprising derived and/or modified sequence from LASV(Nig08-A19;Clade III)__ADU56618__GPCmut3 (opt5)
aggagagucccgcagucggcguccagcggcucugcuuguucgugugugugucguugcaggccuuauucaagcuuaccaugggccagaucgugaccuucuuucaagaggucccccacguuauugaagaggugaugaacaucgugcugauugcccucagcauccuggcuauucuuaaggggcuguacaauaucgccacaugcggacucaucggccuggucacguuccuucugcucuccgggagaucuuguagcaugaccuauaaaggaguguacgaacugcagacacuggagcucaacaugaauacccugaacaugacaaugccucuuuccugcaccaagaauaacucucaucacuauauuaugguuggcaaugaaacagggcuggagcucacccugacgaacaccagccuucugcaucacaaauuuuguaaucucuccgacgcgcauaagaaaaaccuguacgaucacacacugaugucuaucauuagcaccuuccaccucuccaucccgaauuuuaaccaguaugaggcuaugagcugcgacuucaauggaggcaagauuacagugcaguacaaccugucucauuccuaugccaucgaugccgcuaaucacuguggcaccgucgccaacggggugcuucaaacguuuaugcggauggcuuggggaggcagcuacauugcccuggacucugggcgcggaaagugggauugcaucaugacauccuaccaguaucucaucauucagaacaccacaugggaagaccauugucaguucagcagacccucuccuaucggcuaccuggggcuucugucccaacggacccgcgauauuuauaucagcagacggcgcagaggaaccuuuacauggacgcucuccgacucugagggcaaugaaacccccggcggguacugccugacacgguggaugcugauugaggcggagcucaaauguuucggaaacaccgccguugcuaagugcaaugaaaaacacgaugaggaauuuugugacaugcugcgccuuuucgauuuuaacaagcaggccaucagacggcugaaagcuccugcccagaugagcauccagcucauuaauaaggcggugaacgcccugaucaaugaccaacuuauuaugaagaaccaucugcgcgauaucaugggcauucccuauugcaauuacuccaaauauugcuaccucaaccacacaagcaccgggagaacgucucugccucgguguugccuggucuccaauggaagcuaccucaacgagacacacuucucugacgacaucgaacagcaggcugauaauaugaucaccgagaugcugcaaaaggaguaucuugaccgccagggcaaaaccccgcuggggcucguggaucuguucguguuuagcacauccuucuaccugauuucuaucuuucuucaucucgucaagauucccacccacagacauaucguuggaaaaccuugucccaagccucaccggcugaaccacaugggcauuugcagcuguggccuguauaaacagcccggggugccggugagauggaagcgcugaggacuagucccuguucccagagcccacuuuuuuuucuuuuuuugaaauaaaauagccugucuuucagaucuaaaaaaaaaaaaaaaaaaaaaaaaaaaaaaaaaaaaaaaaaaaaaaaaaaaaaaaaaaaaaaaaaaaaaaaaaaaaaaaaaaaaaaaaaaaaaaaaaaaa

SEQ ID NO: 25179 - RNA, 1724 nt, Artificial Sequence
  mRNA product Design a-1 (A100) comprising derived and/or modified sequence from LASV(G1180-SLE-2010;Clade IV)__AIT17168__GPCmut3 (opt5)
aggagagucccgcagucggcguccagcggcucugcuuguucgugugugugucguugcaggccuuauucaagcuuaccaugggccagaucgugaccuucuuucaagaggucccccacguuauugaagaggugaugaacaucgugcugauugcccucagcauccuggcuguccuuaaggggcuguacaauuucgccacaugcggacucgugggccugcuuacguuucugcuccugugugggagauccugcaccgcgucucgguauaaaggaguuuacgaacugcagacacucgagcugaacauggaaacccuuaauaugacaaugccucugagcuguaccaagaacaauucccaucacuauauuauggugggcaacgagacagggcucgagcugacccuuacgaauaccucuaucaucaaccauaaauucugcaaucugagcgacgcucacaagaaaaaccucuacgaucaugcccugauguccauuaucucuacauuucaccugagcauuccgaauuucaaccaguaugaagccauguccugugacuuuaauggaggcaagaucagcguccaguacaaccucucucacuccuaugcuggcgaugccgcuaaucauugcgggaccguggccaacggaguucugcaaacauucaugcgcauggcguggggcgggagcuacauugcccuugacucuggacacggcuccugggauuguaucaugaccagcuaccaguaucugauuauccagaacacgacaugggaggaccauugccaguuuucuagacccuccccuaucggguaccucggacugcuuagccaacggacccgcgauauuuauaucuccagacggcgcagaggcacauucaccuggacccugucugacagcgaaggcaaggauacacccgggggauacugucucacgcgguggaugcugauugaggcugagcugaaaugcuuuggcaauaccgccguggcuaaguguaacgaaaaacacgacgaggaguucugcgauaugcuccgccuguuugacuucaauaagcaggccauccagagacuuaaagcgccugcccagauguccauucaacugaucaacaaggcugucaaugcccucaucaacgaucagcugauuaugaagaaucaccuucgggacaucauggggauucccuauugcaacuacagcaaauauuguuaccugaaucauacaaccacaggaaagaccucucucccuaaaugcugucugguguccaacggcagcuaccugaaugaaacgcacuucucugacgauaucgaacagcaagcugacaacaugauuacagagaugcuccagaaggaguauauggaacgccaggggaaaaccccgcugggacuuguggaucuguuugucuucagcaccuccuuuuaccucaucucuaucuuccugcaucugguuaagauucccacacacagacauaucgugggcaaaagcugcccuaagccccaccggcuuaaucacaugggcauuuguuccugcgggcucuauaagcagccuggagugcccgucaaauggaagcgcugaggacuagucccuguucccagagcccacuuuuuuuucuuuuuuugaaauaaaauagccugucuuucagaucuaaaaaaaaaaaaaaaaaaaaaaaaaaaaaaaaaaaaaaaaaaaaaaaaaaaaaaaaaaaaaaaaaaaaaaaaaaaaaaaaaaaaaaaaaaaaaaaaaaaa

SEQ ID NO: 25180 - RNA, 1724 nt, Artificial Sequence
  mRNA product Design a-1 (A100) comprising derived and/or modified sequence from LASV(G1442-SLE-2011;Clade IV)__AIT17180__GPCmut3 (opt5)
aggagagucccgcagucggcguccagcggcucugcuuguucgugugugugucguugcaggccuuauucaagcuuaccaugggccagaucgugaccuucuuucaagaggucccccacguuauugaagaggugaugaacaucgugcugauugcccucagcauccuggcuguccuuaaggggcuguacaauguggccacaugcggacucauuggccugguuacguuccuucugcucugugggagauccugcaccacaacccuguauaaaggaguguacgaacugcagacacucgagcugaacauggaaacccuuaauaugacaaugccucugucuuguaccaagaacaauagccaucacuauauccgggucggcaacgagacggggcucgagcugacccuuacaaauaccuccaucauuaaccauaaauuuugcaaucugucugacgcgcacaagaaaaaccucuacgaucaugcucugaugagcaucauuuccacauuccaccugucuaucccgaauuuuaaccaguaugaagccaugagcugugacuucaauggaggcaagauuuccgugcaguacaaccucagccacucuuaugccggcgaugcugccaaucauugcgggaccguugcuaacggagugcugcaaacguuuaugcgcauggccuggggcggguccuacaucgcgcuugacagcggaagaggcaacugggauuguauuaugacaucuuaccaguaucugaucauccagaauaccacaugggacgaucacugccaguucucccggcccagcccuauuggguaccucggacugcuuucucaacgcaccagagacgucuauaucucccggcgcagacggggcaccuuuacauggacgcugagcgauuccgagggcaaggacacccccgggggauacugucucacacgcuggaugcugauugaagccgagcugaaaugcuucggcaacaccgcuguggccaaguguaaugagaaacaugaugaagaguuuugcgacaugcucagacuguucgauuuuaacaagcaggcuauccagcggcuuaaagccccugcgcagaugucuauucaacugaucaauaaggccgugaacgcucucaucaaugaccagcugauuaugaagaaccaccuucgcgacaucauggggauucccuauugcaauuacagcaaauauuguuaccugaacaauacagccaccggaaagacgucccucccuaaaugcugucugaucagcaacggcucuuaccugaaugaaacacacuucuccgaugacauugagcaggaagcugauaacaugaucaccgagaugcuccaaaaggaguauauggaaagacaggggaaaaccccgcugggacuugucgaccuguucguuuuuagcacaucuuucuaccucaucagcauuuuucugcaucuggugaagauccccacccaccggcauauugugggcaaauccugcccuaagccccaccgccuuaaucauaugggcaucuguucuugcgggcucuauaagcagccuggaguccccgugagauggaaacggugaggacuagucccuguucccagagcccacuuuuuuuucuuuuuuugaaauaaaauagccugucuuucagaucuaaaaaaaaaaaaaaaaaaaaaaaaaaaaaaaaaaaaaaaaaaaaaaaaaaaaaaaaaaaaaaaaaaaaaaaaaaaaaaaaaaaaaaaaaaaaaaaaaaaa

SEQ ID NO: 25181 - RNA, 1724 nt, Artificial Sequence
  mRNA product Design a-1 (A100) comprising derived and/or modified sequence from LASV(G3010-SLE-2013;Clade IV)__AIT17344__GPCmut3 (opt5)
aggagagucccgcagucggcguccagcggcucugcuuguucgugugugugucguugcaggccuuauucaagcuuaccaugggccagaucgugaccuucuuucaagaggucccccacguuauugaagaggugaugaacaucgugcugauugcccucagcauccuggcuguccuuaaggggcuguacaauuucgccacaugcggacucgugggccugguuacguuucuucugcucugugggagauccugcaccacaucucuguauaaaggaguguacgaacugcagacccucgagcugaacauggaaacacuuaauaugaccaugccucugagcuguacaaagaacaauucccaucacuauauuauggucggcaacgagaccgggcucgagcugacgcuuaccaauacaucuaucaucaaccauaaauucugcaaucugagcgacgcgcacaagaaaaaccucuacaaucaugcucugauguccauuaucucuaccuuucaccugagcauuccgaacuucaaucaguaugaagccauguccugugauuuuaacggaggcaagaucagcgugcaguacaaucucucucacuccuaugccggcgacgcugccagccauugcgggacaguugcuaacggagugcugcaaaccuucaugcggauggccuggggcgggucuuacauugcgcuugauuccggauacggcaagugggacuguaucaugacgagcuaucaguaccugauuauccagaacacaaccugggaggaucacugccaguuuucucgccccuccccuaucggguaucucggacugcuuagccaaagaacacgggacauuuacaucucccgcagacggcgcggcaccuucaccuggacacugucugauagcgaaggcaaagacacgcccgggggauauugucucaccagauggaugcugauugaggccgagcugaagugcuuuggcaauacagcugucgccaaauguaacgaaaagcaugaugaggaguucugcgacaugcuccggcuguuugauuucaauaaacaggcuauccagcgccuuaagaccccugcccagauguccauucaacugaucaacaaggcggugaaugcccucaucaacgaccagcugauuaugaaaaaucaccuuagagauaucauggggauucccuacugcaacuauagcaaguacuguuaccugaaucacacaaccacgggaaaaacaucucucccuaagugcugucugguguccaacggcagcuaucugaaugaaacccauuucucugacgacaucgaacagcaagcugauaacaugauuaccgagaugcuccagaaagaguacauggaacggcaggggaagacaccgcugggacuugucgaccuguuuguuuucagcaccuccuuuuaucucaucucuaucuuccugcaccuggugaaaauucccacacaucgccacaucgugggcaagagcugcccuaagccccauagacuuaaucacaugggcauuuguuccugcgggcucuacaaacagccuggaguccccgugcgguggaagcgcugaggacuagucccuguucccagagcccacuuuuuuuucuuuuuuugaaauaaaauagccugucuuucagaucuaaaaaaaaaaaaaaaaaaaaaaaaaaaaaaaaaaaaaaaaaaaaaaaaaaaaaaaaaaaaaaaaaaaaaaaaaaaaaaaaaaaaaaaaaaaaaaaaaaaa

SEQ ID NO: 25182 - RNA, 1724 nt, Artificial Sequence
  mRNA product Design a-1 (A100) comprising derived and/or modified sequence from LASV(G502-SLE-2009;Clade IV)__AIT17126__GPCmut3 (opt5)
aggagagucccgcagucggcguccagcggcucugcuuguucgugugugugucguugcaggccuuauucaagcuuaccaugggccagaucgugaccuucuuucaagaggucccccacguuauugaagaggugaugaacaucgugcugauugcccucagcauccuggcuguccuuaaggggcuguacaauuucgccacaugcggacucgugggccugcuuacguuucugcuccugugugggagauccugcaccacaggacuguauaaaggcguuuacgaacuccagacccuggagcuuaacauggaaacacugaauaugaccaugccucucucuuguacaaagaacaauagccaucacuauauuaugguggggaacgagaccggacuggagcuuacgcugaccaauacauccaucaucaaccauaaauucugcaaucucucugacgcgcacaagaaaaaccuguacgaucaugcucugaugagcauuaucuccaccuuucaccucucuauuccgaauuucaaccaguaugaagccaugagcugugacuuuaauggcggcaagaucuccguccaguacaaccugagccacucuuaugccggggaugcugccgaccauugcggaacaguggcuaauggcguucuucaaaccuucaugcggauggccuggggaggguccuacauugcgcuggauagcggccgcgggagaugggacuguaucaugacgucuuaccaguaucucauuauccagaacacaaccugggaggaucacugccaguuuucccggcccagcccuaucggauaccugggccuucugucucaacgcacaagagacauuuauaucucccggcgcagacggggcaccuucaccuggacacucagcgauuccgaagggaaggacacgcccggaggcuacugucugacccgcuggaugcugauugaggccgagcucaaaugcuuugggaacacagcuguggccaaguguaaugaaaaacaugaugaggaguucugcgacaugcugagacuuuuugauuucaacaagcaggcuauccagcggcugaaagccccugcgcagaugucuauucaacucaucaauaaggccgucaacgcucugaucaaugaccagcuugugaugaagaaccaucugcgcgacauuaugggaauccccuauugcaauuacagcagauauuguuaccucaaccacaccacaaccggccggacgucccugccuaaaugcugucuggugagcaaugggucuuaccucaacgaaacacacuucuccgaugacauugaacagcaagccgauaauaugaucaccgagaugcugcagaaggaguauauggaacgccagggaaaaaccccgcuuggccuggucgaccucuuuguuuucagcacaucuuuuuaccugauuagcaucuuccugcaccuugugaagauccccacccauagacacauugugggcaaauccugcccuaagccccaucggcucaaccacauggggaucuguucuugcggacuguauaaacagccuggcguccccgugaaguggaagagaugaggacuagucccuguucccagagcccacuuuuuuuucuuuuuuugaaauaaaauagccugucuuucagaucuaaaaaaaaaaaaaaaaaaaaaaaaaaaaaaaaaaaaaaaaaaaaaaaaaaaaaaaaaaaaaaaaaaaaaaaaaaaaaaaaaaaaaaaaaaaaaaaaaaaa

SEQ ID NO: 25183 - RNA, 1724 nt, Artificial Sequence
  mRNA product Design a-1 (A100) comprising derived and/or modified sequence from LASV(G733-SLE-2010;Clade IV)__AIT17154__GPCmut3 (opt5)
aggagagucccgcagucggcguccagcggcucugcuuguucgugugugugucguugcaggccuuauucaagcuuaccaugggccagaucgugaccuucuuucaagaggucccccacguuauugaagaggugaugaacaucgugcugauugcccucagcauccuggcuguccuuaaggggcuguacaauuucgccacaugcggaauugugggccucguuuccuuucugcuucugugugggagaucuugcacgaccagccucuauaaaggaguguacgaacugcagacacuggagcucaacauggaaacccugaauaugacaaugccucuuuccuguaccaagaacaauucucaucacuauaucauggucggcaacgagacagggcuggagcucacccugacgaauaccagcaucauuaaccauaaauucugcaaucuuuccgacgcgcacaagaaaaaccuguacgaucaugcucucaugucuaucauuagcacauuucaccuguccaucccgaauuucaaccaguaugaagccaugagcugugacuuuaauggaggcaagauuucugugcaguacaaccugucccacagcuaugccggcgaugcugccaaucauugcgggaccaucgcuaacggaguucuccaaacauucaugcggauggccuggggcgggucuuacauugcgcuggacuccggacgcgauagaugggacuguaucaugaccagcuaccaguaucuuaucauucagaacacgacaugggaggaucacugccaguuuucucggcccuccccuaucggcuaccuggggcuccugagccaacgcaccagagacauuuauaucucccggcgcagacggggaacauucaccuggacccuuucugauagcgaaggcaaggacacacccggcggguacugucugacgcgcuggaugcucauugaggccgagcugaaaugcuuuggaaauaccgcuguggccaaguguaacgaaaaacaugaugaggaguucugcgacaugcugagacucuuugauuucaauaagcaggcuauccagcggcugaaagccccugcgcagauguccauccaacuuauuaacaaggccgucaaugcucugaucaacgaccagcucauuaugaagaaucaucugcgcgacaucaugggcauucccuauugcaacuacagcaaauauuguuaccuuaaucacacaaccacagggaagaccucucugccuaaaugcugucucguguccaacggaagcuaccugaaugaaacgcacuucucugaugacaucgaacagcaagccgauaacaugaucacagagaugcugcagaaggaguauauggaaagacagggcaaaaccccgcucgggcugguggaccuuuuugucuucagcaccuccuuuuaccugauuucuaucuuccuccaccugguuaagauucccacacaucggcacguggugggaaaaagcugcccuaagccccaucgccugaaucacaugggcaucuguuccugcggccuuuaugggcagccuggaguccccgugaaguggaaaagaugaggacuagucccuguucccagagcccacuuuuuuuucuuuuuuugaaauaaaauagccugucuuucagaucuaaaaaaaaaaaaaaaaaaaaaaaaaaaaaaaaaaaaaaaaaaaaaaaaaaaaaaaaaaaaaaaaaaaaaaaaaaaaaaaaaaaaaaaaaaaaaaaaaaaa

SEQ ID NO: 25184 - RNA, 1724 nt, Artificial Sequence
  mRNA product Design a-1 (A100) comprising derived and/or modified sequence from MOPV/LASV reassortant(IGS-1;Clade IV)__AFY05576__GPCmut3 (opt5)
aggagagucccgcagucggcguccagcggcucugcuuguucgugugugugucguugcaggccuuauucaagcuuaccaugggccagaucgugaccuucuuucaagaggucccccacguuauugaagaggugaugaacaucgugcugauugcccucagcguccuggcugugcuuaaggggcuguacaauuucgccacaugcggacucguuggccuggugacguuucuucugcucugugggagauccugcaccacaucucuguauaaaggagucuacgaacugcagacccucgagcugaacauggaaacacuuaauaugaccaugccucugagcuguacaaagaacaauucccaucacuauaucauggugggcaacgagaccgggcucgagcugacgcuuaccaauacaucuauuaucaaccauaaauucugcaaucugagcgacgcgcacaagaaaaaccucuacgaucaugcucugauguccaucauuucuaccuuucaccugagcaucccgaauuucaaccaguaugaagccauguccugugacuuuaauggaggcaagauuagcguucaguacaaccucucucacuccuaugccggcgaugcugccaaucauugcgggacaguggcuaacggaguccugcaaaccuucaugcggauggccuggggcgggagcuacaucgcgcuugacucuggacgcggcaacugggauuguauuaugacguccuaccaguaucugaucauucagaauacaaccugggaggaccacugccaguuuagcagacccucuccuaucggguaccucggacugcuuucccaacggacacgcgauaucuauauuagcagacggcgcagaggcaccuucaccuggacacuguccgacucugaaggcgaggauacgcccgggggauacugucucacccgguggaugcugaucgaggccgaacugaagugcuuuggcaacacagcuguggccaaauguaaugagaagcaugacgaagaguucugcgauaugcuccgccuguuugacuucaacaaacaggcuauucagagacuuaaggccccugcgcagaugagcauccaacugauuaauaaagccgugaacgcucucaucaaugaucagcugaucaugaagaaccaccuucgggacauuauggggauccccuauugcaauuacuccaaguauuguuaccugaaccacaccacaaccggacgcacgagccucccuaaaugcugucuggucucuaauggcuccuaccugaacgaaacacauuucagcgacgauauugagcagcaagccgacaauaugaucaccgagaugcuccagaaggaauauauggagagacaggggaaaaccccgcugggacuuguugaucuguuuguguucucuaccagcuuuuaccucauuuccaucuuccugcaccuggugaagauccccacacaucggcacauugucggcaaaucuugcccuaagccccaucgccuuaaccacaugggcaucuguagcugcgggcucuauaaacagccuggagugcccguuaaguggaagagaugaggacuagucccuguucccagagcccacuuuuuuuucuuuuuuugaaauaaaauagccugucuuucagaucuaaaaaaaaaaaaaaaaaaaaaaaaaaaaaaaaaaaaaaaaaaaaaaaaaaaaaaaaaaaaaaaaaaaaaaaaaaaaaaaaaaaaaaaaaaaaaaaaaaaa

SEQ ID NO: 25185 - RNA, 1724 nt, Artificial Sequence
  mRNA product Design a-1 (A100) comprising derived and/or modified sequence from LASV(LM765-SLE-2012;Clade IV)__AIT17814__GPCmut3 (opt5)
aggagagucccgcagucggcguccagcggcucugcuuguucgugugugugucguugcaggccuuauucaagcuuaccaugggccagaucgugaccuucuuucaagaggucccccacguuauugaagaggugaugaacaucgugcugauugcccucagcauccuggcuguccuuaaggggcuguacaauuucgccacaugcggacucgugggccugguuacguuucuucugcucugugggagauccugcaccacaucucuguauaaaggaguguacgaacugcagacccucgagcugaacauggaaacacuuaauaugaccaugccucugagcuguacaaagaacaauucccaucacuauauuauggucggcaacgagaccgggcucgagcugacgcuuaccaauacaucuaucaucgaccauaaauucugcaaccugagcgaugcgcaccggaagaaucucuacgaccaugcucugauguccauuaucucuaccuuucaccugagcauuccgaacuucaaucaguaugaagccauguccugugauuuuaacggaggcaaaaucagcgugcaguacaaucucucucacuccuaugccaaggacgcugccgaucauugcggcacaguugcuaacggggugcugcaaaccuucaugcgcauggccuggggaggcagcuacauugcgcuugacucugggagaggacggugggauuguaucaugacguccuaccaguaucugauuauccagaauacaaccugggaggaccacugccaguuuagccgccccucuccuaucggcuaccucgggcugcuuucccaaagaacacgggauauuuauaucagccgcagacggcgcggaaccuucaccuggacacuguccgacucugaaggcaaggauacgcccggcggguacugucucaccagauggaugcugauugaggccgagcugaaaugcuuuggaaacacagcugucgccaaguguaacgaaaaacaugacgaggaguucugcgauaugcuccggcuguuugacuucaauaagcaggcuauccagcgccuuaaagccccugcgcagaugagcauucaacugaucaacaaggccgugaaugcucucaucaacgaccagcugauuaugaagaaucaccuuagagauaucaugggcauucccuauugcaacuacuccaaauauuguuaccugaaucacaccacaaccgggaagacgagccucccuaaaugcugucuggugucuaacggauccuaccugaaugaaacacauuucagcgacgauaucgaacagcaagccgacaacaugauuaccgagaugcuccagaaggaguauauggaacggcagggcaaaaccccgcuggggcuugucgaucuguuuguuuucucuaccagcuuuuaccucaucuccaucuuccugcaccuggugaagauucccacacaucgccacaucgugggaaaaccuugccccaagccucauagacuuaaucacaugggcauuuguucuugcggccucuauaagcagcccggggucccggugaaauggaagcggugaggacuagucccuguucccagagcccacuuuuuuuucuuuuuuugaaauaaaauagccugucuuucagaucuaaaaaaaaaaaaaaaaaaaaaaaaaaaaaaaaaaaaaaaaaaaaaaaaaaaaaaaaaaaaaaaaaaaaaaaaaaaaaaaaaaaaaaaaaaaaaaaaaaaa

SEQ ID NO: 25186 - RNA, 1724 nt, Artificial Sequence
  mRNA product Design a-1 (A100) comprising derived and/or modified sequence from LASV(LM776-SLE-2012;Clade IV)__AIT17824__GPCmut3 (opt5)
aggagagucccgcagucggcguccagcggcucugcuuguucgugugugugucguugcaggccuuauucaagcuuaccaugggccagaucgugaccuucuuucaagaggucccccacguuauugaagaggugaugaacaucgugcugauugcccucagcauccuggcuguccuuaaggggcuguacaauuucgccacaugcggacucgugggccugguuacguuucuucugcucugugggagauccugcaccacaucuguguauaaaggagucuacgaacugcagacccuggagcucaacauggaaacacugaauaugaccaugccucuuagcuguacaaagaacaauucccaucacuauauuauggugggcaacgagaccgggcuggagcucacgcugaccaauacaucuaucaucaaccauaaauucugcaaucuuagcgacgcgcacaagaaaaaccuguacgaucaugcucucauguccauuaucucuaccuuucaccugagcauuccgaauuucaaccaguaugaagccauguccugugacuuuaauggaggcaagaucagcguucaguacaaccugucucacuccuaugccggcgaugcugccaaucauugcgggacaguggcuaacggaguccuccaaaccuucaugcggauggccuggggcgggagcuacauugcgcuggacucuggacacggcaagugggauuguaucaugacguccuaccaguaucuuauuauccagaacacaaccugggaggaccauugccaguuuagccgccccucuccuaucggguaccugggacuccugucccaaagaacacgggauauuuauaucagccgcagacggcgcggcaccuucaccuggacacuuuccgacucugaaggcaaagauacgcccgggggauacugucugaccagauggaugcucauugaggccgagcugaagugcuuuggcaauacagcuguggccaaauguaacgaaaagcacgacgaggaguucugcgauaugcugcggcucuuugacuucaauaaacaggcuauccagcgccugaaggccccugcgcagaugagcauucaacuuaucaacaaggccgugaaugcucugaucaacgaucagcucauuaugaaaaaucaccugagagacaucauggggauucccuauugcaacuacuccaaguauuguuaccuuaaucauaccacaaccggaaaaacgagccugccuaagugcugucucgucucuaacggcuccuaccugaaugaaacacacuucagcgacgauaucgaacagcaagccgacaacaugauuaccgagaugcugcagaaagaguauauggaacggcaggggaagaccccgcucggacugguugaucuuuuuguguucucuaccagcuuuuaccugaucuccaucuuccuccaucuggugaaaauucccacacaccgccauaucgucggcaagucuugcccuaagccccacagacugaaucacaugggcauuuguagcugcgggcuuuauaaacagccuggagugcccguucgguggaagcgcugaggacuagucccuguucccagagcccacuuuuuuuucuuuuuuugaaauaaaauagccugucuuucagaucuaaaaaaaaaaaaaaaaaaaaaaaaaaaaaaaaaaaaaaaaaaaaaaaaaaaaaaaaaaaaaaaaaaaaaaaaaaaaaaaaaaaaaaaaaaaaaaaaaaaa

SEQ ID NO: 25187 - RNA, 1724 nt, Artificial Sequence
  mRNA product Design a-1 (A100) comprising derived and/or modified sequence from LASV(Mad39;Clade IV)__ANH09722__GPCmut3 (opt5)
aggagagucccgcagucggcguccagcggcucugcuuguucgugugugugucguugcaggccuuauucaagcuuaccaugggccagaucgugaccuucuuucaagaggucccccacguuauugaagaggugaugaacaucgugcugauugcccucagcauccuggcuguccuuaaggggcuguacaauguggccacaugcggacucauuggccugguuacguuccuucugcucugugggagauccugcaccacaacccuguauaaaggaguguacgaacugcaggcgcucgagcugaacauggaaacacuuaauaugaccaugccucugucuuguacaaagaacaauagccaucacuauauccgggucggcaacgagaccgggcucgagcugacgcuuaccaauacaucccugaucaaccauaaauuuugcaaucucucugacgcucacaagaaaaaccuguacgaucaugcccugaugagcauuaucuccaccuuccaccucucuauuccgaauuuuaaccaguaugaagccaugagcugugacuucaaugauggaaagaucuccgugcaguacaaccugagccacacauaugcuggcgacaccgccaaucauugcggcacgguugcuaacggggugcuucaaacauuuaugcgcauggccuggggaggcucuuacauugcgcuggauuccgggagaggaggcugggacuguaucaugaccagcuaccaguaucucauuauccagaacacaaccugggaggaucacugccaguucucucggcccuccccuaucggguaccugggacuucugagccaacgcaccagagacauuuauaucucucggcgcagacggggcacauuuacguggacccucuccgauagcgaaggcaaggacacacccgggggauacugucugacccgcuggaugcugauugaggccgagcucaaaugcuucggcaauacagcugucgccaaguguaacgaaaaacaugaugaggaauuuugcgacaugcugagacuuuucgauuuuaauaagcaggcuauccagcggcugaaagccccugcgcagauguccauucaacucaucaacaaggccgugaaugcucugaucaacgaccagcuuauuaugaagaaucaucugcgcgacaucauggggauucccuauugcaacuacucuaaauauuguuaccucaaucacaccgugacgggaaagacaagccugccuaaaugcugucuggucuccaacggcagcuaccucaaugagacccacuucucugaugacaucgaacagcaagccgauaacaugauuaccgagaugcugcagaaggaguauauggaaagacaggggaaaacaccgcuuggacugguugaccucuucguguuuuccaccagcuucuaccugaucucuaucuuucugcaccuugugaagauucccacacaucggcacgucgugggcaaaccuugccccaagccucaucgccucaaucacaugggcaucuguagcugcggguucuauaagcagcccggaguuccggugagauggaaacggugaggacuagucccuguucccagagcccacuuuuuuuucuuuuuuugaaauaaaauagccugucuuucagaucuaaaaaaaaaaaaaaaaaaaaaaaaaaaaaaaaaaaaaaaaaaaaaaaaaaaaaaaaaaaaaaaaaaaaaaaaaaaaaaaaaaaaaaaaaaaaaaaaaaaa

SEQ ID NO: 25188 - RNA, 1724 nt, Artificial Sequence
  mRNA product Design a-1 (A100) comprising derived and/or modified sequence from LASV(Z0947-SLE-2011;Clade IV)__AIT17840__GPCmut3 (opt5)
aggagagucccgcagucggcguccagcggcucugcuuguucgugugugugucguugcaggccuuauucaagcuuaccaugggccagaucgugaccuucuuucaagaggucccccacguuauugaagaggugaugaacaucgugcugauugcccucagcauccuggcuguccuuaaggggcuguacaauuucgccacaugcggacucgugggccugguuacguuucuucugcucugugggagauccugcaccauuucucuguauaaaggaguguacgaacugcagacacucgagcugaacauggaaacccuuaauaugacaaugccucugagcuguaccaagaacaauucccaucacuauaucauggucggcaacgagacagggcucgagcugacccuuacgaauaccucuaucauuaaccauaaauucugcaaucugagcgacgcgcacaagaaaaaccucuacgaucaugcucugauguccaucauuucuacauuucaccugagcaucccgaauuucaaccaguaugaagccauguccugugacuuuaauggaggcaagauuagcgugcaguacaaccucucucacuccuaugccggcgaugcugccaaucauugcgggaccguugcuaacggagugcugcaaacauucaugcggauggccuggggcgggagcuacaucgcgcuugacucuggacgcgauagaugggacuguauuaugaccuccuaccaguaucugaucauccagaacacgacaugggaggaucacugccaguuuagccggcccucuccuauuggcuaccucgggcugcuuucccaacgcaccagagacaucuauauuagccggcgcagacggggaacauucaccuggacccuguccgauucugaaggcaaggacacacccggcggguacugucucacgcgcuggaugcugaucgaggccgagcugaaaugcuuuggaaauaccgcugucgccaaguguaacgaaaaacaugaugaggaguucugcgacaugcucagacuguuugauuucaauaagcaggcuauucagcggcuuaaagccccugcgcagaugagcauccaacugaucaacaaggccgugaaugcucucauuaacgaccagcugaucaugaagaaucaccuucgcgacauuaugggcauccccuauugcaacuacuccaaauauuguuaccugaaucacacaaccacagggaagaccagccucccuaaaugcugucuggugucuaacggauccuaccugaaugaaacgcauuucagcgaugacauugaacagcaagccgauaacaugaucacagagaugcuccagaaggaguauauggaaagacagggcaaaaccccgcuggggcuugucgaccuguuuguuuucucuaccagcuuuuaccucaucuccauuuuccugcaccuggugaagauccccacacaucggcacauugugggaaaaccuugccccaagccucaucgccuuaaucacaugggcaucuguucuugcggccucuauaagcagcccggggucccggugaaauggaagagaugaggacuagucccuguucccagagcccacuuuuuuuucuuuuuuugaaauaaaauagccugucuuucagaucuaaaaaaaaaaaaaaaaaaaaaaaaaaaaaaaaaaaaaaaaaaaaaaaaaaaaaaaaaaaaaaaaaaaaaaaaaaaaaaaaaaaaaaaaaaaaaaaaaaaa

SEQ ID NO: 25189 - RNA, 1736 nt, Artificial Sequence
  mRNA product Design a-2 (hSL-A64-N5) comprising derived and/or modified sequence from LASV(Josiah;Clade IV)__NP_694870__GPCmut3 (opt1)
aggagaguccgcucagccagguugcagaagcggcuuagcguguguccuaaucuucucucugcguguagguaggccugugccgcaaacaagcuuaccaugggccagaucgugaccuucuuccaggaggucccccacgugaucgaggaggugaugaacaucguccugaucgcccucagcgugcuggccgugcugaaggggcucuacaacuucgcgaccugcggccuggucgggcuggugacguuccuccugcugugcggccgcuccugcaccaccagccucuacaaggggguguacgagcugcagacccuggagcucaacauggagacgcugaacaugaccaugccgcuguccugcaccaagaacaacagccaccacuacaucauggucggcaacgagaccggccucgagcugacgcugaccaacaccuccaucaucaaccacaaguucugcaaccucagcgacgcccacaagaagaaccuguacgaccacgcccugauguccaucaucagcaccuuccaccucuccauccccaacuucaaccaguacgaggccaugagcugcgacuucaacgggggcaagaucuccgugcaguacaaccugagccacuccuacgccggggacgcggccaaccacugcggcacgguggccaacgggguccugcagaccuucaugcggauggccuggggcggcagcuacaucgcgcucgacuccgggcgcggcaacugggacugcaucaugaccagcuaccaguaccugaucauccagaacaccacgugggaggaccacugccaguucucccggcccagccccaucggguaccugggccuccugucccagcgcacccgggacaucuacaucagccgccggcgccggggcaccuucaccuggacgcugagcgacuccgaggggaaggacaccccgggcggguacugccugacccgcuggaugcucaucgaggccgagcugaagugcuucggcaacaccgccguggccaagugcaacgagaagcacgacgaggaguucugcgacaugcugcggcuguucgacuucaacaagcaggccauccagcgccugaaggcgcccgcccagaugagcauccagcugaucaacaaggccgugaacgcccucaucaacgaccagcugaucaugaagaaccaccuccgggacaucauggggauccccuacugcaacuacuccaaguacugcuaccucaaccacacgaccaccggccgcaccagccugcccaagugcugccuggucuccaacggcagcuaccucaacgagacgcacuucuccgacgacaucgagcagcaggccgacaacaugaucaccgagaugcugcagaaggaguacauggagcggcaggggaagacgccccugggccucguggaccuguucguguucagcaccuccuucuaccugaucagcaucuuccugcaccucgucaagaucccgacccaccgccacaucguggggaaguccugccccaagccccaccggcugaaccacaugggcaucugcagcugcgggcuguacaagcagcccggcgugccggucaaguggaagcgcugaggacuagucccuguucccagagcccacuuuuuuuucuuuuuuugaaauaaaauagccugucuuucagaucucaaaggcucuuuucagagccaccaaaaaaaaaaaaaaaaaaaaaaaaaaaaaaaaaaaaaaaaaaaaaaaaaaaaaaaaaaaaaaaaagaauu

SEQ ID NO: 25190 - RNA, 1733 nt, Artificial Sequence
  mRNA product Design a-2 (hSL-A64-N5) comprising derived and/or modified sequence from LASV(LP;Clade I)__AAF86701__GPCmut3 (opt1)
aggagaguccgcucagccagguugcagaagcggcuuagcguguguccuaaucuucucucugcguguagguaggccugugccgcaaacaagcuuaccaugggccagaucaucaccuucuuccaggaggugccccacgucaucgaggaggugaugaacaucgugcugaucgcccucagccugcuggccauccucaaggggcuguacaacaucgcgaccugcggcaucaucgggcuggucgccuuccucuuccugugcggcaaguccugcagccugacgcucaagggcggguacgagcugcagacccuggagcucaacauggagacccugaacaugaccaugccgcuguccugcacgaagaacagcucccaccacuacauccgcgugggcaacgagaccgggcucgagcugacccugaccaacacgagcaucaucaaccacaaguucugcaaccucuccgacgcccacaagaagaaccuguacgaccacgcccugaugagcaucaucuccaccuuccaccucagcauccccaacuucaaccaguacgaggccauguccugcgacuucaacggcgggaagaucagcgugcaguacaaccugucccacagcuacgcgggcgacgccgccgagcacugcgggaccgucgccaacggcgugcugcagaccuucaugcggauggcguggggcgggcgcuacaucgcccucgacuccggcaaggggaacugggacugcaucaugacgagcuaccaguaccugaucauccagaacaccaccugggaggaccacugccaguucucccggcccagccccaucggcuaccugggccuccugucccagcgcacccgggacaucuacaucagccgccggcgccgggggacguucaccuggacccugagcgacuccgagggcaacgagacccccgggggcuacugccugacgcgcuggaugcucaucgaggccgagcugaagugcuucgggaacaccgccguggccaagugcaacgagaagcacgacgaggaguucugcgacaugcugcggcuguucgacuucaacaagcaggcgauccgccggcugaaggcccccgcccagaugagcauccagcugaucaacaaggccgucaacgcccucaucaacgaccagcugaucaugaagaaccaccuccgcgacaucaugggcauccccuacugcaacuacuccaaguacugcuaccucaaccacaccagcuccggccggaccagccugcccaagugcugccugaucuccaacgggagcuaccucaacgagacgcaguucuccgacgacaucgagcagcaggcggacaacaugaucaccgagaugcugcagaaggaguacaucgagcgccagggcaagaccccgcuggggcucguggacaucuucaucuucagcaccuccuucuaccugaucagcaucuuccugcaccugaucaagaucccgacgcaccggcacaucgugggcaagcccugccccaagccccaccgccucaaccacaugggggucugcuccugcggccuguacaagcacccgggcgugcccaccaaguggaagcggugaggacuagucccuguucccagagcccacuuuuuuuucuuuuuuugaaauaaaauagccugucuuucagaucucaaaggcucuuuucagagccaccaaaaaaaaaaaaaaaaaaaaaaaaaaaaaaaaaaaaaaaaaaaaaaaaaaaaaaaaaaaaaaaaagaauu

SEQ ID NO: 25191 - RNA, 1733 nt, Artificial Sequence
  mRNA product Design a-2 (hSL-A64-N5) comprising derived and/or modified sequence from LASV(803213;Clade II)__AAF86703__GPCmut3 (opt1)
aggagaguccgcucagccagguugcagaagcggcuuagcguguguccuaaucuucucucugcguguagguaggccugugccgcaaacaagcuuaccaugggccagaucaucaccuucuuccaggaggugccccacgucaucgaggaggugaugaacaucgugcugaucgcccucagccugcuggccauccucaaggggaucuacaacgucgcgaccugcggccuguucgggcugaucuccuuccuccugcugugcggccgcagcugcuccgugacguacaaggggguguacgagcuccagacccuggagcugaacauggccaaccucaacaugaccaugccgcugagcugcaccaagaacaacucccaccacuacaucauggucggcaacgagacgggccuggagcucacccugaccaacaccagcaucaucaaccacaaguucugcaaccuguccgacgcccacaagaagaaccucuacgaccacgcccugaugagcaucaucuccacguuccaccugagcauccccaacuucaaccaguacgaggccauguccugcgacuucaacgggggcaagaucagcgugcaguacaaccucucccacagcuucgcgguggacgccgccaaccacugcgggaccaucgccaacggcguccugcagaccuucaugcggauggcguggggcggguccuacaucgcccuggacagcggcaaggggaacugggacugcaucaugaccuccuaccaguaccucaucauccagaacacgaccugggaggaccacugccaguucagccgccccucccccaucggcuaccuggggcugcucagccagcggacccgcgacaucuacaucagccggcgccgccggggcaccuucacguggacccucuccgacagcgagggcaacgaggcccccgggggcuacugccugacccgguggaugcugaucgaggccgagcucaagugcuucgggaacaccgccguggcgaagugcaacgagaagcacgacgaggaguucugcgacaugcugcgccuguucgacuucaacaagcaggccaucaagcggcucaagacgcccgcccagauguccauccagcugaucaacaaggccgugaacgcccugaucaacgaccagcucaucaugaagaaccaccuccgcgacaucaugggcauccccuacugcaacuacagccgguacugcuaccugaaccacaccgucaccgggaagaccucccugccccgcugcugccuggugagcaacggcuccuaccugaacgagacgcacuucagcgacgacaucgagcagcaggcggacaacaugaucaccgagaugcuccagaaggaguacauggaccggcagggcaagaccccgcuggggcugguggaccucuucgucuucuccaccagcuucuaccugaucuccaucuuccugcaccuggugaagaucccgacgcaccgccacaucgugggcaagcccugccccaagccccaccggcucaaccacauggggaucugcagcugcggccuguacaagcacccggggguccccgugaaguggaagcgcugaggacuagucccuguucccagagcccacuuuuuuuucuuuuuuugaaauaaaauagccugucuuucagaucucaaaggcucuuuucagagccaccaaaaaaaaaaaaaaaaaaaaaaaaaaaaaaaaaaaaaaaaaaaaaaaaaaaaaaaaaaaaaaaaagaauu

SEQ ID NO: 25192 - RNA, 1733 nt, Artificial Sequence
  mRNA product Design a-2 (hSL-A64-N5) comprising derived and/or modified sequence from LASV(GA391;Clade III)__CAA36645__GPCmut3 (opt1)
aggagaguccgcucagccagguugcagaagcggcuuagcguguguccuaaucuucucucugcguguagguaggccugugccgcaaacaagcuuaccaugggccagaucgugaccuucuuccaggaggucccccacgugaucgaggaggugaugaacaucguccugaucgcccucagcauccuggccauccugaaggggcucuacaacguggcgaccugcggccugaucgggcuggugacguuccuccugcuguccggccgcagcugcucccucaucuacaaggggaccuacgagcugcagacccuggagcucaacauggagacccugaacaugacgaugccgcugagcugcaccaagaacaacucccaccacuacauccgggucggcaacgagaccggccucgagcugacccugacgaacaccagcauccucaaccacaaguucugcaaccuguccgacgcccacaagcgcaaccuguacgaccacagccucauguccaucaucagcaccuuccaccuguccauccccaacuucaaccaguacgaggccaugagcugcgacuucaacgggggcaagaucaccgugcaguacaaccugucccacagcuucgccguggacgccgcggggcacugcggcacgcucgccaacgggguccugcagaccuucaugcggauggccuggggcggcuccuacaucgcccuggacagcgggcgcggcaacugggacugcaucaugaccuccuaccaguaccucaucauccagaacaccacgugggacgaccacugccaguucagccggcccucccccaucggguaccugggccugcucagccagcgcacccgggacaucuacaucagccgccggcgccggggcaccuucaccuggacgcucuccgacagcgaggggaacgagaccccgggcggguacugccugacccgcuggaugcugaucgaggcggagcucaagugcuucggcaacaccgccguggccaagugcaacgagaagcacgacgaggaguucugcgacaugcugcggcuguucgacuucaacaagcaggccauccgccggcucaagacgcccgcccagauguccauccagcugaucaacaaggcggugaacgcccugaucaacgaccagcucaucaugaagaaccaccuccgcgacaucauggggauccccuacugcaacuacagccgguacugcuaccugaaccacaccuccaccggcaagaccagccugccccgcugcugccugaucuccaacggcagcuaccugaacgagacgaaguucuccgacgacaucgagcagcaggccgacaacaugaucaccgagaugcuccagaaggaguacaucgaccggcaggggaagacgccccugggccuggucgaccuguucguguucagcaccuccuucuaccucaucagcaucuuccugcaccuggugaagaucccgacccaccgccacaucgucgggaagcccugccccaagccccaccggcucaaccacaugggcaucugcuccugcgggcuguacaagcagccgggcgugcccgugcgcuggaagcggugaggacuagucccuguucccagagcccacuuuuuuuucuuuuuuugaaauaaaauagccugucuuucagaucucaaaggcucuuuucagagccaccaaaaaaaaaaaaaaaaaaaaaaaaaaaaaaaaaaaaaaaaaaaaaaaaaaaaaaaaaaaaaaaaagaauu

SEQ ID NO: 25193 - RNA, 1736 nt, Artificial Sequence
  mRNA product Design a-2 (hSL-A64-N5) comprising derived and/or modified sequence from LASV(AV;Clade V)__CCA30314__GPCmut3 (opt1)
aggagaguccgcucagccagguugcagaagcggcuuagcguguguccuaaucuucucucugcguguagguaggccugugccgcaaacaagcuuaccaugggccagaucgugaccuucuuccaggaggucccccacgugaucgaggaggugaugaacaucguccugaucgcccucagcauccuggccgugcugaaggggcucuacaacaucgcgaccugcggccugaucgggcugaucacguuccuccugcugugcggccgcuccugcagcuccaaccucuacaaggggguguacgagcugcagagccuggaccucaacauggagacccugaacaugaccaugccgcuguccugcaccaagaacaacagccaccacuacauccgggucggcaacgacacgggccucgagcugacccugaccaacaccuccauccucaaccacaaguucugcaaccugagcgacgcccacaagaaggaccuguacgaccacgcccucauguccaucaucagcacguuccaccuguccauccccaacuucaaccaguacgaggccaugagcugcgacuucaacgggggcaagaucuccgugcaguacaaccugagccacuccuacgccaucgacgcggccaaccacugcgggaccguggccaacggcauccuccagaccuucaugcgcauggccuggggcgggagcuacaucgcgcuggacuccggccgggggaacugggacugcaucaugaccagcuaccaguaccugaucauccagaacacgaccugggagaaccacugccaguucucccgccccagccccaucggcuaccucgggcugcugagccagcggacccgcgacaucuacaucucccggcgccgccggggcaccuucacguggacccugagcgacuccgagggcaacgccacccccgggggcuacugccucacccgguggaugcugaucgaggccgagcugaagugcuucgggaacacggccgucgccaagugcaacgagaagcacgacgaggaguucugcgacaugcuccgccuguucgacuucaacaagcaggcgaucagccggcugaagucccccgcccagaugagcauccagcucaucaacaaggccgugaacgcccugaucaacgaccagcugaucaugaagaaccaccuccgcgacaucaugggcauccccuacugcaacuacuccaaguacugcuaccugaaccacaccaucaccgggaagaccagccugcccaagugcugccucguguccaacggcagcuaccugaacgagacgcacuucuccgacgacaucgagcagcaggccgacaacaugaucaccgagaugcugcagaaggaguacauggagcggcagggcaagaccccgcucgggcuggucgaccuguucguguucagcaccuccuucuaccugaucagcaucuuccuccgccuggugaagaucccgacgcaccggcacaucgucggcaagcccugccccaagccccaccgccugaaccacauggggaucugcuccugcggccucuacaagcagccgggggugcccgugcgguggaagcgcugaggacuagucccuguucccagagcccacuuuuuuuucuuuuuuugaaauaaaauagccugucuuucagaucucaaaggcucuuuucagagccaccaaaaaaaaaaaaaaaaaaaaaaaaaaaaaaaaaaaaaaaaaaaaaaaaaaaaaaaaaaaaaaaaagaauu

SEQ ID NO: 25194 - RNA, 1733 nt, Artificial Sequence
  mRNA product Design a-2 (hSL-A64-N5) comprising derived and/or modified sequence from LASV(Togo/2016/7082;Clade VI)__AMR44577__GPCmut3 (opt1)
aggagaguccgcucagccagguugcagaagcggcuuagcguguguccuaaucuucucucugcguguagguaggccugugccgcaaacaagcuuaccaugggccagaucaucaccuucuuccaggaggugccccacgucaucgaggaggugaugaacaucgugcugaucgcccucagccugcuggccauccucaagggggucuacaacguggcgaccugcggcaucaucgggcuggugacguuccuguuccucugcggccgcuccugcagccugaucuacaagggguccuacgagcugcagacccucgagcugaacauggagacccugaacaugaccaugccgcucagcugcacgaagaacuccagccaccacuacauccgggucggcaacgagaccggccuggagcugacccucaccaacacguccaucaucaaccacaaguucugcaaccugagcgacgcccacaagcgcaaccuguacgaccacgcccucauguccauccugagcaccuuccaccuguccauccccaacuucaaccaguacgaggccaugagcugcgacuucaacgggggcaagaucuccgugcaguacaaccucagccacgccuacgcgguggacgccgccgagcacugcgggaccgucgccaacggcgugcugcagaccuucaugcggauggcguggggcggguccuacaucgcccuggacagcggccgcgggaacugggacugcaucaugacguccuaccaguaccucaucauccagaacaccaccugggaggaccacugccaguucagccggcccucccccaucggcuaccuggggcugcucagccagcgcacccgggacaucuacaucagccgccggcgccggggcacguucaccuggacccucuccgacagcgagggcaacgagacccccgggggcuacugccugacgcgcuggaugcugaucgaggccgagcucaagugcuucgggaacaccgccguggccaagugcaacgagaagcacgacgaggaguucugcgacaugcugcggcuguucgacuucaacaagcaggcgauccagcgccucaagucccccgcccagaugagcauccagcugaucaacaaggccgucaacgcccugaucaacgaccagcucaucaugaagaaccaccuccgggacaugaugggcauccccuacugcaacuacuccaaguacugcuaccugaaccacaccagcuccgggcgcaccagccugcccaagugcugccugguguccaacggcagcuaccugaacgagacgcacuucuccgacgacaucgagcagcaggccgacaacaugaucaccgagaugcuccagaaggaguacaucgaccggcagggcaagaccccgcuggggcugguggaccucuucgucuucagcaccuccuucuaccugaucagcaucuuccugcaccugaucaagaucccgacgcaccgccacaucgugggcaagcccugccccaagccccaccggcucaaccacauggggaucugcuccugcggccuguacaagcagccgggggugcccacccgcuggaagcggugaggacuagucccuguucccagagcccacuuuuuuuucuuuuuuugaaauaaaauagccugucuuucagaucucaaaggcucuuuucagagccaccaaaaaaaaaaaaaaaaaaaaaaaaaaaaaaaaaaaaaaaaaaaaaaaaaaaaaaaaaaaaaaaaagaauu

SEQ ID NO: 25195 - RNA, 1733 nt, Artificial Sequence
  mRNA product Design a-2 (hSL-A64-N5) comprising derived and/or modified sequence from LASV(KAK-428;Clade n.d. (VII))__ANH09740__GPCmut3 (opt1)
aggagaguccgcucagccagguugcagaagcggcuuagcguguguccuaaucuucucucugcguguagguaggccugugccgcaaacaagcuuaccaugggccagaucgugaccuucuuccaggaggucccccacgugaucgaggaggugaugaacaucguccugaucgcccucagccugcuggccauccucaaggggcuguacaacuucgcgaccugcggcgugaucgggcugaucacguuccuccugcugugcggccgcuccugcagcgccaccuacaaggggcaguacgagcuccagacccuggagcugaacauggagucccucaacaugaccaugccgcugagcugcacgaagaacaacucccaccacuacauccgggccggcaacaacaccggccuggagcucacccugaccaacacgagcaucaucucccacaaguucugcaaccugagcgacgcccacaagaagaaccucuacgaccacacccugauguccaucaucaccaccuuccaccugagcauccccaacuucaaccaguacgaggccauguccugcgacuucaacgggggcaagaucagcauccaguacaaccucucccacagcuacgcgggggacgccgcccagcacugcggcacgguggccaacgggguccugcagaccuucaugcgcauggcguggggcggcuccuaccuggcccucgacagcgggcggcgcggcugggacugcaucaucuccagcuaccaguaccugaucauccagaacaccaccugggacgaccacugccaguucucccggcccagccccaucggguaccugggcuucgugagccagaagacgcgcgacaucuacaucucccggcgccgccggggcaccuucaccuggacccugagcgacuccgaggggcacgacaugccgggcggguacugccucacgcgguggaugcugaucgaggccgaccugaagugcuucggcaacaccgccguggccaagugcaacgagaagcacgacgaggaguucugcgacauguggcgccucuucgacuucaacaagcaggcgauccagcggcugaaggcccccgcccagaugaacauccagcugaucaacaaggccgucaacgcccucaucaacgaccagcugaugaugaagaaccaccuccgcgacaucauggggauccccuacugcaacuacagcaaguucugcuaccugaacaacaccaccacgggccggaccucccugccccgcugcugccugaucagcaacggcuccuaccucaacgagacccacuucagcgacgacaucgagcagcaggcggacaacaugaucaccgagaugcugcagaaggaguacauggaccggcaggggaagacgccccugggccucguggaccuguucguguucuccaccagcuucuaccugaucaccaucuuccuccaccuggucaagaucccgacccaccgccacaucguggggaagcccugccccaagccccaccggcugaaccacaugggcaucugcuccugcgggcuguacaagcagccgggcgugcccguccgcuggaagcggugaggacuagucccuguucccagagcccacuuuuuuuucuuuuuuugaaauaaaauagccugucuuucagaucucaaaggcucuuuucagagccaccaaaaaaaaaaaaaaaaaaaaaaaaaaaaaaaaaaaaaaaaaaaaaaaaaaaaaaaaaaaaaaaaagaauu

SEQ ID NO: 25196 - RNA, 1733 nt, Artificial Sequence; identical to SEQ ID NO: 25190
  mRNA product Design a-2 (hSL-A64-N5) comprising derived and/or modified sequence from LASV(Pinneo-NIG-1969;Clade I)__AIT17836__GPCmut3 (opt1)

SEQ ID NO: 25197 - RNA, 1733 nt, Artificial Sequence
  mRNA product Design a-2 (hSL-A64-N5) comprising derived and/or modified sequence from LASV(ISTH0009-NIG-2011;Clade II)__AIT17404__GPCmut3 (opt1)
aggagaguccgcucagccagguugcagaagcggcuuagcguguguccuaaucuucucucugcguguagguaggccugugccgcaaacaagcuuaccaugggccagaucaucaccuucuuccaggaggugccccacgucaucgaggaggugaugaacaucgugcugaucgcccucagccugcuggccauccucaaggggaucuacaacgucgcgaccugcggccuguucgggcugguguccuuccuccugcugugcggccgcagcugcuccacgaccuacaaggggguguacgagcuccagacccuggagcuggacauggccagccucaacaugaccaugccgcuguccugcacgaagaacaacagccaccacuacaucauggucggcaacgagaccggccuggagcucacccugaccaacacguccaucaucaaccacaaguucugcaaccugagcgacgcccacaagaagaaccucuacgaccacgcccugauguccaucaucagcaccuuccaccuguccauccccaacuucaaccaguacgaggccaugagcugcgacuucaacgggggcaagaucuccgugcaguacaaccucagccacgcguacgccguggacgccgccaaccacugcgggaccaucgcgaacggcguccugcagaccuucaugcggauggccuggggcggguccuacaucgcccuggacagcggcaagggguccugggacugcaucaugacgagcuaccaguaccucaucauccagaacaccaccugggaggaccacugccaguucucccgccccagccccaucggcuaccuggggcugcucagccagcggacccgcgacaucuacaucucccggcgccgccggggcacguucaccuggacccucagcgacuccgagggcaacgagacccccgggggcuacugccugacgcgguggaugcugaucgaggccgagcucaagugcuucgggaacaccgccguggcgaagugcaacgagaagcacgacgaggaguucugcgacaugcugcgccuguucgacuucaacaagcaggccauccggcgccucaagacccccgcccagaugagcauccagcugaucaacaaggccgugaacgcccugaucaacgaccagcucaucaugaagaaccaccuccgggacaucaugggcaucccguacugcaacuacuccaaguacugcuaccugaaccacaccgucacggggaagaccagccugccccgcugcugccugguguccaacggcagcuaccugaacgagacccacuucuccgacgacaucgagcagcaggcggacaacaugaucaccgagcuccugcagaaggaguacauggaccggcagggcaagacgccccuggggcucguggaccuguucgucuucagcaccuccuucuaccugaucagcaucuuccugcaccucaucaagaucccgacccaccgccacaucaccggcaagcccugccccaagccccaccggcugaaccacauggggaucugcuccugcggccuguacaagcacccgggggugcccgugaaguggaagcgcugaggacuagucccuguucccagagcccacuuuuuuuucuuuuuuugaaauaaaauagccugucuuucagaucucaaaggcucuuuucagagccaccaaaaaaaaaaaaaaaaaaaaaaaaaaaaaaaaaaaaaaaaaaaaaaaaaaaaaaaaaaaaaaaaagaauu

SEQ ID NO: 25198 - RNA, 1733 nt, Artificial Sequence
  mRNA product Design a-2 (hSL-A64-N5) comprising derived and/or modified sequence from LASV(ISTH2010-NIG-2012;Clade II)__AIT17482__GPCmut3 (opt1)
aggagaguccgcucagccagguugcagaagcggcuuagcguguguccuaaucuucucucugcguguagguaggccugugccgcaaacaagcuuaccaugggccagaucaucaccuucuuccaggaggugccccacgucaucgaggaggugaugaacaucgugcugaucgcccucagccugcuggccauccucaaggggaucuacaacgucgcgaccugcggccuguucgggcugguguccuuccuccugcugugcggccgcagcugcuccacgaccuacaaggggguguacgagcuccagacccuggagcuggacauggccagccucaacaugaccaugccgcuguccugcacgaagaacaacagccaccacuacaucauggucggcaacgagaccggccuggagcucacccugaccaacacguccaucaucaaccacaaguucugcaaccugagcgacgcccacaagaagaaccucuacgaccacgcccugauguccaucaucagcaccuuccaccuguccauccccaacuucaaccaguacgaggccaugagcugcgacuucaacgggggcaagaucuccgugcaguacaaccucagccacgcguacgccguggacgccgccaaccacugcgggaccaucgcgaacggcguccugcagaccuucaugcggauggccuggggcggguccuacaucgcccuggacagcggcaagggguccugggacugcaucaugacgagcuaccaguaccucaucauccagaacaucaccugggaggaccacugccaguucucccgccccagccccaucggcuaccuggggcugcucagccagcggacccgcgacaucuacaucucccggcgccgccggggcaccuucacguggacccucagcgacuccgagggcaacgagacccccgggggcuacugccugacccgguggaugcugaucgaggccgagcucaagugcuucgggaacacggccguggcgaagugcaacgagaagcacgacgaggaguucugcgacaugcugcgccuguucgacuucaacaagcaggccauccggcgccucaagacccccgcccagaugagcauccagcugaucaacaaggccgugaacgcccugaucaacgaccagcucaucaugaagaaccaccuccgggacaucaugggcauccccuacugcaacuacuccaaguacugcuaccugaaccacaccgucaccgggaagacgagccugccccgcugcugccugguguccaacggcagcuaccugaacgagacccacuucuccgacgacaucgagcagcaggcggacaacaugaucaccgagcuccugcagaaggaguacaucgaccggcagggcaagaccccgcuggggcucguggaccuguucgucuucagcacguccuucuaccugaucagcaucuuccugcaccucgugaagaucccgacccaccgccacguggucggcaagcccugccccaagccccaccggcugaaccacauggggaucugcuccugcggccuguacaagcacccgggggugcccgugaaguggaagcgcugaggacuagucccuguucccagagcccacuuuuuuuucuuuuuuugaaauaaaauagccugucuuucagaucucaaaggcucuuuucagagccaccaaaaaaaaaaaaaaaaaaaaaaaaaaaaaaaaaaaaaaaaaaaaaaaaaaaaaaaaaaaaaaaaagaauu

SEQ ID NO: 25199 - RNA, 1733 nt, Artificial Sequence
  mRNA product Design a-2 (hSL-A64-N5) comprising derived and/or modified sequence from LASV(Lassa virus/H.sapiens-wt/NGA/2015/ISTH_0543;Clade II)__AVO03639__GPCmut3 (opt1)
aggagaguccgcucagccagguugcagaagcggcuuagcguguguccuaaucuucucucugcguguagguaggccugugccgcaaacaagcuuaccaugggccagaucaucaccuucuuccaggaggugccccacgucaucgaggaggugaugaacaucgugcugaucgcccucagccugcuggccauccucaaggggaucuacaacgucgcgaccugcggccuguucgggcugguguccuuccuccugcugugcggccgcagcugcuccacgaccuacaaggggguguacgagcuccagacccuggagcuggacauggccaaccucaacaugaccaugccgcugagcugcacgaagaacaacucccaccacuacaucauggucggcaacgagaccggccuggagcucacccugaccaacacgagcaucaucaaccacaaguucugcaaccuguccgacgcccacaagaagaaccucuacgaccacgcccugaugagcaucaucuccaccuuccaccugagcauccccaacuucaaccaguacgaggccauguccugcgacuucaacgggggcaagaucagcgugcaguacaaccucucccacaccuacgcgguggacgccgccaaccacugcgggaccaucgccaacggcguccugcagacguucaugcggauggcguggggcgggagcuacaucgcccuggacuccggcaaggggagcugggacugcaucaugaccuccuaccaguaccucgugauccagaacaccaccugggaggaccacugccaguucagccgccccucccccaucggcuaccuggggcugcucagccagcggacgcgcgacaucuacaucagccggcgccgccggggcaccuucaccuggacccucuccgacagcgagggcaacgagacgcccgggggcuacugccugacccgguggaugcugaucgaggccgagcucaagugcuucgggaacaccgccguggccaagugcaacgagaagcacgacgaggaguucugcgacaugcugcgccuguucgacuucaacaagcaggcgauccggcgccucaagacccccgcccagauguccauccagcugaucaacaaggccgucaacgcccugaucaacgaccagcucaucaugaagaaccaccuccgggacaucaugggcauccccuacugcaacuacagcaaguacugcuaccugaaccacacggugaccgggaagaccucccugccccgcugcugccuggugagcaacggcuccuaccugaacgagacccacuucagcgacgacaucgagcagcaggccgacaacaugaucacggagcuccugcagaaggaguacaucgaccggcagggcaagaccccgcuggggcucgucgaccuguucguguucuccaccagcuucuaccugaucuccaucuuccugcaccucgugaagaucccgacccaccgccacaucacgggcaagcccugccccaagccccaccggcugaaccacauggggaucugcagcugcggccuguacaagcacccggggguccccgugaaguggaagcgcugaggacuagucccuguucccagagcccacuuuuuuuucuuuuuuugaaauaaaauagccugucuuucagaucucaaaggcucuuuucagagccaccaaaaaaaaaaaaaaaaaaaaaaaaaaaaaaaaaaaaaaaaaaaaaaaaaaaaaaaaaaaaaaaaagaauu

SEQ ID NO: 25200 - RNA, 1733 nt, Artificial Sequence
  mRNA product Design a-2 (hSL-A64-N5) comprising derived and/or modified sequence from LASV(Lassa virus/H.sapiens-wt/NGA/2016/ISTH_0009;Clade II)__AVO03571__GPCmut3 (opt1)
aggagaguccgcucagccagguugcagaagcggcuuagcguguguccuaaucuucucucugcguguagguaggccugugccgcaaacaagcuuaccaugggccagaucaucaccuucuuccaggaggugccccacgucaucgaggaggugaugaacaucgugcugaucgcccucagccugcuggccauccucaaggggaucuacaacgucgcgaccugcggccugcuggggcucguguccuuccugcugcucugcggccgcagcugcuccacgaccuacaaggggguguacgagcugcagacccuggagcucgacauggccagccugaacaugaccaugccgcuguccugcacgaagaacaacagccaccacuacaucauggucggcaacgagaccggccucgagcugacccugaccaacacguccaucaucaaccacaaguucugcaaccucagcgacgcccacaagaagaaccuguacgaccacgcccugauguccaucaucagcaccuuccaccucuccauccccaacuucaaccaguacgaggccaugagcugcgacuucaacgggggccggaucuccgugcaguacaaccugagccacuccuacgcgguggacgccgccaaccacugcgggaccaucgccaacggcguccugcagaccuucaugcgcauggcguggggcgggagcuacaucgcccucgacuccggcaaggggagcugggacugcaucaugacguccuaccaguaccugaucauccagaacaccaccugggaggaccacugccaguucagccggcccagccccaucggcuaccuggggcuccugucccagcgcacccgggacaucuacaucagccgccggcgccggggcacguucaccuggacccuguccgacagcgagggcaacgagacccccgggggcuacugccugacgcgcuggaugcucaucgaggccgagcugaagugcuucgggaacaccgccguggccaagugcaacgagaagcacgacgaggaguucugcgacaugcugcggcuguucgacuucaacaagcaggcgauccgccggcugaagacccccgcccagauguccauccagcugaucaacaaggccgugaacgcccucaucaacgaccagcugaucaugaagaaccaccuccgcgacaucaugggcaucccguacugcaacuacagcaaguacugcuaccucaaccacaccgucacggggaagaccucccugccccggugcugccuggugagcaacggcuccuaccucaacgagacccacuucagcgacgacaucgagcagcaggccgacaacaugaucaccgagcugcugcagaaggaguacaucgaccgccagggcaagacgccccucgggcugguggaccuguucgucuucuccaccagcuucuaccugaucuccaucuuccuccaccuggugaagaucccgacccaccggcacaucaccggcaagcccugccccaagccccaccgccugaaccacauggggaucugcagcugcggccucuacaaccacccgggggugcccgucaaguggaagcggugaggacuagucccuguucccagagcccacuuuuuuuucuuuuuuugaaauaaaauagccugucuuucagaucucaaaggcucuuuucagagccaccaaaaaaaaaaaaaaaaaaaaaaaaaaaaaaaaaaaaaaaaaaaaaaaaaaaaaaaaaaaaaaaaagaauu

SEQ ID NO: 25201 - RNA, 1733 nt, Artificial Sequence
  mRNA product Design a-2 (hSL-A64-N5) comprising derived and/or modified sequence from LASV(Lassa virus/H.sapiens-wt/NGA/2016/ISTH_0017;Clade II)__AVO03567__GPCmut3 (opt1)
aggagaguccgcucagccagguugcagaagcggcuuagcguguguccuaaucuucucucugcguguagguaggccugugccgcaaacaagcuuaccaugggccagaucaucaccuucuuccaggaggugccccacgucaucgaggaggugaugaacaucgugcugaucgcccucagccugcuggccauccucaaggggaucuacaacgucgcgaccugcggccuguucgggcugguguccuuccuccugcugugcggccgcagcugcuccacgaccuacaaggggguguacgagcuccagacccuggagcuggacauggccagccucaacaugaccaugccgcuguccugcacgaagaacaacagccaccacuacaucauggucggcaacgagaccggccuggagcucacccugaccaacacguccaucaucaaccacaaguucugcaaccugagcgacgcccacaagaagaaccucuacgaccacgcccugauguccaucaucagcaccuuccaccuguccauccccaacuucaaccaguacgaggccaugagcugcgacuucaacgggggcaagaucuccgugcaguacaaccucagccacaccuacgcgaucgacgccgccaaccacugcgggaccaucgccaacggcgugcugcagacguucaugcggauggcguggggcggguccuacaucgcccuggacagcggcaagggguccugggacugcaucaugaccagcuaccaguaccucaucauccagaacaccaccugggaggaccacugccaguucucccgccccagccccaucggcuaccuggggcugcucagccagcggacgcgcgacaucuacaucucccggcgccgccggggcaccuucaccuggacccucagcgacuccgagggcaacgagacgcccgggggcuacugccugacccgguggaugcugaucgaggccgagcucaagugcuucgggaacaccgccgucgccaagugcaacgagaagcacgacgaggaguucugcgacaugcugcgccuguucgacuucaacaagcaggcgauccggcgccucaagacccccgcccagaugagcauccagcugaucaacaaggccgugaacgcccugaucaacgaccagcucaucaugaagaaccaccuccgggacaucaugggcauccccuacugcaacuacuccaaguacugcuaccugaaccacacggugaccgggaagaccagccugccccgcugcugccuggucuccaacggcagcuaccugaacgagacccacuucuccgacgacaucgagcagcaggccgacaacaugaucacggagcuccugcagaaggaguacauggaccggcagggcaagaccccgcuggggcucguggaccuguucguguucagcaccuccuucuaccugaucagcaucuuccugcaccucguccgcaucccgacccaccggcacgugaucggcaagcccugccccaagccccaccgccugaaccacauggggaucugcuccugcggccuguacaagcacccgggggugcccgucaaguggaagcggugaggacuagucccuguucccagagcccacuuuuuuuucuuuuuuugaaauaaaauagccugucuuucagaucucaaaggcucuuuucagagccaccaaaaaaaaaaaaaaaaaaaaaaaaaaaaaaaaaaaaaaaaaaaaaaaaaaaaaaaaaaaaaaaaagaauu

SEQ ID NO: 25202 - RNA, 1733 nt, Artificial Sequence
  mRNA product Design a-2 (hSL-A64-N5) comprising derived and/or modified sequence from LASV(Lassa virus/H.sapiens-wt/NGA/2018/ISTH_0959;Clade II)__AVV65099__GPCmut3 (opt1)
aggagaguccgcucagccagguugcagaagcggcuuagcguguguccuaaucuucucucugcguguagguaggccugugccgcaaacaagcuuaccaugggccagaucaucaccuucuuccaggaggugccccacgucaucgaggaggugaugaacaucgugcugaucgcccucagccugcuggccauccucaaggggaucuacaacgucgugaccugcggccuguucgggcugguguccuuccuccugcugugcggccgcagcugcuccacgaccuacaagggggucuacgagcuccagacccuggagcuggacauggcgagccucaacaugaccaugccgcuguccugcacgaagaacaacagccaccacuacaucauggugggcaacgagaccggccuggagcucacccugaccaacacguccaucaucaaccacaaguucugcaaccugagcgacgcccacaagaagaaccucuacgaccacgcccugauguccaucaucagcaccuuccaccuguccauccccaacuucaaccaguacgaggccaugagcugcgacuucaacgggggcaagaucuccgugcaguacaaccucagccacgccuacgcgaucgacgccgccaaccacugcgggaccaucgccaacggcguccugcagaccuucaugcggauggcguggggcggguccuacaucgcccuggacagcggcaagggguccugggacugcaucaugacgagcuaccaguaccucaucauccagaacaccaccugggaggaccacugccaguucucccgccccagccccaucggcuaccuggggcugcucagccagcggacccgcgacaucuacaucucccggcgccgccggggcacguucaccuggacccucagcgacuccgagggcaacgagacccccgggggcuacugccugacgcgguggaugcugaucgaggccgagcucaagugcuucgggaacaccgccguggccaagugcaacgagaagcacgacgaggaguucugcgacaugcugcgccuguucgacuucaacaagcaggcgauccggcgccucaagacccccgcccagaugagcauccagcugaucaacaaggccgugaacgcccugaucaacgaccagcucaucaugaagaaccaccuccgggacaucaugggcaucccguacugcaacuacuccaaguacugcuaccugaaccacaccgucacggggaagaccagccugccccgcugcugccugguguccaacggcagcuaccugaacgagacccacuucuccgacgacaucgagcagcaggccgacaacaugaucaccgagcuccugcagaaggaguacaucgaccggcagggcaagacgccccuggggcucguggaccuguucgucuucagcaccuccuucuaccugaucagcaucuuccugcaccucgugaagaucccgacccaccgccacgugaucggcaagcccugccccaagccccaccggcugaaccacauggggaucugcuccugcggccuguacaagcacccggggguccccgugaaguggaagcgcugaggacuagucccuguucccagagcccacuuuuuuuucuuuuuuugaaauaaaauagccugucuuucagaucucaaaggcucuuuucagagccaccaaaaaaaaaaaaaaaaaaaaaaaaaaaaaaaaaaaaaaaaaaaaaaaaaaaaaaaaaaaaaaaaagaauu

SEQ ID NO: 25203 - RNA, 1733 nt, Artificial Sequence
  mRNA product Design a-2 (hSL-A64-N5) comprising derived and/or modified sequence from LASV(LASV003-NIG-2008;Clade II)__AIT17580__GPCmut3 (opt1)
aggagaguccgcucagccagguugcagaagcggcuuagcguguguccuaaucuucucucugcguguagguaggccugugccgcaaacaagcuuaccaugggccagaucaucaccuucuuccaggaggugccccacgucaucgaggaggugaugaacaucgugcugaucgcccucagccugcuggccauccucaaggggaucuacaacgucgcgaccugcggccuguucgggcugguguccuuccuccugcugugcggccgcagcugcuccacgaccuacaaggggguguacgagcuccagacccuggagcuggacauggccagccucaacaugaccaugccgcuguccugcacgaagaacaacagccaccacuacaucauggucggcaacgagaccggccuggagcucacccugaccaacacguccaucaucaaccacaaguucugcaaccugagcgacgcccacaagaagaaccucuacgaccacgcccugauguccaucaucagcaccuuccaccuguccauccccaacuucaaccaguacgaggccaugagcugcgacuucaacgggggcaagaucuccgugcaguacaaccucagccacaccuacgcgguggacgccgccaaccacugcgggaccaucgccaacggcguccugcagacguucaugcggauggcguggggcggguccuacaucgcccuggacagcggcaagggguccugggacugcaucaugaccagcuaccaguaccucaucauccagaacaccaccugggaggaccacugccaguucucccgccccagccccaucggcuaccuggggcugcucagccagcggacgcgcgacaucuacaucucccggcgccgccggggcaccuucaccuggacccucagcgacuccgagagcaacgagacgccgggcggguacugccugacccgguggaugcugaucgaggccgagcucaagugcuucggcaacaccgccguggccaagugcaacgagaagcacgacgaggaguucugcgacaugcugcgccuguucgacuucaacaagcaggcgauccggcgccucaaggcccccgcccagauguccauccagcugaucaacaaggccgugaacgcccugaucaacgaccagcucaucaugaagaaccaccuccgggacaucauggggauccccuacugcaacuacagcaaguacugcuaccugaaccacaccgucacgggccgcaccucccugccccggugcugccuggugagcaacggguccuaccugaacgagacccacuucagcgacgacaucgagcagcaggcggacaacaugaucaccgagcuccugcagaaggaguacauggaccgccagggcaagacgccccugggccucguggaccuguucgucuucuccaccagcuucuaccugaucuccaucuuccugcaccucgugaagaucccgacccaccggcacgugaucgggaagcccugccccaagccccaccgccugaaccacaugggcaucugcagcugcgggcuguacaagcacccgggcguccccgugaaguggaagcggugaggacuagucccuguucccagagcccacuuuuuuuucuuuuuuugaaauaaaauagccugucuuucagaucucaaaggcucuuuucagagccaccaaaaaaaaaaaaaaaaaaaaaaaaaaaaaaaaaaaaaaaaaaaaaaaaaaaaaaaaaaaaaaaaagaauu

SEQ ID NO: 25204 - RNA, 1733 nt, Artificial Sequence
  mRNA product Design a-2 (hSL-A64-N5) comprising derived and/or modified sequence from LASV(LASV035-NIG-2009;Clade II)__AIT17588__GPCmut3 (opt1)
aggagaguccgcucagccagguugcagaagcggcuuagcguguguccuaaucuucucucugcguguagguaggccugugccgcaaacaagcuuaccaugggccagaucaucaccuucuuccaggaggugccccacgucaucgaggaggugaugaacaucgugcugaucgcccucagccugcuggccauccucaaggggaucuacaacgucgcgaccugcggccuguucgggcugguguccuuccuccugcugugcggccgcagcugcuccacgaccuacaaggggguguacgagcuccagacccuggagcuggacauggccagccucaacaugaccaugccgcuguccugcacgaagaacaacagccaccacuacaucauggucggcaacgagaccggccuggagcucacccugaccaacacguccaucaucaaccacaaguucugcaaccugagcgacgcccacaagaagaaccucuacgaccacgcccugauguccaucaucagcaccuuccaccuguccauccccaacuucaaccaguacgaggccaugagcugcgacuucaacgggggcaagaucuccgugcaguacaaccucagccacgcguacgccguggacgccgccaaccacugcgggaccaucgcgaacggcguccugcagaccuucaugcggauggccuggggcggguccuacaucgcccuggacagcggcaagggguccugggacugcaucaugacgagcuaccaguaccucaucauccagaacaccaccugggaggaccacugccaguucucccgccccagccccaucggcuaccuggggcugcucagccagcggacccgcgacaucuacaucucccggcgccgccggggcacguucaccuggacccucagcgacuccgagggcaacgagacccccgggggcuacugccugacgcgguggaugcugaucgaggccgagcucaagugcuucgggaacaccgccguggcgaagugcaacgagaagcacgacgaggaguucugcgacaugcugcgccuguucgacuucaacaagcaggccauccggcgccucaaggcccccgcccagaugagcauccagcugaucaacaaggccgugaacgcgcugaucaacgaccagcucaucaugaagaaccaccuccgggacaucaugggcauccccuacugcaacuacuccaaguacugcuaccugaaccacaccgucaccgggaagacgagccugccccgcugcugccugguguccaacggcagcuaccugaacgagacccacuucuccgacgacaucgagcagcaggccgacaacaugaucaccgagcuccugcagaaggaguacaucgaccggcagggcaagaccccgcuggggcucguggaccuguucgucuucagcacguccuucuaccugaucagcaucuuccugcaccucgugaagaucccgacccaccgccacgugaucggcaagcccugccccaagccccaccggcugaaccacauggggaucugcuccugcggccuguacaagcacccggggguccccgugaaguggaagcgcugaggacuagucccuguucccagagcccacuuuuuuuucuuuuuuugaaauaaaauagccugucuuucagaucucaaaggcucuuuucagagccaccaaaaaaaaaaaaaaaaaaaaaaaaaaaaaaaaaaaaaaaaaaaaaaaaaaaaaaaaaaaaaaaaagaauu

SEQ ID NO: 25205 - RNA, 1733 nt, Artificial Sequence
  mRNA product Design a-2 (hSL-A64-N5) comprising derived and/or modified sequence from LASV(LASV1000-NIG-2009;Clade II)__AIT17782__GPCmut3 (opt1)
aggagaguccgcucagccagguugcagaagcggcuuagcguguguccuaaucuucucucugcguguagguaggccugugccgcaaacaagcuuaccaugggccagaucaucaccuucuuccaggaggugccccacgucaucgaggaggugaugaacaucgugcugaucgcccucagccugcuggccauccucaaggggaucuacaacgucgcgaccugcggccuguucgggcugguguccuuccuccugcugugcggccgcagcugcuccacgaccuacaaggggguguacgagcuccagacccuggagcuggacauggccagccucaacaugaccaugccgcuguccugcacgaagaacaacagccaccacuacaucauggucggcaacgagaccggccuggagcucacccugaccaacacguccaucaucaaccacaaguucugcaaccugagcgacgcccacaagaagaaccucuacgaccacgcccugauguccaucaucagcaccuuccaccuguccauccccaacuucaaccaguacgaggccaugagcugcgacuucaacgggggcaagaucuccgugcaguacaaccucagccacaccuacgcgguggacgccgccaaccacugcgggaccaucgccaacggcguccugcagacguucaugcggauggcguggggcggguccuacaucgcccuggacagcggcaagggguccugggacugcaucaugaccagcuaccaguaccucaucauccagaacaccaccugggaggaccacugccaguucucccgccccagccccaucggcuaccuggggcugcucagccagcggacgcgcgacaucuacaucucccggcgccgccggggcaccuucaccuggacccucagcgacuccgagggcaacgagacgcccgggggcuacugccugacccgguggaugcugaucgaggccgagcucaagugcuucgggaacaccgccguggccaagugcaacgagaagcacgacgaggaguucugcgacaugcugcgccuguucgacuucaacaagcaggcgaucaagcggcucaagacccccgcccagaugagcauccagcugaucaacaaggccgugaacgcccugaucaacgaccagcucaucaugaagaaccaccuccgcgacaucaugggcauccccuacugcaacuacuccaaguacugcuaccugaaccacacggucaccgggaagaccagccugccccggugcugccugguguccaacggcagcuaccugaacgagacccacuucuccgacgacaucgagcagcaggccgacaacaugaucacggagcuccugcagaaggaguacaucgaccgccagggcaagaccccgcuggggcucguggaccuguucgucuucagcaccuccuucuaccugaucagcaucuuccugcaccucgugaagaucccgacccaccggcacguggucggcaagcccugccccaagccccaccgccugaaccacauggggaucugcuccugcggccuguacaagcacccgggggugcccgugaaguggaagcggugaggacuagucccuguucccagagcccacuuuuuuuucuuuuuuugaaauaaaauagccugucuuucagaucucaaaggcucuuuucagagccaccaaaaaaaaaaaaaaaaaaaaaaaaaaaaaaaaaaaaaaaaaaaaaaaaaaaaaaaaaaaaaaaaagaauu

SEQ ID NO: 25206 - RNA, 1733 nt, Artificial Sequence
  mRNA product Design a-2 (hSL-A64-N5) comprising derived and/or modified sequence from LASV(LASV221-NIG-2010;Clade II)__AIT17624__GPCmut3 (opt1)
aggagaguccgcucagccagguugcagaagcggcuuagcguguguccuaaucuucucucugcguguagguaggccugugccgcaaacaagcuuaccaugggccagaucaucaccuucuuccaggaggugccccacgucaucgaggaggugaugaacaucgugcugaucgcccucagccugcuggccauccucaaggggaucuacaacgucgcgaccugcggccuguucgggcugguguccuuccuccugcugugcggccgcagcugcuccacgaccuacaaggggguguacgagcuccagacccuggagcuggacauggccagccucaacaugaccaugccgcuguccugcacgaagaacaacagccaccacuacaucauggucggcaacgagaccggccuggagcucacccugaccaacacguccaucaucaaccacaaguucugcaaccugagcgacgcccacaagaagaaccucuacgaccacgcccugauguccaucaucagcaccuuccaccuguccauccccaacuucaaccaguacgaggccaugagcugcgacuucaacgggggcaagaucuccgugcaguacaaccucagccacaccuacgcgaucgacgccgccaaccacugcgggaccaucgccaacggcgugcugcagacguucaugcggauggcguggggcggguccuacaucgcccuggacagcggcaagggguccugggacugcaucaugaccagcuaccaguaccucaucauccagaacaccaccugggaggaccacugccaguucucccgccccagccccaucggcuaccuggggcugcucagccagcggacgcgcgacaucuacaucucccggcgccgccggggcaccuucaccuggacccucagcgacuccgagggcaacgagacgcccgggggcuacugccugacccgguggaugcugaucgaggccgagcucaagugcuucgggaacaccgccgucgccaagugcaacgagaagcacgacgaggaguucugcgacaugcugcgccuguucgacuucaacaagcaggcgauccggcgccucaagacccccgcccagaugagcauccagcugaucaacaaggccgugaacgcccugaucaacgaccagcucaucaugaagaaccaccuccgggacaucaugggcauccccuacugcaacuacuccaaguacugcuaccugaaccacacggugaccgggaagaccagccugccccgcugcugccuggucuccaacggcagcuaccugaacgagacccacuucuccgacgacaucgagcagcaggccgacaacaugaucacggagaugcuccagaaggaguacauggaccggcagggcaagaccccgcuggggcugguggaccucuucguguucagcaccuccuucuaccugaucagcaucuuccugcaccuggucaagaucccgacccaccgccacgugaucggcaagcccugccccaagccccaccggcucaaccacauggggaucugcuccugcggccuguacaagcacccgggggugcccgucaaguggaagcgcugaggacuagucccuguucccagagcccacuuuuuuuucuuuuuuugaaauaaaauagccugucuuucagaucucaaaggcucuuuucagagccaccaaaaaaaaaaaaaaaaaaaaaaaaaaaaaaaaaaaaaaaaaaaaaaaaaaaaaaaaaaaaaaaaagaauu

SEQ ID NO: 25207 - RNA, 1733 nt, Artificial Sequence
  mRNA product Design a-2 (hSL-A64-N5) comprising derived and/or modified sequence from LASV(LASV237-NIG-2010;Clade II)__AIT17638__GPCmut3 (opt1)
aggagaguccgcucagccagguugcagaagcggcuuagcguguguccuaaucuucucucugcguguagguaggccugugccgcaaacaagcuuaccaugggccagaucaucaccuucuuccaggaggugccccacgucaucgaggaggugaugaacaucgugcugaucgcccucagccugcuggccauccucaaggggaucuacaacgucgcgaccugcggccuguucgggcugguguccuuccuccugcugugcggccgcagcugcuccacgaccuacaaggggguguacgagcuccagacccuggagcuggacauggccagccucaacaugaccaugccgcuguccugcacgaagaacaacagccaccacuacaucauggucggcaacgagaccggccuggagcucacccugaccaacacguccaucaucaaccacaaguucugcaaccugagcgacgcccacaagaaggaccucuacgaccacgcccugauguccaucaucagcaccuuccaccuguccauccccaacuucaaccaguacgaggccaugagcugcgacuucaacgggggcaagaucuccgugcaguacaaccucagccacaccuacgcgguggacgccgccaaccacugcgggaccaucgccaacggcguccugcagacguucaugcggauggcguggggcggguccuacaucgcccuggacagcggcaagggguccugggacugcaucaugaccagcuaccaguaccucaucauccagaacaccaccugggaggaccacugccaguucucccgccccagccccaucggcuaccuggggcugcucagccagcggacgcgcgacaucuacaucucccggcgccgccggggcaccuucaccuggacccucagcgacuccgagggcaacgagacgcccgggggcuacugccugacccgguggaugcugaucgaggccgagcucaagugcuucgggaacaccgccguggccaagugcaacgagaagcacgacgaggaguucugcgacaugcugcgccuguucgacuucaacaagcaggcgauccggcgccucaagacccccgcccagaugagcauccagcugaucaacaaggccgugaacgcccugaucaacgaccagcucaucaugaagaaccaccuccgggacaucaugggcauccccuacugcaacuacuccaaguacugcuaccugaaccacacggucaccgggaagaccagccugccccgcugcugccugguguccaacggcagcuaccugaacgagacccacuucuccgacgacaucgagcagcaggccgacaacaugaucacggagcuccugcagaaggaguacauggaccggcagggcaagaccccgcuggggcucguggaccuguucgucuucagcaccuccuucuaccugaucagcaucuuccugcaccucaucaagaucccgacccaccgccacaucacgggcaagcccugccccaagccccaccggcugaaccacauggggaucugcuccugcggccuguacaagcacccgggggugcccgugaaguggaagcgcugaggacuagucccuguucccagagcccacuuuuuuuucuuuuuuugaaauaaaauagccugucuuucagaucucaaaggcucuuuucagagccaccaaaaaaaaaaaaaaaaaaaaaaaaaaaaaaaaaaaaaaaaaaaaaaaaaaaaaaaaaaaaaaaaagaauu

SEQ ID NO: 25208 - RNA, 1733 nt, Artificial Sequence
  mRNA product Design a-2 (hSL-A64-N5) comprising derived and/or modified sequence from LASV(LASV253-NIG-2011;Clade II)__AIT17670__GPCmut3 (opt1)
aggagaguccgcucagccagguugcagaagcggcuuagcguguguccuaaucuucucucugcguguagguaggccugugccgcaaacaagcuuaccaugggccagaucaucaccuucuuccaggaggugccccacgucaucgaggaggugaugaacaucgugcugaucgcccucagccugcuggccauccucaaggggaucuacaacgucgcgaccugcggccuguucgggcugguguccuuccuccugcugugcggccgcagcugcuccacgaccuacaaggggguguacgagcuccagacccuggagcuggacauggccagccucaacaugaccaugccgcuguccugcacgaagaacaacagccaccacuacaucauggucggcaacgagaccggccuggagcucacccugaccaacacguccaucaucaaccacaaguucugcaaccugagcgacgcccacaagaagaaccucuacgaccacgcccugauguccaucaucagcaccuuccaccuguccauccccaacuucaaccaguacgaggccaugagcugcgacuucaacgggggcaagaucuccgugcaguacaaccucagccacaccuacgcgguggacgccgccaaccacugcgggaccaucgccaacggcguccugcagacguucaugcggauggcguggggcggguccuacaucgcccuggacagcggcaagggguccugggacugcaucaugaccagcuaccaguaccucaucauccagaacaccaccugggaggaccacugccaguucucccgccccagccccaucggcuaccuggggcugcucagccagcggacgcgcgacaucuacaucucccggcgccgccggggcaccuucaccuggacccucagcgacuccgagggcaacgagacgcccgggggcuacugccugacccgguggaugcugaucgaggccgagcucaagugcuucgggaacaccgccguggccaagugcaacgagaagcacgacgaggaguucugcgacaugcugcgccuguucgacuucaacaagcaggcgauccggcgccucaaggcccccgcccagaugagcauccagcugaucaacaaggccgugaacgcccugaucaacgaccagcucaucaugaagaaccaccuccgggacaucaugggcaucccguacugcaacuacuccaaguacugcuaccugaaccacaccgucacggggcgcaccagccugccccggugcugccugguguccaacggcagcuaccugaacgagacccacuucuccgacgacaucgagcagcaggcggacaacaugaucaccgagcuccugcagaaggaguacaucgaccgccagggcaagacgccccuggggcucguggaccuguucgucuucagcaccuccuucuaccugaucagcaucuuccugcaccucgugaagaucccgacccaccggcacaucaucggcaagcccugccccaagccccaccgccugaaccacauggggaucugcuccugcggccuguacaagcacccgggggugcccgucaaguggaagcggugaggacuagucccuguucccagagcccacuuuuuuuucuuuuuuugaaauaaaauagccugucuuucagaucucaaaggcucuuuucagagccaccaaaaaaaaaaaaaaaaaaaaaaaaaaaaaaaaaaaaaaaaaaaaaaaaaaaaaaaaaaaaaaaaagaauu

SEQ ID NO: 25209 - RNA, 1733 nt, Artificial Sequence
  mRNA product Design a-2 (hSL-A64-N5) comprising derived and/or modified sequence from LASV(LASV254-NIG-2011;Clade II)__AIT17674__GPCmut3 (opt1)
aggagaguccgcucagccagguugcagaagcggcuuagcguguguccuaaucuucucucugcguguagguaggccugugccgcaaacaagcuuaccaugggccagaucaucaccuucuuccaggaggugccccacgucaucgaggaggugaugaacaucgugcugaucgcccucagccugcuggccauccucaaggggaucuacaacgucgcgaccugcggccuguucgggcugguguccuuccuccugcugugcggccgcagcugcuccacgaccuacaaggggguguacgagcuccagacccuggagcuggacaugaccaaccucaacaugacgaugccgcugagcugcaccaagaacaacucccaccacuacaucauggucggcaacgagaccggccuggagcucacccugacgaacaccagcaucaucaaccacaaguucugcaaccuguccgacgcccacaagaagaaccucuacaaccacgcccugaugagcaucaucuccaccuuccaccugagcauccccaacuucaaccaguacgaggccauguccugcgacuucaacgggggcaagaucagcgugcaguacaaccucucccacagcuacgccguggacgcggccaaccacugcgggaccaucgccaacggcguccugcagacguucaugcggauggccuggggcggguccuacaucgcgcuggacagcggcaaggggaacugggacugcaucaugaccuccuaccaguaccucaucauccagaacaccaccugggaggaccacugccaguucagccgccccucccccaucggcuaccuggggcugcucagccagcggacgcgcgacaucuacaucagccggcgccgccggggcaccuucaccuggacccucuccgacagcgagggcaacgagacgcccgggggcuacugccugacccgguggaugcugaucgaggccgagcucaagugcuucgggaacaccgccguggccaagugcaacgagaagcacgacgaggaguucugcgacaugcugcgccuguucgacuucaacaagcaggccauccggcgccucaagacccccgcgcaggccaacauccagcugaucaacaaggccgugaacgcccugaucaacgaccagcucaucaugaagaaccaccuccgggacaucaugggcauccccuacugcaacuacuccaaguacugcuaccugaaccacacggucaccgggaagaccagccugccccgcugcugccugguguccaacggcagcuaccugaacgagacccacuucuccgacgacaucgagcagcaggccgacaacaugaucacggagcuccugcagaaggaguacauggaccggcagggcaagaccccgcuggggcucguggaccuguucgucuucagcaccuccuucuaccugaucagcaucuuccugcaccucgugaagaucccgacccaccgccacgugaucggcaagcccugccccaagccccaccggcugaaccacauggggaucugcuccugcggccuguacaagcacccggggguccccgugaaguggaagcgcugaggacuagucccuguucccagagcccacuuuuuuuucuuuuuuugaaauaaaauagccugucuuucagaucucaaaggcucuuuucagagccaccaaaaaaaaaaaaaaaaaaaaaaaaaaaaaaaaaaaaaaaaaaaaaaaaaaaaaaaaaaaaaaaaagaauu

SEQ ID NO: 25210 - RNA, 1733 nt, Artificial Sequence
  mRNA product Design a-2 (hSL-A64-N5) comprising derived and/or modified sequence from LASV(Nig08-A19;Clade III)__ADU56618__GPCmut3 (opt1)
aggagaguccgcucagccagguugcagaagcggcuuagcguguguccuaaucuucucucugcguguagguaggccugugccgcaaacaagcuuaccaugggccagaucgugaccuucuuccaggaggucccccacgugaucgaggaggugaugaacaucguccugaucgcccucagcauccuggccauccugaaggggcucuacaacaucgcgaccugcggccugaucgggcuggugacguuccuccugcuguccggccgcagcugcuccaugaccuacaaggggguguacgagcuccagacccuggagcugaacaugaacacccucaacaugacgaugccgcugagcugcaccaagaacaacucccaccacuacaucauggucggcaacgagaccggccuggagcucacccugacgaacaccagccugcuccaccacaaguucugcaaccuguccgacgcccacaagaagaaccuguacgaccacacccucaugagcaucaucuccaccuuccaccugagcauccccaacuucaaccaguacgaggccauguccugcgacuucaacgggggcaagaucacggugcaguacaaccugagccacuccuacgccaucgacgccgcgaaccacugcgggaccguggccaacggcguccuccagaccuucaugcggauggccuggggcgggagcuacaucgcccuggacuccggccgcgggaagugggacugcaucaugaccagcuaccaguaccugaucauccagaacacgaccugggaggaccacugccaguucucccggcccagccccaucggcuaccucgggcugcugucccagcgcacccgggacaucuacaucagccgccggcgccggggcaccuucacguggacccugagcgacuccgagggcaacgagacccccgggggcuacugccucacccgcuggaugcugaucgaggcggagcugaagugcuucgggaacacggccguggccaagugcaacgagaagcacgacgaggaguucugcgacaugcuccggcuguucgacuucaacaagcaggccauccgccggcugaaggcccccgcgcagaugagcauccagcucaucaacaaggccgugaacgcccugaucaacgaccagcugaucaugaagaaccaccuccgcgacaucaugggcauccccuacugcaacuacuccaaguacugcuaccugaaccacaccagcaccgggcggaccucccugccccgcugcugccucgucagcaacggcuccuaccugaacgagacgcacuucagcgacgacaucgagcagcaggccgacaacaugaucaccgagaugcugcagaaggaguaccucgaccggcagggcaagaccccgcuggggcugguggaccuguucguguucuccaccagcuucuaccucaucuccaucuuccugcaccuggucaagaucccgacgcaccgccacaucgugggcaagcccugccccaagccccaccggcucaaccacauggggaucugcagcugcggccuguacaagcagccgggggugcccguccgcuggaagcggugaggacuagucccuguucccagagcccacuuuuuuuucuuuuuuugaaauaaaauagccugucuuucagaucucaaaggcucuuuucagagccaccaaaaaaaaaaaaaaaaaaaaaaaaaaaaaaaaaaaaaaaaaaaaaaaaaaaaaaaaaaaaaaaaagaauu

SEQ ID NO: 25211 - RNA, 1736 nt, Artificial Sequence
  mRNA product Design a-2 (hSL-A64-N5) comprising derived and/or modified sequence from LASV(G1180-SLE-2010;Clade IV)__AIT17168__GPCmut3 (opt1)
aggagaguccgcucagccagguugcagaagcggcuuagcguguguccuaaucuucucucugcguguagguaggccugugccgcaaacaagcuuaccaugggccagaucgugaccuucuuccaggaggucccccacgugaucgaggaggugaugaacaucguccugaucgcccucagcauccuggccgugcugaaggggcucuacaacuucgcgaccugcggccugguggggcugcucaccuuccugcugcucugcggccgcuccugcaccgccagccgguacaagggggucuacgagcugcagacccuggagcucaacauggagacccugaacaugacgaugccgcuguccugcaccaagaacaacagccaccacuacaucauggugggcaacgagaccggccucgagcugacccugacgaacaccuccaucaucaaccacaaguucugcaaccucagcgacgcccacaagaagaaccuguacgaccacgcccugauguccaucaucagcaccuuccaccucuccauccccaacuucaaccaguacgaggccaugagcugcgacuucaacgggggcaagaucuccgugcaguacaaccugagccacuccuacgcgggggacgccgccaaccacugcggcaccgucgccaacggggugcugcagacguucaugcgcauggcguggggcggcagcuacaucgcccucgacuccgggcacggcagcugggacugcaucaugaccuccuaccaguaccugaucauccagaacaccaccugggaggaccacugccaguucagccggcccucccccaucggguaccugggccuccugagccagcgcacgcgggacaucuacaucagccgccggcgccggggcaccuucaccuggacccuguccgacagcgaggggaaggacacgccgggcggguacugccugacccgcuggaugcucaucgaggccgagcugaagugcuucggcaacaccgccguggccaagugcaacgagaagcacgacgaggaguucugcgacaugcugcggcuguucgacuucaacaagcaggcgauccagcgccugaaggcccccgcccagauguccauccagcugaucaacaaggccgucaacgcccucaucaacgaccagcugaucaugaagaaccaccuccgggacaucauggggauccccuacugcaacuacagcaaguacugcuaccucaaccacaccacgaccggcaagaccucccugcccaagugcugccuggugagcaacggcuccuaccucaacgagacccacuucagcgacgacaucgagcagcaggcggacaacaugaucacggagaugcugcagaaggaguacauggagcgccaggggaagacgccccugggccucguggaccuguucgucuucuccaccagcuucuaccugaucuccaucuuccugcaccucgugaagaucccgacccaccggcacaucgugggcaagagcugccccaagccccaccgccugaaccacauggggaucugcuccugcgggcuguacaagcagcccggcgucccggugaaguggaagcggugaggacuagucccuguucccagagcccacuuuuuuuucuuuuuuugaaauaaaauagccugucuuucagaucucaaaggcucuuuucagagccaccaaaaaaaaaaaaaaaaaaaaaaaaaaaaaaaaaaaaaaaaaaaaaaaaaaaaaaaaaaaaaaaaagaauu

SEQ ID NO: 25212 - RNA, 1736 nt, Artificial Sequence
  mRNA product Design a-2 (hSL-A64-N5) comprising derived and/or modified sequence from LASV(G1442-SLE-2011;Clade IV)__AIT17180__GPCmut3 (opt1)
aggagaguccgcucagccagguugcagaagcggcuuagcguguguccuaaucuucucucugcguguagguaggccugugccgcaaacaagcuuaccaugggccagaucgugaccuucuuccaggaggucccccacgugaucgaggaggugaugaacaucguccugaucgcccucagcauccuggccgugcugaaggggcucuacaacguggcgaccugcggccugaucgggcuggucacguuccuccugcugugcggccgcuccugcaccaccacccucuacaaggggguguacgagcugcagacgcuggagcucaacauggagacccugaacaugaccaugccgcugagcugcaccaagaacaacucccaccacuacauccgggugggcaacgagacgggccucgagcugacccugaccaacaccagcaucaucaaccacaaguucugcaaccucuccgacgcccacaagaagaaccuguacgaccacgcccugaugagcaucaucuccacguuccaccucagcauccccaacuucaaccaguacgaggccauguccugcgacuucaacgggggcaagaucagcguccaguacaaccugucccacagcuacgccggggacgcggccaaccacugcggcaccguggccaacggggugcugcagaccuucaugcgcauggccuggggcggcuccuacaucgcgcucgacagcgggcggggcaacugggacugcaucaugaccuccuaccaguaccugaucauccagaacacgaccugggacgaccacugccaguucagccgccccucccccaucggguaccugggccuccugagccagcggacccgcgacgucuacaucucccggcgccgccggggcaccuucacguggacccugagcgacagcgaggggaaggacaccccgggcggguacugccugacccgguggaugcucaucgaggccgagcugaagugcuucggcaacacggccguggccaagugcaacgagaagcacgacgaggaguucugcgacaugcugcgccucuucgacuucaacaagcaggccauccagcggcugaaggcgcccgcccagauguccauccagcugaucaacaaggccgugaacgcccucaucaacgaccagcugaucaugaagaaccaccuccgcgacaucauggggauccccuacugcaacuacagcaaguacugcuaccugaacaacaccgccaccggcaagaccucccugcccaagugcugccugaucagcaacggcuccuaccucaacgagacgcacuucagcgacgacaucgagcaggaggcggacaacaugaucaccgagaugcugcagaaggaguacauggagcggcaggggaagacgccccugggccucgucgaccuguucguguucuccaccagcuucuaccugaucuccaucuuccugcaccucgugaagaucccgacccaccgccacaucgucggcaagagcugccccaagccccaccggcugaaccacauggggaucugcuccugcgggcuguacaagcagcccggcgugccggugcgcuggaagcggugaggacuagucccuguucccagagcccacuuuuuuuucuuuuuuugaaauaaaauagccugucuuucagaucucaaaggcucuuuucagagccaccaaaaaaaaaaaaaaaaaaaaaaaaaaaaaaaaaaaaaaaaaaaaaaaaaaaaaaaaaaaaaaaaagaauu

SEQ ID NO: 25213 - RNA, 1736 nt, Artificial Sequence
  mRNA product Design a-2 (hSL-A64-N5) comprising derived and/or modified sequence from LASV(G3010-SLE-2013;Clade IV)__AIT17344__GPCmut3 (opt1)
aggagaguccgcucagccagguugcagaagcggcuuagcguguguccuaaucuucucucugcguguagguaggccugugccgcaaacaagcuuaccaugggccagaucgugaccuucuuccaggaggucccccacgugaucgaggaggugaugaacaucguccugaucgcccucagcauccuggccgugcugaaggggcucuacaacuucgcgaccugcggccugguggggcuggucacguuccuccugcugugcggccgcuccugcaccaccagccucuacaaggggguguacgagcugcagacccuggagcucaacauggagacgcugaacaugaccaugccgcuguccugcaccaagaacaacagccaccacuacaucauggugggcaacgagaccggccucgagcugacgcugaccaacaccuccaucaucaaccacaaguucugcaaccucagcgacgcccacaagaagaaccuguacaaccacgcccugauguccaucaucagcaccuuccaccucuccauccccaacuucaaccaguacgaggccaugagcugcgacuucaacgggggcaagaucuccguccaguacaaccugagccacuccuacgccggggacgcggccagccacugcggcacgguggccaacggggugcugcagaccuucaugcggauggccuggggcggcuccuacaucgcgcucgacagcggguacggcaagugggacugcaucaugaccuccuaccaguaccugaucauccagaacaccacgugggaggaccacugccaguucagccgccccucccccaucggguaccugggccuccugagccagcggacccgcgacaucuacaucagccggcgccgccggggcaccuucaccuggacgcuguccgacagcgaggggaaggacaccccgggcggguacugccugacccgguggaugcucaucgaggccgagcugaagugcuucggcaacaccgccgucgccaagugcaacgagaagcacgacgaggaguucugcgacaugcugcgccucuucgacuucaacaagcaggccauccagcggcugaagacgcccgcgcagauguccauccagcugaucaacaaggccgugaacgcccucaucaacgaccagcugaucaugaagaaccaccuccgcgacaucauggggauccccuacugcaacuacagcaaguacugcuaccugaaccacaccaccaccggcaagacgucccugcccaagugcugccuggugagcaacggcuccuaccucaacgagacccacuucagcgacgacaucgagcagcaggccgacaacaugaucaccgagaugcugcagaaggaguacauggagcggcaggggaagacgccccugggccucgucgaccuguucguguucuccaccagcuucuaccugaucuccaucuuccugcaccucgugaagaucccgacccaccgccacaucgucggcaagagcugccccaagccccaccggcugaaccacauggggaucugcuccugcgggcuguacaagcagcccggcgugccggugcgcuggaagcggugaggacuagucccuguucccagagcccacuuuuuuuucuuuuuuugaaauaaaauagccugucuuucagaucucaaaggcucuuuucagagccaccaaaaaaaaaaaaaaaaaaaaaaaaaaaaaaaaaaaaaaaaaaaaaaaaaaaaaaaaaaaaaaaaagaauu

SEQ ID NO: 25214 - RNA, 1736 nt, Artificial Sequence
  mRNA product Design a-2 (hSL-A64-N5) comprising derived and/or modified sequence from LASV(G502-SLE-2009;Clade IV)__AIT17126__GPCmut3 (opt1)
aggagaguccgcucagccagguugcagaagcggcuuagcguguguccuaaucuucucucugcguguagguaggccugugccgcaaacaagcuuaccaugggccagaucgugaccuucuuccaggaggucccccacgugaucgaggaggugaugaacaucguccugaucgcccucagcauccuggccgugcugaaggggcucuacaacuucgcgaccugcggccugguggggcugcucacguuccugcugcucugcggccgcuccugcaccaccgggcuguacaagggcgucuacgagcugcagacccucgagcugaacauggagacgcugaacaugaccaugccgcucagcugcaccaagaacaacucccaccacuacaucauggugggcaacgagaccgggcuggagcugacgcucaccaacaccagcaucaucaaccacaaguucugcaaccuguccgacgcccacaagaagaaccuguacgaccacgcccucaugagcaucaucuccaccuuccaccugagcauccccaacuucaaccaguacgaggccauguccugcgacuucaacggcgggaagaucagcgugcaguacaaccugucccacagcuacgccggcgacgcggccgaccacugcgggacggucgccaacggcgugcuccagaccuucaugcggauggccuggggcggguccuacaucgcgcuggacagcggccgcgggcggugggacugcaucaugaccuccuaccaguaccugaucauccagaacaccacgugggaggaccacugccaguucagccgccccucccccaucggcuaccucggccugcugagccagcggacccgcgacaucuacaucucccggcgccgccgggggaccuucaccuggacgcugagcgacagcgagggcaaggacacccccgggggcuacugccucacccgguggaugcugaucgaggccgagcugaagugcuucgggaacaccgccguggccaagugcaacgagaagcacgacgaggaguucugcgacaugcuccgccuguucgacuucaacaagcaggccauccagcggcugaaggcgcccgcccagauguccauccagcucaucaacaaggccgucaacgcccugaucaacgaccagcuggugaugaagaaccaccuccgcgacaucaugggcauccccuacugcaacuacagccgguacugcuaccugaaccacacgaccaccggccgcaccucccugcccaagugcugccucgugagcaacggguccuaccugaacgagacgcacuucagcgacgacaucgagcagcaggccgacaacaugaucaccgagaugcugcagaaggaguacauggagcggcagggcaagaccccgcucgggcuggucgaccuguucguguucuccaccagcuucuaccugaucuccaucuuccuccaccuggugaagaucccgacgcaccgccacaucgucggcaagagcugccccaagccccaccggcugaaccacauggggaucugcuccugcggccucuacaagcagcccggcgugccggugaaguggaagcgcugaggacuagucccuguucccagagcccacuuuuuuuucuuuuuuugaaauaaaauagccugucuuucagaucucaaaggcucuuuucagagccaccaaaaaaaaaaaaaaaaaaaaaaaaaaaaaaaaaaaaaaaaaaaaaaaaaaaaaaaaaaaaaaaaagaauu

SEQ ID NO: 25215 - RNA, 1736 nt, Artificial Sequence
  mRNA product Design a-2 (hSL-A64-N5) comprising derived and/or modified sequence from LASV(G733-SLE-2010;Clade IV)__AIT17154__GPCmut3 (opt1)
aggagaguccgcucagccagguugcagaagcggcuuagcguguguccuaaucuucucucugcguguagguaggccugugccgcaaacaagcuuaccaugggccagaucgugaccuucuuccaggaggucccccacgugaucgaggaggugaugaacaucguccugaucgcccucagcauccuggccgugcugaaggggcucuacaacuucgcgaccugcggcaucguggggcuggucuccuuccugcuccugugcggccgcagcugcacgaccucccuguacaaggggguguacgagcuccagacccuggagcugaacauggagacccucaacaugacgaugccgcugagcugcaccaagaacaacucccaccacuacaucauggugggcaacgagaccggccuggagcucacccugacgaacaccagcaucaucaaccacaaguucugcaaccuguccgacgcccacaagaagaaccucuacgaccacgcccugaugagcaucaucuccaccuuccaccugagcauccccaacuucaaccaguacgaggccauguccugcgacuucaacgggggcaagaucagcguccaguacaaccucucccacagcuacgccggggacgcggccaaccacugcggcaccaucgccaacggggugcugcagacguucaugcggauggccuggggcggcuccuacaucgcgcuggacagcgggcgcgaccggugggacugcaucaugaccuccuaccaguaccucaucauccagaacaccaccugggaggaccacugccaguucagccgccccucccccaucggcuaccuggggcugcucagccagcggacgcgcgacaucuacaucagccggcgccgccggggcaccuucaccuggacccucuccgacagcgagggcaaggacacgcccgggggcuacugccugacccgguggaugcugaucgaggccgagcucaagugcuucgggaacaccgccguggccaagugcaacgagaagcacgacgaggaguucugcgacaugcugcgccuguucgacuucaacaagcaggccauccagcggcucaaggcgcccgcccagauguccauccagcugaucaacaaggccgucaacgcccugaucaacgaccagcucaucaugaagaaccaccuccgcgacaucaugggcauccccuacugcaacuacagcaaguacugcuaccugaaccacaccacgaccgggaagaccucccugcccaagugcugccuggugagcaacggcuccuaccugaacgagacccacuucagcgacgacaucgagcagcaggccgacaacaugaucacggagaugcuccagaaggaguacauggagcggcagggcaagaccccgcuggggcugguggaccucuucgucuucuccaccagcuucuaccugaucuccaucuuccugcaccuggugaagaucccgacccaccgccacguggucggcaagagcugccccaagccccaccggcucaaccacauggggaucugcuccugcggccuguacgggcagcccggcgugccggugaaguggaagcgcugaggacuagucccuguucccagagcccacuuuuuuuucuuuuuuugaaauaaaauagccugucuuucagaucucaaaggcucuuuucagagccaccaaaaaaaaaaaaaaaaaaaaaaaaaaaaaaaaaaaaaaaaaaaaaaaaaaaaaaaaaaaaaaaaagaauu

SEQ ID NO: 25216 - RNA, 1736 nt, Artificial Sequence
  mRNA product Design a-2 (hSL-A64-N5) comprising derived and/or modified sequence from MOPV/LASV reassortant(IGS-1;Clade IV)__AFY05576__GPCmut3 (opt1)
aggagaguccgcucagccagguugcagaagcggcuuagcguguguccuaaucuucucucugcguguagguaggccugugccgcaaacaagcuuaccaugggccagaucgugaccuucuuccaggaggucccccacgugaucgaggaggugaugaacaucguccugaucgcccucagcgugcuggccgugcugaaggggcucuacaacuucgcgaccugcggccuggucgggcuggugacguuccuccugcugugcggccgcuccugcaccaccagccucuacaaggggguguacgagcugcagacccuggagcucaacauggagacgcugaacaugaccaugccgcuguccugcaccaagaacaacagccaccacuacaucauggucggcaacgagaccggccucgagcugacgcugaccaacaccuccaucaucaaccacaaguucugcaaccucagcgacgcccacaagaagaaccuguacgaccacgcccugauguccaucaucagcaccuuccaccucuccauccccaacuucaaccaguacgaggccaugagcugcgacuucaacgggggcaagaucuccgugcaguacaaccugagccacuccuacgccggggacgcggccaaccacugcggcacgguggccaacgggguccugcagaccuucaugcggauggccuggggcggcagcuacaucgcgcucgacuccgggcgcggcaacugggacugcaucaugaccagcuaccaguaccugaucauccagaacaccacgugggaggaccacugccaguucucccggcccagccccaucggguaccugggccuccugucccagcgcacccgggacaucuacaucagccgccggcgccggggcaccuucaccuggacgcugagcgacuccgagggggaggacaccccgggcggguacugccugacccgcuggaugcucaucgaggccgagcugaagugcuucggcaacaccgccguggccaagugcaacgagaagcacgacgaggaguucugcgacaugcugcggcuguucgacuucaacaagcaggccauccagcgccugaaggcgcccgcccagaugagcauccagcugaucaacaaggccgugaacgcccucaucaacgaccagcugaucaugaagaaccaccuccgggacaucauggggauccccuacugcaacuacuccaaguacugcuaccucaaccacacgaccaccggccgcaccagccugcccaagugcugccuggucuccaacggcagcuaccucaacgagacgcacuucuccgacgacaucgagcagcaggccgacaacaugaucaccgagaugcugcagaaggaguacauggagcggcaggggaagacgccccugggccucguggaccuguucguguucagcaccuccuucuaccugaucagcaucuuccugcaccucgucaagaucccgacccaccgccacaucguggggaaguccugccccaagccccaccggcugaaccacaugggcaucugcagcugcgggcuguacaagcagcccggcgugccggucaaguggaagcgcugaggacuagucccuguucccagagcccacuuuuuuuucuuuuuuugaaauaaaauagccugucuuucagaucucaaaggcucuuuucagagccaccaaaaaaaaaaaaaaaaaaaaaaaaaaaaaaaaaaaaaaaaaaaaaaaaaaaaaaaaaaaaaaaaagaauu

SEQ ID NO: 25217 - RNA, 1736 nt, Artificial Sequence
  mRNA product Design a-2 (hSL-A64-N5) comprising derived and/or modified sequence from LASV(LM765-SLE-2012;Clade IV)__AIT17814__GPCmut3 (opt1)
aggagaguccgcucagccagguugcagaagcggcuuagcguguguccuaaucuucucucugcguguagguaggccugugccgcaaacaagcuuaccaugggccagaucgugaccuucuuccaggaggucccccacgugaucgaggaggugaugaacaucguccugaucgcccucagcauccuggccgugcugaaggggcucuacaacuucgcgaccugcggccugguggggcuggucacguuccuccugcugugcggccgcuccugcaccaccagccucuacaaggggguguacgagcugcagacccuggagcucaacauggagacgcugaacaugaccaugccgcuguccugcaccaagaacaacagccaccacuacaucauggugggcaacgagaccggccucgagcugacgcugaccaacaccuccaucaucgaccacaaguucugcaaccucagcgacgcccaccggaagaaccuguacgaccacgcccugauguccaucaucagcaccuuccaccucuccauccccaacuucaaccaguacgaggccaugagcugcgacuucaacgggggcaagaucuccguccaguacaaccugagccacuccuacgccaaggacgcggccgaccacugcgggacgguggccaacggcgugcugcagaccuucaugcgcauggccuggggcgggagcuacaucgcgcucgacuccggccgggggcgcugggacugcaucaugaccagcuaccaguaccugaucauccagaacaccacgugggaggaccacugccaguucucccggcccagccccaucggcuaccuggggcuccugucccagcgcacccgggacaucuacaucagccgccggcgccggggcaccuucaccuggacgcugagcgacuccgagggcaaggacacccccgggggcuacugccugacccgcuggaugcucaucgaggccgagcugaagugcuucgggaacaccgccgucgccaagugcaacgagaagcacgacgaggaguucugcgacaugcugcggcuguucgacuucaacaagcaggccauccagcgccugaaggcgcccgcccagaugagcauccagcugaucaacaaggccgugaacgcccucaucaacgaccagcugaucaugaagaaccaccuccgggacaucaugggcauccccuacugcaacuacuccaaguacugcuaccucaaccacacgaccaccgggaagaccagccugcccaagugcugccugguguccaacggcagcuaccucaacgagacgcacuucuccgacgacaucgagcagcaggccgacaacaugaucaccgagaugcugcagaaggaguacauggagcgccagggcaagaccccgcuggggcucgucgaccuguucguguucagcaccuccuucuaccugaucagcaucuuccugcaccucgugaagaucccgacgcaccggcacaucgucggcaagcccugccccaagccccaccgccugaaccacauggggaucugcuccugcggccuguacaagcagccgggggugcccgugaaguggaagcggugaggacuagucccuguucccagagcccacuuuuuuuucuuuuuuugaaauaaaauagccugucuuucagaucucaaaggcucuuuucagagccaccaaaaaaaaaaaaaaaaaaaaaaaaaaaaaaaaaaaaaaaaaaaaaaaaaaaaaaaaaaaaaaaaagaauu

SEQ ID NO: 25218 - RNA, 1736 nt, Artificial Sequence
  mRNA product Design a-2 (hSL-A64-N5) comprising derived and/or modified sequence from LASV(LM776-SLE-2012;Clade IV)__AIT17824__GPCmut3 (opt1)
aggagaguccgcucagccagguugcagaagcggcuuagcguguguccuaaucuucucucugcguguagguaggccugugccgcaaacaagcuuaccaugggccagaucgugaccuucuuccaggaggucccccacgugaucgaggaggugaugaacaucguccugaucgcccucagcauccuggccgugcugaaggggcucuacaacuucgcgaccugcggccugguggggcuggucacguuccuccugcugugcggccgcuccugcaccaccagcguguacaaggggguguacgagcuccagacccuggagcugaacauggagacgcucaacaugaccaugccgcuguccugcaccaagaacaacagccaccacuacaucauggucggcaacgagaccggccuggagcucacgcugaccaacaccuccaucaucaaccacaaguucugcaaccugagcgacgcccacaagaagaaccucuacgaccacgcccugauguccaucaucagcaccuuccaccuguccauccccaacuucaaccaguacgaggccaugagcugcgacuucaacgggggcaagaucuccgugcaguacaaccucagccacuccuacgccggggacgcggccaaccacugcggcacgguggccaacgggguccugcagaccuucaugcggauggccuggggcggcagcuacaucgcgcuggacuccgggcacggcaagugggacugcaucaugaccagcuaccaguaccucaucauccagaacaccacgugggaggaccacugccaguucucccgccccagccccaucggguaccugggccugcucucccagcggacccgcgacaucuacaucagccggcgccgccggggcaccuucaccuggacgcucagcgacuccgaggggaaggacaccccgggcggguacugccugacccgguggaugcugaucgaggccgagcucaagugcuucggcaacaccgccguggccaagugcaacgagaagcacgacgaggaguucugcgacaugcugcgccuguucgacuucaacaagcaggccauccagcggcucaaggcgcccgcccagaugagcauccagcugaucaacaaggccgugaacgcccugaucaacgaccagcucaucaugaagaaccaccuccgcgacaucauggggauccccuacugcaacuacuccaaguacugcuaccugaaccacacgaccaccggcaagaccagccugcccaagugcugccuggucuccaacggcagcuaccugaacgagacgcacuucuccgacgacaucgagcagcaggccgacaacaugaucaccgagaugcuccagaaggaguacauggagcggcaggggaagacgccccugggccugguggaccucuucguguucagcaccuccuucuaccugaucagcaucuuccugcaccuggucaagaucccgacccaccgccacaucguggggaaguccugccccaagccccaccggcucaaccacaugggcaucugcagcugcgggcuguacaagcagcccggcgugccgguccgcuggaagcggugaggacuagucccuguucccagagcccacuuuuuuuucuuuuuuugaaauaaaauagccugucuuucagaucucaaaggcucuuuucagagccaccaaaaaaaaaaaaaaaaaaaaaaaaaaaaaaaaaaaaaaaaaaaaaaaaaaaaaaaaaaaaaaaaagaauu

SEQ ID NO: 25219 - RNA, 1736 nt, Artificial Sequence
  mRNA product Design a-2 (hSL-A64-N5) comprising derived and/or modified sequence from LASV(Mad39;Clade IV)__ANH09722__GPCmut3 (opt1)
aggagaguccgcucagccagguugcagaagcggcuuagcguguguccuaaucuucucucugcguguagguaggccugugccgcaaacaagcuuaccaugggccagaucgugaccuucuuccaggaggucccccacgugaucgaggaggugaugaacaucguccugaucgcccucagcauccuggccgugcugaaggggcucuacaacguggcgaccugcggccugaucgggcuggucacguuccuccugcugugcggccgcuccugcaccaccacccucuacaaggggguguacgagcugcaggcccuggagcucaacauggagacgcugaacaugaccaugccgcugagcugcaccaagaacaacucccaccacuacauccgggugggcaacgagaccggccucgagcugacgcugaccaacaccagccucaucaaccacaaguucugcaaccuguccgacgcccacaagaagaaccuguacgaccacgcccucaugagcaucaucuccaccuuccaccugagcauccccaacuucaaccaguacgaggccauguccugcgacuucaacgacgggaagaucagcguccaguacaaccugucccacacguacgcgggcgacaccgccaaccacugcgggaccguggccaacggcgugcuccagaccuucaugcgcauggccuggggcgggagcuacaucgcgcuggacuccggccgcgggggcugggacugcaucaugacgagcuaccaguaccugaucauccagaacaccaccugggaggaccacugccaguucucccggcccagccccaucggguaccucggccugcugucccagcggacccgcgacaucuacaucagccggcgccgccggggcacguucaccuggacccuguccgacagcgaggggaaggacaccccgggcggguacugccucacgcgguggaugcugaucgaggccgagcugaagugcuucggcaacaccgccgucgccaagugcaacgagaagcacgacgaggaguucugcgacaugcuccgccuguucgacuucaacaagcaggccauccagcggcugaaggcgcccgcccagaugagcauccagcucaucaacaaggccgugaacgcccugaucaacgaccagcugaucaugaagaaccaccuccgcgacaucauggggauccccuacugcaacuacuccaaguacugcuaccugaaccacaccgugaccggcaagacgagccugcccaagugcugccucgucuccaacggcagcuaccugaacgagacccacuucuccgacgacaucgagcagcaggccgacaacaugaucaccgagaugcugcagaaggaguacauggagcggcaggggaagacgccccucggccugguggaccuguucguguucagcaccuccuucuaccugaucagcaucuuccuccaccuggucaagaucccgacccaccgccacgugguggggaagcccugccccaagccccaccggcugaaccacaugggcaucugcuccugcggguucuacaagcagccgggcguccccgugcgcuggaagcggugaggacuagucccuguucccagagcccacuuuuuuuucuuuuuuugaaauaaaauagccugucuuucagaucucaaaggcucuuuucagagccaccaaaaaaaaaaaaaaaaaaaaaaaaaaaaaaaaaaaaaaaaaaaaaaaaaaaaaaaaaaaaaaaaagaauu

SEQ ID NO: 25220 - RNA, 1736 nt, Artificial Sequence
  mRNA product Design a-2 (hSL-A64-N5) comprising derived and/or modified sequence from LASV(Z0947-SLE-2011;Clade IV)__AIT17840__GPCmut3 (opt1)
aggagaguccgcucagccagguugcagaagcggcuuagcguguguccuaaucuucucucugcguguagguaggccugugccgcaaacaagcuuaccaugggccagaucgugaccuucuuccaggaggucccccacgugaucgaggaggugaugaacaucguccugaucgcccucagcauccuggccgugcugaaggggcucuacaacuucgcgaccugcggccugguggggcuggucacguuccuccugcugugcggccgcuccugcaccaucagccucuacaaggggguguacgagcugcagacccuggagcucaacauggagacccugaacaugacgaugccgcuguccugcaccaagaacaacagccaccacuacaucauggugggcaacgagaccggccucgagcugacccugacgaacaccuccaucaucaaccacaaguucugcaaccucagcgacgcccacaagaagaaccuguacgaccacgcccugauguccaucaucagcaccuuccaccucuccauccccaacuucaaccaguacgaggccaugagcugcgacuucaacgggggcaagaucuccguccaguacaaccugagccacuccuacgccggggacgcggccaaccacugcggcaccguggccaacggggugcugcagacguucaugcggauggccuggggcggcagcuacaucgcgcucgacuccgggcgcgaccggugggacugcaucaugaccagcuaccaguaccugaucauccagaacaccaccugggaggaccacugccaguucucccgccccagccccaucggcuaccuggggcuccugucccagcggacgcgcgacaucuacaucagccggcgccgccggggcaccuucaccuggacccugagcgacuccgagggcaaggacacgcccgggggcuacugccugacccgguggaugcucaucgaggccgagcugaagugcuucgggaacaccgccgucgccaagugcaacgagaagcacgacgaggaguucugcgacaugcugcgccucuucgacuucaacaagcaggccauccagcggcugaaggcgcccgcccagaugagcauccagcugaucaacaaggccgugaacgcccucaucaacgaccagcugaucaugaagaaccaccuccgcgacaucaugggcauccccuacugcaacuacuccaaguacugcuaccugaaccacaccacgaccgggaagaccagccugcccaagugcugccugguguccaacggcagcuaccucaacgagacccacuucuccgacgacaucgagcagcaggccgacaacaugaucacggagaugcugcagaaggaguacauggagcggcagggcaagaccccgcuggggcucgucgaccuguucguguucagcaccuccuucuaccugaucagcaucuuccugcaccucgugaagaucccgacccaccgccacaucgucggcaagcccugccccaagccccaccggcugaaccacauggggaucugcuccugcggccuguacaagcagccgggggugcccgugaaguggaagcgcugaggacuagucccuguucccagagcccacuuuuuuuucuuuuuuugaaauaaaauagccugucuuucagaucucaaaggcucuuuucagagccaccaaaaaaaaaaaaaaaaaaaaaaaaaaaaaaaaaaaaaaaaaaaaaaaaaaaaaaaaaaaaaaaaagaauu

SEQ ID NO: 25221 - RNA, 1736 nt, Artificial Sequence
  mRNA product Design a-2 (hSL-A64-N5) comprising derived and/or modified sequence from LASV(Josiah;Clade IV)__NP_694870__GPCmut3 (opt1)
aggagaguccgcucagccagguugcagaagcggcuuagcguguguccuaaucuucucucugcguguagguaggccugugccgcaaacaagcuuaccaugggccagaucgugaccuucuuccaggaggucccccacgugaucgaggaggugaugaacaucguccugaucgcccucagcgugcuggccgugcugaaggggcucuacaacuucgcgaccugcggccuggucgggcuggugacguuccuccugcugugcggccgcuccugcaccaccagccucuacaaggggguguacgagcugcagacccuggagcucaacauggagacgcugaacaugaccaugccgcuguccugcaccaagaacaacagccaccacuacaucauggucggcaacgagaccggccucgagcugacgcugaccaacaccuccaucaucaaccacaaguucugcaaccucagcgacgcccacaagaagaaccuguacgaccacgcccugauguccaucaucagcaccuuccaccucuccauccccaacuucaaccaguacgaggccaugagcugcgacuucaacgggggcaagaucuccgugcaguacaaccugagccacuccuacgccggggacgcggccaaccacugcggcacgguggccaacgggguccugcagaccuucaugcggauggccuggggcggcagcuacaucgcgcucgacuccgggcgcggcaacugggacugcaucaugaccagcuaccaguaccugaucauccagaacaccacgugggaggaccacugccaguucucccggcccagccccaucggguaccugggccuccugucccagcgcacccgggacaucuacaucagccgccggcgccggggcaccuucaccuggacgcugagcgacuccgaggggaaggacaccccgggcggguacugccucacccgcuggaugcugaucgaggccgagcugaagugcuucggcaacaccgccguggccaagugcaacgagaagcacgacgaggaguucugcgacaugcuccggcuguucgacuucaacaagcaggccauccagcgccugaaggcgcccgcccagaugagcauccagcucaucaacaaggccgugaacgcccugaucaacgaccagcugaucaugaagaaccaccuccgggacaucauggggauccccuacugcaacuacuccaaguacugcuaccugaaccacacgaccaccggccgcaccagccugcccaagugcugccucgucuccaacggcagcuaccugaacgagacgcacuucuccgacgacaucgagcagcaggccgacaacaugaucaccgagaugcugcagaaggaguacauggagcggcaggggaagaccccgcucggccugguggaccuguucguguucagcaccuccuucuaccugaucagcaucuuccuccaccuggucaagauccccacgcaccgccacaucguggggaaguccugccccaagccccaccggcugaaccacaugggcaucugcagcugcgggcucuacaagcagccgggcgugcccgucaaguggaagcgcugaggacuagucccuguucccagagcccacuuuuuuuucuuuuuuugaaauaaaauagccugucuuucagaucucaaaggcucuuuucagagccaccaaaaaaaaaaaaaaaaaaaaaaaaaaaaaaaaaaaaaaaaaaaaaaaaaaaaaaaaaaaaaaaaagaauu

SEQ ID NO: 25222 - RNA, 1733 nt, Artificial Sequence
  mRNA product Design a-2 (hSL-A64-N5) comprising derived and/or modified sequence from LASV(LP;Clade I)__AAF86701__GPCmut3 (opt1)
aggagaguccgcucagccagguugcagaagcggcuuagcguguguccuaaucuucucucugcguguagguaggccugugccgcaaacaagcuuaccaugggccagaucaucaccuucuuccaggaggugccccacgucaucgaggaggugaugaacaucgugcugaucgcccucagccugcuggccauccucaaggggcuguacaacaucgcgaccugcggcaucaucgggcuggucgccuuccucuuccugugcggcaaguccugcagccugacgcucaagggcggguacgagcugcagacccuggagcucaacauggagacccugaacaugaccaugccgcuguccugcacgaagaacagcucccaccacuacauccgcgugggcaacgagaccgggcucgagcugacccugaccaacacgagcaucaucaaccacaaguucugcaaccucuccgacgcccacaagaagaaccuguacgaccacgcccugaugagcaucaucuccaccuuccaccucagcauccccaacuucaaccaguacgaggccauguccugcgacuucaacggcgggaagaucagcgugcaguacaaccugucccacagcuacgcgggcgacgccgccgagcacugcgggaccgucgccaacggcgugcugcagaccuucaugcggauggcguggggcgggcgcuacaucgcccucgacuccggcaaggggaacugggacugcaucaugacgagcuaccaguaccugaucauccagaacaccaccugggaggaccacugccaguucucccggcccagccccaucggcuaccugggccuccugucccagcgcacccgggacaucuacaucagccgccggcgccgggggacguucaccuggacccugagcgacuccgagggcaacgagacccccgggggcuacugccucacgcgcuggaugcugaucgaggccgagcugaagugcuucgggaacaccgccguggccaagugcaacgagaagcacgacgaggaguucugcgacaugcuccggcuguucgacuucaacaagcaggcgauccgccggcugaaggccccggcccagaugagcauccagcucaucaacaaggccgucaacgcccugaucaacgaccagcugaucaugaagaaccaccuccgcgacaucaugggcauccccuacugcaacuacuccaaguacugcuaccugaaccacaccagcuccggccggaccagccugcccaagugcugccucaucuccaacgggagcuaccugaacgagacgcaguucuccgacgacaucgagcagcaggcggacaacaugaucaccgagaugcugcagaaggaguacaucgagcgccagggcaagaccccgcucgggcugguggacaucuucaucuucagcaccuccuucuaccugaucagcaucuuccugcaccucaucaagauccccacgcaccggcacaucgugggcaagcccugccccaagccgcaccgccugaaccacaugggggucugcuccugcggccuguacaagcaccccggcgugcccaccaaguggaagcggugaggacuagucccuguucccagagcccacuuuuuuuucuuuuuuugaaauaaaauagccugucuuucagaucucaaaggcucuuuucagagccaccaaaaaaaaaaaaaaaaaaaaaaaaaaaaaaaaaaaaaaaaaaaaaaaaaaaaaaaaaaaaaaaaagaauu

SEQ ID NO: 25223 - RNA, 1733 nt, Artificial Sequence
  mRNA product Design a-2 (hSL-A64-N5) comprising derived and/or modified sequence from LASV(803213;Clade II)__AAF86703__GPCmut3 (opt1)
aggagaguccgcucagccagguugcagaagcggcuuagcguguguccuaaucuucucucugcguguagguaggccugugccgcaaacaagcuuaccaugggccagaucaucaccuucuuccaggaggugccccacgucaucgaggaggugaugaacaucgugcugaucgcccucagccugcuggccauccucaaggggaucuacaacgucgcgaccugcggccuguucgggcugaucuccuuccuccugcugugcggccgcagcugcuccgugacguacaaggggguguacgagcuccagacccuggagcugaacauggccaaccucaacaugaccaugccgcugagcugcaccaagaacaacucccaccacuacaucauggucggcaacgagacgggccuggagcucacccugaccaacaccagcaucaucaaccacaaguucugcaaccuguccgacgcccacaagaagaaccucuacgaccacgcccugaugagcaucaucuccacguuccaccugagcauccccaacuucaaccaguacgaggccauguccugcgacuucaacgggggcaagaucagcgugcaguacaaccucucccacagcuucgcgguggacgccgccaaccacugcgggaccaucgccaacggcguccugcagaccuucaugcggauggcguggggcggguccuacaucgcccuggacagcggcaaggggaacugggacugcaucaugaccuccuaccaguaccucaucauccagaacacgaccugggaggaccacugccaguucagccgccccucccccaucggcuaccuggggcugcucagccagcggacccgcgacaucuacaucagccggcgccggcgcggcaccuucacguggacccuguccgacagcgagggcaacgaggcccccgggggcuacugccugacccgguggaugcucaucgaggccgagcugaagugcuucgggaacaccgccguggcgaagugcaacgagaagcacgacgaggaguucugcgacaugcugcgccucuucgacuucaacaagcaggccaucaagcggcugaagacgccggcccagauguccauccagcugaucaacaaggccgugaacgcccucaucaacgaccagcugaucaugaagaaccaccuccgcgacaucaugggcauccccuacugcaacuacagccgguacugcuaccugaaccacaccgucaccgggaagaccucccugccccgcugcugccuggugagcaacggcuccuaccucaacgagacgcacuucagcgacgacaucgagcagcaggcggacaacaugaucaccgagaugcugcagaaggaguacauggaccggcagggcaagaccccgcuggggcucguggaccuguucgucuucuccaccagcuucuaccugaucuccaucuuccugcaccucgugaagauccccacgcaccgccacaucgugggcaagcccugccccaagccgcaccggcugaaccacauggggaucugcagcugcggccuguacaagcaccccgggguccccgugaaguggaagcgcugaggacuagucccuguucccagagcccacuuuuuuuucuuuuuuugaaauaaaauagccugucuuucagaucucaaaggcucuuuucagagccaccaaaaaaaaaaaaaaaaaaaaaaaaaaaaaaaaaaaaaaaaaaaaaaaaaaaaaaaaaaaaaaaaagaauu

SEQ ID NO: 25224 - RNA, 1733 nt, Artificial Sequence
  mRNA product Design a-2 (hSL-A64-N5) comprising derived and/or modified sequence from LASV(GA391;Clade III)__CAA36645__GPCmut3 (opt1)
aggagaguccgcucagccagguugcagaagcggcuuagcguguguccuaaucuucucucugcguguagguaggccugugccgcaaacaagcuuaccaugggccagaucgugaccuucuuccaggaggucccccacgugaucgaggaggugaugaacaucguccugaucgcccucagcauccuggccauccugaaggggcucuacaacguggcgaccugcggccugaucgggcuggugacguuccuccugcuguccggccgcagcugcucccucaucuacaaggggaccuacgagcugcagacccuggagcucaacauggagacccugaacaugacgaugccgcugagcugcaccaagaacaacucccaccacuacauccgggucggcaacgagaccggccucgagcugacccugacgaacaccagcauccucaaccacaaguucugcaaccuguccgacgcccacaagcgcaaccuguacgaccacagccucauguccaucaucagcaccuuccaccuguccauccccaacuucaaccaguacgaggccaugagcugcgacuucaacgggggcaagaucaccgugcaguacaaccugucccacagcuucgccguggacgccgcggggcacugcggcacgcucgccaacgggguccugcagaccuucaugcggauggccuggggcggcuccuacaucgcccuggacagcgggcgcggcaacugggacugcaucaugaccuccuaccaguaccucaucauccagaacaccacgugggacgaccacugccaguucagccggcccucccccaucggguaccugggccugcucagccagcgcacccgggacaucuacaucagccgccggcgccggggcaccuucaccuggacgcuguccgacagcgaggggaacgagaccccgggcggguacugccugacccgcuggaugcucaucgaggcggagcugaagugcuucggcaacaccgccguggccaagugcaacgagaagcacgacgaggaguucugcgacaugcugcggcuguucgacuucaacaagcaggccauccgccggcugaagacgcccgcccagauguccauccagcugaucaacaaggcggugaacgcccucaucaacgaccagcugaucaugaagaaccaccuccgcgacaucauggggauccccuacugcaacuacagccgguacugcuaccucaaccacaccuccaccggcaagaccagccugccccgcugcugccugaucuccaacggcagcuaccucaacgagacgaaguucuccgacgacaucgagcagcaggccgacaacaugaucaccgagaugcugcagaaggaguacaucgaccggcaggggaagaccccgcugggccuggucgaccucuucguguucagcaccuccuucuaccugaucagcaucuuccugcaccucgugaagauccccacgcaccgccacaucgucgggaagcccugccccaagccgcaccggcugaaccacaugggcaucugcuccugcgggcuguacaagcagcccggcgugcccgugcgcuggaagcgcugaggacuagucccuguucccagagcccacuuuuuuuucuuuuuuugaaauaaaauagccugucuuucagaucucaaaggcucuuuucagagccaccaaaaaaaaaaaaaaaaaaaaaaaaaaaaaaaaaaaaaaaaaaaaaaaaaaaaaaaaaaaaaaaaagaauu

SEQ ID NO: 25225 - RNA, 1736 nt, Artificial Sequence
  mRNA product Design a-2 (hSL-A64-N5) comprising derived and/or modified sequence from LASV(AV;Clade V)__CCA30314__GPCmut3 (opt1)
aggagaguccgcucagccagguugcagaagcggcuuagcguguguccuaaucuucucucugcguguagguaggccugugccgcaaacaagcuuaccaugggccagaucgugaccuucuuccaggaggucccccacgugaucgaggaggugaugaacaucguccugaucgcccucagcauccuggccgugcugaaggggcucuacaacaucgcgaccugcggccugaucgggcugaucacguuccuccugcugugcggccgcuccugcagcuccaaccucuacaaggggguguacgagcugcagagccuggaccucaacauggagacccugaacaugaccaugccgcuguccugcaccaagaacaacagccaccacuacauccgggucggcaacgacacgggccucgagcugacccugaccaacaccuccauccucaaccacaaguucugcaaccugagcgacgcccacaagaaggaccuguacgaccacgcccucauguccaucaucagcacguuccaccuguccauccccaacuucaaccaguacgaggccaugagcugcgacuucaacgggggcaagaucuccgugcaguacaaccugagccacuccuacgccaucgacgcggccaaccacugcgggaccguggccaacggcauccuccagaccuucaugcgcauggccuggggcgggagcuacaucgcgcuggacuccggccgggggaacugggacugcaucaugaccagcuaccaguaccugaucauccagaacacgaccugggagaaccacugccaguucucccgccccagccccaucggcuaccucgggcugcugagccagcggacccgcgacaucuacaucucccggcgccggcgcggcaccuucacguggacccucagcgacuccgagggcaacgccacccccgggggcuacugccugacccgguggaugcugaucgaggccgagcucaagugcuucgggaacacggccgucgccaagugcaacgagaagcacgacgaggaguucugcgacaugcugcgccuguucgacuucaacaagcaggcgaucagccggcucaaguccccggcccagaugagcauccagcugaucaacaaggccgugaacgcccugaucaacgaccagcucaucaugaagaaccaccuccgcgacaucaugggcauccccuacugcaacuacuccaaguacugcuaccugaaccacaccaucaccgggaagaccagccugcccaagugcugccugguguccaacggcagcuaccugaacgagacgcacuucuccgacgacaucgagcagcaggccgacaacaugaucaccgagaugcuccagaaggaguacauggagcggcagggcaagaccccgcuggggcuggucgaccuguucguguucagcaccuccuucuaccucaucagcaucuuccugcgccuggugaagauccccacgcaccggcacaucgucggcaagcccugccccaagccgcaccgccucaaccacauggggaucugcuccugcggccuguacaagcagcccggggugcccgugcgguggaagcgcugaggacuagucccuguucccagagcccacuuuuuuuucuuuuuuugaaauaaaauagccugucuuucagaucucaaaggcucuuuucagagccaccaaaaaaaaaaaaaaaaaaaaaaaaaaaaaaaaaaaaaaaaaaaaaaaaaaaaaaaaaaaaaaaaagaauu

SEQ ID NO: 25226 - RNA, 1733 nt, Artificial Sequence
  mRNA product Design a-2 (hSL-A64-N5) comprising derived and/or modified sequence from LASV(Togo/2016/7082;Clade VI)__AMR44577__GPCmut3 (opt1)
aggagaguccgcucagccagguugcagaagcggcuuagcguguguccuaaucuucucucugcguguagguaggccugugccgcaaacaagcuuaccaugggccagaucaucaccuucuuccaggaggugccccacgucaucgaggaggugaugaacaucgugcugaucgcccucagccugcuggccauccucaagggggucuacaacguggcgaccugcggcaucaucgggcuggugacguuccuguuccucugcggccgcuccugcagccugaucuacaagggguccuacgagcugcagacccucgagcugaacauggagacccugaacaugaccaugccgcucagcugcacgaagaacuccagccaccacuacauccgggucggcaacgagaccggccuggagcugacccucaccaacacguccaucaucaaccacaaguucugcaaccugagcgacgcccacaagcgcaaccuguacgaccacgcccucauguccauccugagcaccuuccaccuguccauccccaacuucaaccaguacgaggccaugagcugcgacuucaacgggggcaagaucuccgugcaguacaaccucagccacgccuacgcgguggacgccgccgagcacugcgggaccgucgccaacggcgugcugcagaccuucaugcggauggcguggggcggguccuacaucgcccuggacagcggccgcgggaacugggacugcaucaugacguccuaccaguaccucaucauccagaacaccaccugggaggaccacugccaguucagccggcccucccccaucggcuaccuggggcugcucagccagcgcacccgggacaucuacaucagccgccggcgccggggcacguucaccuggacccuguccgacagcgagggcaacgagacccccgggggcuacugccugacgcgcuggaugcucaucgaggccgagcugaagugcuucgggaacaccgccguggccaagugcaacgagaagcacgacgaggaguucugcgacaugcugcggcuguucgacuucaacaagcaggcgauccagcgccugaaguccccggcccagaugagcauccagcugaucaacaaggccgucaacgcccucaucaacgaccagcugaucaugaagaaccaccuccgggacaugaugggcauccccuacugcaacuacuccaaguacugcuaccucaaccacaccagcuccgggcgcaccagccugcccaagugcugccugguguccaacggcagcuaccucaacgagacgcacuucuccgacgacaucgagcagcaggccgacaacaugaucaccgagaugcugcagaaggaguacaucgaccggcagggcaagaccccgcuggggcucguggaccuguucgucuucagcaccuccuucuaccugaucagcaucuuccugcaccucaucaagauccccacgcaccgccacaucgugggcaagcccugccccaagccgcaccggcugaaccacauggggaucugcuccugcggccuguacaagcagcccggggugcccacccgcuggaagcggugaggacuagucccuguucccagagcccacuuuuuuuucuuuuuuugaaauaaaauagccugucuuucagaucucaaaggcucuuuucagagccaccaaaaaaaaaaaaaaaaaaaaaaaaaaaaaaaaaaaaaaaaaaaaaaaaaaaaaaaaaaaaaaaaagaauu

SEQ ID NO: 25227 - RNA, 1733 nt, Artificial Sequence
  mRNA product Design a-2 (hSL-A64-N5) comprising derived and/or modified sequence from LASV(KAK-428;Clade n.d. (VII))__ANH09740__GPCmut3 (opt1)
aggagaguccgcucagccagguugcagaagcggcuuagcguguguccuaaucuucucucugcguguagguaggccugugccgcaaacaagcuuaccaugggccagaucgugaccuucuuccaggaggucccccacgugaucgaggaggugaugaacaucguccugaucgcccucagccugcuggccauccucaaggggcuguacaacuucgcgaccugcggcgugaucgggcugaucacguuccuccugcugugcggccgcuccugcagcgccaccuacaaggggcaguacgagcuccagacccuggagcugaacauggagucccucaacaugaccaugccgcugagcugcacgaagaacaacucccaccacuacauccgggccggcaacaacaccggccuggagcucacccugaccaacacgagcaucaucucccacaaguucugcaaccugagcgacgcccacaagaagaaccucuacgaccacacccugauguccaucaucaccaccuuccaccugagcauccccaacuucaaccaguacgaggccauguccugcgacuucaacgggggcaagaucagcauccaguacaaccucucccacagcuacgcgggggacgccgcccagcacugcggcacgguggccaacgggguccugcagaccuucaugcgcauggcguggggcggcuccuaccuggcccucgacagcgggcggcgcggcugggacugcaucaucuccagcuaccaguaccugaucauccagaacaccaccugggacgaccacugccaguucucccggcccagccccaucggguaccugggcuucgugagccagaagacgcgcgacaucuacaucucccggcgccggcgcggcaccuucaccuggacccucagcgacuccgaggggcacgacaugccgggcggguacugccugacgcgguggaugcugaucgaggccgaccucaagugcuucggcaacaccgccguggccaagugcaacgagaagcacgacgaggaguucugcgacauguggcgccuguucgacuucaacaagcaggcgauccagcggcugaaggcccccgcccagaugaacauccagcucaucaacaaggccgucaacgcccugaucaacgaccagcugaugaugaagaaccaccuccgcgacaucauggggauccccuacugcaacuacagcaaguucugcuaccugaacaacaccaccacgggccggaccucccugccccgcugcugccucaucagcaacggcuccuaccugaacgagacccacuucagcgacgacaucgagcagcaggcggacaacaugaucaccgagaugcugcagaaggaguacauggaccggcaggggaagacgccgcucggccugguggaccuguucguguucuccaccagcuucuaccucaucaccaucuuccugcaccuggucaagauccccacccaccgccacaucguggggaagcccugccccaagccgcaccggcugaaccacaugggcaucugcuccugcgggcucuacaagcagcccggcgugcccguccgcuggaagcggugaggacuagucccuguucccagagcccacuuuuuuuucuuuuuuugaaauaaaauagccugucuuucagaucucaaaggcucuuuucagagccaccaaaaaaaaaaaaaaaaaaaaaaaaaaaaaaaaaaaaaaaaaaaaaaaaaaaaaaaaaaaaaaaaagaauu

SEQ ID NO: 25228 - RNA, 1733 nt, Artificial Sequence; identical to SEQ ID NO: 25222
  mRNA product Design a-2 (hSL-A64-N5) comprising derived and/or modified sequence from LASV(Pinneo-NIG-1969;Clade I)__AIT17836__GPCmut3 (opt1)

SEQ ID NO: 25229 - RNA, 1733 nt, Artificial Sequence
  mRNA product Design a-2 (hSL-A64-N5) comprising derived and/or modified sequence from LASV(ISTH0009-NIG-2011;Clade II)__AIT17404__GPCmut3 (opt1)
aggagaguccgcucagccagguugcagaagcggcuuagcguguguccuaaucuucucucugcguguagguaggccugugccgcaaacaagcuuaccaugggccagaucaucaccuucuuccaggaggugccccacgucaucgaggaggugaugaacaucgugcugaucgcccucagccugcuggccauccucaaggggaucuacaacgucgcgaccugcggccuguucgggcugguguccuuccuccugcugugcggccgcagcugcuccacgaccuacaaggggguguacgagcuccagacccuggagcuggacauggccagccucaacaugaccaugccgcuguccugcacgaagaacaacagccaccacuacaucauggucggcaacgagaccggccuggagcucacccugaccaacacguccaucaucaaccacaaguucugcaaccugagcgacgcccacaagaagaaccucuacgaccacgcccugauguccaucaucagcaccuuccaccuguccauccccaacuucaaccaguacgaggccaugagcugcgacuucaacgggggcaagaucuccgugcaguacaaccucagccacgcguacgccguggacgccgccaaccacugcgggaccaucgcgaacggcguccugcagaccuucaugcggauggccuggggcggguccuacaucgcccuggacagcggcaagggguccugggacugcaucaugacgagcuaccaguaccucaucauccagaacaccaccugggaggaccacugccaguucucccgccccagccccaucggcuaccuggggcugcucagccagcggacccgcgacaucuacaucucccggcgccggcgcggcacguucaccuggacccugagcgacuccgagggcaacgagacccccgggggcuacugccugacgcgguggaugcucaucgaggccgagcugaagugcuucgggaacaccgccguggcgaagugcaacgagaagcacgacgaggaguucugcgacaugcugcgccucuucgacuucaacaagcaggccauccggcgccugaagaccccggcccagaugagcauccagcugaucaacaaggccgugaacgcccucaucaacgaccagcugaucaugaagaaccaccuccgggacaucaugggcauccccuacugcaacuacuccaaguacugcuaccugaaccacaccgucacggggaagaccagccugccccgcugcugccugguguccaacggcagcuaccucaacgagacccacuucuccgacgacaucgagcagcaggcggacaacaugaucaccgagcugcugcagaaggaguacauggaccggcagggcaagacgccgcucgggcugguggaccuguucgucuucagcaccuccuucuaccugaucagcaucuuccuccaccugaucaagauccccacccaccgccacaucaccggcaagcccugccccaagccgcaccggcugaaccacauggggaucugcuccugcggccucuacaagcaccccggggugcccgugaaguggaagcgcugaggacuagucccuguucccagagcccacuuuuuuuucuuuuuuugaaauaaaauagccugucuuucagaucucaaaggcucuuuucagagccaccaaaaaaaaaaaaaaaaaaaaaaaaaaaaaaaaaaaaaaaaaaaaaaaaaaaaaaaaaaaaaaaaagaauu

SEQ ID NO: 25230 - RNA, 1733 nt, Artificial Sequence
  mRNA product Design a-2 (hSL-A64-N5) comprising derived and/or modified sequence from LASV(ISTH2010-NIG-2012;Clade II)__AIT17482__GPCmut3 (opt1)
aggagaguccgcucagccagguugcagaagcggcuuagcguguguccuaaucuucucucugcguguagguaggccugugccgcaaacaagcuuaccaugggccagaucaucaccuucuuccaggaggugccccacgucaucgaggaggugaugaacaucgugcugaucgcccucagccugcuggccauccucaaggggaucuacaacgucgcgaccugcggccuguucgggcugguguccuuccuccugcugugcggccgcagcugcuccacgaccuacaaggggguguacgagcuccagacccuggagcuggacauggccagccucaacaugaccaugccgcuguccugcacgaagaacaacagccaccacuacaucauggucggcaacgagaccggccuggagcucacccugaccaacacguccaucaucaaccacaaguucugcaaccugagcgacgcccacaagaagaaccucuacgaccacgcccugauguccaucaucagcaccuuccaccuguccauccccaacuucaaccaguacgaggccaugagcugcgacuucaacgggggcaagaucuccgugcaguacaaccucagccacgcguacgccguggacgccgccaaccacugcgggaccaucgcgaacggcguccugcagaccuucaugcggauggccuggggcggguccuacaucgcccuggacagcggcaagggguccugggacugcaucaugacgagcuaccaguaccucaucauccagaacaucaccugggaggaccacugccaguucucccgccccagccccaucggcuaccuggggcugcucagccagcggacccgcgacaucuacaucucccggcgccggcgcggcaccuucacguggacccugagcgacuccgagggcaacgagacccccgggggcuacugccugacccgguggaugcucaucgaggccgagcugaagugcuucgggaacacggccguggcgaagugcaacgagaagcacgacgaggaguucugcgacaugcugcgccucuucgacuucaacaagcaggccauccggcgccugaagaccccggcccagaugagcauccagcugaucaacaaggccgugaacgcccucaucaacgaccagcugaucaugaagaaccaccuccgggacaucaugggcauccccuacugcaacuacuccaaguacugcuaccugaaccacaccgucaccgggaagacgagccugccccgcugcugccugguguccaacggcagcuaccucaacgagacccacuucuccgacgacaucgagcagcaggcggacaacaugaucaccgagcugcugcagaaggaguacaucgaccggcagggcaagaccccgcucgggcugguggaccuguucgucuucagcacguccuucuaccugaucagcaucuuccuccaccuggugaagauccccacccaccgccacguggucggcaagcccugccccaagccgcaccggcugaaccacauggggaucugcuccugcggccucuacaagcaccccggggugcccgugaaguggaagcgcugaggacuagucccuguucccagagcccacuuuuuuuucuuuuuuugaaauaaaauagccugucuuucagaucucaaaggcucuuuucagagccaccaaaaaaaaaaaaaaaaaaaaaaaaaaaaaaaaaaaaaaaaaaaaaaaaaaaaaaaaaaaaaaaaagaauu

SEQ ID NO: 25231 - RNA, 1733 nt, Artificial Sequence
  mRNA product Design a-2 (hSL-A64-N5) comprising derived and/or modified sequence from LASV(Lassa virus/H.sapiens-wt/NGA/2015/ISTH_0543;Clade II)__AVO03639__GPCmut3 (opt1)
aggagaguccgcucagccagguugcagaagcggcuuagcguguguccuaaucuucucucugcguguagguaggccugugccgcaaacaagcuuaccaugggccagaucaucaccuucuuccaggaggugccccacgucaucgaggaggugaugaacaucgugcugaucgcccucagccugcuggccauccucaaggggaucuacaacgucgcgaccugcggccuguucgggcugguguccuuccuccugcugugcggccgcagcugcuccacgaccuacaaggggguguacgagcuccagacccuggagcuggacauggccaaccucaacaugaccaugccgcugagcugcacgaagaacaacucccaccacuacaucauggucggcaacgagaccggccuggagcucacccugaccaacacgagcaucaucaaccacaaguucugcaaccuguccgacgcccacaagaagaaccucuacgaccacgcccugaugagcaucaucuccaccuuccaccugagcauccccaacuucaaccaguacgaggccauguccugcgacuucaacgggggcaagaucagcgugcaguacaaccucucccacaccuacgcgguggacgccgccaaccacugcgggaccaucgccaacggcguccugcagacguucaugcggauggcguggggcgggagcuacaucgcccuggacuccggcaaggggagcugggacugcaucaugaccuccuaccaguaccucgugauccagaacaccaccugggaggaccacugccaguucagccgccccucccccaucggcuaccuggggcugcucagccagcggacgcgcgacaucuacaucagccggcgccggcgcggcaccuucaccuggacccuguccgacagcgagggcaacgagacgcccgggggcuacugccugacccgguggaugcucaucgaggccgagcugaagugcuucgggaacaccgccguggccaagugcaacgagaagcacgacgaggaguucugcgacaugcugcgccucuucgacuucaacaagcaggcgauccggcgccugaagaccccggcccagauguccauccagcugaucaacaaggccgucaacgcccucaucaacgaccagcugaucaugaagaaccaccuccgggacaucaugggcauccccuacugcaacuacagcaaguacugcuaccugaaccacacggugaccgggaagaccucccugccccgcugcugccuggugagcaacggcuccuaccucaacgagacccacuucagcgacgacaucgagcagcaggccgacaacaugaucacggagcugcugcagaaggaguacaucgaccggcagggcaagaccccgcucgggcuggucgaccuguucguguucuccaccagcuucuaccugaucuccaucuuccuccaccuggugaagauccccacccaccgccacaucacgggcaagcccugccccaagccgcaccggcugaaccacauggggaucugcagcugcggccucuacaagcaccccgggguccccgugaaguggaagcgcugaggacuagucccuguucccagagcccacuuuuuuuucuuuuuuugaaauaaaauagccugucuuucagaucucaaaggcucuuuucagagccaccaaaaaaaaaaaaaaaaaaaaaaaaaaaaaaaaaaaaaaaaaaaaaaaaaaaaaaaaaaaaaaaaagaauu

SEQ ID NO: 25232 - RNA, 1733 nt, Artificial Sequence
  mRNA product Design a-2 (hSL-A64-N5) comprising derived and/or modified sequence from LASV(Lassa virus/H.sapiens-wt/NGA/2016/ISTH_0009;Clade II)__AVO03571__GPCmut3 (opt1)
aggagaguccgcucagccagguugcagaagcggcuuagcguguguccuaaucuucucucugcguguagguaggccugugccgcaaacaagcuuaccaugggccagaucaucaccuucuuccaggaggugccccacgucaucgaggaggugaugaacaucgugcugaucgcccucagccugcuggccauccucaaggggaucuacaacgucgcgaccugcggccugcuggggcucguguccuuccugcugcucugcggccgcagcugcuccacgaccuacaaggggguguacgagcugcagacccuggagcucgacauggccagccugaacaugaccaugccgcuguccugcacgaagaacaacagccaccacuacaucauggucggcaacgagaccggccucgagcugacccugaccaacacguccaucaucaaccacaaguucugcaaccucagcgacgcccacaagaagaaccuguacgaccacgcccugauguccaucaucagcaccuuccaccucuccauccccaacuucaaccaguacgaggccaugagcugcgacuucaacgggggccggaucuccgugcaguacaaccugagccacuccuacgcgguggacgccgccaaccacugcgggaccaucgccaacggcguccugcagaccuucaugcgcauggcguggggcgggagcuacaucgcccucgacuccggcaaggggagcugggacugcaucaugacguccuaccaguaccugaucauccagaacaccaccugggaggaccacugccaguucagccggcccagccccaucggcuaccuggggcuccugucccagcgcacccgggacaucuacaucagccgccggcgccggggcacguucaccuggacccuguccgacagcgagggcaacgagacccccgggggcuacugccucacgcgcuggaugcugaucgaggccgagcugaagugcuucgggaacaccgccguggccaagugcaacgagaagcacgacgaggaguucugcgacaugcuccggcuguucgacuucaacaagcaggcgauccgccggcugaagaccccggcccagauguccauccagcucaucaacaaggccgugaacgcccugaucaacgaccagcugaucaugaagaaccaccuccgcgacaucaugggcauccccuacugcaacuacagcaaguacugcuaccugaaccacaccgucacggggaagaccucccugccccggugcugccucgugagcaacggcuccuaccugaacgagacccacuucagcgacgacaucgagcagcaggccgacaacaugaucaccgagcugcuccagaaggaguacaucgaccgccagggcaagacgccgcuggggcugguggaccuguucgucuucuccaccagcuucuaccucaucuccaucuuccugcaccuggugaagauccccacccaccggcacaucaccggcaagcccugccccaagccgcaccgccucaaccacauggggaucugcagcugcggccuguacaaccaccccggggugcccgucaaguggaagcggugaggacuagucccuguucccagagcccacuuuuuuuucuuuuuuugaaauaaaauagccugucuuucagaucucaaaggcucuuuucagagccaccaaaaaaaaaaaaaaaaaaaaaaaaaaaaaaaaaaaaaaaaaaaaaaaaaaaaaaaaaaaaaaaaagaauu

SEQ ID NO: 25233 - RNA, 1733 nt, Artificial Sequence
  mRNA product Design a-2 (hSL-A64-N5) comprising derived and/or modified sequence from LASV(Lassa virus/H.sapiens-wt/NGA/2016/ISTH_0017;Clade II)__AVO03567__GPCmut3 (opt1)
aggagaguccgcucagccagguugcagaagcggcuuagcguguguccuaaucuucucucugcguguagguaggccugugccgcaaacaagcuuaccaugggccagaucaucaccuucuuccaggaggugccccacgucaucgaggaggugaugaacaucgugcugaucgcccucagccugcuggccauccucaaggggaucuacaacgucgcgaccugcggccuguucgggcugguguccuuccuccugcugugcggccgcagcugcuccacgaccuacaaggggguguacgagcuccagacccuggagcuggacauggccagccucaacaugaccaugccgcuguccugcacgaagaacaacagccaccacuacaucauggucggcaacgagaccggccuggagcucacccugaccaacacguccaucaucaaccacaaguucugcaaccugagcgacgcccacaagaagaaccucuacgaccacgcccugauguccaucaucagcaccuuccaccuguccauccccaacuucaaccaguacgaggccaugagcugcgacuucaacgggggcaagaucuccgugcaguacaaccucagccacaccuacgcgaucgacgccgccaaccacugcgggaccaucgccaacggcgugcugcagacguucaugcggauggcguggggcggguccuacaucgcccuggacagcggcaagggguccugggacugcaucaugaccagcuaccaguaccucaucauccagaacaccaccugggaggaccacugccaguucucccgccccagccccaucggcuaccuggggcugcucagccagcggacgcgcgacaucuacaucucccggcgccggcgcggcaccuucaccuggacccugagcgacuccgagggcaacgagacgcccgggggcuacugccugacccgguggaugcucaucgaggccgagcugaagugcuucgggaacaccgccgucgccaagugcaacgagaagcacgacgaggaguucugcgacaugcugcgccucuucgacuucaacaagcaggcgauccggcgccugaagaccccggcccagaugagcauccagcugaucaacaaggccgugaacgcccucaucaacgaccagcugaucaugaagaaccaccuccgggacaucaugggcauccccuacugcaacuacuccaaguacugcuaccugaaccacacggugaccgggaagaccagccugccccgcugcugccuggucuccaacggcagcuaccucaacgagacccacuucuccgacgacaucgagcagcaggccgacaacaugaucacggagcugcugcagaaggaguacauggaccggcagggcaagaccccgcucgggcugguggaccuguucguguucagcaccuccuucuaccugaucagcaucuuccuccaccugguccgcauccccacccaccggcacgugaucggcaagcccugccccaagccgcaccgccugaaccacauggggaucugcuccugcggccucuacaagcaccccggggugcccgucaaguggaagcggugaggacuagucccuguucccagagcccacuuuuuuuucuuuuuuugaaauaaaauagccugucuuucagaucucaaaggcucuuuucagagccaccaaaaaaaaaaaaaaaaaaaaaaaaaaaaaaaaaaaaaaaaaaaaaaaaaaaaaaaaaaaaaaaaagaauu

SEQ ID NO: 25234 - RNA, 1733 nt, Artificial Sequence
  mRNA product Design a-2 (hSL-A64-N5) comprising derived and/or modified sequence from LASV(Lassa virus/H.sapiens-wt/NGA/2018/ISTH_0959;Clade II)__AVV65099__GPCmut3 (opt1)
aggagaguccgcucagccagguugcagaagcggcuuagcguguguccuaaucuucucucugcguguagguaggccugugccgcaaacaagcuuaccaugggccagaucaucaccuucuuccaggaggugccccacgucaucgaggaggugaugaacaucgugcugaucgcccucagccugcuggccauccucaaggggaucuacaacgucgugaccugcggccuguucgggcugguguccuuccuccugcugugcggccgcagcugcuccacgaccuacaagggggucuacgagcuccagacccuggagcuggacauggcgagccucaacaugaccaugccgcuguccugcacgaagaacaacagccaccacuacaucauggugggcaacgagaccggccuggagcucacccugaccaacacguccaucaucaaccacaaguucugcaaccugagcgacgcccacaagaagaaccucuacgaccacgcccugauguccaucaucagcaccuuccaccuguccauccccaacuucaaccaguacgaggccaugagcugcgacuucaacgggggcaagaucuccgugcaguacaaccucagccacgccuacgcgaucgacgccgccaaccacugcgggaccaucgccaacggcguccugcagaccuucaugcggauggcguggggcggguccuacaucgcccuggacagcggcaagggguccugggacugcaucaugacgagcuaccaguaccucaucauccagaacaccaccugggaggaccacugccaguucucccgccccagccccaucggcuaccuggggcugcucagccagcggacccgcgacaucuacaucucccggcgccggcgcggcacguucaccuggacccugagcgacuccgagggcaacgagacccccgggggcuacugccugacgcgguggaugcucaucgaggccgagcugaagugcuucgggaacaccgccguggccaagugcaacgagaagcacgacgaggaguucugcgacaugcugcgccucuucgacuucaacaagcaggcgauccggcgccugaagaccccggcccagaugagcauccagcugaucaacaaggccgugaacgcccucaucaacgaccagcugaucaugaagaaccaccuccgggacaucaugggcauccccuacugcaacuacuccaaguacugcuaccugaaccacaccgucacggggaagaccagccugccccgcugcugccugguguccaacggcagcuaccucaacgagacccacuucuccgacgacaucgagcagcaggccgacaacaugaucaccgagcugcugcagaaggaguacaucgaccggcagggcaagacgccgcucgggcugguggaccuguucgucuucagcaccuccuucuaccugaucagcaucuuccuccaccuggugaagauccccacccaccgccacgugaucggcaagcccugccccaagccgcaccggcugaaccacauggggaucugcuccugcggccucuacaagcaccccgggguccccgugaaguggaagcgcugaggacuagucccuguucccagagcccacuuuuuuuucuuuuuuugaaauaaaauagccugucuuucagaucucaaaggcucuuuucagagccaccaaaaaaaaaaaaaaaaaaaaaaaaaaaaaaaaaaaaaaaaaaaaaaaaaaaaaaaaaaaaaaaaagaauu

SEQ ID NO: 25235 - RNA, 1733 nt, Artificial Sequence
  mRNA product Design a-2 (hSL-A64-N5) comprising derived and/or modified sequence from LASV(LASV003-NIG-2008;Clade II)__AIT17580__GPCmut3 (opt1)
aggagaguccgcucagccagguugcagaagcggcuuagcguguguccuaaucuucucucugcguguagguaggccugugccgcaaacaagcuuaccaugggccagaucaucaccuucuuccaggaggugccccacgucaucgaggaggugaugaacaucgugcugaucgcccucagccugcuggccauccucaaggggaucuacaacgucgcgaccugcggccuguucgggcugguguccuuccuccugcugugcggccgcagcugcuccacgaccuacaaggggguguacgagcuccagacccuggagcuggacauggccagccucaacaugaccaugccgcuguccugcacgaagaacaacagccaccacuacaucauggucggcaacgagaccggccuggagcucacccugaccaacacguccaucaucaaccacaaguucugcaaccugagcgacgcccacaagaagaaccucuacgaccacgcccugauguccaucaucagcaccuuccaccuguccauccccaacuucaaccaguacgaggccaugagcugcgacuucaacgggggcaagaucuccgugcaguacaaccucagccacaccuacgcgguggacgccgccaaccacugcgggaccaucgccaacggcguccugcagacguucaugcggauggcguggggcggguccuacaucgcccuggacagcggcaagggguccugggacugcaucaugaccagcuaccaguaccucaucauccagaacaccaccugggaggaccacugccaguucucccgccccagccccaucggcuaccuggggcugcucagccagcggacgcgcgacaucuacaucucccggcgccggcgcggcaccuucaccuggacccugagcgacuccgagagcaacgagacgccgggcggguacugccugacccgguggaugcucaucgaggccgagcugaagugcuucggcaacaccgccguggccaagugcaacgagaagcacgacgaggaguucugcgacaugcugcgccucuucgacuucaacaagcaggcgauccggcgccugaaggcccccgcccagauguccauccagcugaucaacaaggccgugaacgcccucaucaacgaccagcugaucaugaagaaccaccuccgggacaucauggggauccccuacugcaacuacagcaaguacugcuaccugaaccacaccgucacgggccgcaccucccugccccggugcugccuggugagcaacggguccuaccucaacgagacccacuucagcgacgacaucgagcagcaggcggacaacaugaucaccgagcugcugcagaaggaguacauggaccgccagggcaagacgccgcucggccugguggaccuguucgucuucuccaccagcuucuaccugaucuccaucuuccuccaccuggugaagauccccacccaccggcacgugaucgggaagcccugccccaagccgcaccgccugaaccacaugggcaucugcagcugcgggcucuacaagcaccccggcguccccgugaaguggaagcggugaggacuagucccuguucccagagcccacuuuuuuuucuuuuuuugaaauaaaauagccugucuuucagaucucaaaggcucuuuucagagccaccaaaaaaaaaaaaaaaaaaaaaaaaaaaaaaaaaaaaaaaaaaaaaaaaaaaaaaaaaaaaaaaaagaauu

SEQ ID NO: 25236 - RNA, 1733 nt, Artificial Sequence
  mRNA product Design a-2 (hSL-A64-N5) comprising derived and/or modified sequence from LASV(LASV035-NIG-2009;Clade II)__AIT17588__GPCmut3 (opt1)
aggagaguccgcucagccagguugcagaagcggcuuagcguguguccuaaucuucucucugcguguagguaggccugugccgcaaacaagcuuaccaugggccagaucaucaccuucuuccaggaggugccccacgucaucgaggaggugaugaacaucgugcugaucgcccucagccugcuggccauccucaaggggaucuacaacgucgcgaccugcggccuguucgggcugguguccuuccuccugcugugcggccgcagcugcuccacgaccuacaaggggguguacgagcuccagacccuggagcuggacauggccagccucaacaugaccaugccgcuguccugcacgaagaacaacagccaccacuacaucauggucggcaacgagaccggccuggagcucacccugaccaacacguccaucaucaaccacaaguucugcaaccugagcgacgcccacaagaagaaccucuacgaccacgcccugauguccaucaucagcaccuuccaccuguccauccccaacuucaaccaguacgaggccaugagcugcgacuucaacgggggcaagaucuccgugcaguacaaccucagccacgcguacgccguggacgccgccaaccacugcgggaccaucgcgaacggcguccugcagaccuucaugcggauggccuggggcggguccuacaucgcccuggacagcggcaagggguccugggacugcaucaugacgagcuaccaguaccucaucauccagaacaccaccugggaggaccacugccaguucucccgccccagccccaucggcuaccuggggcugcucagccagcggacccgcgacaucuacaucucccggcgccggcgcggcacguucaccuggacccugagcgacuccgagggcaacgagacccccgggggcuacugccugacgcgguggaugcucaucgaggccgagcugaagugcuucgggaacaccgccguggcgaagugcaacgagaagcacgacgaggaguucugcgacaugcugcgccucuucgacuucaacaagcaggccauccggcgccugaaggccccggcccagaugagcauccagcugaucaacaaggccgugaacgcgcucaucaacgaccagcugaucaugaagaaccaccuccgggacaucaugggcauccccuacugcaacuacuccaaguacugcuaccugaaccacaccgucaccgggaagacgagccugccccgcugcugccugguguccaacggcagcuaccucaacgagacccacuucuccgacgacaucgagcagcaggccgacaacaugaucaccgagcugcugcagaaggaguacaucgaccggcagggcaagaccccgcucgggcugguggaccuguucgucuucagcacguccuucuaccugaucagcaucuuccuccaccuggugaagauccccacccaccgccacgugaucggcaagcccugccccaagccgcaccggcugaaccacauggggaucugcuccugcggccucuacaagcaccccgggguccccgugaaguggaagcgcugaggacuagucccuguucccagagcccacuuuuuuuucuuuuuuugaaauaaaauagccugucuuucagaucucaaaggcucuuuucagagccaccaaaaaaaaaaaaaaaaaaaaaaaaaaaaaaaaaaaaaaaaaaaaaaaaaaaaaaaaaaaaaaaaagaauu

SEQ ID NO: 25237 - RNA, 1733 nt, Artificial Sequence
  mRNA product Design a-2 (hSL-A64-N5) comprising derived and/or modified sequence from LASV(LASV1000-NIG-2009;Clade II)__AIT17782__GPCmut3 (opt1)
aggagaguccgcucagccagguugcagaagcggcuuagcguguguccuaaucuucucucugcguguagguaggccugugccgcaaacaagcuuaccaugggccagaucaucaccuucuuccaggaggugccccacgucaucgaggaggugaugaacaucgugcugaucgcccucagccugcuggccauccucaaggggaucuacaacgucgcgaccugcggccuguucgggcugguguccuuccuccugcugugcggccgcagcugcuccacgaccuacaaggggguguacgagcuccagacccuggagcuggacauggccagccucaacaugaccaugccgcuguccugcacgaagaacaacagccaccacuacaucauggucggcaacgagaccggccuggagcucacccugaccaacacguccaucaucaaccacaaguucugcaaccugagcgacgcccacaagaagaaccucuacgaccacgcccugauguccaucaucagcaccuuccaccuguccauccccaacuucaaccaguacgaggccaugagcugcgacuucaacgggggcaagaucuccgugcaguacaaccucagccacaccuacgcgguggacgccgccaaccacugcgggaccaucgccaacggcguccugcagacguucaugcggauggcguggggcggguccuacaucgcccuggacagcggcaagggguccugggacugcaucaugaccagcuaccaguaccucaucauccagaacaccaccugggaggaccacugccaguucucccgccccagccccaucggcuaccuggggcugcucagccagcggacgcgcgacaucuacaucucccggcgccggcgcggcaccuucaccuggacccugagcgacuccgagggcaacgagacgcccgggggcuacugccugacccgguggaugcucaucgaggccgagcugaagugcuucgggaacaccgccguggccaagugcaacgagaagcacgacgaggaguucugcgacaugcugcgccucuucgacuucaacaagcaggcgaucaagcggcugaagaccccggcccagaugagcauccagcugaucaacaaggccgugaacgcccucaucaacgaccagcugaucaugaagaaccaccuccgcgacaucaugggcauccccuacugcaacuacuccaaguacugcuaccugaaccacacggucaccgggaagaccagccugccccggugcugccugguguccaacggcagcuaccucaacgagacccacuucuccgacgacaucgagcagcaggccgacaacaugaucacggagcugcugcagaaggaguacaucgaccgccagggcaagaccccgcucgggcugguggaccuguucgucuucagcaccuccuucuaccugaucagcaucuuccuccaccuggugaagauccccacccaccggcacguggucggcaagcccugccccaagccgcaccgccugaaccacauggggaucugcuccugcggccucuacaagcaccccggggugcccgugaaguggaagcggugaggacuagucccuguucccagagcccacuuuuuuuucuuuuuuugaaauaaaauagccugucuuucagaucucaaaggcucuuuucagagccaccaaaaaaaaaaaaaaaaaaaaaaaaaaaaaaaaaaaaaaaaaaaaaaaaaaaaaaaaaaaaaaaaagaauu

SEQ ID NO: 25238 - RNA, 1733 nt, Artificial Sequence
  mRNA product Design a-2 (hSL-A64-N5) comprising derived and/or modified sequence from LASV(LASV221-NIG-2010;Clade II)__AIT17624__GPCmut3 (opt1)
aggagaguccgcucagccagguugcagaagcggcuuagcguguguccuaaucuucucucugcguguagguaggccugugccgcaaacaagcuuaccaugggccagaucaucaccuucuuccaggaggugccccacgucaucgaggaggugaugaacaucgugcugaucgcccucagccugcuggccauccucaaggggaucuacaacgucgcgaccugcggccuguucgggcugguguccuuccuccugcugugcggccgcagcugcuccacgaccuacaaggggguguacgagcuccagacccuggagcuggacauggccagccucaacaugaccaugccgcuguccugcacgaagaacaacagccaccacuacaucauggucggcaacgagaccggccuggagcucacccugaccaacacguccaucaucaaccacaaguucugcaaccugagcgacgcccacaagaagaaccucuacgaccacgcccugauguccaucaucagcaccuuccaccuguccauccccaacuucaaccaguacgaggccaugagcugcgacuucaacgggggcaagaucuccgugcaguacaaccucagccacaccuacgcgaucgacgccgccaaccacugcgggaccaucgccaacggcgugcugcagacguucaugcggauggcguggggcggguccuacaucgcccuggacagcggcaagggguccugggacugcaucaugaccagcuaccaguaccucaucauccagaacaccaccugggaggaccacugccaguucucccgccccagccccaucggcuaccuggggcugcucagccagcggacgcgcgacaucuacaucucccggcgccggcgcggcaccuucaccuggacccugagcgacuccgagggcaacgagacgcccgggggcuacugccugacccgguggaugcucaucgaggccgagcugaagugcuucgggaacaccgccgucgccaagugcaacgagaagcacgacgaggaguucugcgacaugcugcgccucuucgacuucaacaagcaggcgauccggcgccugaagaccccggcccagaugagcauccagcugaucaacaaggccgugaacgcccucaucaacgaccagcugaucaugaagaaccaccuccgggacaucaugggcauccccuacugcaacuacuccaaguacugcuaccugaaccacacggugaccgggaagaccagccugccccgcugcugccuggucuccaacggcagcuaccucaacgagacccacuucuccgacgacaucgagcagcaggccgacaacaugaucacggagaugcugcagaaggaguacauggaccggcagggcaagaccccgcuggggcucguggaccuguucguguucagcaccuccuucuaccugaucagcaucuuccugcaccucgucaagauccccacccaccgccacgugaucggcaagcccugccccaagccgcaccggcugaaccacauggggaucugcuccugcggccuguacaagcaccccggggugcccgucaaguggaagcgcugaggacuagucccuguucccagagcccacuuuuuuuucuuuuuuugaaauaaaauagccugucuuucagaucucaaaggcucuuuucagagccaccaaaaaaaaaaaaaaaaaaaaaaaaaaaaaaaaaaaaaaaaaaaaaaaaaaaaaaaaaaaaaaaaagaauu

SEQ ID NO: 25239 - RNA, 1733 nt, Artificial Sequence
  mRNA product Design a-2 (hSL-A64-N5) comprising derived and/or modified sequence from LASV(LASV237-NIG-2010;Clade II)__AIT17638__GPCmut3 (opt1)
aggagaguccgcucagccagguugcagaagcggcuuagcguguguccuaaucuucucucugcguguagguaggccugugccgcaaacaagcuuaccaugggccagaucaucaccuucuuccaggaggugccccacgucaucgaggaggugaugaacaucgugcugaucgcccucagccugcuggccauccucaaggggaucuacaacgucgcgaccugcggccuguucgggcugguguccuuccuccugcugugcggccgcagcugcuccacgaccuacaaggggguguacgagcuccagacccuggagcuggacauggccagccucaacaugaccaugccgcuguccugcacgaagaacaacagccaccacuacaucauggucggcaacgagaccggccuggagcucacccugaccaacacguccaucaucaaccacaaguucugcaaccugagcgacgcccacaagaaggaccucuacgaccacgcccugauguccaucaucagcaccuuccaccuguccauccccaacuucaaccaguacgaggccaugagcugcgacuucaacgggggcaagaucuccgugcaguacaaccucagccacaccuacgcgguggacgccgccaaccacugcgggaccaucgccaacggcguccugcagacguucaugcggauggcguggggcggguccuacaucgcccuggacagcggcaagggguccugggacugcaucaugaccagcuaccaguaccucaucauccagaacaccaccugggaggaccacugccaguucucccgccccagccccaucggcuaccuggggcugcucagccagcggacgcgcgacaucuacaucucccggcgccggcgcggcaccuucaccuggacccugagcgacuccgagggcaacgagacgcccgggggcuacugccugacccgguggaugcucaucgaggccgagcugaagugcuucgggaacaccgccguggccaagugcaacgagaagcacgacgaggaguucugcgacaugcugcgccucuucgacuucaacaagcaggcgauccggcgccugaagaccccggcccagaugagcauccagcugaucaacaaggccgugaacgcccucaucaacgaccagcugaucaugaagaaccaccuccgggacaucaugggcauccccuacugcaacuacuccaaguacugcuaccugaaccacacggucaccgggaagaccagccugccccgcugcugccugguguccaacggcagcuaccucaacgagacccacuucuccgacgacaucgagcagcaggccgacaacaugaucacggagcugcugcagaaggaguacauggaccggcagggcaagaccccgcucgggcugguggaccuguucgucuucagcaccuccuucuaccugaucagcaucuuccuccaccugaucaagauccccacccaccgccacaucacgggcaagcccugccccaagccgcaccggcugaaccacauggggaucugcuccugcggccucuacaagcaccccggggugcccgugaaguggaagcgcugaggacuagucccuguucccagagcccacuuuuuuuucuuuuuuugaaauaaaauagccugucuuucagaucucaaaggcucuuuucagagccaccaaaaaaaaaaaaaaaaaaaaaaaaaaaaaaaaaaaaaaaaaaaaaaaaaaaaaaaaaaaaaaaaagaauu

SEQ ID NO: 25240 - RNA, 1733 nt, Artificial Sequence
  mRNA product Design a-2 (hSL-A64-N5) comprising derived and/or modified sequence from LASV(LASV253-NIG-2011;Clade II)__AIT17670__GPCmut3 (opt1)
aggagaguccgcucagccagguugcagaagcggcuuagcguguguccuaaucuucucucugcguguagguaggccugugccgcaaacaagcuuaccaugggccagaucaucaccuucuuccaggaggugccccacgucaucgaggaggugaugaacaucgugcugaucgcccucagccugcuggccauccucaaggggaucuacaacgucgcgaccugcggccuguucgggcugguguccuuccuccugcugugcggccgcagcugcuccacgaccuacaaggggguguacgagcuccagacccuggagcuggacauggccagccucaacaugaccaugccgcuguccugcacgaagaacaacagccaccacuacaucauggucggcaacgagaccggccuggagcucacccugaccaacacguccaucaucaaccacaaguucugcaaccugagcgacgcccacaagaagaaccucuacgaccacgcccugauguccaucaucagcaccuuccaccuguccauccccaacuucaaccaguacgaggccaugagcugcgacuucaacgggggcaagaucuccgugcaguacaaccucagccacaccuacgcgguggacgccgccaaccacugcgggaccaucgccaacggcguccugcagacguucaugcggauggcguggggcggguccuacaucgcccuggacagcggcaagggguccugggacugcaucaugaccagcuaccaguaccucaucauccagaacaccaccugggaggaccacugccaguucucccgccccagccccaucggcuaccuggggcugcucagccagcggacgcgcgacaucuacaucucccggcgccggcgcggcaccuucaccuggacccugagcgacuccgagggcaacgagacgcccgggggcuacugccugacccgguggaugcucaucgaggccgagcugaagugcuucgggaacaccgccguggccaagugcaacgagaagcacgacgaggaguucugcgacaugcugcgccucuucgacuucaacaagcaggcgauccggcgccugaaggccccggcccagaugagcauccagcugaucaacaaggccgugaacgcccucaucaacgaccagcugaucaugaagaaccaccuccgggacaucaugggcauccccuacugcaacuacuccaaguacugcuaccugaaccacaccgucacggggcgcaccagccugccccggugcugccugguguccaacggcagcuaccucaacgagacccacuucuccgacgacaucgagcagcaggcggacaacaugaucaccgagcugcugcagaaggaguacaucgaccgccagggcaagacgccgcucgggcugguggaccuguucgucuucagcaccuccuucuaccugaucagcaucuuccuccaccuggugaagauccccacccaccggcacaucaucggcaagcccugccccaagccgcaccgccugaaccacauggggaucugcuccugcggccucuacaagcaccccggggugcccgucaaguggaagcggugaggacuagucccuguucccagagcccacuuuuuuuucuuuuuuugaaauaaaauagccugucuuucagaucucaaaggcucuuuucagagccaccaaaaaaaaaaaaaaaaaaaaaaaaaaaaaaaaaaaaaaaaaaaaaaaaaaaaaaaaaaaaaaaaagaauu

SEQ ID NO: 25241 - RNA, 1733 nt, Artificial Sequence
  mRNA product Design a-2 (hSL-A64-N5) comprising derived and/or modified sequence from LASV(LASV254-NIG-2011;Clade II)__AIT17674__GPCmut3 (opt1)
aggagaguccgcucagccagguugcagaagcggcuuagcguguguccuaaucuucucucugcguguagguaggccugugccgcaaacaagcuuaccaugggccagaucaucaccuucuuccaggaggugccccacgucaucgaggaggugaugaacaucgugcugaucgcccucagccugcuggccauccucaaggggaucuacaacgucgcgaccugcggccuguucgggcugguguccuuccuccugcugugcggccgcagcugcuccacgaccuacaaggggguguacgagcuccagacccuggagcuggacaugaccaaccucaacaugacgaugccgcugagcugcaccaagaacaacucccaccacuacaucauggucggcaacgagaccggccuggagcucacccugacgaacaccagcaucaucaaccacaaguucugcaaccuguccgacgcccacaagaagaaccucuacaaccacgcccugaugagcaucaucuccaccuuccaccugagcauccccaacuucaaccaguacgaggccauguccugcgacuucaacgggggcaagaucagcgugcaguacaaccucucccacagcuacgccguggacgcggccaaccacugcgggaccaucgccaacggcguccugcagacguucaugcggauggccuggggcggguccuacaucgcgcuggacagcggcaaggggaacugggacugcaucaugaccuccuaccaguaccucaucauccagaacaccaccugggaggaccacugccaguucagccgccccucccccaucggcuaccuggggcugcucagccagcggacgcgcgacaucuacaucagccggcgccggcgcggcaccuucaccuggacccuguccgacagcgagggcaacgagacgcccgggggcuacugccugacccgguggaugcucaucgaggccgagcugaagugcuucgggaacaccgccguggccaagugcaacgagaagcacgacgaggaguucugcgacaugcugcgccucuucgacuucaacaagcaggccauccggcgccugaagaccccggcgcaggccaacauccagcugaucaacaaggccgugaacgcccucaucaacgaccagcugaucaugaagaaccaccuccgggacaucaugggcauccccuacugcaacuacuccaaguacugcuaccugaaccacacggucaccgggaagaccagccugccccgcugcugccugguguccaacggcagcuaccucaacgagacccacuucuccgacgacaucgagcagcaggccgacaacaugaucacggagcugcugcagaaggaguacauggaccggcagggcaagaccccgcucgggcugguggaccuguucgucuucagcaccuccuucuaccugaucagcaucuuccuccaccuggugaagauccccacccaccgccacgugaucggcaagcccugccccaagccgcaccggcugaaccacauggggaucugcuccugcggccucuacaagcaccccgggguccccgugaaguggaagcgcugaggacuagucccuguucccagagcccacuuuuuuuucuuuuuuugaaauaaaauagccugucuuucagaucucaaaggcucuuuucagagccaccaaaaaaaaaaaaaaaaaaaaaaaaaaaaaaaaaaaaaaaaaaaaaaaaaaaaaaaaaaaaaaaaagaauu

SEQ ID NO: 25242 - RNA, 1733 nt, Artificial Sequence
  mRNA product Design a-2 (hSL-A64-N5) comprising derived and/or modified sequence from LASV(Nig08-A19;Clade III)__ADU56618__GPCmut3 (opt1)
aggagaguccgcucagccagguugcagaagcggcuuagcguguguccuaaucuucucucugcguguagguaggccugugccgcaaacaagcuuaccaugggccagaucgugaccuucuuccaggaggucccccacgugaucgaggaggugaugaacaucguccugaucgcccucagcauccuggccauccugaaggggcucuacaacaucgcgaccugcggccugaucgggcuggugacguuccuccugcuguccggccgcagcugcuccaugaccuacaaggggguguacgagcuccagacccuggagcugaacaugaacacccucaacaugacgaugccgcugagcugcaccaagaacaacucccaccacuacaucauggucggcaacgagaccggccuggagcucacccugacgaacaccagccugcuccaccacaaguucugcaaccuguccgacgcccacaagaagaaccuguacgaccacacccucaugagcaucaucuccaccuuccaccugagcauccccaacuucaaccaguacgaggccauguccugcgacuucaacgggggcaagaucacggugcaguacaaccugagccacuccuacgccaucgacgccgcgaaccacugcgggaccguggccaacggcguccuccagaccuucaugcggauggccuggggcgggagcuacaucgcccuggacuccggccgcgggaagugggacugcaucaugaccagcuaccaguaccugaucauccagaacacgaccugggaggaccacugccaguucucccggcccagccccaucggcuaccucgggcugcugucccagcgcacccgggacaucuacaucagccgccggcgccggggcaccuucacguggacccucagcgacuccgagggcaacgagacccccgggggcuacugccugacccgcuggaugcugaucgaggcggagcucaagugcuucgggaacacggccguggccaagugcaacgagaagcacgacgaggaguucugcgacaugcugcggcuguucgacuucaacaagcaggccauccgccggcucaaggccccggcgcagaugagcauccagcugaucaacaaggccgugaacgcccugaucaacgaccagcucaucaugaagaaccaccuccgcgacaucaugggcauccccuacugcaacuacuccaaguacugcuaccugaaccacaccagcaccgggcggaccucccugccccgcugcugccuggucagcaacggcuccuaccugaacgagacgcacuucagcgacgacaucgagcagcaggccgacaacaugaucaccgagaugcuccagaaggaguaccuggaccggcagggcaagaccccgcuggggcugguggaccucuucguguucuccaccagcuucuaccugaucuccaucuuccugcaccucgucaagauccccacgcaccgccacaucgugggcaagcccugccccaagccgcaccggcugaaccacauggggaucugcagcugcggccuguacaagcagcccggggugcccguccgcuggaagcggugaggacuagucccuguucccagagcccacuuuuuuuucuuuuuuugaaauaaaauagccugucuuucagaucucaaaggcucuuuucagagccaccaaaaaaaaaaaaaaaaaaaaaaaaaaaaaaaaaaaaaaaaaaaaaaaaaaaaaaaaaaaaaaaaagaauu

SEQ ID NO: 25243 - RNA, 1736 nt, Artificial Sequence
  mRNA product Design a-2 (hSL-A64-N5) comprising derived and/or modified sequence from LASV(G1180-SLE-2010;Clade IV)__AIT17168__GPCmut3 (opt1)
aggagaguccgcucagccagguugcagaagcggcuuagcguguguccuaaucuucucucugcguguagguaggccugugccgcaaacaagcuuaccaugggccagaucgugaccuucuuccaggaggucccccacgugaucgaggaggugaugaacaucguccugaucgcccucagcauccuggccgugcugaaggggcucuacaacuucgcgaccugcggccugguggggcugcucacguuccugcugcucugcggccgcuccugcaccgccagccgguacaagggggucuacgagcugcagacccuggagcucaacauggagacccugaacaugacgaugccgcuguccugcaccaagaacaacagccaccacuacaucauggugggcaacgagaccggccucgagcugacccugacgaacaccuccaucaucaaccacaaguucugcaaccucagcgacgcccacaagaagaaccuguacgaccacgcccugauguccaucaucagcaccuuccaccucuccauccccaacuucaaccaguacgaggccaugagcugcgacuucaacgggggcaagaucuccgugcaguacaaccugagccacuccuacgcgggggacgccgccaaccacugcggcaccgucgccaacggggugcugcagacguucaugcgcauggcguggggcggcagcuacaucgcccucgacuccgggcacggcagcugggacugcaucaugaccuccuaccaguaccugaucauccagaacaccaccugggaggaccacugccaguucagccggcccucccccaucggguaccugggccuccugagccagcgcacgcgggacaucuacaucagccgccggcgccggggcaccuucaccuggacccuguccgacagcgaggggaaggacacgccgggcggguacugccucacccgcuggaugcugaucgaggccgagcugaagugcuucggcaacaccgccguggccaagugcaacgagaagcacgacgaggaguucugcgacaugcuccggcuguucgacuucaacaagcaggcgauccagcgccugaaggcccccgcccagauguccauccagcucaucaacaaggccgucaacgcccugaucaacgaccagcugaucaugaagaaccaccuccgggacaucauggggauccccuacugcaacuacagcaaguacugcuaccugaaccacaccacgaccggcaagaccucccugcccaagugcugccucgugagcaacggcuccuaccugaacgagacccacuucagcgacgacaucgagcagcaggcggacaacaugaucacggagaugcugcagaaggaguacauggagcgccaggggaagaccccgcucggccugguggaccuguucgucuucuccaccagcuucuaccugaucuccaucuuccuccaccuggugaagauccccacccaccggcacaucgugggcaagagcugccccaagccccaccgccugaaccacauggggaucugcuccugcgggcucuacaagcagccgggcguccccgugaaguggaagcggugaggacuagucccuguucccagagcccacuuuuuuuucuuuuuuugaaauaaaauagccugucuuucagaucucaaaggcucuuuucagagccaccaaaaaaaaaaaaaaaaaaaaaaaaaaaaaaaaaaaaaaaaaaaaaaaaaaaaaaaaaaaaaaaaagaauu

SEQ ID NO: 25244 - RNA, 1736 nt, Artificial Sequence
  mRNA product Design a-2 (hSL-A64-N5) comprising derived and/or modified sequence from LASV(G1442-SLE-2011;Clade IV)__AIT17180__GPCmut3 (opt1)
aggagaguccgcucagccagguugcagaagcggcuuagcguguguccuaaucuucucucugcguguagguaggccugugccgcaaacaagcuuaccaugggccagaucgugaccuucuuccaggaggucccccacgugaucgaggaggugaugaacaucguccugaucgcccucagcauccuggccgugcugaaggggcucuacaacguggcgaccugcggccugaucgggcuggucacguuccuccugcugugcggccgcuccugcaccaccacccucuacaaggggguguacgagcugcagacgcuggagcucaacauggagacccugaacaugaccaugccgcugagcugcaccaagaacaacucccaccacuacauccgggugggcaacgagacgggccucgagcugacccugaccaacaccagcaucaucaaccacaaguucugcaaccucuccgacgcccacaagaagaaccuguacgaccacgcccugaugagcaucaucuccacguuccaccucagcauccccaacuucaaccaguacgaggccauguccugcgacuucaacgggggcaagaucagcguccaguacaaccugucccacagcuacgccggggacgcggccaaccacugcggcaccguggccaacggggugcugcagaccuucaugcgcauggccuggggcggcuccuacaucgcgcucgacagcgggcggggcaacugggacugcaucaugaccuccuaccaguaccugaucauccagaacacgaccugggacgaccacugccaguucagccgccccucccccaucggguaccugggccuccugagccagcggacccgcgacgucuacaucucccggcgccggcgcggcaccuucacguggacccugagcgacagcgaggggaaggacaccccgggcggguacugccucacccgguggaugcugaucgaggccgagcugaagugcuucggcaacacggccguggccaagugcaacgagaagcacgacgaggaguucugcgacaugcuccgccuguucgacuucaacaagcaggccauccagcggcugaaggcgcccgcccagauguccauccagcucaucaacaaggccgugaacgcccugaucaacgaccagcugaucaugaagaaccaccuccgcgacaucauggggauccccuacugcaacuacagcaaguacugcuaccugaacaacaccgccaccggcaagaccucccugcccaagugcugccucaucagcaacggcuccuaccugaacgagacgcacuucagcgacgacaucgagcaggaggcggacaacaugaucaccgagaugcugcagaaggaguacauggagcggcaggggaagaccccgcucggccuggucgaccuguucguguucuccaccagcuucuaccugaucuccaucuuccuccaccuggugaagauccccacgcaccgccacaucgucggcaagagcugccccaagccccaccggcugaaccacauggggaucugcuccugcgggcucuacaagcagccgggcgugcccgugcgcuggaagcggugaggacuagucccuguucccagagcccacuuuuuuuucuuuuuuugaaauaaaauagccugucuuucagaucucaaaggcucuuuucagagccaccaaaaaaaaaaaaaaaaaaaaaaaaaaaaaaaaaaaaaaaaaaaaaaaaaaaaaaaaaaaaaaaaagaauu

SEQ ID NO: 25245 - RNA, 1736 nt, Artificial Sequence
  mRNA product Design a-2 (hSL-A64-N5) comprising derived and/or modified sequence from LASV(G3010-SLE-2013;Clade IV)__AIT17344__GPCmut3 (opt1)
aggagaguccgcucagccagguugcagaagcggcuuagcguguguccuaaucuucucucugcguguagguaggccugugccgcaaacaagcuuaccaugggccagaucgugaccuucuuccaggaggucccccacgugaucgaggaggugaugaacaucguccugaucgcccucagcauccuggccgugcugaaggggcucuacaacuucgcgaccugcggccugguggggcuggucacguuccuccugcugugcggccgcuccugcaccaccagccucuacaaggggguguacgagcugcagacccuggagcucaacauggagacgcugaacaugaccaugccgcuguccugcaccaagaacaacagccaccacuacaucauggugggcaacgagaccggccucgagcugacgcugaccaacaccuccaucaucaaccacaaguucugcaaccucagcgacgcccacaagaagaaccuguacaaccacgcccugauguccaucaucagcaccuuccaccucuccauccccaacuucaaccaguacgaggccaugagcugcgacuucaacgggggcaagaucuccguccaguacaaccugagccacuccuacgccggggacgcggccagccacugcggcacgguggccaacggggugcugcagaccuucaugcggauggccuggggcggcuccuacaucgcgcucgacagcggguacggcaagugggacugcaucaugaccuccuaccaguaccugaucauccagaacaccacgugggaggaccacugccaguucagccgccccucccccaucggguaccugggccuccugagccagcggacccgcgacaucuacaucagccggcgccggcgcggcaccuucaccuggacgcuguccgacagcgaggggaaggacaccccgggcggguacugccucacccgguggaugcugaucgaggccgagcugaagugcuucggcaacaccgccgucgccaagugcaacgagaagcacgacgaggaguucugcgacaugcuccgccuguucgacuucaacaagcaggccauccagcggcugaagacgcccgcgcagauguccauccagcucaucaacaaggccgugaacgcccugaucaacgaccagcugaucaugaagaaccaccuccgcgacaucauggggauccccuacugcaacuacagcaaguacugcuaccugaaccacaccaccaccggcaagacgucccugcccaagugcugccucgugagcaacggcuccuaccugaacgagacccacuucagcgacgacaucgagcagcaggccgacaacaugaucaccgagaugcugcagaaggaguacauggagcggcaggggaagaccccgcucggccuggucgaccuguucguguucuccacgagcuucuaccugaucuccaucuuccuccaccuggugaagauccccacccaccgccacaucgucggcaagagcugccccaagccccaccggcugaaccacauggggaucugcuccugcgggcucuacaagcagccgggcgugcccgugcgcuggaagcggugaggacuagucccuguucccagagcccacuuuuuuuucuuuuuuugaaauaaaauagccugucuuucagaucucaaaggcucuuuucagagccaccaaaaaaaaaaaaaaaaaaaaaaaaaaaaaaaaaaaaaaaaaaaaaaaaaaaaaaaaaaaaaaaaagaauu

SEQ ID NO: 25246 - RNA, 1736 nt, Artificial Sequence
  mRNA product Design a-2 (hSL-A64-N5) comprising derived and/or modified sequence from LASV(G502-SLE-2009;Clade IV)__AIT17126__GPCmut3 (opt1)
aggagaguccgcucagccagguugcagaagcggcuuagcguguguccuaaucuucucucugcguguagguaggccugugccgcaaacaagcuuaccaugggccagaucgugaccuucuuccaggaggucccccacgugaucgaggaggugaugaacaucguccugaucgcccucagcauccuggccgugcugaaggggcucuacaacuucgcgaccugcggccugguggggcugcucacguuccugcugcucugcggccgcuccugcaccaccgggcuguacaagggcgucuacgagcugcagacccucgagcugaacauggagacgcugaacaugaccaugccgcucagcugcaccaagaacaacucccaccacuacaucauggugggcaacgagaccgggcuggagcugacgcucaccaacaccagcaucaucaaccacaaguucugcaaccuguccgacgcccacaagaagaaccuguacgaccacgcccucaugagcaucaucuccaccuuccaccugagcauccccaacuucaaccaguacgaggccauguccugcgacuucaacggcgggaagaucagcgugcaguacaaccugucccacagcuacgccggcgacgcggccgaccacugcgggacggucgccaacggcgugcuccagaccuucaugcggauggccuggggcggguccuacaucgcgcuggacagcggccgcgggcggugggacugcaucaugaccuccuaccaguaccugaucauccagaacaccacgugggaggaccacugccaguucagccgccccucccccaucggcuaccucggccugcugagccagcggacccgcgacaucuacaucucccggcgccggcgcgggaccuucaccuggacgcucagcgacagcgagggcaaggacacccccgggggcuacugccugacccgguggaugcugaucgaggccgagcucaagugcuucgggaacaccgccguggccaagugcaacgagaagcacgacgaggaguucugcgacaugcugcgccuguucgacuucaacaagcaggccauccagcggcucaaggcgccggcccagauguccauccagcugaucaacaaggccgucaacgcccugaucaacgaccagcucgugaugaagaaccaccuccgcgacaucaugggcauccccuacugcaacuacagccgguacugcuaccugaaccacacgaccaccggccgcaccucccugcccaagugcugccuggugagcaacggguccuaccugaacgagacgcacuucagcgacgacaucgagcagcaggccgacaacaugaucaccgagaugcuccagaaggaguacauggagcggcagggcaagaccccgcuggggcuggucgaccuguucguguucuccaccagcuucuaccucaucuccaucuuccugcaccuggugaagauccccacgcaccgccacaucgucggcaagagcugccccaagccccaccggcucaaccacauggggaucugcuccugcggccuguacaagcagccgggcgugcccgugaaguggaagcgcugaggacuagucccuguucccagagcccacuuuuuuuucuuuuuuugaaauaaaauagccugucuuucagaucucaaaggcucuuuucagagccaccaaaaaaaaaaaaaaaaaaaaaaaaaaaaaaaaaaaaaaaaaaaaaaaaaaaaaaaaaaaaaaaaagaauu

SEQ ID NO: 25247 - RNA, 1736 nt, Artificial Sequence
  mRNA product Design a-2 (hSL-A64-N5) comprising derived and/or modified sequence from LASV(G733-SLE-2010;Clade IV)__AIT17154__GPCmut3 (opt1)
aggagaguccgcucagccagguugcagaagcggcuuagcguguguccuaaucuucucucugcguguagguaggccugugccgcaaacaagcuuaccaugggccagaucgugaccuucuuccaggaggucccccacgugaucgaggaggugaugaacaucguccugaucgcccucagcauccuggccgugcugaaggggcucuacaacuucgcgaccugcggcaucguggggcuggucuccuuccugcuccugugcggccgcagcugcacgaccucccuguacaaggggguguacgagcuccagacccuggagcugaacauggagacccucaacaugacgaugccgcugagcugcaccaagaacaacucccaccacuacaucauggugggcaacgagaccggccuggagcucacccugacgaacaccagcaucaucaaccacaaguucugcaaccuguccgacgcccacaagaagaaccucuacgaccacgcccugaugagcaucaucuccaccuuccaccugagcauccccaacuucaaccaguacgaggccauguccugcgacuucaacgggggcaagaucagcguccaguacaaccucucccacagcuacgccggggacgcggccaaccacugcggcaccaucgccaacggggugcugcagacguucaugcggauggccuggggcggcuccuacaucgcgcuggacagcgggcgcgaccggugggacugcaucaugaccuccuaccaguaccucaucauccagaacaccaccugggaggaccacugccaguucagccgccccucccccaucggcuaccuggggcugcucagccagcggacgcgcgacaucuacaucagccggcgccggcgcggcaccuucaccuggacccuguccgacagcgagggcaaggacacgcccgggggcuacugccugacccgguggaugcucaucgaggccgagcugaagugcuucgggaacaccgccguggccaagugcaacgagaagcacgacgaggaguucugcgacaugcugcgccucuucgacuucaacaagcaggccauccagcggcugaaggcgccggcccagauguccauccagcugaucaacaaggccgucaacgcccucaucaacgaccagcugaucaugaagaaccaccuccgcgacaucaugggcauccccuacugcaacuacagcaaguacugcuaccugaaccacaccacgaccgggaagaccucccugcccaagugcugccuggugagcaacggcuccuaccucaacgagacccacuucagcgacgacaucgagcagcaggccgacaacaugaucacggagaugcugcagaaggaguacauggagcggcagggcaagaccccgcuggggcucguggaccuguucgucuucuccaccagcuucuaccugaucuccaucuuccugcaccucgugaagauccccacccaccgccacguggucggcaagagcugccccaagccccaccggcugaaccacauggggaucugcuccugcggccuguacgggcagccgggcgugcccgugaaguggaagcgcugaggacuagucccuguucccagagcccacuuuuuuuucuuuuuuugaaauaaaauagccugucuuucagaucucaaaggcucuuuucagagccaccaaaaaaaaaaaaaaaaaaaaaaaaaaaaaaaaaaaaaaaaaaaaaaaaaaaaaaaaaaaaaaaaagaauu

SEQ ID NO: 25248 - RNA, 1736 nt, Artificial Sequence
  mRNA product Design a-2 (hSL-A64-N5) comprising derived and/or modified sequence from MOPV/LASV reassortant(IGS-1;Clade IV)__AFY05576__GPCmut3 (opt1)
aggagaguccgcucagccagguugcagaagcggcuuagcguguguccuaaucuucucucugcguguagguaggccugugccgcaaacaagcuuaccaugggccagaucgugaccuucuuccaggaggucccccacgugaucgaggaggugaugaacaucguccugaucgcccucagcgugcuggccgugcugaaggggcucuacaacuucgcgaccugcggccuggucgggcuggugacguuccuccugcugugcggccgcuccugcaccaccagccucuacaaggggguguacgagcugcagacccuggagcucaacauggagacgcugaacaugaccaugccgcuguccugcaccaagaacaacagccaccacuacaucauggucggcaacgagaccggccucgagcugacgcugaccaacaccuccaucaucaaccacaaguucugcaaccucagcgacgcccacaagaagaaccuguacgaccacgcccugauguccaucaucagcaccuuccaccucuccauccccaacuucaaccaguacgaggccaugagcugcgacuucaacgggggcaagaucuccgugcaguacaaccugagccacuccuacgccggggacgcggccaaccacugcggcacgguggccaacgggguccugcagaccuucaugcggauggccuggggcggcagcuacaucgcgcucgacuccgggcgcggcaacugggacugcaucaugaccagcuaccaguaccugaucauccagaacaccacgugggaggaccacugccaguucucccggcccagccccaucggguaccugggccuccugucccagcgcacccgggacaucuacaucagccgccggcgccggggcaccuucaccuggacgcugagcgacuccgagggggaggacaccccgggcggguacugccucacccgcuggaugcugaucgaggccgagcugaagugcuucggcaacaccgccguggccaagugcaacgagaagcacgacgaggaguucugcgacaugcuccggcuguucgacuucaacaagcaggccauccagcgccugaaggcgcccgcccagaugagcauccagcucaucaacaaggccgugaacgcccugaucaacgaccagcugaucaugaagaaccaccuccgggacaucauggggauccccuacugcaacuacuccaaguacugcuaccugaaccacacgaccaccggccgcaccagccugcccaagugcugccucgucuccaacggcagcuaccugaacgagacgcacuucuccgacgacaucgagcagcaggccgacaacaugaucaccgagaugcugcagaaggaguacauggagcggcaggggaagaccccgcucggccugguggaccuguucguguucagcaccuccuucuaccugaucagcaucuuccuccaccuggucaagauccccacgcaccgccacaucguggggaaguccugccccaagccccaccggcugaaccacaugggcaucugcagcugcgggcucuacaagcagccgggcgugcccgucaaguggaagcgcugaggacuagucccuguucccagagcccacuuuuuuuucuuuuuuugaaauaaaauagccugucuuucagaucucaaaggcucuuuucagagccaccaaaaaaaaaaaaaaaaaaaaaaaaaaaaaaaaaaaaaaaaaaaaaaaaaaaaaaaaaaaaaaaaagaauu

SEQ ID NO: 25249 - RNA, 1736 nt, Artificial Sequence
  mRNA product Design a-2 (hSL-A64-N5) comprising derived and/or modified sequence from LASV(LM765-SLE-2012;Clade IV)__AIT17814__GPCmut3 (opt1)
aggagaguccgcucagccagguugcagaagcggcuuagcguguguccuaaucuucucucugcguguagguaggccugugccgcaaacaagcuuaccaugggccagaucgugaccuucuuccaggaggucccccacgugaucgaggaggugaugaacaucguccugaucgcccucagcauccuggccgugcugaaggggcucuacaacuucgcgaccugcggccugguggggcuggucacguuccuccugcugugcggccgcuccugcaccaccagccucuacaaggggguguacgagcugcagacccuggagcucaacauggagacgcugaacaugaccaugccgcuguccugcaccaagaacaacagccaccacuacaucauggugggcaacgagaccggccucgagcugacgcugaccaacaccuccaucaucgaccacaaguucugcaaccucagcgacgcccaccggaagaaccuguacgaccacgcccugauguccaucaucagcaccuuccaccucuccauccccaacuucaaccaguacgaggccaugagcugcgacuucaacgggggcaagaucuccguccaguacaaccugagccacuccuacgccaaggacgcggccgaccacugcgggacgguggccaacggcgugcugcagaccuucaugcgcauggccuggggcgggagcuacaucgcgcucgacuccggccgggggcgcugggacugcaucaugaccagcuaccaguaccugaucauccagaacaccacgugggaggaccacugccaguucucccggcccagccccaucggcuaccuggggcuccugucccagcgcacccgggacaucuacaucagccgccggcgccggggcaccuucaccuggacgcugagcgacuccgagggcaaggacacccccgggggcuacugccucacccgcuggaugcugaucgaggccgagcugaagugcuucgggaacaccgccgucgccaagugcaacgagaagcacgacgaggaguucugcgacaugcuccggcuguucgacuucaacaagcaggccauccagcgccugaaggcgccggcccagaugagcauccagcucaucaacaaggccgugaacgcccugaucaacgaccagcugaucaugaagaaccaccuccgggacaucaugggcauccccuacugcaacuacuccaaguacugcuaccugaaccacacgaccaccgggaagaccagccugcccaagugcugccucguguccaacggcagcuaccugaacgagacgcacuucuccgacgacaucgagcagcaggccgacaacaugaucaccgagaugcugcagaaggaguacauggagcgccagggcaagaccccgcucgggcuggucgaccuguucguguucagcaccuccuucuaccugaucagcaucuuccuccaccuggugaagauccccacgcaccggcacaucgucggcaagcccugccccaagccgcaccgccugaaccacauggggaucugcuccugcggccucuacaagcagcccggggugcccgugaaguggaagcggugaggacuagucccuguucccagagcccacuuuuuuuucuuuuuuugaaauaaaauagccugucuuucagaucucaaaggcucuuuucagagccaccaaaaaaaaaaaaaaaaaaaaaaaaaaaaaaaaaaaaaaaaaaaaaaaaaaaaaaaaaaaaaaaaagaauu

SEQ ID NO: 25250 - RNA, 1736 nt, Artificial Sequence
  mRNA product Design a-2 (hSL-A64-N5) comprising derived and/or modified sequence from LASV(LM776-SLE-2012;Clade IV)__AIT17824__GPCmut3 (opt1)
aggagaguccgcucagccagguugcagaagcggcuuagcguguguccuaaucuucucucugcguguagguaggccugugccgcaaacaagcuuaccaugggccagaucgugaccuucuuccaggaggucccccacgugaucgaggaggugaugaacaucguccugaucgcccucagcauccuggccgugcugaaggggcucuacaacuucgcgaccugcggccugguggggcuggucacguuccuccugcugugcggccgcuccugcaccaccagcguguacaaggggguguacgagcuccagacccuggagcugaacauggagacgcucaacaugaccaugccgcuguccugcaccaagaacaacagccaccacuacaucauggucggcaacgagaccggccuggagcucacgcugaccaacaccuccaucaucaaccacaaguucugcaaccugagcgacgcccacaagaagaaccucuacgaccacgcccugauguccaucaucagcaccuuccaccuguccauccccaacuucaaccaguacgaggccaugagcugcgacuucaacgggggcaagaucuccgugcaguacaaccucagccacuccuacgccggggacgcggccaaccacugcggcacgguggccaacgggguccugcagaccuucaugcggauggccuggggcggcagcuacaucgcgcuggacuccgggcacggcaagugggacugcaucaugaccagcuaccaguaccucaucauccagaacaccacgugggaggaccacugccaguucucccgccccagccccaucggguaccugggccugcucucccagcggacccgcgacaucuacaucagccggcgccggcgcggcaccuucaccuggacgcugagcgacuccgaggggaaggacaccccgggcggguacugccugacccgguggaugcucaucgaggccgagcugaagugcuucggcaacaccgccguggccaagugcaacgagaagcacgacgaggaguucugcgacaugcugcgccucuucgacuucaacaagcaggccauccagcggcugaaggcgcccgcccagaugagcauccagcugaucaacaaggccgugaacgcccucaucaacgaccagcugaucaugaagaaccaccuccgcgacaucauggggauccccuacugcaacuacuccaaguacugcuaccugaaccacacgaccaccggcaagaccagccugcccaagugcugccuggucuccaacggcagcuaccucaacgagacgcacuucuccgacgacaucgagcagcaggccgacaacaugaucaccgagaugcugcagaaggaguacauggagcggcaggggaagaccccgcugggccucguggaccuguucguguucagcaccuccuucuaccugaucagcaucuuccugcaccucgucaagauccccacgcaccgccacaucguggggaaguccugccccaagccccaccggcugaaccacaugggcaucugcagcugcgggcuguacaagcagccgggcgugcccguccgcuggaagcggugaggacuagucccuguucccagagcccacuuuuuuuucuuuuuuugaaauaaaauagccugucuuucagaucucaaaggcucuuuucagagccaccaaaaaaaaaaaaaaaaaaaaaaaaaaaaaaaaaaaaaaaaaaaaaaaaaaaaaaaaaaaaaaaaagaauu

SEQ ID NO: 25251 - RNA, 1736 nt, Artificial Sequence
  mRNA product Design a-2 (hSL-A64-N5) comprising derived and/or modified sequence from LASV(Mad39;Clade IV)__ANH09722__GPCmut3 (opt1)
aggagaguccgcucagccagguugcagaagcggcuuagcguguguccuaaucuucucucugcguguagguaggccugugccgcaaacaagcuuaccaugggccagaucgugaccuucuuccaggaggucccccacgugaucgaggaggugaugaacaucguccugaucgcccucagcauccuggccgugcugaaggggcucuacaacguggcgaccugcggccugaucgggcuggucacguuccuccugcugugcggccgcuccugcaccaccacccucuacaaggggguguacgagcugcaggcccuggagcucaacauggagacgcugaacaugaccaugccgcugagcugcaccaagaacaacucccaccacuacauccgggugggcaacgagaccggccucgagcugacgcugaccaacaccagccucaucaaccacaaguucugcaaccuguccgacgcccacaagaagaaccuguacgaccacgcccucaugagcaucaucuccaccuuccaccugagcauccccaacuucaaccaguacgaggccauguccugcgacuucaacgacgggaagaucagcguccaguacaaccugucccacacguacgcgggcgacaccgccaaccacugcgggaccguggccaacggcgugcuccagaccuucaugcgcauggccuggggcgggagcuacaucgcgcuggacuccggccgcgggggcugggacugcaucaugacgagcuaccaguaccugaucauccagaacaccaccugggaggaccacugccaguucucccggcccagccccaucggguaccucggccugcugucccagcggacccgcgacaucuacaucagccggcgccggcgcggcacguucaccuggacccucuccgacagcgaggggaaggacaccccgggcggguacugccugacgcgguggaugcugaucgaggccgagcucaagugcuucggcaacaccgccgucgccaagugcaacgagaagcacgacgaggaguucugcgacaugcugcgccuguucgacuucaacaagcaggccauccagcggcucaaggcgcccgcccagaugagcauccagcugaucaacaaggccgugaacgcccugaucaacgaccagcucaucaugaagaaccaccuccgcgacaucauggggauccccuacugcaacuacuccaaguacugcuaccugaaccacaccgugaccggcaagacgagccugcccaagugcugccuggucuccaacggcagcuaccugaacgagacccacuucuccgacgacaucgagcagcaggccgacaacaugaucaccgagaugcuccagaaggaguacauggagcggcaggggaagaccccgcugggccugguggaccuguucguguucagcacguccuucuaccucaucagcaucuuccugcaccuggucaagauccccacccaccgccacgugguggggaagcccugccccaagccgcaccggcucaaccacaugggcaucugcuccugcggguucuacaagcagcccggcguccccgugcgcuggaagcggugaggacuagucccuguucccagagcccacuuuuuuuucuuuuuuugaaauaaaauagccugucuuucagaucucaaaggcucuuuucagagccaccaaaaaaaaaaaaaaaaaaaaaaaaaaaaaaaaaaaaaaaaaaaaaaaaaaaaaaaaaaaaaaaaagaauu

SEQ ID NO: 25252 - RNA, 1736 nt, Artificial Sequence
  mRNA product Design a-2 (hSL-A64-N5) comprising derived and/or modified sequence from LASV(Z0947-SLE-2011;Clade IV)__AIT17840__GPCmut3 (opt1)
aggagaguccgcucagccagguugcagaagcggcuuagcguguguccuaaucuucucucugcguguagguaggccugugccgcaaacaagcuuaccaugggccagaucgugaccuucuuccaggaggucccccacgugaucgaggaggugaugaacaucguccugaucgcccucagcauccuggccgugcugaaggggcucuacaacuucgcgaccugcggccugguggggcuggucacguuccuccugcugugcggccgcuccugcaccaucagccucuacaaggggguguacgagcugcagacccuggagcucaacauggagacccugaacaugacgaugccgcuguccugcaccaagaacaacagccaccacuacaucauggugggcaacgagaccggccucgagcugacccugacgaacaccuccaucaucaaccacaaguucugcaaccucagcgacgcccacaagaagaaccuguacgaccacgcccugauguccaucaucagcaccuuccaccucuccauccccaacuucaaccaguacgaggccaugagcugcgacuucaacgggggcaagaucuccguccaguacaaccugagccacuccuacgccggggacgcggccaaccacugcggcaccguggccaacggggugcugcagacguucaugcggauggccuggggcggcagcuacaucgcgcucgacuccgggcgcgaccggugggacugcaucaugaccagcuaccaguaccugaucauccagaacaccaccugggaggaccacugccaguucucccgccccagccccaucggcuaccuggggcuccugucccagcggacgcgcgacaucuacaucagccggcgccggcgcggcaccuucaccuggacccugagcgacuccgagggcaaggacacgcccgggggcuacugccucacccgguggaugcugaucgaggccgagcugaagugcuucgggaacaccgccgucgccaagugcaacgagaagcacgacgaggaguucugcgacaugcuccgccuguucgacuucaacaagcaggccauccagcggcugaaggcgccggcccagaugagcauccagcucaucaacaaggccgugaacgcccugaucaacgaccagcugaucaugaagaaccaccuccgcgacaucaugggcauccccuacugcaacuacuccaaguacugcuaccugaaccacaccacgaccgggaagaccagccugcccaagugcugccucguguccaacggcagcuaccugaacgagacccacuucuccgacgacaucgagcagcaggccgacaacaugaucacggagaugcugcagaaggaguacauggagcggcagggcaagaccccgcucgggcuggucgaccuguucguguucagcaccuccuucuaccugaucagcaucuuccuccaccuggugaagauccccacccaccgccacaucgucggcaagcccugccccaagccgcaccggcugaaccacauggggaucugcuccugcggccucuacaagcagcccggggugcccgugaaguggaagcgcugaggacuagucccuguucccagagcccacuuuuuuuucuuuuuuugaaauaaaauagccugucuuucagaucucaaaggcucuuuucagagccaccaaaaaaaaaaaaaaaaaaaaaaaaaaaaaaaaaaaaaaaaaaaaaaaaaaaaaaaaaaaaaaaaagaauu

SEQ ID NO: 25253 - RNA, 1736 nt, Artificial Sequence
  mRNA product Design a-2 (hSL-A64-N5) comprising derived and/or modified sequence from LASV(Josiah;Clade IV)__NP_694870__GPCmut3 (opt4)
aggagaguccgcucagccagguugcagaagcggcuuagcguguguccuaaucuucucucugcguguagguaggccugugccgcaaacaagcuuaccaugggccagaucgugaccuucuuccaggaggugccccacgugaucgaggaggugaugaacaucgugcugaucgcccugagcgugcuggccgugcugaagggccuguacaacuucgccaccugcggccuggugggccuggugaccuuccugcugcugugcggcagaagcugcaccaccagccuguacaagggcguguacgagcugcagacccuggagcugaacauggagacccugaacaugaccaugccccugagcugcaccaagaacaacagccaccacuacaucauggugggcaacgagaccggccuggagcugacccugaccaacaccagcaucaucaaccacaaguucugcaaccugagcgacgcccacaagaagaaccuguacgaccacgcccugaugagcaucaucagcaccuuccaccugagcauccccaacuucaaccaguacgaggccaugagcugcgacuucaacggcggcaagaucagcgugcaguacaaccugagccacagcuacgccggcgacgccgccaaccacugcggcaccguggccaacggcgugcugcagaccuucaugagaauggccuggggcggcagcuacaucgcccuggacagcggcagaggcaacugggacugcaucaugaccagcuaccaguaccugaucauccagaacaccaccugggaggaccacugccaguucagcagacccagccccaucggcuaccugggccugcugagccagagaaccagagacaucuacaucagcagaagaagaagaggcaccuucaccuggacccugagcgacagcgagggcaaggacacccccggcggcuacugccugaccagauggaugcugaucgaggccgagcugaagugcuucggcaacaccgccguggccaagugcaacgagaagcacgacgaggaguucugcgacaugcugagacuguucgacuucaacaagcaggccauccagagacugaaggcccccgcccagaugagcauccagcugaucaacaaggccgugaacgcccugaucaacgaccagcugaucaugaagaaccaccugagagacaucaugggcauccccuacugcaacuacagcaaguacugcuaccugaaccacaccaccaccggcagaaccagccugcccaagugcugccuggugagcaacggcagcuaccugaacgagacccacuucagcgacgacaucgagcagcaggccgacaacaugaucaccgagaugcugcagaaggaguacauggagagacagggcaagaccccccugggccugguggaccuguucguguucagcaccagcuucuaccugaucagcaucuuccugcaccuggugaagauccccacccacagacacaucgugggcaagagcugccccaagccccacagacugaaccacaugggcaucugcagcugcggccuguacaagcagcccggcgugcccgugaaguggaagagaugaggacuagucccuguucccagagcccacuuuuuuuucuuuuuuugaaauaaaauagccugucuuucagaucucaaaggcucuuuucagagccaccaaaaaaaaaaaaaaaaaaaaaaaaaaaaaaaaaaaaaaaaaaaaaaaaaaaaaaaaaaaaaaaaagaauu

SEQ ID NO: 25254 - RNA, 1733 nt, Artificial Sequence
  mRNA product Design a-2 (hSL-A64-N5) comprising derived and/or modified sequence from LASV(LP;Clade I)__AAF86701__GPCmut3 (opt4)
aggagaguccgcucagccagguugcagaagcggcuuagcguguguccuaaucuucucucugcguguagguaggccugugccgcaaacaagcuuaccaugggccagaucaucaccuucuuccaggaggugccccacgugaucgaggaggugaugaacaucgugcugaucgcccugagccugcuggccauccugaagggccuguacaacaucgccaccugcggcaucaucggccugguggccuuccuguuccugugcggcaagagcugcagccugacccugaagggcggcuacgagcugcagacccuggagcugaacauggagacccugaacaugaccaugccccugagcugcaccaagaacagcagccaccacuacaucagagugggcaacgagaccggccuggagcugacccugaccaacaccagcaucaucaaccacaaguucugcaaccugagcgacgcccacaagaagaaccuguacgaccacgcccugaugagcaucaucagcaccuuccaccugagcauccccaacuucaaccaguacgaggccaugagcugcgacuucaacggcggcaagaucagcgugcaguacaaccugagccacagcuacgccggcgacgccgccgagcacugcggcaccguggccaacggcgugcugcagaccuucaugagaauggccuggggcggcagauacaucgcccuggacagcggcaagggcaacugggacugcaucaugaccagcuaccaguaccugaucauccagaacaccaccugggaggaccacugccaguucagcagacccagccccaucggcuaccugggccugcugagccagagaaccagagacaucuacaucagcagaagaagaagaggcaccuucaccuggacccugagcgacagcgagggcaacgagacccccggcggcuacugccugaccagauggaugcugaucgaggccgagcugaagugcuucggcaacaccgccguggccaagugcaacgagaagcacgacgaggaguucugcgacaugcugagacuguucgacuucaacaagcaggccaucagaagacugaaggcccccgcccagaugagcauccagcugaucaacaaggccgugaacgcccugaucaacgaccagcugaucaugaagaaccaccugagagacaucaugggcauccccuacugcaacuacagcaaguacugcuaccugaaccacaccagcagcggcagaaccagccugcccaagugcugccugaucagcaacggcagcuaccugaacgagacccaguucagcgacgacaucgagcagcaggccgacaacaugaucaccgagaugcugcagaaggaguacaucgagagacagggcaagaccccccugggccugguggacaucuucaucuucagcaccagcuucuaccugaucagcaucuuccugcaccugaucaagauccccacccacagacacaucgugggcaagcccugccccaagccccacagacugaaccacaugggcgugugcagcugcggccuguacaagcaccccggcgugcccaccaaguggaagagaugaggacuagucccuguucccagagcccacuuuuuuuucuuuuuuugaaauaaaauagccugucuuucagaucucaaaggcucuuuucagagccaccaaaaaaaaaaaaaaaaaaaaaaaaaaaaaaaaaaaaaaaaaaaaaaaaaaaaaaaaaaaaaaaaagaauu

SEQ ID NO: 25255 - RNA, 1733 nt, Artificial Sequence
  mRNA product Design a-2 (hSL-A64-N5) comprising derived and/or modified sequence from LASV(803213;Clade II)__AAF86703__GPCmut3 (opt4)
aggagaguccgcucagccagguugcagaagcggcuuagcguguguccuaaucuucucucugcguguagguaggccugugccgcaaacaagcuuaccaugggccagaucaucaccuucuuccaggaggugccccacgugaucgaggaggugaugaacaucgugcugaucgcccugagccugcuggccauccugaagggcaucuacaacguggccaccugcggccuguucggccugaucagcuuccugcugcugugcggcagaagcugcagcgugaccuacaagggcguguacgagcugcagacccuggagcugaacauggccaaccugaacaugaccaugccccugagcugcaccaagaacaacagccaccacuacaucauggugggcaacgagaccggccuggagcugacccugaccaacaccagcaucaucaaccacaaguucugcaaccugagcgacgcccacaagaagaaccuguacgaccacgcccugaugagcaucaucagcaccuuccaccugagcauccccaacuucaaccaguacgaggccaugagcugcgacuucaacggcggcaagaucagcgugcaguacaaccugagccacagcuucgccguggacgccgccaaccacugcggcaccaucgccaacggcgugcugcagaccuucaugagaauggccuggggcggcagcuacaucgcccuggacagcggcaagggcaacugggacugcaucaugaccagcuaccaguaccugaucauccagaacaccaccugggaggaccacugccaguucagcagacccagccccaucggcuaccugggccugcugagccagagaaccagagacaucuacaucagcagaagaagaagaggcaccuucaccuggacccugagcgacagcgagggcaacgaggcccccggcggcuacugccugaccagauggaugcugaucgaggccgagcugaagugcuucggcaacaccgccguggccaagugcaacgagaagcacgacgaggaguucugcgacaugcugagacuguucgacuucaacaagcaggccaucaagagacugaagacccccgcccagaugagcauccagcugaucaacaaggccgugaacgcccugaucaacgaccagcugaucaugaagaaccaccugagagacaucaugggcauccccuacugcaacuacagcagauacugcuaccugaaccacaccgugaccggcaagaccagccugcccagaugcugccuggugagcaacggcagcuaccugaacgagacccacuucagcgacgacaucgagcagcaggccgacaacaugaucaccgagaugcugcagaaggaguacauggacagacagggcaagaccccccugggccugguggaccuguucguguucagcaccagcuucuaccugaucagcaucuuccugcaccuggugaagauccccacccacagacacaucgugggcaagcccugccccaagccccacagacugaaccacaugggcaucugcagcugcggccuguacaagcaccccggcgugcccgugaaguggaagagaugaggacuagucccuguucccagagcccacuuuuuuuucuuuuuuugaaauaaaauagccugucuuucagaucucaaaggcucuuuucagagccaccaaaaaaaaaaaaaaaaaaaaaaaaaaaaaaaaaaaaaaaaaaaaaaaaaaaaaaaaaaaaaaaaagaauu

SEQ ID NO: 25256 - RNA, 1733 nt, Artificial Sequence
  mRNA product Design a-2 (hSL-A64-N5) comprising derived and/or modified sequence from LASV(GA391;Clade III)__CAA36645__GPCmut3 (opt4)
aggagaguccgcucagccagguugcagaagcggcuuagcguguguccuaaucuucucucugcguguagguaggccugugccgcaaacaagcuuaccaugggccagaucgugaccuucuuccaggaggugccccacgugaucgaggaggugaugaacaucgugcugaucgcccugagcauccuggccauccugaagggccuguacaacguggccaccugcggccugaucggccuggugaccuuccugcugcugagcggcagaagcugcagccugaucuacaagggcaccuacgagcugcagacccuggagcugaacauggagacccugaacaugaccaugccccugagcugcaccaagaacaacagccaccacuacaucagagugggcaacgagaccggccuggagcugacccugaccaacaccagcauccugaaccacaaguucugcaaccugagcgacgcccacaagagaaaccuguacgaccacagccugaugagcaucaucagcaccuuccaccugagcauccccaacuucaaccaguacgaggccaugagcugcgacuucaacggcggcaagaucaccgugcaguacaaccugagccacagcuucgccguggacgccgccggccacugcggcacccuggccaacggcgugcugcagaccuucaugagaauggccuggggcggcagcuacaucgcccuggacagcggcagaggcaacugggacugcaucaugaccagcuaccaguaccugaucauccagaacaccaccugggacgaccacugccaguucagcagacccagccccaucggcuaccugggccugcugagccagagaaccagagacaucuacaucagcagaagaagaagaggcaccuucaccuggacccugagcgacagcgagggcaacgagacccccggcggcuacugccugaccagauggaugcugaucgaggccgagcugaagugcuucggcaacaccgccguggccaagugcaacgagaagcacgacgaggaguucugcgacaugcugagacuguucgacuucaacaagcaggccaucagaagacugaagacccccgcccagaugagcauccagcugaucaacaaggccgugaacgcccugaucaacgaccagcugaucaugaagaaccaccugagagacaucaugggcauccccuacugcaacuacagcagauacugcuaccugaaccacaccagcaccggcaagaccagccugcccagaugcugccugaucagcaacggcagcuaccugaacgagaccaaguucagcgacgacaucgagcagcaggccgacaacaugaucaccgagaugcugcagaaggaguacaucgacagacagggcaagaccccccugggccugguggaccuguucguguucagcaccagcuucuaccugaucagcaucuuccugcaccuggugaagauccccacccacagacacaucgugggcaagcccugccccaagccccacagacugaaccacaugggcaucugcagcugcggccuguacaagcagcccggcgugcccgugagauggaagagaugaggacuagucccuguucccagagcccacuuuuuuuucuuuuuuugaaauaaaauagccugucuuucagaucucaaaggcucuuuucagagccaccaaaaaaaaaaaaaaaaaaaaaaaaaaaaaaaaaaaaaaaaaaaaaaaaaaaaaaaaaaaaaaaaagaauu

SEQ ID NO: 25257 - RNA, 1736 nt, Artificial Sequence
  mRNA product Design a-2 (hSL-A64-N5) comprising derived and/or modified sequence from LASV(AV;Clade V)__CCA30314__GPCmut3 (opt4)
aggagaguccgcucagccagguugcagaagcggcuuagcguguguccuaaucuucucucugcguguagguaggccugugccgcaaacaagcuuaccaugggccagaucgugaccuucuuccaggaggugccccacgugaucgaggaggugaugaacaucgugcugaucgcccugagcauccuggccgugcugaagggccuguacaacaucgccaccugcggccugaucggccugaucaccuuccugcugcugugcggcagaagcugcagcagcaaccuguacaagggcguguacgagcugcagagccuggaccugaacauggagacccugaacaugaccaugccccugagcugcaccaagaacaacagccaccacuacaucagagugggcaacgacaccggccuggagcugacccugaccaacaccagcauccugaaccacaaguucugcaaccugagcgacgcccacaagaaggaccuguacgaccacgcccugaugagcaucaucagcaccuuccaccugagcauccccaacuucaaccaguacgaggccaugagcugcgacuucaacggcggcaagaucagcgugcaguacaaccugagccacagcuacgccaucgacgccgccaaccacugcggcaccguggccaacggcauccugcagaccuucaugagaauggccuggggcggcagcuacaucgcccuggacagcggcagaggcaacugggacugcaucaugaccagcuaccaguaccugaucauccagaacaccaccugggagaaccacugccaguucagcagacccagccccaucggcuaccugggccugcugagccagagaaccagagacaucuacaucagcagaagaagaagaggcaccuucaccuggacccugagcgacagcgagggcaacgccacccccggcggcuacugccugaccagauggaugcugaucgaggccgagcugaagugcuucggcaacaccgccguggccaagugcaacgagaagcacgacgaggaguucugcgacaugcugagacuguucgacuucaacaagcaggccaucagcagacugaagagccccgcccagaugagcauccagcugaucaacaaggccgugaacgcccugaucaacgaccagcugaucaugaagaaccaccugagagacaucaugggcauccccuacugcaacuacagcaaguacugcuaccugaaccacaccaucaccggcaagaccagccugcccaagugcugccuggugagcaacggcagcuaccugaacgagacccacuucagcgacgacaucgagcagcaggccgacaacaugaucaccgagaugcugcagaaggaguacauggagagacagggcaagaccccccugggccugguggaccuguucguguucagcaccagcuucuaccugaucagcaucuuccugagacuggugaagauccccacccacagacacaucgugggcaagcccugccccaagccccacagacugaaccacaugggcaucugcagcugcggccuguacaagcagcccggcgugcccgugagauggaagagaugaggacuagucccuguucccagagcccacuuuuuuuucuuuuuuugaaauaaaauagccugucuuucagaucucaaaggcucuuuucagagccaccaaaaaaaaaaaaaaaaaaaaaaaaaaaaaaaaaaaaaaaaaaaaaaaaaaaaaaaaaaaaaaaaagaauu

SEQ ID NO: 25258 - RNA, 1733 nt, Artificial Sequence
  mRNA product Design a-2 (hSL-A64-N5) comprising derived and/or modified sequence from LASV(Togo/2016/7082;Clade VI)__AMR44577__GPCmut3 (opt4)
aggagaguccgcucagccagguugcagaagcggcuuagcguguguccuaaucuucucucugcguguagguaggccugugccgcaaacaagcuuaccaugggccagaucaucaccuucuuccaggaggugccccacgugaucgaggaggugaugaacaucgugcugaucgcccugagccugcuggccauccugaagggcguguacaacguggccaccugcggcaucaucggccuggugaccuuccuguuccugugcggcagaagcugcagccugaucuacaagggcagcuacgagcugcagacccuggagcugaacauggagacccugaacaugaccaugccccugagcugcaccaagaacagcagccaccacuacaucagagugggcaacgagaccggccuggagcugacccugaccaacaccagcaucaucaaccacaaguucugcaaccugagcgacgcccacaagagaaaccuguacgaccacgcccugaugagcauccugagcaccuuccaccugagcauccccaacuucaaccaguacgaggccaugagcugcgacuucaacggcggcaagaucagcgugcaguacaaccugagccacgccuacgccguggacgccgccgagcacugcggcaccguggccaacggcgugcugcagaccuucaugagaauggccuggggcggcagcuacaucgcccuggacagcggcagaggcaacugggacugcaucaugaccagcuaccaguaccugaucauccagaacaccaccugggaggaccacugccaguucagcagacccagccccaucggcuaccugggccugcugagccagagaaccagagacaucuacaucagcagaagaagaagaggcaccuucaccuggacccugagcgacagcgagggcaacgagacccccggcggcuacugccugaccagauggaugcugaucgaggccgagcugaagugcuucggcaacaccgccguggccaagugcaacgagaagcacgacgaggaguucugcgacaugcugagacuguucgacuucaacaagcaggccauccagagacugaagagccccgcccagaugagcauccagcugaucaacaaggccgugaacgcccugaucaacgaccagcugaucaugaagaaccaccugagagacaugaugggcauccccuacugcaacuacagcaaguacugcuaccugaaccacaccagcagcggcagaaccagccugcccaagugcugccuggugagcaacggcagcuaccugaacgagacccacuucagcgacgacaucgagcagcaggccgacaacaugaucaccgagaugcugcagaaggaguacaucgacagacagggcaagaccccccugggccugguggaccuguucguguucagcaccagcuucuaccugaucagcaucuuccugcaccugaucaagauccccacccacagacacaucgugggcaagcccugccccaagccccacagacugaaccacaugggcaucugcagcugcggccuguacaagcagcccggcgugcccaccagauggaagagaugaggacuagucccuguucccagagcccacuuuuuuuucuuuuuuugaaauaaaauagccugucuuucagaucucaaaggcucuuuucagagccaccaaaaaaaaaaaaaaaaaaaaaaaaaaaaaaaaaaaaaaaaaaaaaaaaaaaaaaaaaaaaaaaaagaauu

SEQ ID NO: 25259 - RNA, 1733 nt, Artificial Sequence
  mRNA product Design a-2 (hSL-A64-N5) comprising derived and/or modified sequence from LASV(KAK-428;Clade n.d. (VII))__ANH09740__GPCmut3 (opt4)
aggagaguccgcucagccagguugcagaagcggcuuagcguguguccuaaucuucucucugcguguagguaggccugugccgcaaacaagcuuaccaugggccagaucgugaccuucuuccaggaggugccccacgugaucgaggaggugaugaacaucgugcugaucgcccugagccugcuggccauccugaagggccuguacaacuucgccaccugcggcgugaucggccugaucaccuuccugcugcugugcggcagaagcugcagcgccaccuacaagggccaguacgagcugcagacccuggagcugaacauggagagccugaacaugaccaugccccugagcugcaccaagaacaacagccaccacuacaucagagccggcaacaacaccggccuggagcugacccugaccaacaccagcaucaucagccacaaguucugcaaccugagcgacgcccacaagaagaaccuguacgaccacacccugaugagcaucaucaccaccuuccaccugagcauccccaacuucaaccaguacgaggccaugagcugcgacuucaacggcggcaagaucagcauccaguacaaccugagccacagcuacgccggcgacgccgcccagcacugcggcaccguggccaacggcgugcugcagaccuucaugagaauggccuggggcggcagcuaccuggcccuggacagcggcagaagaggcugggacugcaucaucagcagcuaccaguaccugaucauccagaacaccaccugggacgaccacugccaguucagcagacccagccccaucggcuaccugggcuucgugagccagaagaccagagacaucuacaucagcagaagaagaagaggcaccuucaccuggacccugagcgacagcgagggccacgacaugcccggcggcuacugccugaccagauggaugcugaucgaggccgaccugaagugcuucggcaacaccgccguggccaagugcaacgagaagcacgacgaggaguucugcgacauguggagacuguucgacuucaacaagcaggccauccagagacugaaggcccccgcccagaugaacauccagcugaucaacaaggccgugaacgcccugaucaacgaccagcugaugaugaagaaccaccugagagacaucaugggcauccccuacugcaacuacagcaaguucugcuaccugaacaacaccaccaccggcagaaccagccugcccagaugcugccugaucagcaacggcagcuaccugaacgagacccacuucagcgacgacaucgagcagcaggccgacaacaugaucaccgagaugcugcagaaggaguacauggacagacagggcaagaccccccugggccugguggaccuguucguguucagcaccagcuucuaccugaucaccaucuuccugcaccuggugaagauccccacccacagacacaucgugggcaagcccugccccaagccccacagacugaaccacaugggcaucugcagcugcggccuguacaagcagcccggcgugcccgugagauggaagagaugaggacuagucccuguucccagagcccacuuuuuuuucuuuuuuugaaauaaaauagccugucuuucagaucucaaaggcucuuuucagagccaccaaaaaaaaaaaaaaaaaaaaaaaaaaaaaaaaaaaaaaaaaaaaaaaaaaaaaaaaaaaaaaaaagaauu

SEQ ID NO: 25260 - RNA, 1733 nt, Artificial Sequence; identical to SEQ ID NO: 25254
  mRNA product Design a-2 (hSL-A64-N5) comprising derived and/or modified sequence from LASV(Pinneo-NIG-1969;Clade I)__AIT17836__GPCmut3 (opt4)

SEQ ID NO: 25261 - RNA, 1733 nt, Artificial Sequence
  mRNA product Design a-2 (hSL-A64-N5) comprising derived and/or modified sequence from LASV(ISTH0009-NIG-2011;Clade II)__AIT17404__GPCmut3 (opt4)
aggagaguccgcucagccagguugcagaagcggcuuagcguguguccuaaucuucucucugcguguagguaggccugugccgcaaacaagcuuaccaugggccagaucaucaccuucuuccaggaggugccccacgugaucgaggaggugaugaacaucgugcugaucgcccugagccugcuggccauccugaagggcaucuacaacguggccaccugcggccuguucggccuggugagcuuccugcugcugugcggcagaagcugcagcaccaccuacaagggcguguacgagcugcagacccuggagcuggacauggccagccugaacaugaccaugccccugagcugcaccaagaacaacagccaccacuacaucauggugggcaacgagaccggccuggagcugacccugaccaacaccagcaucaucaaccacaaguucugcaaccugagcgacgcccacaagaagaaccuguacgaccacgcccugaugagcaucaucagcaccuuccaccugagcauccccaacuucaaccaguacgaggccaugagcugcgacuucaacggcggcaagaucagcgugcaguacaaccugagccacgccuacgccguggacgccgccaaccacugcggcaccaucgccaacggcgugcugcagaccuucaugagaauggccuggggcggcagcuacaucgcccuggacagcggcaagggcagcugggacugcaucaugaccagcuaccaguaccugaucauccagaacaccaccugggaggaccacugccaguucagcagacccagccccaucggcuaccugggccugcugagccagagaaccagagacaucuacaucagcagaagaagaagaggcaccuucaccuggacccugagcgacagcgagggcaacgagacccccggcggcuacugccugaccagauggaugcugaucgaggccgagcugaagugcuucggcaacaccgccguggccaagugcaacgagaagcacgacgaggaguucugcgacaugcugagacuguucgacuucaacaagcaggccaucagaagacugaagacccccgcccagaugagcauccagcugaucaacaaggccgugaacgcccugaucaacgaccagcugaucaugaagaaccaccugagagacaucaugggcauccccuacugcaacuacagcaaguacugcuaccugaaccacaccgugaccggcaagaccagccugcccagaugcugccuggugagcaacggcagcuaccugaacgagacccacuucagcgacgacaucgagcagcaggccgacaacaugaucaccgagcugcugcagaaggaguacauggacagacagggcaagaccccccugggccugguggaccuguucguguucagcaccagcuucuaccugaucagcaucuuccugcaccugaucaagauccccacccacagacacaucaccggcaagcccugccccaagccccacagacugaaccacaugggcaucugcagcugcggccuguacaagcaccccggcgugcccgugaaguggaagagaugaggacuagucccuguucccagagcccacuuuuuuuucuuuuuuugaaauaaaauagccugucuuucagaucucaaaggcucuuuucagagccaccaaaaaaaaaaaaaaaaaaaaaaaaaaaaaaaaaaaaaaaaaaaaaaaaaaaaaaaaaaaaaaaaagaauu

SEQ ID NO: 25262 - RNA, 1733 nt, Artificial Sequence
  mRNA product Design a-2 (hSL-A64-N5) comprising derived and/or modified sequence from LASV(ISTH2010-NIG-2012;Clade II)__AIT17482__GPCmut3 (opt4)
aggagaguccgcucagccagguugcagaagcggcuuagcguguguccuaaucuucucucugcguguagguaggccugugccgcaaacaagcuuaccaugggccagaucaucaccuucuuccaggaggugccccacgugaucgaggaggugaugaacaucgugcugaucgcccugagccugcuggccauccugaagggcaucuacaacguggccaccugcggccuguucggccuggugagcuuccugcugcugugcggcagaagcugcagcaccaccuacaagggcguguacgagcugcagacccuggagcuggacauggccagccugaacaugaccaugccccugagcugcaccaagaacaacagccaccacuacaucauggugggcaacgagaccggccuggagcugacccugaccaacaccagcaucaucaaccacaaguucugcaaccugagcgacgcccacaagaagaaccuguacgaccacgcccugaugagcaucaucagcaccuuccaccugagcauccccaacuucaaccaguacgaggccaugagcugcgacuucaacggcggcaagaucagcgugcaguacaaccugagccacgccuacgccguggacgccgccaaccacugcggcaccaucgccaacggcgugcugcagaccuucaugagaauggccuggggcggcagcuacaucgcccuggacagcggcaagggcagcugggacugcaucaugaccagcuaccaguaccugaucauccagaacaucaccugggaggaccacugccaguucagcagacccagccccaucggcuaccugggccugcugagccagagaaccagagacaucuacaucagcagaagaagaagaggcaccuucaccuggacccugagcgacagcgagggcaacgagacccccggcggcuacugccugaccagauggaugcugaucgaggccgagcugaagugcuucggcaacaccgccguggccaagugcaacgagaagcacgacgaggaguucugcgacaugcugagacuguucgacuucaacaagcaggccaucagaagacugaagacccccgcccagaugagcauccagcugaucaacaaggccgugaacgcccugaucaacgaccagcugaucaugaagaaccaccugagagacaucaugggcauccccuacugcaacuacagcaaguacugcuaccugaaccacaccgugaccggcaagaccagccugcccagaugcugccuggugagcaacggcagcuaccugaacgagacccacuucagcgacgacaucgagcagcaggccgacaacaugaucaccgagcugcugcagaaggaguacaucgacagacagggcaagaccccccugggccugguggaccuguucguguucagcaccagcuucuaccugaucagcaucuuccugcaccuggugaagauccccacccacagacacguggugggcaagcccugccccaagccccacagacugaaccacaugggcaucugcagcugcggccuguacaagcaccccggcgugcccgugaaguggaagagaugaggacuagucccuguucccagagcccacuuuuuuuucuuuuuuugaaauaaaauagccugucuuucagaucucaaaggcucuuuucagagccaccaaaaaaaaaaaaaaaaaaaaaaaaaaaaaaaaaaaaaaaaaaaaaaaaaaaaaaaaaaaaaaaaagaauu

SEQ ID NO: 25263 - RNA, 1733 nt, Artificial Sequence
  mRNA product Design a-2 (hSL-A64-N5) comprising derived and/or modified sequence from LASV(Lassa virus/H.sapiens-wt/NGA/2015/ISTH_0543;Clade II)__AVO03639__GPCmut3 (opt4)
aggagaguccgcucagccagguugcagaagcggcuuagcguguguccuaaucuucucucugcguguagguaggccugugccgcaaacaagcuuaccaugggccagaucaucaccuucuuccaggaggugccccacgugaucgaggaggugaugaacaucgugcugaucgcccugagccugcuggccauccugaagggcaucuacaacguggccaccugcggccuguucggccuggugagcuuccugcugcugugcggcagaagcugcagcaccaccuacaagggcguguacgagcugcagacccuggagcuggacauggccaaccugaacaugaccaugccccugagcugcaccaagaacaacagccaccacuacaucauggugggcaacgagaccggccuggagcugacccugaccaacaccagcaucaucaaccacaaguucugcaaccugagcgacgcccacaagaagaaccuguacgaccacgcccugaugagcaucaucagcaccuuccaccugagcauccccaacuucaaccaguacgaggccaugagcugcgacuucaacggcggcaagaucagcgugcaguacaaccugagccacaccuacgccguggacgccgccaaccacugcggcaccaucgccaacggcgugcugcagaccuucaugagaauggccuggggcggcagcuacaucgcccuggacagcggcaagggcagcugggacugcaucaugaccagcuaccaguaccuggugauccagaacaccaccugggaggaccacugccaguucagcagacccagccccaucggcuaccugggccugcugagccagagaaccagagacaucuacaucagcagaagaagaagaggcaccuucaccuggacccugagcgacagcgagggcaacgagacccccggcggcuacugccugaccagauggaugcugaucgaggccgagcugaagugcuucggcaacaccgccguggccaagugcaacgagaagcacgacgaggaguucugcgacaugcugagacuguucgacuucaacaagcaggccaucagaagacugaagacccccgcccagaugagcauccagcugaucaacaaggccgugaacgcccugaucaacgaccagcugaucaugaagaaccaccugagagacaucaugggcauccccuacugcaacuacagcaaguacugcuaccugaaccacaccgugaccggcaagaccagccugcccagaugcugccuggugagcaacggcagcuaccugaacgagacccacuucagcgacgacaucgagcagcaggccgacaacaugaucaccgagcugcugcagaaggaguacaucgacagacagggcaagaccccccugggccugguggaccuguucguguucagcaccagcuucuaccugaucagcaucuuccugcaccuggugaagauccccacccacagacacaucaccggcaagcccugccccaagccccacagacugaaccacaugggcaucugcagcugcggccuguacaagcaccccggcgugcccgugaaguggaagagaugaggacuagucccuguucccagagcccacuuuuuuuucuuuuuuugaaauaaaauagccugucuuucagaucucaaaggcucuuuucagagccaccaaaaaaaaaaaaaaaaaaaaaaaaaaaaaaaaaaaaaaaaaaaaaaaaaaaaaaaaaaaaaaaaagaauu

SEQ ID NO: 25264 - RNA, 1733 nt, Artificial Sequence
  mRNA product Design a-2 (hSL-A64-N5) comprising derived and/or modified sequence from LASV(Lassa virus/H.sapiens-wt/NGA/2016/ISTH_0009;Clade II)__AVO03571__GPCmut3 (opt4)
aggagaguccgcucagccagguugcagaagcggcuuagcguguguccuaaucuucucucugcguguagguaggccugugccgcaaacaagcuuaccaugggccagaucaucaccuucuuccaggaggugccccacgugaucgaggaggugaugaacaucgugcugaucgcccugagccugcuggccauccugaagggcaucuacaacguggccaccugcggccugcugggccuggugagcuuccugcugcugugcggcagaagcugcagcaccaccuacaagggcguguacgagcugcagacccuggagcuggacauggccagccugaacaugaccaugccccugagcugcaccaagaacaacagccaccacuacaucauggugggcaacgagaccggccuggagcugacccugaccaacaccagcaucaucaaccacaaguucugcaaccugagcgacgcccacaagaagaaccuguacgaccacgcccugaugagcaucaucagcaccuuccaccugagcauccccaacuucaaccaguacgaggccaugagcugcgacuucaacggcggcagaaucagcgugcaguacaaccugagccacagcuacgccguggacgccgccaaccacugcggcaccaucgccaacggcgugcugcagaccuucaugagaauggccuggggcggcagcuacaucgcccuggacagcggcaagggcagcugggacugcaucaugaccagcuaccaguaccugaucauccagaacaccaccugggaggaccacugccaguucagcagacccagccccaucggcuaccugggccugcugagccagagaaccagagacaucuacaucagcagaagaagaagaggcaccuucaccuggacccugagcgacagcgagggcaacgagacccccggcggcuacugccugaccagauggaugcugaucgaggccgagcugaagugcuucggcaacaccgccguggccaagugcaacgagaagcacgacgaggaguucugcgacaugcugagacuguucgacuucaacaagcaggccaucagaagacugaagacccccgcccagaugagcauccagcugaucaacaaggccgugaacgcccugaucaacgaccagcugaucaugaagaaccaccugagagacaucaugggcauccccuacugcaacuacagcaaguacugcuaccugaaccacaccgugaccggcaagaccagccugcccagaugcugccuggugagcaacggcagcuaccugaacgagacccacuucagcgacgacaucgagcagcaggccgacaacaugaucaccgagcugcugcagaaggaguacaucgacagacagggcaagaccccccugggccugguggaccuguucguguucagcaccagcuucuaccugaucagcaucuuccugcaccuggugaagauccccacccacagacacaucaccggcaagcccugccccaagccccacagacugaaccacaugggcaucugcagcugcggccuguacaaccaccccggcgugcccgugaaguggaagagaugaggacuagucccuguucccagagcccacuuuuuuuucuuuuuuugaaauaaaauagccugucuuucagaucucaaaggcucuuuucagagccaccaaaaaaaaaaaaaaaaaaaaaaaaaaaaaaaaaaaaaaaaaaaaaaaaaaaaaaaaaaaaaaaaagaauu

SEQ ID NO: 25265 - RNA, 1733 nt, Artificial Sequence
  mRNA product Design a-2 (hSL-A64-N5) comprising derived and/or modified sequence from LASV(Lassa virus/H.sapiens-wt/NGA/2016/ISTH_0017;Clade II)__AVO03567__GPCmut3 (opt4)
aggagaguccgcucagccagguugcagaagcggcuuagcguguguccuaaucuucucucugcguguagguaggccugugccgcaaacaagcuuaccaugggccagaucaucaccuucuuccaggaggugccccacgugaucgaggaggugaugaacaucgugcugaucgcccugagccugcuggccauccugaagggcaucuacaacguggccaccugcggccuguucggccuggugagcuuccugcugcugugcggcagaagcugcagcaccaccuacaagggcguguacgagcugcagacccuggagcuggacauggccagccugaacaugaccaugccccugagcugcaccaagaacaacagccaccacuacaucauggugggcaacgagaccggccuggagcugacccugaccaacaccagcaucaucaaccacaaguucugcaaccugagcgacgcccacaagaagaaccuguacgaccacgcccugaugagcaucaucagcaccuuccaccugagcauccccaacuucaaccaguacgaggccaugagcugcgacuucaacggcggcaagaucagcgugcaguacaaccugagccacaccuacgccaucgacgccgccaaccacugcggcaccaucgccaacggcgugcugcagaccuucaugagaauggccuggggcggcagcuacaucgcccuggacagcggcaagggcagcugggacugcaucaugaccagcuaccaguaccugaucauccagaacaccaccugggaggaccacugccaguucagcagacccagccccaucggcuaccugggccugcugagccagagaaccagagacaucuacaucagcagaagaagaagaggcaccuucaccuggacccugagcgacagcgagggcaacgagacccccggcggcuacugccugaccagauggaugcugaucgaggccgagcugaagugcuucggcaacaccgccguggccaagugcaacgagaagcacgacgaggaguucugcgacaugcugagacuguucgacuucaacaagcaggccaucagaagacugaagacccccgcccagaugagcauccagcugaucaacaaggccgugaacgcccugaucaacgaccagcugaucaugaagaaccaccugagagacaucaugggcauccccuacugcaacuacagcaaguacugcuaccugaaccacaccgugaccggcaagaccagccugcccagaugcugccuggugagcaacggcagcuaccugaacgagacccacuucagcgacgacaucgagcagcaggccgacaacaugaucaccgagcugcugcagaaggaguacauggacagacagggcaagaccccccugggccugguggaccuguucguguucagcaccagcuucuaccugaucagcaucuuccugcaccuggugagaauccccacccacagacacgugaucggcaagcccugccccaagccccacagacugaaccacaugggcaucugcagcugcggccuguacaagcaccccggcgugcccgugaaguggaagagaugaggacuagucccuguucccagagcccacuuuuuuuucuuuuuuugaaauaaaauagccugucuuucagaucucaaaggcucuuuucagagccaccaaaaaaaaaaaaaaaaaaaaaaaaaaaaaaaaaaaaaaaaaaaaaaaaaaaaaaaaaaaaaaaaagaauu

SEQ ID NO: 25266 - RNA, 1733 nt, Artificial Sequence
  mRNA product Design a-2 (hSL-A64-N5) comprising derived and/or modified sequence from LASV(Lassa virus/H.sapiens-wt/NGA/2018/ISTH_0959;Clade II)__AVV65099__GPCmut3 (opt4)
aggagaguccgcucagccagguugcagaagcggcuuagcguguguccuaaucuucucucugcguguagguaggccugugccgcaaacaagcuuaccaugggccagaucaucaccuucuuccaggaggugccccacgugaucgaggaggugaugaacaucgugcugaucgcccugagccugcuggccauccugaagggcaucuacaacguggugaccugcggccuguucggccuggugagcuuccugcugcugugcggcagaagcugcagcaccaccuacaagggcguguacgagcugcagacccuggagcuggacauggccagccugaacaugaccaugccccugagcugcaccaagaacaacagccaccacuacaucauggugggcaacgagaccggccuggagcugacccugaccaacaccagcaucaucaaccacaaguucugcaaccugagcgacgcccacaagaagaaccuguacgaccacgcccugaugagcaucaucagcaccuuccaccugagcauccccaacuucaaccaguacgaggccaugagcugcgacuucaacggcggcaagaucagcgugcaguacaaccugagccacgccuacgccaucgacgccgccaaccacugcggcaccaucgccaacggcgugcugcagaccuucaugagaauggccuggggcggcagcuacaucgcccuggacagcggcaagggcagcugggacugcaucaugaccagcuaccaguaccugaucauccagaacaccaccugggaggaccacugccaguucagcagacccagccccaucggcuaccugggccugcugagccagagaaccagagacaucuacaucagcagaagaagaagaggcaccuucaccuggacccugagcgacagcgagggcaacgagacccccggcggcuacugccugaccagauggaugcugaucgaggccgagcugaagugcuucggcaacaccgccguggccaagugcaacgagaagcacgacgaggaguucugcgacaugcugagacuguucgacuucaacaagcaggccaucagaagacugaagacccccgcccagaugagcauccagcugaucaacaaggccgugaacgcccugaucaacgaccagcugaucaugaagaaccaccugagagacaucaugggcauccccuacugcaacuacagcaaguacugcuaccugaaccacaccgugaccggcaagaccagccugcccagaugcugccuggugagcaacggcagcuaccugaacgagacccacuucagcgacgacaucgagcagcaggccgacaacaugaucaccgagcugcugcagaaggaguacaucgacagacagggcaagaccccccugggccugguggaccuguucguguucagcaccagcuucuaccugaucagcaucuuccugcaccuggugaagauccccacccacagacacgugaucggcaagcccugccccaagccccacagacugaaccacaugggcaucugcagcugcggccuguacaagcaccccggcgugcccgugaaguggaagagaugaggacuagucccuguucccagagcccacuuuuuuuucuuuuuuugaaauaaaauagccugucuuucagaucucaaaggcucuuuucagagccaccaaaaaaaaaaaaaaaaaaaaaaaaaaaaaaaaaaaaaaaaaaaaaaaaaaaaaaaaaaaaaaaaagaauu

SEQ ID NO: 25267 - RNA, 1733 nt, Artificial Sequence
  mRNA product Design a-2 (hSL-A64-N5) comprising derived and/or modified sequence from LASV(LASV003-NIG-2008;Clade II)__AIT17580__GPCmut3 (opt4)
aggagaguccgcucagccagguugcagaagcggcuuagcguguguccuaaucuucucucugcguguagguaggccugugccgcaaacaagcuuaccaugggccagaucaucaccuucuuccaggaggugccccacgugaucgaggaggugaugaacaucgugcugaucgcccugagccugcuggccauccugaagggcaucuacaacguggccaccugcggccuguucggccuggugagcuuccugcugcugugcggcagaagcugcagcaccaccuacaagggcguguacgagcugcagacccuggagcuggacauggccagccugaacaugaccaugccccugagcugcaccaagaacaacagccaccacuacaucauggugggcaacgagaccggccuggagcugacccugaccaacaccagcaucaucaaccacaaguucugcaaccugagcgacgcccacaagaagaaccuguacgaccacgcccugaugagcaucaucagcaccuuccaccugagcauccccaacuucaaccaguacgaggccaugagcugcgacuucaacggcggcaagaucagcgugcaguacaaccugagccacaccuacgccguggacgccgccaaccacugcggcaccaucgccaacggcgugcugcagaccuucaugagaauggccuggggcggcagcuacaucgcccuggacagcggcaagggcagcugggacugcaucaugaccagcuaccaguaccugaucauccagaacaccaccugggaggaccacugccaguucagcagacccagccccaucggcuaccugggccugcugagccagagaaccagagacaucuacaucagcagaagaagaagaggcaccuucaccuggacccugagcgacagcgagagcaacgagacccccggcggcuacugccugaccagauggaugcugaucgaggccgagcugaagugcuucggcaacaccgccguggccaagugcaacgagaagcacgacgaggaguucugcgacaugcugagacuguucgacuucaacaagcaggccaucagaagacugaaggcccccgcccagaugagcauccagcugaucaacaaggccgugaacgcccugaucaacgaccagcugaucaugaagaaccaccugagagacaucaugggcauccccuacugcaacuacagcaaguacugcuaccugaaccacaccgugaccggcagaaccagccugcccagaugcugccuggugagcaacggcagcuaccugaacgagacccacuucagcgacgacaucgagcagcaggccgacaacaugaucaccgagcugcugcagaaggaguacauggacagacagggcaagaccccccugggccugguggaccuguucguguucagcaccagcuucuaccugaucagcaucuuccugcaccuggugaagauccccacccacagacacgugaucggcaagcccugccccaagccccacagacugaaccacaugggcaucugcagcugcggccuguacaagcaccccggcgugcccgugaaguggaagagaugaggacuagucccuguucccagagcccacuuuuuuuucuuuuuuugaaauaaaauagccugucuuucagaucucaaaggcucuuuucagagccaccaaaaaaaaaaaaaaaaaaaaaaaaaaaaaaaaaaaaaaaaaaaaaaaaaaaaaaaaaaaaaaaaagaauu

SEQ ID NO: 25268 - RNA, 1733 nt, Artificial Sequence
  mRNA product Design a-2 (hSL-A64-N5) comprising derived and/or modified sequence from LASV(LASV035-NIG-2009;Clade II)__AIT17588__GPCmut3 (opt4)
aggagaguccgcucagccagguugcagaagcggcuuagcguguguccuaaucuucucucugcguguagguaggccugugccgcaaacaagcuuaccaugggccagaucaucaccuucuuccaggaggugccccacgugaucgaggaggugaugaacaucgugcugaucgcccugagccugcuggccauccugaagggcaucuacaacguggccaccugcggccuguucggccuggugagcuuccugcugcugugcggcagaagcugcagcaccaccuacaagggcguguacgagcugcagacccuggagcuggacauggccagccugaacaugaccaugccccugagcugcaccaagaacaacagccaccacuacaucauggugggcaacgagaccggccuggagcugacccugaccaacaccagcaucaucaaccacaaguucugcaaccugagcgacgcccacaagaagaaccuguacgaccacgcccugaugagcaucaucagcaccuuccaccugagcauccccaacuucaaccaguacgaggccaugagcugcgacuucaacggcggcaagaucagcgugcaguacaaccugagccacgccuacgccguggacgccgccaaccacugcggcaccaucgccaacggcgugcugcagaccuucaugagaauggccuggggcggcagcuacaucgcccuggacagcggcaagggcagcugggacugcaucaugaccagcuaccaguaccugaucauccagaacaccaccugggaggaccacugccaguucagcagacccagccccaucggcuaccugggccugcugagccagagaaccagagacaucuacaucagcagaagaagaagaggcaccuucaccuggacccugagcgacagcgagggcaacgagacccccggcggcuacugccugaccagauggaugcugaucgaggccgagcugaagugcuucggcaacaccgccguggccaagugcaacgagaagcacgacgaggaguucugcgacaugcugagacuguucgacuucaacaagcaggccaucagaagacugaaggcccccgcccagaugagcauccagcugaucaacaaggccgugaacgcccugaucaacgaccagcugaucaugaagaaccaccugagagacaucaugggcauccccuacugcaacuacagcaaguacugcuaccugaaccacaccgugaccggcaagaccagccugcccagaugcugccuggugagcaacggcagcuaccugaacgagacccacuucagcgacgacaucgagcagcaggccgacaacaugaucaccgagcugcugcagaaggaguacaucgacagacagggcaagaccccccugggccugguggaccuguucguguucagcaccagcuucuaccugaucagcaucuuccugcaccuggugaagauccccacccacagacacgugaucggcaagcccugccccaagccccacagacugaaccacaugggcaucugcagcugcggccuguacaagcaccccggcgugcccgugaaguggaagagaugaggacuagucccuguucccagagcccacuuuuuuuucuuuuuuugaaauaaaauagccugucuuucagaucucaaaggcucuuuucagagccaccaaaaaaaaaaaaaaaaaaaaaaaaaaaaaaaaaaaaaaaaaaaaaaaaaaaaaaaaaaaaaaaaagaauu

SEQ ID NO: 25269 - RNA, 1733 nt, Artificial Sequence
  mRNA product Design a-2 (hSL-A64-N5) comprising derived and/or modified sequence from LASV(LASV1000-NIG-2009;Clade II)__AIT17782__GPCmut3 (opt4)
aggagaguccgcucagccagguugcagaagcggcuuagcguguguccuaaucuucucucugcguguagguaggccugugccgcaaacaagcuuaccaugggccagaucaucaccuucuuccaggaggugccccacgugaucgaggaggugaugaacaucgugcugaucgcccugagccugcuggccauccugaagggcaucuacaacguggccaccugcggccuguucggccuggugagcuuccugcugcugugcggcagaagcugcagcaccaccuacaagggcguguacgagcugcagacccuggagcuggacauggccagccugaacaugaccaugccccugagcugcaccaagaacaacagccaccacuacaucauggugggcaacgagaccggccuggagcugacccugaccaacaccagcaucaucaaccacaaguucugcaaccugagcgacgcccacaagaagaaccuguacgaccacgcccugaugagcaucaucagcaccuuccaccugagcauccccaacuucaaccaguacgaggccaugagcugcgacuucaacggcggcaagaucagcgugcaguacaaccugagccacaccuacgccguggacgccgccaaccacugcggcaccaucgccaacggcgugcugcagaccuucaugagaauggccuggggcggcagcuacaucgcccuggacagcggcaagggcagcugggacugcaucaugaccagcuaccaguaccugaucauccagaacaccaccugggaggaccacugccaguucagcagacccagccccaucggcuaccugggccugcugagccagagaaccagagacaucuacaucagcagaagaagaagaggcaccuucaccuggacccugagcgacagcgagggcaacgagacccccggcggcuacugccugaccagauggaugcugaucgaggccgagcugaagugcuucggcaacaccgccguggccaagugcaacgagaagcacgacgaggaguucugcgacaugcugagacuguucgacuucaacaagcaggccaucaagagacugaagacccccgcccagaugagcauccagcugaucaacaaggccgugaacgcccugaucaacgaccagcugaucaugaagaaccaccugagagacaucaugggcauccccuacugcaacuacagcaaguacugcuaccugaaccacaccgugaccggcaagaccagccugcccagaugcugccuggugagcaacggcagcuaccugaacgagacccacuucagcgacgacaucgagcagcaggccgacaacaugaucaccgagcugcugcagaaggaguacaucgacagacagggcaagaccccccugggccugguggaccuguucguguucagcaccagcuucuaccugaucagcaucuuccugcaccuggugaagauccccacccacagacacguggugggcaagcccugccccaagccccacagacugaaccacaugggcaucugcagcugcggccuguacaagcaccccggcgugcccgugaaguggaagagaugaggacuagucccuguucccagagcccacuuuuuuuucuuuuuuugaaauaaaauagccugucuuucagaucucaaaggcucuuuucagagccaccaaaaaaaaaaaaaaaaaaaaaaaaaaaaaaaaaaaaaaaaaaaaaaaaaaaaaaaaaaaaaaaaagaauu

SEQ ID NO: 25270 - RNA, 1733 nt, Artificial Sequence
  mRNA product Design a-2 (hSL-A64-N5) comprising derived and/or modified sequence from LASV(LASV221-NIG-2010;Clade II)__AIT17624__GPCmut3 (opt4)
aggagaguccgcucagccagguugcagaagcggcuuagcguguguccuaaucuucucucugcguguagguaggccugugccgcaaacaagcuuaccaugggccagaucaucaccuucuuccaggaggugccccacgugaucgaggaggugaugaacaucgugcugaucgcccugagccugcuggccauccugaagggcaucuacaacguggccaccugcggccuguucggccuggugagcuuccugcugcugugcggcagaagcugcagcaccaccuacaagggcguguacgagcugcagacccuggagcuggacauggccagccugaacaugaccaugccccugagcugcaccaagaacaacagccaccacuacaucauggugggcaacgagaccggccuggagcugacccugaccaacaccagcaucaucaaccacaaguucugcaaccugagcgacgcccacaagaagaaccuguacgaccacgcccugaugagcaucaucagcaccuuccaccugagcauccccaacuucaaccaguacgaggccaugagcugcgacuucaacggcggcaagaucagcgugcaguacaaccugagccacaccuacgccaucgacgccgccaaccacugcggcaccaucgccaacggcgugcugcagaccuucaugagaauggccuggggcggcagcuacaucgcccuggacagcggcaagggcagcugggacugcaucaugaccagcuaccaguaccugaucauccagaacaccaccugggaggaccacugccaguucagcagacccagccccaucggcuaccugggccugcugagccagagaaccagagacaucuacaucagcagaagaagaagaggcaccuucaccuggacccugagcgacagcgagggcaacgagacccccggcggcuacugccugaccagauggaugcugaucgaggccgagcugaagugcuucggcaacaccgccguggccaagugcaacgagaagcacgacgaggaguucugcgacaugcugagacuguucgacuucaacaagcaggccaucagaagacugaagacccccgcccagaugagcauccagcugaucaacaaggccgugaacgcccugaucaacgaccagcugaucaugaagaaccaccugagagacaucaugggcauccccuacugcaacuacagcaaguacugcuaccugaaccacaccgugaccggcaagaccagccugcccagaugcugccuggugagcaacggcagcuaccugaacgagacccacuucagcgacgacaucgagcagcaggccgacaacaugaucaccgagaugcugcagaaggaguacauggacagacagggcaagaccccccugggccugguggaccuguucguguucagcaccagcuucuaccugaucagcaucuuccugcaccuggugaagauccccacccacagacacgugaucggcaagcccugccccaagccccacagacugaaccacaugggcaucugcagcugcggccuguacaagcaccccggcgugcccgugaaguggaagagaugaggacuagucccuguucccagagcccacuuuuuuuucuuuuuuugaaauaaaauagccugucuuucagaucucaaaggcucuuuucagagccaccaaaaaaaaaaaaaaaaaaaaaaaaaaaaaaaaaaaaaaaaaaaaaaaaaaaaaaaaaaaaaaaaagaauu

SEQ ID NO: 25271 - RNA, 1733 nt, Artificial Sequence
  mRNA product Design a-2 (hSL-A64-N5) comprising derived and/or modified sequence from LASV(LASV237-NIG-2010;Clade II)__AIT17638__GPCmut3 (opt4)
aggagaguccgcucagccagguugcagaagcggcuuagcguguguccuaaucuucucucugcguguagguaggccugugccgcaaacaagcuuaccaugggccagaucaucaccuucuuccaggaggugccccacgugaucgaggaggugaugaacaucgugcugaucgcccugagccugcuggccauccugaagggcaucuacaacguggccaccugcggccuguucggccuggugagcuuccugcugcugugcggcagaagcugcagcaccaccuacaagggcguguacgagcugcagacccuggagcuggacauggccagccugaacaugaccaugccccugagcugcaccaagaacaacagccaccacuacaucauggugggcaacgagaccggccuggagcugacccugaccaacaccagcaucaucaaccacaaguucugcaaccugagcgacgcccacaagaaggaccuguacgaccacgcccugaugagcaucaucagcaccuuccaccugagcauccccaacuucaaccaguacgaggccaugagcugcgacuucaacggcggcaagaucagcgugcaguacaaccugagccacaccuacgccguggacgccgccaaccacugcggcaccaucgccaacggcgugcugcagaccuucaugagaauggccuggggcggcagcuacaucgcccuggacagcggcaagggcagcugggacugcaucaugaccagcuaccaguaccugaucauccagaacaccaccugggaggaccacugccaguucagcagacccagccccaucggcuaccugggccugcugagccagagaaccagagacaucuacaucagcagaagaagaagaggcaccuucaccuggacccugagcgacagcgagggcaacgagacccccggcggcuacugccugaccagauggaugcugaucgaggccgagcugaagugcuucggcaacaccgccguggccaagugcaacgagaagcacgacgaggaguucugcgacaugcugagacuguucgacuucaacaagcaggccaucagaagacugaagacccccgcccagaugagcauccagcugaucaacaaggccgugaacgcccugaucaacgaccagcugaucaugaagaaccaccugagagacaucaugggcauccccuacugcaacuacagcaaguacugcuaccugaaccacaccgugaccggcaagaccagccugcccagaugcugccuggugagcaacggcagcuaccugaacgagacccacuucagcgacgacaucgagcagcaggccgacaacaugaucaccgagcugcugcagaaggaguacauggacagacagggcaagaccccccugggccugguggaccuguucguguucagcaccagcuucuaccugaucagcaucuuccugcaccugaucaagauccccacccacagacacaucaccggcaagcccugccccaagccccacagacugaaccacaugggcaucugcagcugcggccuguacaagcaccccggcgugcccgugaaguggaagagaugaggacuagucccuguucccagagcccacuuuuuuuucuuuuuuugaaauaaaauagccugucuuucagaucucaaaggcucuuuucagagccaccaaaaaaaaaaaaaaaaaaaaaaaaaaaaaaaaaaaaaaaaaaaaaaaaaaaaaaaaaaaaaaaaagaauu

SEQ ID NO: 25272 - RNA, 1733 nt, Artificial Sequence
  mRNA product Design a-2 (hSL-A64-N5) comprising derived and/or modified sequence from LASV(LASV253-NIG-2011;Clade II)__AIT17670__GPCmut3 (opt4)
aggagaguccgcucagccagguugcagaagcggcuuagcguguguccuaaucuucucucugcguguagguaggccugugccgcaaacaagcuuaccaugggccagaucaucaccuucuuccaggaggugccccacgugaucgaggaggugaugaacaucgugcugaucgcccugagccugcuggccauccugaagggcaucuacaacguggccaccugcggccuguucggccuggugagcuuccugcugcugugcggcagaagcugcagcaccaccuacaagggcguguacgagcugcagacccuggagcuggacauggccagccugaacaugaccaugccccugagcugcaccaagaacaacagccaccacuacaucauggugggcaacgagaccggccuggagcugacccugaccaacaccagcaucaucaaccacaaguucugcaaccugagcgacgcccacaagaagaaccuguacgaccacgcccugaugagcaucaucagcaccuuccaccugagcauccccaacuucaaccaguacgaggccaugagcugcgacuucaacggcggcaagaucagcgugcaguacaaccugagccacaccuacgccguggacgccgccaaccacugcggcaccaucgccaacggcgugcugcagaccuucaugagaauggccuggggcggcagcuacaucgcccuggacagcggcaagggcagcugggacugcaucaugaccagcuaccaguaccugaucauccagaacaccaccugggaggaccacugccaguucagcagacccagccccaucggcuaccugggccugcugagccagagaaccagagacaucuacaucagcagaagaagaagaggcaccuucaccuggacccugagcgacagcgagggcaacgagacccccggcggcuacugccugaccagauggaugcugaucgaggccgagcugaagugcuucggcaacaccgccguggccaagugcaacgagaagcacgacgaggaguucugcgacaugcugagacuguucgacuucaacaagcaggccaucagaagacugaaggcccccgcccagaugagcauccagcugaucaacaaggccgugaacgcccugaucaacgaccagcugaucaugaagaaccaccugagagacaucaugggcauccccuacugcaacuacagcaaguacugcuaccugaaccacaccgugaccggcagaaccagccugcccagaugcugccuggugagcaacggcagcuaccugaacgagacccacuucagcgacgacaucgagcagcaggccgacaacaugaucaccgagcugcugcagaaggaguacaucgacagacagggcaagaccccccugggccugguggaccuguucguguucagcaccagcuucuaccugaucagcaucuuccugcaccuggugaagauccccacccacagacacaucaucggcaagcccugccccaagccccacagacugaaccacaugggcaucugcagcugcggccuguacaagcaccccggcgugcccgugaaguggaagagaugaggacuagucccuguucccagagcccacuuuuuuuucuuuuuuugaaauaaaauagccugucuuucagaucucaaaggcucuuuucagagccaccaaaaaaaaaaaaaaaaaaaaaaaaaaaaaaaaaaaaaaaaaaaaaaaaaaaaaaaaaaaaaaaaagaauu

SEQ ID NO: 25273 - RNA, 1733 nt, Artificial Sequence
  mRNA product Design a-2 (hSL-A64-N5) comprising derived and/or modified sequence from LASV(LASV254-NIG-2011;Clade II)__AIT17674__GPCmut3 (opt4)
aggagaguccgcucagccagguugcagaagcggcuuagcguguguccuaaucuucucucugcguguagguaggccugugccgcaaacaagcuuaccaugggccagaucaucaccuucuuccaggaggugccccacgugaucgaggaggugaugaacaucgugcugaucgcccugagccugcuggccauccugaagggcaucuacaacguggccaccugcggccuguucggccuggugagcuuccugcugcugugcggcagaagcugcagcaccaccuacaagggcguguacgagcugcagacccuggagcuggacaugaccaaccugaacaugaccaugccccugagcugcaccaagaacaacagccaccacuacaucauggugggcaacgagaccggccuggagcugacccugaccaacaccagcaucaucaaccacaaguucugcaaccugagcgacgcccacaagaagaaccuguacaaccacgcccugaugagcaucaucagcaccuuccaccugagcauccccaacuucaaccaguacgaggccaugagcugcgacuucaacggcggcaagaucagcgugcaguacaaccugagccacagcuacgccguggacgccgccaaccacugcggcaccaucgccaacggcgugcugcagaccuucaugagaauggccuggggcggcagcuacaucgcccuggacagcggcaagggcaacugggacugcaucaugaccagcuaccaguaccugaucauccagaacaccaccugggaggaccacugccaguucagcagacccagccccaucggcuaccugggccugcugagccagagaaccagagacaucuacaucagcagaagaagaagaggcaccuucaccuggacccugagcgacagcgagggcaacgagacccccggcggcuacugccugaccagauggaugcugaucgaggccgagcugaagugcuucggcaacaccgccguggccaagugcaacgagaagcacgacgaggaguucugcgacaugcugagacuguucgacuucaacaagcaggccaucagaagacugaagacccccgcccaggccaacauccagcugaucaacaaggccgugaacgcccugaucaacgaccagcugaucaugaagaaccaccugagagacaucaugggcauccccuacugcaacuacagcaaguacugcuaccugaaccacaccgugaccggcaagaccagccugcccagaugcugccuggugagcaacggcagcuaccugaacgagacccacuucagcgacgacaucgagcagcaggccgacaacaugaucaccgagcugcugcagaaggaguacauggacagacagggcaagaccccccugggccugguggaccuguucguguucagcaccagcuucuaccugaucagcaucuuccugcaccuggugaagauccccacccacagacacgugaucggcaagcccugccccaagccccacagacugaaccacaugggcaucugcagcugcggccuguacaagcaccccggcgugcccgugaaguggaagagaugaggacuagucccuguucccagagcccacuuuuuuuucuuuuuuugaaauaaaauagccugucuuucagaucucaaaggcucuuuucagagccaccaaaaaaaaaaaaaaaaaaaaaaaaaaaaaaaaaaaaaaaaaaaaaaaaaaaaaaaaaaaaaaaaagaauu

SEQ ID NO: 25274 - RNA, 1733 nt, Artificial Sequence
  mRNA product Design a-2 (hSL-A64-N5) comprising derived and/or modified sequence from LASV(Nig08-A19;Clade III)__ADU56618__GPCmut3 (opt4)
aggagaguccgcucagccagguugcagaagcggcuuagcguguguccuaaucuucucucugcguguagguaggccugugccgcaaacaagcuuaccaugggccagaucgugaccuucuuccaggaggugccccacgugaucgaggaggugaugaacaucgugcugaucgcccugagcauccuggccauccugaagggccuguacaacaucgccaccugcggccugaucggccuggugaccuuccugcugcugagcggcagaagcugcagcaugaccuacaagggcguguacgagcugcagacccuggagcugaacaugaacacccugaacaugaccaugccccugagcugcaccaagaacaacagccaccacuacaucauggugggcaacgagaccggccuggagcugacccugaccaacaccagccugcugcaccacaaguucugcaaccugagcgacgcccacaagaagaaccuguacgaccacacccugaugagcaucaucagcaccuuccaccugagcauccccaacuucaaccaguacgaggccaugagcugcgacuucaacggcggcaagaucaccgugcaguacaaccugagccacagcuacgccaucgacgccgccaaccacugcggcaccguggccaacggcgugcugcagaccuucaugagaauggccuggggcggcagcuacaucgcccuggacagcggcagaggcaagugggacugcaucaugaccagcuaccaguaccugaucauccagaacaccaccugggaggaccacugccaguucagcagacccagccccaucggcuaccugggccugcugagccagagaaccagagacaucuacaucagcagaagaagaagaggcaccuucaccuggacccugagcgacagcgagggcaacgagacccccggcggcuacugccugaccagauggaugcugaucgaggccgagcugaagugcuucggcaacaccgccguggccaagugcaacgagaagcacgacgaggaguucugcgacaugcugagacuguucgacuucaacaagcaggccaucagaagacugaaggcccccgcccagaugagcauccagcugaucaacaaggccgugaacgcccugaucaacgaccagcugaucaugaagaaccaccugagagacaucaugggcauccccuacugcaacuacagcaaguacugcuaccugaaccacaccagcaccggcagaaccagccugcccagaugcugccuggugagcaacggcagcuaccugaacgagacccacuucagcgacgacaucgagcagcaggccgacaacaugaucaccgagaugcugcagaaggaguaccuggacagacagggcaagaccccccugggccugguggaccuguucguguucagcaccagcuucuaccugaucagcaucuuccugcaccuggugaagauccccacccacagacacaucgugggcaagcccugccccaagccccacagacugaaccacaugggcaucugcagcugcggccuguacaagcagcccggcgugcccgugagauggaagagaugaggacuagucccuguucccagagcccacuuuuuuuucuuuuuuugaaauaaaauagccugucuuucagaucucaaaggcucuuuucagagccaccaaaaaaaaaaaaaaaaaaaaaaaaaaaaaaaaaaaaaaaaaaaaaaaaaaaaaaaaaaaaaaaaagaauu

SEQ ID NO: 25275 - RNA, 1736 nt, Artificial Sequence
  mRNA product Design a-2 (hSL-A64-N5) comprising derived and/or modified sequence from LASV(G1180-SLE-2010;Clade IV)__AIT17168__GPCmut3 (opt4)
aggagaguccgcucagccagguugcagaagcggcuuagcguguguccuaaucuucucucugcguguagguaggccugugccgcaaacaagcuuaccaugggccagaucgugaccuucuuccaggaggugccccacgugaucgaggaggugaugaacaucgugcugaucgcccugagcauccuggccgugcugaagggccuguacaacuucgccaccugcggccuggugggccugcugaccuuccugcugcugugcggcagaagcugcaccgccagcagauacaagggcguguacgagcugcagacccuggagcugaacauggagacccugaacaugaccaugccccugagcugcaccaagaacaacagccaccacuacaucauggugggcaacgagaccggccuggagcugacccugaccaacaccagcaucaucaaccacaaguucugcaaccugagcgacgcccacaagaagaaccuguacgaccacgcccugaugagcaucaucagcaccuuccaccugagcauccccaacuucaaccaguacgaggccaugagcugcgacuucaacggcggcaagaucagcgugcaguacaaccugagccacagcuacgccggcgacgccgccaaccacugcggcaccguggccaacggcgugcugcagaccuucaugagaauggccuggggcggcagcuacaucgcccuggacagcggccacggcagcugggacugcaucaugaccagcuaccaguaccugaucauccagaacaccaccugggaggaccacugccaguucagcagacccagccccaucggcuaccugggccugcugagccagagaaccagagacaucuacaucagcagaagaagaagaggcaccuucaccuggacccugagcgacagcgagggcaaggacacccccggcggcuacugccugaccagauggaugcugaucgaggccgagcugaagugcuucggcaacaccgccguggccaagugcaacgagaagcacgacgaggaguucugcgacaugcugagacuguucgacuucaacaagcaggccauccagagacugaaggcccccgcccagaugagcauccagcugaucaacaaggccgugaacgcccugaucaacgaccagcugaucaugaagaaccaccugagagacaucaugggcauccccuacugcaacuacagcaaguacugcuaccugaaccacaccaccaccggcaagaccagccugcccaagugcugccuggugagcaacggcagcuaccugaacgagacccacuucagcgacgacaucgagcagcaggccgacaacaugaucaccgagaugcugcagaaggaguacauggagagacagggcaagaccccccugggccugguggaccuguucguguucagcaccagcuucuaccugaucagcaucuuccugcaccuggugaagauccccacccacagacacaucgugggcaagagcugccccaagccccacagacugaaccacaugggcaucugcagcugcggccuguacaagcagcccggcgugcccgugaaguggaagagaugaggacuagucccuguucccagagcccacuuuuuuuucuuuuuuugaaauaaaauagccugucuuucagaucucaaaggcucuuuucagagccaccaaaaaaaaaaaaaaaaaaaaaaaaaaaaaaaaaaaaaaaaaaaaaaaaaaaaaaaaaaaaaaaaagaauu

SEQ ID NO: 25276 - RNA, 1736 nt, Artificial Sequence
  mRNA product Design a-2 (hSL-A64-N5) comprising derived and/or modified sequence from LASV(G1442-SLE-2011;Clade IV)__AIT17180__GPCmut3 (opt4)
aggagaguccgcucagccagguugcagaagcggcuuagcguguguccuaaucuucucucugcguguagguaggccugugccgcaaacaagcuuaccaugggccagaucgugaccuucuuccaggaggugccccacgugaucgaggaggugaugaacaucgugcugaucgcccugagcauccuggccgugcugaagggccuguacaacguggccaccugcggccugaucggccuggugaccuuccugcugcugugcggcagaagcugcaccaccacccuguacaagggcguguacgagcugcagacccuggagcugaacauggagacccugaacaugaccaugccccugagcugcaccaagaacaacagccaccacuacaucagagugggcaacgagaccggccuggagcugacccugaccaacaccagcaucaucaaccacaaguucugcaaccugagcgacgcccacaagaagaaccuguacgaccacgcccugaugagcaucaucagcaccuuccaccugagcauccccaacuucaaccaguacgaggccaugagcugcgacuucaacggcggcaagaucagcgugcaguacaaccugagccacagcuacgccggcgacgccgccaaccacugcggcaccguggccaacggcgugcugcagaccuucaugagaauggccuggggcggcagcuacaucgcccuggacagcggcagaggcaacugggacugcaucaugaccagcuaccaguaccugaucauccagaacaccaccugggacgaccacugccaguucagcagacccagccccaucggcuaccugggccugcugagccagagaaccagagacguguacaucagcagaagaagaagaggcaccuucaccuggacccugagcgacagcgagggcaaggacacccccggcggcuacugccugaccagauggaugcugaucgaggccgagcugaagugcuucggcaacaccgccguggccaagugcaacgagaagcacgacgaggaguucugcgacaugcugagacuguucgacuucaacaagcaggccauccagagacugaaggcccccgcccagaugagcauccagcugaucaacaaggccgugaacgcccugaucaacgaccagcugaucaugaagaaccaccugagagacaucaugggcauccccuacugcaacuacagcaaguacugcuaccugaacaacaccgccaccggcaagaccagccugcccaagugcugccugaucagcaacggcagcuaccugaacgagacccacuucagcgacgacaucgagcaggaggccgacaacaugaucaccgagaugcugcagaaggaguacauggagagacagggcaagaccccccugggccugguggaccuguucguguucagcaccagcuucuaccugaucagcaucuuccugcaccuggugaagauccccacccacagacacaucgugggcaagagcugccccaagccccacagacugaaccacaugggcaucugcagcugcggccuguacaagcagcccggcgugcccgugagauggaagagaugaggacuagucccuguucccagagcccacuuuuuuuucuuuuuuugaaauaaaauagccugucuuucagaucucaaaggcucuuuucagagccaccaaaaaaaaaaaaaaaaaaaaaaaaaaaaaaaaaaaaaaaaaaaaaaaaaaaaaaaaaaaaaaaaagaauu

SEQ ID NO: 25277 - RNA, 1736 nt, Artificial Sequence
  mRNA product Design a-2 (hSL-A64-N5) comprising derived and/or modified sequence from LASV(G3010-SLE-2013;Clade IV)__AIT17344__GPCmut3 (opt4)
aggagaguccgcucagccagguugcagaagcggcuuagcguguguccuaaucuucucucugcguguagguaggccugugccgcaaacaagcuuaccaugggccagaucgugaccuucuuccaggaggugccccacgugaucgaggaggugaugaacaucgugcugaucgcccugagcauccuggccgugcugaagggccuguacaacuucgccaccugcggccuggugggccuggugaccuuccugcugcugugcggcagaagcugcaccaccagccuguacaagggcguguacgagcugcagacccuggagcugaacauggagacccugaacaugaccaugccccugagcugcaccaagaacaacagccaccacuacaucauggugggcaacgagaccggccuggagcugacccugaccaacaccagcaucaucaaccacaaguucugcaaccugagcgacgcccacaagaagaaccuguacaaccacgcccugaugagcaucaucagcaccuuccaccugagcauccccaacuucaaccaguacgaggccaugagcugcgacuucaacggcggcaagaucagcgugcaguacaaccugagccacagcuacgccggcgacgccgccagccacugcggcaccguggccaacggcgugcugcagaccuucaugagaauggccuggggcggcagcuacaucgcccuggacagcggcuacggcaagugggacugcaucaugaccagcuaccaguaccugaucauccagaacaccaccugggaggaccacugccaguucagcagacccagccccaucggcuaccugggccugcugagccagagaaccagagacaucuacaucagcagaagaagaagaggcaccuucaccuggacccugagcgacagcgagggcaaggacacccccggcggcuacugccugaccagauggaugcugaucgaggccgagcugaagugcuucggcaacaccgccguggccaagugcaacgagaagcacgacgaggaguucugcgacaugcugagacuguucgacuucaacaagcaggccauccagagacugaagacccccgcccagaugagcauccagcugaucaacaaggccgugaacgcccugaucaacgaccagcugaucaugaagaaccaccugagagacaucaugggcauccccuacugcaacuacagcaaguacugcuaccugaaccacaccaccaccggcaagaccagccugcccaagugcugccuggugagcaacggcagcuaccugaacgagacccacuucagcgacgacaucgagcagcaggccgacaacaugaucaccgagaugcugcagaaggaguacauggagagacagggcaagaccccccugggccugguggaccuguucguguucagcaccagcuucuaccugaucagcaucuuccugcaccuggugaagauccccacccacagacacaucgugggcaagagcugccccaagccccacagacugaaccacaugggcaucugcagcugcggccuguacaagcagcccggcgugcccgugagauggaagagaugaggacuagucccuguucccagagcccacuuuuuuuucuuuuuuugaaauaaaauagccugucuuucagaucucaaaggcucuuuucagagccaccaaaaaaaaaaaaaaaaaaaaaaaaaaaaaaaaaaaaaaaaaaaaaaaaaaaaaaaaaaaaaaaaagaauu

SEQ ID NO: 25278 - RNA, 1736 nt, Artificial Sequence
  mRNA product Design a-2 (hSL-A64-N5) comprising derived and/or modified sequence from LASV(G502-SLE-2009;Clade IV)__AIT17126__GPCmut3 (opt4)
aggagaguccgcucagccagguugcagaagcggcuuagcguguguccuaaucuucucucugcguguagguaggccugugccgcaaacaagcuuaccaugggccagaucgugaccuucuuccaggaggugccccacgugaucgaggaggugaugaacaucgugcugaucgcccugagcauccuggccgugcugaagggccuguacaacuucgccaccugcggccuggugggccugcugaccuuccugcugcugugcggcagaagcugcaccaccggccuguacaagggcguguacgagcugcagacccuggagcugaacauggagacccugaacaugaccaugccccugagcugcaccaagaacaacagccaccacuacaucauggugggcaacgagaccggccuggagcugacccugaccaacaccagcaucaucaaccacaaguucugcaaccugagcgacgcccacaagaagaaccuguacgaccacgcccugaugagcaucaucagcaccuuccaccugagcauccccaacuucaaccaguacgaggccaugagcugcgacuucaacggcggcaagaucagcgugcaguacaaccugagccacagcuacgccggcgacgccgccgaccacugcggcaccguggccaacggcgugcugcagaccuucaugagaauggccuggggcggcagcuacaucgcccuggacagcggcagaggcagaugggacugcaucaugaccagcuaccaguaccugaucauccagaacaccaccugggaggaccacugccaguucagcagacccagccccaucggcuaccugggccugcugagccagagaaccagagacaucuacaucagcagaagaagaagaggcaccuucaccuggacccugagcgacagcgagggcaaggacacccccggcggcuacugccugaccagauggaugcugaucgaggccgagcugaagugcuucggcaacaccgccguggccaagugcaacgagaagcacgacgaggaguucugcgacaugcugagacuguucgacuucaacaagcaggccauccagagacugaaggcccccgcccagaugagcauccagcugaucaacaaggccgugaacgcccugaucaacgaccagcuggugaugaagaaccaccugagagacaucaugggcauccccuacugcaacuacagcagauacugcuaccugaaccacaccaccaccggcagaaccagccugcccaagugcugccuggugagcaacggcagcuaccugaacgagacccacuucagcgacgacaucgagcagcaggccgacaacaugaucaccgagaugcugcagaaggaguacauggagagacagggcaagaccccccugggccugguggaccuguucguguucagcaccagcuucuaccugaucagcaucuuccugcaccuggugaagauccccacccacagacacaucgugggcaagagcugccccaagccccacagacugaaccacaugggcaucugcagcugcggccuguacaagcagcccggcgugcccgugaaguggaagagaugaggacuagucccuguucccagagcccacuuuuuuuucuuuuuuugaaauaaaauagccugucuuucagaucucaaaggcucuuuucagagccaccaaaaaaaaaaaaaaaaaaaaaaaaaaaaaaaaaaaaaaaaaaaaaaaaaaaaaaaaaaaaaaaaagaauu

SEQ ID NO: 25279 - RNA, 1736 nt, Artificial Sequence
  mRNA product Design a-2 (hSL-A64-N5) comprising derived and/or modified sequence from LASV(G733-SLE-2010;Clade IV)__AIT17154__GPCmut3 (opt4)
aggagaguccgcucagccagguugcagaagcggcuuagcguguguccuaaucuucucucugcguguagguaggccugugccgcaaacaagcuuaccaugggccagaucgugaccuucuuccaggaggugccccacgugaucgaggaggugaugaacaucgugcugaucgcccugagcauccuggccgugcugaagggccuguacaacuucgccaccugcggcaucgugggccuggugagcuuccugcugcugugcggcagaagcugcaccaccagccuguacaagggcguguacgagcugcagacccuggagcugaacauggagacccugaacaugaccaugccccugagcugcaccaagaacaacagccaccacuacaucauggugggcaacgagaccggccuggagcugacccugaccaacaccagcaucaucaaccacaaguucugcaaccugagcgacgcccacaagaagaaccuguacgaccacgcccugaugagcaucaucagcaccuuccaccugagcauccccaacuucaaccaguacgaggccaugagcugcgacuucaacggcggcaagaucagcgugcaguacaaccugagccacagcuacgccggcgacgccgccaaccacugcggcaccaucgccaacggcgugcugcagaccuucaugagaauggccuggggcggcagcuacaucgcccuggacagcggcagagacagaugggacugcaucaugaccagcuaccaguaccugaucauccagaacaccaccugggaggaccacugccaguucagcagacccagccccaucggcuaccugggccugcugagccagagaaccagagacaucuacaucagcagaagaagaagaggcaccuucaccuggacccugagcgacagcgagggcaaggacacccccggcggcuacugccugaccagauggaugcugaucgaggccgagcugaagugcuucggcaacaccgccguggccaagugcaacgagaagcacgacgaggaguucugcgacaugcugagacuguucgacuucaacaagcaggccauccagagacugaaggcccccgcccagaugagcauccagcugaucaacaaggccgugaacgcccugaucaacgaccagcugaucaugaagaaccaccugagagacaucaugggcauccccuacugcaacuacagcaaguacugcuaccugaaccacaccaccaccggcaagaccagccugcccaagugcugccuggugagcaacggcagcuaccugaacgagacccacuucagcgacgacaucgagcagcaggccgacaacaugaucaccgagaugcugcagaaggaguacauggagagacagggcaagaccccccugggccugguggaccuguucguguucagcaccagcuucuaccugaucagcaucuuccugcaccuggugaagauccccacccacagacacguggugggcaagagcugccccaagccccacagacugaaccacaugggcaucugcagcugcggccuguacggccagcccggcgugcccgugaaguggaagagaugaggacuagucccuguucccagagcccacuuuuuuuucuuuuuuugaaauaaaauagccugucuuucagaucucaaaggcucuuuucagagccaccaaaaaaaaaaaaaaaaaaaaaaaaaaaaaaaaaaaaaaaaaaaaaaaaaaaaaaaaaaaaaaaaagaauu

SEQ ID NO: 25280 - RNA, 1736 nt, Artificial Sequence
  mRNA product Design a-2 (hSL-A64-N5) comprising derived and/or modified sequence from MOPV/LASV reassortant(IGS-1;Clade IV)__AFY05576__GPCmut3 (opt4)
aggagaguccgcucagccagguugcagaagcggcuuagcguguguccuaaucuucucucugcguguagguaggccugugccgcaaacaagcuuaccaugggccagaucgugaccuucuuccaggaggugccccacgugaucgaggaggugaugaacaucgugcugaucgcccugagcgugcuggccgugcugaagggccuguacaacuucgccaccugcggccuggugggccuggugaccuuccugcugcugugcggcagaagcugcaccaccagccuguacaagggcguguacgagcugcagacccuggagcugaacauggagacccugaacaugaccaugccccugagcugcaccaagaacaacagccaccacuacaucauggugggcaacgagaccggccuggagcugacccugaccaacaccagcaucaucaaccacaaguucugcaaccugagcgacgcccacaagaagaaccuguacgaccacgcccugaugagcaucaucagcaccuuccaccugagcauccccaacuucaaccaguacgaggccaugagcugcgacuucaacggcggcaagaucagcgugcaguacaaccugagccacagcuacgccggcgacgccgccaaccacugcggcaccguggccaacggcgugcugcagaccuucaugagaauggccuggggcggcagcuacaucgcccuggacagcggcagaggcaacugggacugcaucaugaccagcuaccaguaccugaucauccagaacaccaccugggaggaccacugccaguucagcagacccagccccaucggcuaccugggccugcugagccagagaaccagagacaucuacaucagcagaagaagaagaggcaccuucaccuggacccugagcgacagcgagggcgaggacacccccggcggcuacugccugaccagauggaugcugaucgaggccgagcugaagugcuucggcaacaccgccguggccaagugcaacgagaagcacgacgaggaguucugcgacaugcugagacuguucgacuucaacaagcaggccauccagagacugaaggcccccgcccagaugagcauccagcugaucaacaaggccgugaacgcccugaucaacgaccagcugaucaugaagaaccaccugagagacaucaugggcauccccuacugcaacuacagcaaguacugcuaccugaaccacaccaccaccggcagaaccagccugcccaagugcugccuggugagcaacggcagcuaccugaacgagacccacuucagcgacgacaucgagcagcaggccgacaacaugaucaccgagaugcugcagaaggaguacauggagagacagggcaagaccccccugggccugguggaccuguucguguucagcaccagcuucuaccugaucagcaucuuccugcaccuggugaagauccccacccacagacacaucgugggcaagagcugccccaagccccacagacugaaccacaugggcaucugcagcugcggccuguacaagcagcccggcgugcccgugaaguggaagagaugaggacuagucccuguucccagagcccacuuuuuuuucuuuuuuugaaauaaaauagccugucuuucagaucucaaaggcucuuuucagagccaccaaaaaaaaaaaaaaaaaaaaaaaaaaaaaaaaaaaaaaaaaaaaaaaaaaaaaaaaaaaaaaaaagaauu

SEQ ID NO: 25281 - RNA, 1736 nt, Artificial Sequence
  mRNA product Design a-2 (hSL-A64-N5) comprising derived and/or modified sequence from LASV(LM765-SLE-2012;Clade IV)__AIT17814__GPCmut3 (opt4)
aggagaguccgcucagccagguugcagaagcggcuuagcguguguccuaaucuucucucugcguguagguaggccugugccgcaaacaagcuuaccaugggccagaucgugaccuucuuccaggaggugccccacgugaucgaggaggugaugaacaucgugcugaucgcccugagcauccuggccgugcugaagggccuguacaacuucgccaccugcggccuggugggccuggugaccuuccugcugcugugcggcagaagcugcaccaccagccuguacaagggcguguacgagcugcagacccuggagcugaacauggagacccugaacaugaccaugccccugagcugcaccaagaacaacagccaccacuacaucauggugggcaacgagaccggccuggagcugacccugaccaacaccagcaucaucgaccacaaguucugcaaccugagcgacgcccacagaaagaaccuguacgaccacgcccugaugagcaucaucagcaccuuccaccugagcauccccaacuucaaccaguacgaggccaugagcugcgacuucaacggcggcaagaucagcgugcaguacaaccugagccacagcuacgccaaggacgccgccgaccacugcggcaccguggccaacggcgugcugcagaccuucaugagaauggccuggggcggcagcuacaucgcccuggacagcggcagaggcagaugggacugcaucaugaccagcuaccaguaccugaucauccagaacaccaccugggaggaccacugccaguucagcagacccagccccaucggcuaccugggccugcugagccagagaaccagagacaucuacaucagcagaagaagaagaggcaccuucaccuggacccugagcgacagcgagggcaaggacacccccggcggcuacugccugaccagauggaugcugaucgaggccgagcugaagugcuucggcaacaccgccguggccaagugcaacgagaagcacgacgaggaguucugcgacaugcugagacuguucgacuucaacaagcaggccauccagagacugaaggcccccgcccagaugagcauccagcugaucaacaaggccgugaacgcccugaucaacgaccagcugaucaugaagaaccaccugagagacaucaugggcauccccuacugcaacuacagcaaguacugcuaccugaaccacaccaccaccggcaagaccagccugcccaagugcugccuggugagcaacggcagcuaccugaacgagacccacuucagcgacgacaucgagcagcaggccgacaacaugaucaccgagaugcugcagaaggaguacauggagagacagggcaagaccccccugggccugguggaccuguucguguucagcaccagcuucuaccugaucagcaucuuccugcaccuggugaagauccccacccacagacacaucgugggcaagcccugccccaagccccacagacugaaccacaugggcaucugcagcugcggccuguacaagcagcccggcgugcccgugaaguggaagagaugaggacuagucccuguucccagagcccacuuuuuuuucuuuuuuugaaauaaaauagccugucuuucagaucucaaaggcucuuuucagagccaccaaaaaaaaaaaaaaaaaaaaaaaaaaaaaaaaaaaaaaaaaaaaaaaaaaaaaaaaaaaaaaaaagaauu

SEQ ID NO: 25282 - RNA, 1736 nt, Artificial Sequence
  mRNA product Design a-2 (hSL-A64-N5) comprising derived and/or modified sequence from LASV(LM776-SLE-2012;Clade IV)__AIT17824__GPCmut3 (opt4)
aggagaguccgcucagccagguugcagaagcggcuuagcguguguccuaaucuucucucugcguguagguaggccugugccgcaaacaagcuuaccaugggccagaucgugaccuucuuccaggaggugccccacgugaucgaggaggugaugaacaucgugcugaucgcccugagcauccuggccgugcugaagggccuguacaacuucgccaccugcggccuggugggccuggugaccuuccugcugcugugcggcagaagcugcaccaccagcguguacaagggcguguacgagcugcagacccuggagcugaacauggagacccugaacaugaccaugccccugagcugcaccaagaacaacagccaccacuacaucauggugggcaacgagaccggccuggagcugacccugaccaacaccagcaucaucaaccacaaguucugcaaccugagcgacgcccacaagaagaaccuguacgaccacgcccugaugagcaucaucagcaccuuccaccugagcauccccaacuucaaccaguacgaggccaugagcugcgacuucaacggcggcaagaucagcgugcaguacaaccugagccacagcuacgccggcgacgccgccaaccacugcggcaccguggccaacggcgugcugcagaccuucaugagaauggccuggggcggcagcuacaucgcccuggacagcggccacggcaagugggacugcaucaugaccagcuaccaguaccugaucauccagaacaccaccugggaggaccacugccaguucagcagacccagccccaucggcuaccugggccugcugagccagagaaccagagacaucuacaucagcagaagaagaagaggcaccuucaccuggacccugagcgacagcgagggcaaggacacccccggcggcuacugccugaccagauggaugcugaucgaggccgagcugaagugcuucggcaacaccgccguggccaagugcaacgagaagcacgacgaggaguucugcgacaugcugagacuguucgacuucaacaagcaggccauccagagacugaaggcccccgcccagaugagcauccagcugaucaacaaggccgugaacgcccugaucaacgaccagcugaucaugaagaaccaccugagagacaucaugggcauccccuacugcaacuacagcaaguacugcuaccugaaccacaccaccaccggcaagaccagccugcccaagugcugccuggugagcaacggcagcuaccugaacgagacccacuucagcgacgacaucgagcagcaggccgacaacaugaucaccgagaugcugcagaaggaguacauggagagacagggcaagaccccccugggccugguggaccuguucguguucagcaccagcuucuaccugaucagcaucuuccugcaccuggugaagauccccacccacagacacaucgugggcaagagcugccccaagccccacagacugaaccacaugggcaucugcagcugcggccuguacaagcagcccggcgugcccgugagauggaagagaugaggacuagucccuguucccagagcccacuuuuuuuucuuuuuuugaaauaaaauagccugucuuucagaucucaaaggcucuuuucagagccaccaaaaaaaaaaaaaaaaaaaaaaaaaaaaaaaaaaaaaaaaaaaaaaaaaaaaaaaaaaaaaaaaagaauu

SEQ ID NO: 25283 - RNA, 1736 nt, Artificial Sequence
  mRNA product Design a-2 (hSL-A64-N5) comprising derived and/or modified sequence from LASV(Mad39;Clade IV)__ANH09722__GPCmut3 (opt4)
aggagaguccgcucagccagguugcagaagcggcuuagcguguguccuaaucuucucucugcguguagguaggccugugccgcaaacaagcuuaccaugggccagaucgugaccuucuuccaggaggugccccacgugaucgaggaggugaugaacaucgugcugaucgcccugagcauccuggccgugcugaagggccuguacaacguggccaccugcggccugaucggccuggugaccuuccugcugcugugcggcagaagcugcaccaccacccuguacaagggcguguacgagcugcaggcccuggagcugaacauggagacccugaacaugaccaugccccugagcugcaccaagaacaacagccaccacuacaucagagugggcaacgagaccggccuggagcugacccugaccaacaccagccugaucaaccacaaguucugcaaccugagcgacgcccacaagaagaaccuguacgaccacgcccugaugagcaucaucagcaccuuccaccugagcauccccaacuucaaccaguacgaggccaugagcugcgacuucaacgacggcaagaucagcgugcaguacaaccugagccacaccuacgccggcgacaccgccaaccacugcggcaccguggccaacggcgugcugcagaccuucaugagaauggccuggggcggcagcuacaucgcccuggacagcggcagaggcggcugggacugcaucaugaccagcuaccaguaccugaucauccagaacaccaccugggaggaccacugccaguucagcagacccagccccaucggcuaccugggccugcugagccagagaaccagagacaucuacaucagcagaagaagaagaggcaccuucaccuggacccugagcgacagcgagggcaaggacacccccggcggcuacugccugaccagauggaugcugaucgaggccgagcugaagugcuucggcaacaccgccguggccaagugcaacgagaagcacgacgaggaguucugcgacaugcugagacuguucgacuucaacaagcaggccauccagagacugaaggcccccgcccagaugagcauccagcugaucaacaaggccgugaacgcccugaucaacgaccagcugaucaugaagaaccaccugagagacaucaugggcauccccuacugcaacuacagcaaguacugcuaccugaaccacaccgugaccggcaagaccagccugcccaagugcugccuggugagcaacggcagcuaccugaacgagacccacuucagcgacgacaucgagcagcaggccgacaacaugaucaccgagaugcugcagaaggaguacauggagagacagggcaagaccccccugggccugguggaccuguucguguucagcaccagcuucuaccugaucagcaucuuccugcaccuggugaagauccccacccacagacacguggugggcaagcccugccccaagccccacagacugaaccacaugggcaucugcagcugcggcuucuacaagcagcccggcgugcccgugagauggaagagaugaggacuagucccuguucccagagcccacuuuuuuuucuuuuuuugaaauaaaauagccugucuuucagaucucaaaggcucuuuucagagccaccaaaaaaaaaaaaaaaaaaaaaaaaaaaaaaaaaaaaaaaaaaaaaaaaaaaaaaaaaaaaaaaaagaauu

SEQ ID NO: 25284 - RNA, 1736 nt, Artificial Sequence
  mRNA product Design a-2 (hSL-A64-N5) comprising derived and/or modified sequence from LASV(Z0947-SLE-2011;Clade IV)__AIT17840__GPCmut3 (opt4)
aggagaguccgcucagccagguugcagaagcggcuuagcguguguccuaaucuucucucugcguguagguaggccugugccgcaaacaagcuuaccaugggccagaucgugaccuucuuccaggaggugccccacgugaucgaggaggugaugaacaucgugcugaucgcccugagcauccuggccgugcugaagggccuguacaacuucgccaccugcggccuggugggccuggugaccuuccugcugcugugcggcagaagcugcaccaucagccuguacaagggcguguacgagcugcagacccuggagcugaacauggagacccugaacaugaccaugccccugagcugcaccaagaacaacagccaccacuacaucauggugggcaacgagaccggccuggagcugacccugaccaacaccagcaucaucaaccacaaguucugcaaccugagcgacgcccacaagaagaaccuguacgaccacgcccugaugagcaucaucagcaccuuccaccugagcauccccaacuucaaccaguacgaggccaugagcugcgacuucaacggcggcaagaucagcgugcaguacaaccugagccacagcuacgccggcgacgccgccaaccacugcggcaccguggccaacggcgugcugcagaccuucaugagaauggccuggggcggcagcuacaucgcccuggacagcggcagagacagaugggacugcaucaugaccagcuaccaguaccugaucauccagaacaccaccugggaggaccacugccaguucagcagacccagccccaucggcuaccugggccugcugagccagagaaccagagacaucuacaucagcagaagaagaagaggcaccuucaccuggacccugagcgacagcgagggcaaggacacccccggcggcuacugccugaccagauggaugcugaucgaggccgagcugaagugcuucggcaacaccgccguggccaagugcaacgagaagcacgacgaggaguucugcgacaugcugagacuguucgacuucaacaagcaggccauccagagacugaaggcccccgcccagaugagcauccagcugaucaacaaggccgugaacgcccugaucaacgaccagcugaucaugaagaaccaccugagagacaucaugggcauccccuacugcaacuacagcaaguacugcuaccugaaccacaccaccaccggcaagaccagccugcccaagugcugccuggugagcaacggcagcuaccugaacgagacccacuucagcgacgacaucgagcagcaggccgacaacaugaucaccgagaugcugcagaaggaguacauggagagacagggcaagaccccccugggccugguggaccuguucguguucagcaccagcuucuaccugaucagcaucuuccugcaccuggugaagauccccacccacagacacaucgugggcaagcccugccccaagccccacagacugaaccacaugggcaucugcagcugcggccuguacaagcagcccggcgugcccgugaaguggaagagaugaggacuagucccuguucccagagcccacuuuuuuuucuuuuuuugaaauaaaauagccugucuuucagaucucaaaggcucuuuucagagccaccaaaaaaaaaaaaaaaaaaaaaaaaaaaaaaaaaaaaaaaaaaaaaaaaaaaaaaaaaaaaaaaaagaauu

SEQ ID NO: 25285 - RNA, 1736 nt, Artificial Sequence
  mRNA product Design a-2 (hSL-A64-N5) comprising derived and/or modified sequence from LASV(Josiah;Clade IV)__NP_694870__GPCmut3 (opt5)
aggagaguccgcucagccagguugcagaagcggcuuagcguguguccuaaucuucucucugcguguagguaggccugugccgcaaacaagcuuaccaugggccagaucgugaccuucuuucaagaggucccccacguuauugaagaggugaugaacaucgugcugauugcccucagcguccuggcugugcuuaaggggcuguacaauuucgccacaugcggacucguuggccuggugacguuucuucugcucugugggagauccugcaccacaucucuguauaaaggagucuacgaacugcagacccucgagcugaacauggaaacacuuaauaugaccaugccucugagcuguacaaagaacaauucccaucacuauaucauggugggcaacgagaccgggcucgagcugacgcuuaccaauacaucuauuaucaaccauaaauucugcaaucugagcgacgcgcacaagaaaaaccucuacgaucaugcucugauguccaucauuucuaccuuucaccugagcaucccgaauuucaaccaguaugaagccauguccugugacuuuaauggaggcaagauuagcguucaguacaaccucucucacuccuaugccggcgaugcugccaaucauugcgggacaguggcuaacggaguccugcaaaccuucaugcggauggccuggggcgggagcuacaucgcgcuugacucuggacgcggcaacugggauuguauuaugacguccuaccaguaucugaucauucagaauacaaccugggaggaccacugccaguuuagcagacccucuccuaucggguaccucggacugcuuucccaacggacacgcgauaucuauauuagcagacggcgcagaggcaccuucaccuggacacuguccgacucugaaggcaaggauacgcccgggggauacugucucacccgguggaugcugaucgaggccgagcugaaaugcuuuggcaacacagcuguggccaaguguaaugaaaaacaugacgaggaguucugcgauaugcuccgccuguuugacuucaacaagcaggcuauucagagacuuaaagccccugcgcagaugagcauccaacugauuaauaaggccgugaacgcucucaucaaugaucagcugaucaugaagaaccaccuucgggacauuauggggauccccuauugcaauuacuccaaauauuguuaccugaaccacaccacaaccggacgcacgagccucccuaagugcugucuggucucuaauggcuccuaccugaacgaaacacauuucagcgacgauauugaacagcaagccgacaauaugaucaccgagaugcuccagaaagaguauauggaaagacaggggaagaccccgcugggacuuguugaucuguuuguguucucuaccagcuuuuaccucauuuccaucuuccugcaccuggugaaaauccccacacaucggcacauugucggcaagucuugcccuaaaccccaucgccuuaaccacaugggcaucuguagcugcgggcucuauaagcagccuggagugcccguuaaguggaaaagaugaggacuagucccuguucccagagcccacuuuuuuuucuuuuuuugaaauaaaauagccugucuuucagaucucaaaggcucuuuucagagccaccaaaaaaaaaaaaaaaaaaaaaaaaaaaaaaaaaaaaaaaaaaaaaaaaaaaaaaaaaaaaaaaaagaauu

SEQ ID NO: 25286 - RNA, 1733 nt, Artificial Sequence
  mRNA product Design a-2 (hSL-A64-N5) comprising derived and/or modified sequence from LASV(LP;Clade I)__AAF86701__GPCmut3 (opt5)
aggagaguccgcucagccagguugcagaagcggcuuagcguguguccuaaucuucucucugcguguagguaggccugugccgcaaacaagcuuaccaugggccagaucauuaccuucuuucaagaggugccccacgucaucgaagagguuaugaacauugugcugaucgcccucagccugcuugcuauucugaaggggcucuacaauaucgccacaugcggaaucauuggccugguggcguuccuuuuucugugugggaaauccugcucucucacgcugaagggaggcuaugaacugcagacccucgagcugaacauggaaacacuuaauaugaccaugccucugagcuguaccaaaaacuccucucaucacuacaucagagucgggaaugagacaggacucgagcugacacuuaccaacacgagcauuaucaaucauaaguucugcaaccuguccgacgcucacaaaaagaaucucuaugaucaugcccugaugucuauuaucagcaccuuucaccuguccauuccgaacuucaaucaguacgaagccaugagcugugacuuuaacggcggcaagaucucugugcaguauaaucucucccacagcuacgcuggggaugccgcugagcauugcggaacaguugccaacggcgugcugcaaaccuucaugcggauggcguggggagggcgcuauaucgcccuugacucuggcaaagggaauugggauuguauuaugacauccuaccaguaccugaucauucagaacaccacgugggaagaccacugccaguuuagcagacccucuccuaucggauaucucggccugcuuucccaacggacacgcgauauuuacaucagcagacggcgcagaggcaccuucacauggacccuguccgacucugaggggaacgagacccccggaggcuauugucucacacgguggaugcugaucgaagcugagcugaagugcuuugggaauacggccgucgcuaaauguaacgaaaagcaugaugaggaguucugcgacaugcuccgccuguuugauuucaauaaacaggccauuagacggcuuaaggcgccugcccagaugagcauccagcugauuaacaaggcugugaaugcccucaucaacgaccaacugauuaugaaaaaucaccuucgcgauaucaugggaauccccuacugcaacuauuccaaguacuguuaucugaaucacaccagcucuggcagaacaucccucccuaaaugcugucugauuagcaacgggucuuaccugaaugaaacccaguucagcgacgacaucgagcagcaagcugauaacaugauuacagaaaugcuccagaaggaguacaucgaacggcagggaaaaaccccgcugggccuuguugacauuuuuaucuucuccacgucuuuuuaucugauuagcaucuuccuccaucugaucaagauucccacacaccgccauaucgugggcaaaccuugccccaagccucacagacugaaucauaugggggucuguuccugcggacuuuacaagcaccccggcgugccgaccaaauggaagcggugaggacuagucccuguucccagagcccacuuuuuuuucuuuuuuugaaauaaaauagccugucuuucagaucucaaaggcucuuuucagagccaccaaaaaaaaaaaaaaaaaaaaaaaaaaaaaaaaaaaaaaaaaaaaaaaaaaaaaaaaaaaaaaaaagaauu

SEQ ID NO: 25287 - RNA, 1733 nt, Artificial Sequence
  mRNA product Design a-2 (hSL-A64-N5) comprising derived and/or modified sequence from LASV(803213;Clade II)__AAF86703__GPCmut3 (opt5)
aggagaguccgcucagccagguugcagaagcggcuuagcguguguccuaaucuucucucugcguguagguaggccugugccgcaaacaagcuuaccaugggccagaucauuaccuucuuucaagaggugccccacgucaucgaagagguuaugaacauugugcugaucgcccucagccugcuugcuauucugaaggggaucuacaauguggccacaugcggacucuucggccugaucuccuuucuucugcucugugggagaucuugcagcgucacguauaaaggaguguacgaacugcagacccuggagcucaacauggcgaaucugaacaugacaaugccucuuuccuguaccaagaauaacucucaucacuauauuaugguuggcaaugaaacagggcuggagcucacccugacaaacaccagcaucauuaaucauaaauucugcaaccuuuccgacgcucacaagaaaaaucuguacgaucaugcccucaugucuaucauuagcacguuucaccuguccaucccgaacuucaaucaguaugaggccaugagcugugacuuuaacggaggcaagauuucugugcaguacaaucugucccacagcuucgcugucgaugccgcuaaccauugcggcaccaucgccaacggggugcuccaaacauuuaugcggauggcguggggaggcucuuauaucgcccuggacuccgggaagggaaauugggauuguauuaugaccagcuaccaguaccuuaucauucagaacacaaccugggaagaccacugccaguucucucgccccuccccuaucggcuaucuggggcuccugagccaaagaacgcgggauauuuacaucucccgcagacggcgcggaacauuuaccuggacacuuucugacagcgagggcaaugaagcucccggcggguauugucugaccagauggaugcucaucgaggccgagcugaaaugcuucggaaacaccgcuguugccaaguguaaugaaaaacaugaugaggaauuuugcgacaugcugcgccucuucgauuucaacaagcaggcgauuaaacggcugaagacgccugcccagauguccauccagcuuauuaauaaggcugugaacgcccugaucaaugaccaacucauuaugaaaaaccaccugagagauaucaugggcauccccuacugcaauuauagccgguacuguuaucuuaaccacacagucaccgggaagacaucucugccucgcugcugucucguguccaauggaagcuaccugaacgagacccauuuuucugacgacauugaacagcaggcugauaauaugaucacagagaugcugcaaaaagaguacauggacagacagggcaagaccccgcucgggcugguggaucuuuucgucuuuagcacguccuucuaucugauuucuaucuuucuccaccugguuaaaauucccacacaucggcacaucgugggaaagccuugccccaaaccucaucgccugaaccacaugggcauuuguagcugcggccuuuacaagcaccccggggugccggucaaguggaaaagaugaggacuagucccuguucccagagcccacuuuuuuuucuuuuuuugaaauaaaauagccugucuuucagaucucaaaggcucuuuucagagccaccaaaaaaaaaaaaaaaaaaaaaaaaaaaaaaaaaaaaaaaaaaaaaaaaaaaaaaaaaaaaaaaaagaauu

SEQ ID NO: 25288 - RNA, 1733 nt, Artificial Sequence
  mRNA product Design a-2 (hSL-A64-N5) comprising derived and/or modified sequence from LASV(GA391;Clade III)__CAA36645__GPCmut3 (opt5)
aggagaguccgcucagccagguugcagaagcggcuuagcguguguccuaaucuucucucugcguguagguaggccugugccgcaaacaagcuuaccaugggccagaucgugaccuucuuucaagaggucccccacguuauugaagaggugaugaacaucgugcugauugcccucagcauccuggcuauucuuaaggggcuguacaaugucgccacaugcggacucaucggccuggugacguuccuucugcucuccgggagaucuuguagccugaucuauaaaggaaccuacgaacugcagacacucgagcugaacauggaaacccuuaauaugacaaugccucuguccugcaccaagaacaauucucaucacuauauucggguuggcaacgagacagggcucgagcugacccuuacgaauaccagcauccugaaccauaaauuuuguaaucucuccgacgcgcacaagcgcaaccuguacgaucauucucugaugagcauuaucuccacauuccaccucagcauuccgaauuuuaaccaguaugaagcuaugucuugcgacuucaauggaggcaaaaucaccgugcaguacaaccugucccacagcuuugccgucgaugccgcuggccauugugggacacuugccaauggagugcugcaaaccuucaugagaauggcuuggggcgggucuuauauugcccucgacuccggacggggcaacugggauugcaucaugacgagcuaccaguaccugaucauucagaacacaaccugggacgaucacugucaguuuucucgccccuccccuaucggguaucuuggacugcucagccaaagaacacgggacauuuacaucucccgcagacggcgcggcaccuucaccuggacacugucugauagcgagggcaaugaaacgcccgggggauauugccugaccagauggaugcucauugaggcggagcugaaguguuuuggcaacacagccguugcuaagugcaaugaaaaacaugacgaggaguucugugauaugcuucggcuguuugacuucaacaagcaggccauccgcagacucaaaaccccugcucagauguccauccagcugauuaauaaggccgugaacgcgcuuaucaaugaucaacugauuaugaaaaaccaccuccgggacaucauggggauucccuacugcaauuauagccgcuacugcuaucugaaccacacaucuaccggaaagacgucccugccuagauguugccucaucagcaauggcucuuaccugaacgaaacaaaguucagcgacgauaucgaacagcaggccgacaauaugauuaccgagaugcuucaaaaagaguacaucgaucggcaggggaagaccccgcugggacucgucgaccuguuuguguucuccacaucuuuuuaucugauuagcaucuuccuucaucucgugaaaauucccacccacagacauaucgucggcaagccuugucccaaaccucaccgccugaaccauaugggcauuugcuccugugggcuguacaagcagcccggaguuccggugcgguggaaaagaugaggacuagucccuguucccagagcccacuuuuuuuucuuuuuuugaaauaaaauagccugucuuucagaucucaaaggcucuuuucagagccaccaaaaaaaaaaaaaaaaaaaaaaaaaaaaaaaaaaaaaaaaaaaaaaaaaaaaaaaaaaaaaaaaagaauu

SEQ ID NO: 25289 - RNA, 1736 nt, Artificial Sequence
  mRNA product Design a-2 (hSL-A64-N5) comprising derived and/or modified sequence from LASV(AV;Clade V)__CCA30314__GPCmut3 (opt5)
aggagaguccgcucagccagguugcagaagcggcuuagcguguguccuaaucuucucucugcguguagguaggccugugccgcaaacaagcuuaccaugggccagaucgugaccuucuuucaagaggucccccacguuauugaagaggugaugaacaucgugcugauugcccucagcauccuggcuguccuuaaggggcuguacaauauugccacaugcggacucaucggccugaucacguuccuucugcucugugggagauccugcucuagcaaccuguauaaaggaguguacgaacugcagucccucgaccugaauauggagacccuuaacaugacaaugccucugucuuguaccaagaauaacagccaucacuauauucggguuggcaaugauacagggcucgaacugacccuuacaaacaccuccauccugaaucauaaauuuugcaaccucucugacgcgcacaagaaagaucuguacgaccaugcucugaugagcauuaucuccacguuccaccucagcauuccgaauuuuaaccaguaugaggccaugucuugugauuucaauggaggcaagaucuccgugcaguacaaccugagccacucuuaugccauugacgcugccaaucauugcggcaccgucgcuaacgggauccuucaaacauuuaugcgcauggccuggggaggcuccuacaucgcgcuggauagcgggagaggaaacugggacuguauuaugaccucuuaccaguaucucaucauucagaauacaaccugggagaaccacugccaguucucccggcccagcccuaucggcuaccuggggcuucugucccaacgcacgagagauauuuauaucucucggcgcagacggggaacauuuaccuggacacucagcgacuccgaaggcaaugccacccccggcggguacugucugacccgcuggaugcugaucgaggcugaacucaagugcuucggaaacacagccguggcuaaauguaaugagaagcaugaugaggaauuuugcgacaugcugagacuuuucgauuuuaacaaacaggccauuagccggcugaagucuccugcgcagauguccauccagcucauuaauaaagccguuaacgcucugaucaaugaccaacuuauuaugaagaaccaucugcgcgacaucaugggcauccccuauugcaauuacagcaaguauuguuaccucaaccacacgauuaccgggaaaacaucucugccuaagugcugucuggugagcaauggauccuaccucaacgagacccacuucucugaugacaucgaacagcaggccgauaauaugauuacagagaugcugcaaaaagaauauauggagagacagggcaagaccccgcuugggcuggucgaccucuucguguuuagcacguccuucuaccugaucagcauuuuucugcggcuugugaaaauccccacacaccgccauauugucggaaagccuugccccaaaccucacagacucaaccauaugggcaucuguucuugcggccuguauaagcagcccgggguuccggugcgguggaagagaugaggacuagucccuguucccagagcccacuuuuuuuucuuuuuuugaaauaaaauagccugucuuucagaucucaaaggcucuuuucagagccaccaaaaaaaaaaaaaaaaaaaaaaaaaaaaaaaaaaaaaaaaaaaaaaaaaaaaaaaaaaaaaaaaagaauu

SEQ ID NO: 25290 - RNA, 1733 nt, Artificial Sequence
  mRNA product Design a-2 (hSL-A64-N5) comprising derived and/or modified sequence from LASV(Togo/2016/7082;Clade VI)__AMR44577__GPCmut3 (opt5)
aggagaguccgcucagccagguugcagaagcggcuuagcguguguccuaaucuucucucugcguguagguaggccugugccgcaaacaagcuuaccaugggccagaucauuaccuucuuucaagaggugccccacgucaucgaagagguuaugaacauugugcugaucgcccucagccugcuugcuauucugaaggggguguacaaugucgccacaugcggaaucaucggccucgugacguuccuguuucuuugugggagauccugcucucugauuuauaaaggaagcuacgaacuccagacccuggagcugaacauggaaacacucaauaugaccaugccucuguccuguacaaagaacucuagccaucacuauauccggguuggcaaugagaccgggcuugagcugacacucaccaacacguccauuaucaaucauaaauucugcaaccugucugacgcgcacaagcgcaaucuuuacgaucaugcucugaugagcauucucuccaccuuucaccugagcaucccgaacuucaaucaguaugaagccaugucuugugacuuuaacggaggcaaaauuuccgugcaguacaaucugagccacgccuaugcugucgaugccgcugagcauugcggcacaguggccaacgggguucuccaaaccuucaugagaauggcguggggaggcucuuacaucgcccuggacuccgggcggggaaauugggauuguaucaugacaagcuaccaguaucuuauuauccagaacaccacgugggaagaccacugccaguuuucucgccccuccccuauuggcuaccuggggcuccugagccaaagaacacgggauaucuauauuucccgcagacggcgcggaaccuucacauggacccuuucugacagcgagggcaacgagacccccggcggguacugucugacaagauggaugcucaucgaagcugagcugaagugcuuuggaaauacggccguggcuaaguguaacgaaaaacaugaugaggaguucugcgacaugcugcggcucuuugauuucaauaagcaggccauccagcgccugaaauccccugcgcagaugagcauucaacuuaucaacaaggccgucaaugcucugauuaacgaccagcucaucaugaaaaaucaccugagagauaugaugggcauucccuauugcaacuacucuaaguauuguuaccuuaaucacaccuccagcgggcggacaucucugccuaagugcugucucgugagcaacggauccuaccugaaugaaacccauuucucugacgacaucgagcagcaagccgauaacaugaucacagaaaugcugcagaaagaguauauugaccgccagggcaagaccccgcucgggcugguggaucuuuuugucuucagcacguccuuuuaccugaucagcauuuuccuccaccugaucaaaauucccacacauagacacaucguuggaaagccuugccccaaaccucaucggcugaaucacaugggcauuuguucuugcggccuuuauaagcagcccggggugccgaccagauggaaacgcugaggacuagucccuguucccagagcccacuuuuuuuucuuuuuuugaaauaaaauagccugucuuucagaucucaaaggcucuuuucagagccaccaaaaaaaaaaaaaaaaaaaaaaaaaaaaaaaaaaaaaaaaaaaaaaaaaaaaaaaaaaaaaaaaagaauu

SEQ ID NO: 25291 - RNA, 1733 nt, Artificial Sequence
  mRNA product Design a-2 (hSL-A64-N5) comprising derived and/or modified sequence from LASV(KAK-428;Clade n.d. (VII))__ANH09740__GPCmut3 (opt5)
aggagaguccgcucagccagguugcagaagcggcuuagcguguguccuaaucuucucucugcguguagguaggccugugccgcaaacaagcuuaccaugggccagaucgugaccuucuuucaagaggucccccacguuauugaagaggugaugaacaucgugcugauugcccucagccugcuugcuauccugaaggggcucuacaauuucgccacaugcggagucauuggccugaucacguuucuucugcucugugggagauccugcucugcgaccuauaaaggacaguacgaacugcagacacuggagcucaacauggaaagccugaauaugaccaugccucuuuccuguacaaagaacaauucucaucacuauauccgggcuggcaacaauaccgggcuggagcucacacugaccaacacgagcauuaucucccauaaauucugcaaucuuucugacgcccacaagaaaaaccuguacgaucauacccucaugagcauuaucacaaccuuucaccuguccauuccgaauuucaaccaguaugaggccaugagcugugacuuuaauggaggcaagaucucuauucaauacaaccugucccacagcuaugcuggcgaugccgcucagcauugcgggacaguggccaauggaguucuccagaccuucaugcgcauggcguggggcgggucuuaccuggcccuugacuccggaagacggggcugggauuguaucaucagcucuuaccaguaucugauuauccaaaacacgacaugggacgaucacugccaguuuucccgccccagcccuauuggguaccucggauucgugucccagaagaccagagacaucuauauuucucggcgcagacggggcacauuuaccuggacccugagcgauuccgaaggccaugacaugcccgggggauacugucuuacacgcuggaugcugaucgaggcugaucucaaaugcuucggcaacacggccgucgcuaaguguaaugaaaaacacgacgaggaguuuugcgauauguggagacuguucgacuucaacaagcaggccauccaacggcugaaagcgccugcccagaugaauauucagcucaucaacaaggcugugaaugcccugauuaacgaccaacuuaugaugaagaaucaucugcgcgauaucauggggauucccuauugcaacuacagcaaauuuuguuaucucaauaacaccacaaccggaagaacaucucugccucggugcugucuuaucuccaauggcagcuaccugaacgaaacccacuucucugacgauaucgagcagcaggcugacaauaugauuacggaaaugcuccagaaggaguacauggaucgccaagggaaaacaccgcugggacugguugaccucuuuguguucagcaccuccuuuuaucugaucaccauuuuccuucaccuggucaagauccccacacauagacacauugugggcaaaccuugccccaagccucaucggcucaaccacaugggcaucuguucuugcgggcuguacaaacagcccggagugccggucagauggaagcgcugaggacuagucccuguucccagagcccacuuuuuuuucuuuuuuugaaauaaaauagccugucuuucagaucucaaaggcucuuuucagagccaccaaaaaaaaaaaaaaaaaaaaaaaaaaaaaaaaaaaaaaaaaaaaaaaaaaaaaaaaaaaaaaaaagaauu

SEQ ID NO: 25292 - RNA, 1733 nt, Artificial Sequence; identical to SEQ ID NO: 25286
  mRNA product Design a-2 (hSL-A64-N5) comprising derived and/or modified sequence from LASV(Pinneo-NIG-1969;Clade I)__AIT17836__GPCmut3 (opt5)

SEQ ID NO: 25293 - RNA, 1733 nt, Artificial Sequence
  mRNA product Design a-2 (hSL-A64-N5) comprising derived and/or modified sequence from LASV(ISTH0009-NIG-2011;Clade II)__AIT17404__GPCmut3 (opt5)
aggagaguccgcucagccagguugcagaagcggcuuagcguguguccuaaucuucucucugcguguagguaggccugugccgcaaacaagcuuaccaugggccagaucauuaccuucuuucaagaggugccccacgucaucgaagagguuaugaacauugugcugaucgcccucagccugcuugcuauucugaaggggaucuacaauguggccacaugcggacucuucggccuggucuccuuucuucugcucugugggagaucuugcagcacgaccuauaaaggaguguacgaacugcagacacuggagcucgacauggcgucccugaacaugaccaugccucuuucuuguacaaagaauaacagccaucacuauaucaugguuggcaaugaaaccgggcuggagcucacacugaccaacacguccauuaucaaucauaaauucugcaaccuuucugaugcucacaagaaaaaucuguacgaccaugcccucaugagcauuaucuccaccuuucaccugagcauuccgaacuucaaucaguaugaggccaugucuugugauuuuaacggaggcaagaucuccgugcaguacaaucugagccacgcuuaugccgucgacgcugccaaccauugcggcacaauugcgaauggggugcuccaaaccuucaugcggauggccuggggaggcucuuacaucgcucuggauuccgggaagggaagcugggacuguaucaugacaucuuaccaguaucuuauuauccagaacaccacgugggaagaucacugccaguuuucccgccccagcccuauuggcuaccuggggcuccugucccaaagaacacgggacaucuauauuucucgcagacggcgcggaaccuucacauggacccuuagcgauuccgagggcaacgaaacccccggcggguacugucugacaagauggaugcucaucgaggccgagcugaaaugcuuuggaaauacggcuguugccaaguguaacgaaaaacaugacgaggaguucugcgauaugcugcggcucuuugacuucaauaagcaggcgauccgcagacugaaaaccccugcccagaugagcauucagcuuaucaacaaggcugugaaugcccugauuaacgaucaacucaucaugaagaaucaucugcgggacauuaugggcauccccuauugcaacuacucuaaauauuguuaccuuaaucacacagucaccgggaagacaucccugccucgcugcugucucgugagcaacggaucuuaccugaaugaaacccacuucagcgacgauaucgaacagcaggcugacaacaugauuacggagcugcuccaaaaagaguauauggauagacagggcaagacaccgcuggggcuuguggaccuguuugucuucuccaccucuuuuuaccucaucagcauuuuccugcaccugaucaaaauucccacccaucggcacaucacaggaaagccuugccccaaaccucaucgccuuaaucacaugggcauuuguuccugcggccucuauaagcaccccgggguuccggugaaguggaaaagaugaggacuagucccuguucccagagcccacuuuuuuuucuuuuuuugaaauaaaauagccugucuuucagaucucaaaggcucuuuucagagccaccaaaaaaaaaaaaaaaaaaaaaaaaaaaaaaaaaaaaaaaaaaaaaaaaaaaaaaaaaaaaaaaaagaauu

SEQ ID NO: 25294 - RNA, 1733 nt, Artificial Sequence
  mRNA product Design a-2 (hSL-A64-N5) comprising derived and/or modified sequence from LASV(ISTH2010-NIG-2012;Clade II)__AIT17482__GPCmut3 (opt5)
aggagaguccgcucagccagguugcagaagcggcuuagcguguguccuaaucuucucucugcguguagguaggccugugccgcaaacaagcuuaccaugggccagaucauuaccuucuuucaagaggugccccacgucaucgaagagguuaugaacauugugcugaucgcccucagccugcuugcuauucugaaggggaucuacaauguggccacaugcggacucuucggccuggucuccuuucuucugcucugugggagaucuugcagcacgaccuauaaaggaguguacgaacugcagacacuggagcucgacauggcgucccugaacaugaccaugccucuuucuuguacaaagaauaacagccaucacuauaucaugguuggcaaugaaaccgggcuggagcucacacugaccaacacguccauuaucaaucauaaauucugcaaccuuucugaugcucacaagaaaaaucuguacgaccaugcccucaugagcauuaucuccaccuuucaccugagcauuccgaacuucaaucaguaugaggccaugucuugugauuuuaacggaggcaagaucuccgugcaguacaaucugagccacgcuuaugccgucgacgcugccaaccauugcggcacaauugcgaauggggugcuccaaaccuucaugcggauggccuggggaggcucuuacaucgcucuggauuccgggaagggaagcugggacuguaucaugacaucuuaccaguaucuuauuauccagaacauuaccugggaagaucacugccaguuuucccgccccagcccuaucggcuaccuggggcuccugucccaaagaacgcgggacauuuauaucucucgcagacggcgcggaacauucaccuggacacuuagcgauuccgagggcaacgaaacccccggcggguacugucugaccagauggaugcucaucgaggccgagcugaaaugcuuuggaaauacagcuguugccaaguguaacgaaaaacaugacgaggaguucugcgauaugcugcggcucuuugacuucaauaagcaggcgauucgcagacugaaaacgccugcccagaugagcauccagcuuauuaacaaggcugugaaugcccugaucaacgaucaacucauuaugaagaaucaucugcgggacaucaugggcauccccuauugcaacuacucuaaauauuguuaccuuaaucacaccgucacagggaagaccucccugccucgcugcugucucgugagcaacggaucuuaccugaaugaaacacacuucagcgacgauauugaacagcaggcugacaacaugaucaccgagcugcuccaaaaagaguauauugauagacagggcaagacgccgcuggggcuuguggaccuguuugucuucuccacaucuuuuuaccucaucagcauuuuccugcaccugguuaaaauccccacccaucggcacguggugggaaagccuugccccaaaccucaucgccuuaaucacaugggcauuuguuccugcggccucuauaagcaccccggggucccggugaaguggaaaagaugaggacuagucccuguucccagagcccacuuuuuuuucuuuuuuugaaauaaaauagccugucuuucagaucucaaaggcucuuuucagagccaccaaaaaaaaaaaaaaaaaaaaaaaaaaaaaaaaaaaaaaaaaaaaaaaaaaaaaaaaaaaaaaaaagaauu

SEQ ID NO: 25295 - RNA, 1733 nt, Artificial Sequence
  mRNA product Design a-2 (hSL-A64-N5) comprising derived and/or modified sequence from LASV(Lassa virus/H.sapiens-wt/NGA/2015/ISTH_0543;Clade II)__AVO03639__GPCmut3 (opt5)
aggagaguccgcucagccagguugcagaagcggcuuagcguguguccuaaucuucucucugcguguagguaggccugugccgcaaacaagcuuaccaugggccagaucauuaccuucuuucaagaggugccccacgucaucgaagagguuaugaacauugugcugaucgcccucagccugcuugcuauucugaaggggaucuacaauguggccacaugcggacucuucggccuggucuccuuucuucugcucugugggagaucuugcagcacgaccuauaaaggaguguacgaacugcagacacuggagcucgacauggcgaaccugaauaugaccaugccucuuuccuguacaaagaacaauucucaucacuauaucaugguuggcaacgaaaccgggcuggagcucacacugaccaauacgagcauuaucaaccauaaauucugcaaucuuuccgaugcucacaagaaaaaccuguacgaccaugcccucaugucuauuaucagcaccuuucaccuguccauuccgaauuucaaccaguaugaggccaugagcugugauuuuaauggaggcaagaucucugugcaguacaaccugucccacacauaugcugucgacgccgcuaaucauugcggcaccauugccaacggggugcuccaaacauucaugcggauggcguggggaggcagcuacaucgcccuggauucugggaagggauccugggacuguaucaugaccagcuaccaguaucuuguuauucagaacacgacaugggaagaucacugccaguuuucucgccccuccccuaucggcuaccuggggcuccugagccaaagaacccgggacauuuauaucucccgcagacggcgcggaacauucaccuggacccuuucugauagcgagggcaaugaaacacccggcggguacugucugacgagauggaugcucauugaggcugagcugaaaugcuuuggaaacaccgccguggcuaaguguaaugaaaaacaugacgaggaguucugcgauaugcugcggcucuuugacuucaacaagcaggccauccgcagacugaaaaccccugcgcagauguccauccagcuuauuaauaaggccgucaacgcucugaucaaugaucaacucauuaugaagaaccaucugcgggacaucaugggcauucccuauugcaauuacagcaaauauuguuaccuuaaccacacagugacagggaagaccucucugccucgcugcugucucguguccaauggaagcuaccugaacgaaacgcacuucucugacgauaucgaacagcaggccgacaauaugaucacagagcugcuccaaaaagaguauauugauagacagggcaagaccccgcuggggcuugucgaccuguuuguuuucagcaccuccuuuuaccucaucucuauuuuccugcaccuggugaaaauccccacacaucggcacauuaccggaaagccuugccccaaaccucaucgccuuaaccacaugggcaucuguagcugcggccucuauaagcaccccggggugccggucaaguggaaaagaugaggacuagucccuguucccagagcccacuuuuuuuucuuuuuuugaaauaaaauagccugucuuucagaucucaaaggcucuuuucagagccaccaaaaaaaaaaaaaaaaaaaaaaaaaaaaaaaaaaaaaaaaaaaaaaaaaaaaaaaaaaaaaaaaagaauu

SEQ ID NO: 25296 - RNA, 1733 nt, Artificial Sequence
  mRNA product Design a-2 (hSL-A64-N5) comprising derived and/or modified sequence from LASV(Lassa virus/H.sapiens-wt/NGA/2016/ISTH_0009;Clade II)__AVO03571__GPCmut3 (opt5)
aggagaguccgcucagccagguugcagaagcggcuuagcguguguccuaaucuucucucugcguguagguaggccugugccgcaaacaagcuuaccaugggccagaucauuaccuucuuucaagaggugccccacgucaucgaagagguuaugaacauugugcugaucgcccucagccugcuugcuauucugaaggggaucuacaauguggccacaugcggacuccugggccuugucuccuuccugcuccugugugggagaucuugcagcacgaccuauaaaggaguguacgaacugcagacacucgagcuggacauggcgucccuuaacaugaccaugccucugucuuguacaaagaauaacagccaucacuauaucaugguuggcaaugaaaccgggcucgagcugacacuuaccaacacguccauuaucaaucauaaauuuugcaaccugucugaugcucacaagaaaaaucucuacgaccaugcccugaugagcauuaucuccaccuuccaccugagcauuccgaacuuuaaucaguaugaggccaugucuugugauuucaacggaggccggaucuccgugcaguacaaucucagccacucuuaugcugucgacgccgcuaaccauugcggcacaauugccaauggggugcugcaaaccuuuaugcgcauggcguggggaggcuccuacaucgcccuugauagcgggaagggaucuugggacuguaucaugacauccuaccaguaucugauuauccagaacaccacgugggaagaucacugccaguucagcagacccuccccuauuggcuaccucgggcugcuuucucaacggacacgcgacaucuauauuagcagacggcgcagaggaaccuuuacauggacccuguccgauagcgagggcaacgaaacccccggcggguacugucucacacgguggaugcugaucgaggcugagcugaagugcuucggaaauacggccguugcuaaauguaacgaaaagcaugacgaggaauuuugcgauaugcuccgccuguucgacuuuaauaaacaggccaucagacggcuuaagaccccugcgcagaugucuauucagcugaucaacaaagccgugaaugcucucauuaacgaucaacugaucaugaagaaucaccuucgcgacauuaugggcauccccuauugcaacuacuccaaguauuguuaccugaaucacacagucaccgggaaaacaagccucccuagaugcugucuggugucuaacggaagcuaccugaaugagacccauuucuccgacgauaucgaacagcaggccgacaacaugauuacggagcuccugcaaaaggaguauaucgaucggcagggcaaaacaccgcuugggcugguggaccucuucgucuuuucuaccagcuucuaccugauuuccaucuuucugcaccuuguuaagauucccacccaucgccacaucacaggaaaaccuugccccaagccucauagacucaaucacaugggcauuuguagcugcggccuguauaaccaccccggggugccggugaaauggaagcggugaggacuagucccuguucccagagcccacuuuuuuuucuuuuuuugaaauaaaauagccugucuuucagaucucaaaggcucuuuucagagccaccaaaaaaaaaaaaaaaaaaaaaaaaaaaaaaaaaaaaaaaaaaaaaaaaaaaaaaaaaaaaaaaaagaauu

SEQ ID NO: 25297 - RNA, 1733 nt, Artificial Sequence
  mRNA product Design a-2 (hSL-A64-N5) comprising derived and/or modified sequence from LASV(Lassa virus/H.sapiens-wt/NGA/2016/ISTH_0017;Clade II)__AVO03567__GPCmut3 (opt5)
aggagaguccgcucagccagguugcagaagcggcuuagcguguguccuaaucuucucucugcguguagguaggccugugccgcaaacaagcuuaccaugggccagaucauuaccuucuuucaagaggugccccacgucaucgaagagguuaugaacauugugcugaucgcccucagccugcuugcuauucugaaggggaucuacaauguggccacaugcggacucuucggccuggucuccuuucuucugcucugugggagaucuugcagcacgaccuauaaaggaguguacgaacugcagacacuggagcucgacauggcgucccugaacaugaccaugccucuuucuuguacaaagaauaacagccaucacuauaucaugguuggcaaugaaaccgggcuggagcucacacugaccaacacguccauuaucaaucauaaauucugcaaccuuucugaugcucacaagaaaaaucuguacgaccaugcccucaugagcauuaucuccaccuuucaccugagcauuccgaacuucaaucaguaugaggccaugucuugugauuuuaacggaggcaagaucuccgugcaguacaaucugagccacacauaugcuauugacgccgcuaaccauugcggcaccaucgccaaugggguccuccaaacauucaugcggauggcguggggaggcucuuacaucgcccuggauuccgggaagggaagcugggacuguauuaugaccucuuaccaguaucuuaucauucagaacacgacaugggaagaucacugccaguuuucccgccccagcccuaucggcuaccuggggcuccugucccaaagaacccgggacauuuauaucucucgcagacggcgcggaacauucaccuggacccuuagcgauuccgagggcaacgaaacacccggcggguacugucugacgagauggaugcucaucgaggcugagcugaaaugcuuuggaaauaccgccguggcuaaguguaacgaaaaacaugacgaggaguucugcgauaugcugcggcucuuugacuucaauaagcaggccauucgcagacugaaaaccccugcgcagaugagcauccagcuuauuaacaaggccguuaaugcucugaucaacgaucaacucauuaugaagaaucaucugcgggacaucaugggcauccccuauugcaacuacucuaaauauuguuaccuuaaucacacagugacagggaagaccucccugccucgcugcugucucgucagcaacggaucuuaccugaaugaaacgcacuucagcgacgauauugaacagcaggccgacaacaugaucacagagcugcuccaaaaagaguauauggauagacagggcaagaccccgcuggggcuuguggaccuguuuguguucuccaccucuuuuuaccucauuagcaucuuccugcaccugguccggauucccacacaucgccacguuaucggaaaaccuugccccaagccucauagacuuaaucacaugggcauuuguuccugcggccucuauaaacaccccggggugccggugaaguggaagcggugaggacuagucccuguucccagagcccacuuuuuuuucuuuuuuugaaauaaaauagccugucuuucagaucucaaaggcucuuuucagagccaccaaaaaaaaaaaaaaaaaaaaaaaaaaaaaaaaaaaaaaaaaaaaaaaaaaaaaaaaaaaaaaaaagaauu

SEQ ID NO: 25298 - RNA, 1733 nt, Artificial Sequence
  mRNA product Design a-2 (hSL-A64-N5) comprising derived and/or modified sequence from LASV(Lassa virus/H.sapiens-wt/NGA/2018/ISTH_0959;Clade II)__AVV65099__GPCmut3 (opt5)
aggagaguccgcucagccagguugcagaagcggcuuagcguguguccuaaucuucucucugcguguagguaggccugugccgcaaacaagcuuaccaugggccagaucauuaccuucuuucaagaggugccccacgucaucgaagagguuaugaacauugugcugaucgcccucagccugcuugcuauucugaaggggaucuacaauguggucacaugcggacucuucggccugguguccuuucuucugcucugugggagaucuugcagcacgaccuauaaaggaguuuacgaacugcagacacuggagcucgacauggccucccugaacaugaccaugccucuuucuuguacaaagaauaacagccaucacuauaucauggugggcaaugaaaccgggcuggagcucacacugaccaacacguccauuaucaaucauaaauucugcaaccuuucugaugcgcacaagaaaaaucuguacgaccaugcucucaugagcauuaucuccaccuuucaccugagcauuccgaacuucaaucaguaugaggccaugucuugugauuuuaacggaggcaagaucuccguccaguacaaucugagccacgccuaugcuauugacgccgcuaaccauugcggcacaaucgccaauggggugcuccaaaccuucaugcggauggcguggggaggcucuuacaucgcccuggauuccgggaagggaagcugggacuguauuaugacaucuuaccaguaucuuaucauucagaacaccacgugggaagaucacugccaguuuucccgccccagcccuaucggcuaccuggggcuccugucccaaagaacacgggacauuuauaucucucgcagacggcgcggaaccuucacauggacccuuagcgauuccgagggcaacgaaacccccggcggguacugucugacaagauggaugcucaucgaggcugagcugaaaugcuuuggaaauacggccguugcuaaguguaacgaaaaacaugacgaggaguucugcgauaugcugcggcucuuugacuucaauaagcaggccauucgcagacugaaaaccccugcgcagaugagcauccagcuuauuaacaaggccgugaaugcucugaucaacgaucaacucauuaugaagaaucaucugcgggacaucaugggcauccccuauugcaacuacucuaaauauuguuaccuuaaucacacagucaccgggaagacaucccugccucgcugcugucucgugagcaacggaucuuaccugaaugaaacccacuucagcgacgauauugaacagcaggccgacaacaugaucacggagcugcuccaaaaagaguauauugauagacagggcaagacaccgcuggggcuuguggaccuguuugucuucuccaccucuuuuuaccucaucagcauuuuccugcaccugguuaaaauccccacccaucggcacgugauuggaaagccuugccccaaaccucaucgccuuaaucacaugggcaucuguuccugcggccucuauaagcaccccggggugccggucaaguggaaaagaugaggacuagucccuguucccagagcccacuuuuuuuucuuuuuuugaaauaaaauagccugucuuucagaucucaaaggcucuuuucagagccaccaaaaaaaaaaaaaaaaaaaaaaaaaaaaaaaaaaaaaaaaaaaaaaaaaaaaaaaaaaaaaaaaagaauu

SEQ ID NO: 25299 - RNA, 1733 nt, Artificial Sequence
  mRNA product Design a-2 (hSL-A64-N5) comprising derived and/or modified sequence from LASV(LASV003-NIG-2008;Clade II)__AIT17580__GPCmut3 (opt5)
aggagaguccgcucagccagguugcagaagcggcuuagcguguguccuaaucuucucucugcguguagguaggccugugccgcaaacaagcuuaccaugggccagaucauuaccuucuuucaagaggugccccacgucaucgaagagguuaugaacauugugcugaucgcccucagccugcuugcuauucugaaggggaucuacaauguggccacaugcggacucuucggccuggucuccuuucuucugcucugugggagaucuugcagcacgaccuauaaaggaguguacgaacugcagacacuggagcucgacauggcgucccugaacaugaccaugccucuuucuuguacaaagaauaacagccaucacuauaucaugguuggcaaugaaaccgggcuggagcucacacugaccaacacguccauuaucaaucauaaauucugcaaccuuucugaugcucacaagaaaaaucuguacgaccaugcccucaugagcauuaucuccaccuuucaccugagcauuccgaacuucaaucaguaugaggccaugucuugugauuuuaacggaggcaagaucuccgugcaguacaaucugagccacacauaugcugucgacgccgcuaaccauugcggcaccauugccaauggggugcuccaaacauucaugcggauggcguggggaggcucuuacaucgcccuggauuccgggaagggaagcugggacuguaucaugaccucuuaccaguaucuuauuauccagaacacgacaugggaagaucacugccaguuuucccgccccagcccuauuggcuaccuggggcuccugucccaaagaacccgggacaucuauauuucucgcagacggcgcggaacauucaccuggacccuuagcgauuccgagagcaacgaaacacccggcggcuacugucugacgagauggaugcucaucgaggcugagcugaaaugcuuugggaauaccgccguugcuaaguguaacgaaaaacaugacgaggaguucugcgauaugcugcggcucuuugacuucaauaagcaggccauccgcagacugaaagcgccugcccagaugucuauucagcuuaucaacaaggcugugaaugcccugauuaacgaucaacucaucaugaagaaucaucugcgggacauuaugggaauccccuauugcaacuacuccaaauauuguuaccuuaaucacacagucaccggccgcacaagccugccuagaugcugucucgugucuaacgggagcuaccugaaugaaacccacuucuccgacgauaucgaacagcaggcugacaacaugauuacggagcugcuccaaaaggaguauauggaucggcagggaaaaacaccgcugggccuuguggaccuguuugucuucucuaccagcuuuuaccucaucuccauuuuccugcaccugguuaagauccccacccaucgccacgugauugggaaaccuugccccaagccucauagacuuaaucacaugggaaucuguagcugcggccucuauaaacaccccggcgugccggucaaguggaagcggugaggacuagucccuguucccagagcccacuuuuuuuucuuuuuuugaaauaaaauagccugucuuucagaucucaaaggcucuuuucagagccaccaaaaaaaaaaaaaaaaaaaaaaaaaaaaaaaaaaaaaaaaaaaaaaaaaaaaaaaaaaaaaaaaagaauu

SEQ ID NO: 25300 - RNA, 1733 nt, Artificial Sequence
  mRNA product Design a-2 (hSL-A64-N5) comprising derived and/or modified sequence from LASV(LASV035-NIG-2009;Clade II)__AIT17588__GPCmut3 (opt5)
aggagaguccgcucagccagguugcagaagcggcuuagcguguguccuaaucuucucucugcguguagguaggccugugccgcaaacaagcuuaccaugggccagaucauuaccuucuuucaagaggugccccacgucaucgaagagguuaugaacauugugcugaucgcccucagccugcuugcuauucugaaggggaucuacaauguggccacaugcggacucuucggccuggucuccuuucuucugcucugugggagaucuugcagcacgaccuauaaaggaguguacgaacugcagacacuggagcucgacauggcgucccugaacaugaccaugccucuuucuuguacaaagaauaacagccaucacuauaucaugguuggcaaugaaaccgggcuggagcucacacugaccaacacguccauuaucaaucauaaauucugcaaccuuucugaugcucacaagaaaaaucuguacgaccaugcccucaugagcauuaucuccaccuuucaccugagcauuccgaacuucaaucaguaugaggccaugucuugugauuuuaacggaggcaagaucuccgugcaguacaaucugagccacgcuuaugccgucgacgcugccaaccauugcggcacaauugcgaauggggugcuccaaaccuucaugcggauggccuggggaggcucuuacaucgcucuggauuccgggaagggaagcugggacuguaucaugacaucuuaccaguaucuuauuauccagaacaccacgugggaagaucacugccaguuuucccgccccagcccuauuggcuaccuggggcuccugucccaaagaacacgggacaucuauauuucucgcagacggcgcggaaccuucacauggacccuuagcgauuccgagggcaacgaaacccccggcggguacugucugacaagauggaugcucaucgaggccgagcugaaaugcuuuggaaauacggcuguugccaaguguaacgaaaaacaugacgaggaguucugcgauaugcugcggcucuuugacuucaauaagcaggcgauccgcagacugaaagccccugcucagaugagcauucagcuuaucaacaaggccgugaaugcucugauuaacgaucaacucaucaugaagaaucaucugcgggacauuaugggcauccccuauugcaacuacucuaaauauuguuaccuuaaucacaccgucacagggaagaccucccugccucgcugcugucucgugagcaacggaucuuaccugaaugaaacacacuucagcgacgauaucgaacagcaggccgacaacaugauuaccgagcugcuccaaaaagaguauaucgauagacagggcaagacgccgcuggggcuuguggaccuguuugucuucuccacaucuuuuuaccucauuagcaucuuccugcaccugguuaaaauucccacccaucggcacgugaucggaaagccuugccccaaaccucaucgccuuaaucacaugggcauuuguuccugcggccucuauaagcaccccggggugccggucaaguggaaaagaugaggacuagucccuguucccagagcccacuuuuuuuucuuuuuuugaaauaaaauagccugucuuucagaucucaaaggcucuuuucagagccaccaaaaaaaaaaaaaaaaaaaaaaaaaaaaaaaaaaaaaaaaaaaaaaaaaaaaaaaaaaaaaaaaagaauu

SEQ ID NO: 25301 - RNA, 1733 nt, Artificial Sequence
  mRNA product Design a-2 (hSL-A64-N5) comprising derived and/or modified sequence from LASV(LASV1000-NIG-2009;Clade II)__AIT17782__GPCmut3 (opt5)
aggagaguccgcucagccagguugcagaagcggcuuagcguguguccuaaucuucucucugcguguagguaggccugugccgcaaacaagcuuaccaugggccagaucauuaccuucuuucaagaggugccccacgucaucgaagagguuaugaacauugugcugaucgcccucagccugcuugcuauucugaaggggaucuacaauguggccacaugcggacucuucggccuggucuccuuucuucugcucugugggagaucuugcagcacgaccuauaaaggaguguacgaacugcagacacuggagcucgacauggcgucccugaacaugaccaugccucuuucuuguacaaagaauaacagccaucacuauaucaugguuggcaaugaaaccgggcuggagcucacacugaccaacacguccauuaucaaucauaaauucugcaaccuuucugaugcucacaagaaaaaucuguacgaccaugcccucaugagcauuaucuccaccuuucaccugagcauuccgaacuucaaucaguaugaggccaugucuugugauuuuaacggaggcaagaucuccgugcaguacaaucugagccacacauaugcugucgacgccgcuaaccauugcggcaccauugccaauggggugcuccaaacauucaugcggauggcguggggaggcucuuacaucgcccuggauuccgggaagggaagcugggacuguaucaugaccucuuaccaguaucuuauuauccagaacacgacaugggaagaucacugccaguuuucccgccccagcccuauuggcuaccuggggcuccugucccaaagaacccgggacaucuauauuucucgcagacggcgcggaacauucaccuggacccuuagcgauuccgagggcaacgaaacacccggcggguacugucugacgagauggaugcucaucgaggcugagcugaaaugcuuuggaaauaccgccguugcuaaguguaacgaaaaacaugacgaggaguucugcgauaugcugcggcucuuugacuucaauaagcaggccaucaaacgccugaagaccccugcgcagaugagcauucagcuuaucaacaaggccgugaaugcucugauuaacgaucaacucaucaugaaaaaucaccugagagacauuaugggcauccccuauugcaacuacucuaaguauuguuaccuuaaucacacagucacagggaaaaccucccugccucggugcugucucgugagcaacggaucuuaccugaaugaaacgcauuucagcgacgauaucgaacagcaggccgacaacaugauuacagagcugcuccaaaaggaguauaucgaucgccagggcaaaaccccgcuggggcuuguggaccuguuugucuucuccaccucuuuuuaccucauuagcaucuuccugcaccugguuaagauucccacacauagacacguggugggaaaaccuugccccaagccucaucggcuuaaucacaugggcaucuguuccugcggccucuauaagcaccccggggucccggugaaauggaagcgcugaggacuagucccuguucccagagcccacuuuuuuuucuuuuuuugaaauaaaauagccugucuuucagaucucaaaggcucuuuucagagccaccaaaaaaaaaaaaaaaaaaaaaaaaaaaaaaaaaaaaaaaaaaaaaaaaaaaaaaaaaaaaaaaaagaauu

SEQ ID NO: 25302 - RNA, 1733 nt, Artificial Sequence
  mRNA product Design a-2 (hSL-A64-N5) comprising derived and/or modified sequence from LASV(LASV221-NIG-2010;Clade II)__AIT17624__GPCmut3 (opt5)
aggagaguccgcucagccagguugcagaagcggcuuagcguguguccuaaucuucucucugcguguagguaggccugugccgcaaacaagcuuaccaugggccagaucauuaccuucuuucaagaggugccccacgucaucgaagagguuaugaacauugugcugaucgcccucagccugcuugcuauucugaaggggaucuacaauguggccacaugcggacucuucggccuggucuccuuucuucugcucugugggagaucuugcagcacgaccuauaaaggaguguacgaacugcagacacuggagcucgacauggcgucccugaacaugaccaugccucuuucuuguacaaagaauaacagccaucacuauaucaugguuggcaaugaaaccgggcuggagcucacacugaccaacacguccauuaucaaucauaaauucugcaaccuuucugaugcucacaagaaaaaucuguacgaccaugcccucaugagcauuaucuccaccuuucaccugagcauuccgaacuucaaucaguaugaggccaugucuugugauuuuaacggaggcaagaucuccgugcaguacaaucugagccacacauaugcuauugacgccgcuaaccauugcggcaccaucgccaaugggguccuccaaacauucaugcggauggcguggggaggcucuuacaucgcccuggauuccgggaagggaagcugggacuguauuaugaccucuuaccaguaucuuaucauucagaacacgacaugggaagaucacugccaguuuucccgccccagcccuaucggcuaccuggggcuccugucccaaagaacccgggacauuuauaucucucgcagacggcgcggaacauucaccuggacccuuagcgauuccgagggcaacgaaacacccggcggguacugucugacgagauggaugcucaucgaggcugagcugaaaugcuuuggaaauaccgccguggcuaaguguaacgaaaaacaugacgaggaguucugcgauaugcugcggcucuuugacuucaauaagcaggccauucgcagacugaaaaccccugcgcagaugagcauccagcuuauuaacaaggccguuaaugcucugaucaacgaucaacucauuaugaagaaucaucugcgggacaucaugggcauccccuauugcaacuacucuaaauauuguuaccuuaaucacacagugacagggaagaccucccugccucgcugcugucucgucagcaacggaucuuaccugaaugaaacgcacuucagcgacgauauugaacagcaggccgacaacaugaucacagagaugcugcaaaaagaguauauggauagacagggcaagaccccgcucgggcugguggaccuuuuuguguucuccaccucuuuuuaccugauuagcaucuuccuccaccuggucaaaauucccacacaucggcacguuaucggaaagccuugccccaaaccucaucgccugaaucacaugggcauuuguuccugcggccuuuauaagcaccccggggugccggugaaguggaaaagaugaggacuagucccuguucccagagcccacuuuuuuuucuuuuuuugaaauaaaauagccugucuuucagaucucaaaggcucuuuucagagccaccaaaaaaaaaaaaaaaaaaaaaaaaaaaaaaaaaaaaaaaaaaaaaaaaaaaaaaaaaaaaaaaaagaauu

SEQ ID NO: 25303 - RNA, 1733 nt, Artificial Sequence
  mRNA product Design a-2 (hSL-A64-N5) comprising derived and/or modified sequence from LASV(LASV237-NIG-2010;Clade II)__AIT17638__GPCmut3 (opt5)
aggagaguccgcucagccagguugcagaagcggcuuagcguguguccuaaucuucucucugcguguagguaggccugugccgcaaacaagcuuaccaugggccagaucauuaccuucuuucaagaggugccccacgucaucgaagagguuaugaacauugugcugaucgcccucagccugcuugcuauucugaaggggaucuacaauguggccacaugcggacucuucggccuggucuccuuucuucugcucugugggagaucuugcagcacgaccuauaaaggaguguacgaacugcagacacuggagcucgacauggcgucccugaacaugaccaugccucuuucuuguacaaagaauaacagccaucacuauaucaugguuggcaaugaaaccgggcuggagcucacacugaccaacacguccauuaucaaucauaaauucugcaaccuuucugaugcucacaagaaagaccuguacgaucaugcccucaugagcauuaucuccaccuuucaccugagcauuccgaauuucaaccaguaugaggccaugucuugugacuuuaauggaggcaagaucuccgugcaguacaaccugagccacacauaugcugucgaugccgcuaaucauugcggcaccauugccaacggggugcuccaaacauucaugcggauggcguggggaggcucuuacaucgcccuggacuccgggaagggaagcugggauuguaucaugaccucuuaccaguaucuuauuauccagaauacgacaugggaagaccacugccaguuuucccgccccagcccuauuggcuaccuggggcuccugucccaaagaacccgggauaucuauauuucucgcagacggcgcggaacauucaccuggacccuuagcgacuccgagggcaacgaaacacccggcggguacugucugacgagauggaugcucaucgaggcugagcugaaaugcuuuggaaacaccgccguugcuaaguguaaugaaaaacaugaugaggaguucugcgacaugcugcggcucuuugauuucaacaagcaggccauccgcagacugaaaaccccugcgcagaugagcauucagcuuaucaauaaggccgugaacgcucugauuaaugaccaacucaucaugaagaaccaucugcgggacauuaugggcauccccuauugcaauuacucuaaauauuguuaccuuaaccacacagucacagggaagaccucccugccucgcugcugucucgugagcaauggaucuuaccugaacgaaacgcacuucagcgaugacaucgaacagcaggccgauaauaugauuacagagcugcuccaaaaagaguauauggacagacagggcaagaccccgcuggggcuuguggaucuguuugucuucuccaccucuuuuuaccucaucagcauuuuccugcaccugaucaaaauucccacacaucggcacaucaccggaaagccuugccccaaaccucaucgccuuaaccacaugggcauuuguuccugcggccucuauaagcaccccgggguuccggugaaguggaaaagaugaggacuagucccuguucccagagcccacuuuuuuuucuuuuuuugaaauaaaauagccugucuuucagaucucaaaggcucuuuucagagccaccaaaaaaaaaaaaaaaaaaaaaaaaaaaaaaaaaaaaaaaaaaaaaaaaaaaaaaaaaaaaaaaaagaauu

SEQ ID NO: 25304 - RNA, 1733 nt, Artificial Sequence
  mRNA product Design a-2 (hSL-A64-N5) comprising derived and/or modified sequence from LASV(LASV253-NIG-2011;Clade II)__AIT17670__GPCmut3 (opt5)
aggagaguccgcucagccagguugcagaagcggcuuagcguguguccuaaucuucucucugcguguagguaggccugugccgcaaacaagcuuaccaugggccagaucauuaccuucuuucaagaggugccccacgucaucgaagagguuaugaacauugugcugaucgcccucagccugcuugcuauucugaaggggaucuacaauguggccacaugcggacucuucggccuggucuccuuucuucugcucugugggagaucuugcagcacgaccuauaaaggaguguacgaacugcagacacuggagcucgacauggcgucccugaacaugaccaugccucuuucuuguacaaagaauaacagccaucacuauaucaugguuggcaaugaaaccgggcuggagcucacacugaccaacacguccauuaucaaucauaaauucugcaaccuuucugaugcucacaagaaaaaucuguacgaccaugcccucaugagcauuaucuccaccuuucaccugagcauuccgaacuucaaucaguaugaggccaugucuugugauuuuaacggaggcaagaucuccgugcaguacaaucugagccacacauaugcugucgacgccgcuaaccauugcggcaccauugccaauggggugcuccaaacauucaugcggauggcguggggaggcucuuacaucgcccuggauuccgggaagggaagcugggacuguaucaugaccucuuaccaguaucuuauuauccagaacacgacaugggaagaucacugccaguuuucccgccccagcccuauuggcuaccuggggcuccugucccaaagaacccgggacaucuauauuucucgcagacggcgcggaacauucaccuggacccuuagcgauuccgagggcaacgaaacacccggcggguacugucugacgagauggaugcucaucgaggcugagcugaaaugcuuuggaaauaccgccguugcuaaguguaacgaaaaacaugacgaggaguucugcgauaugcugcggcucuuugacuucaauaagcaggccauccgcagacugaaagcgccugcccagaugagcauucagcuuaucaacaaggcugugaaugcccugauuaacgaucaacucaucaugaagaaucaucugcgggacauuaugggcauccccuauugcaacuacucuaaauauuguuaccuuaaucacacagucaccgggcgcacaucccugccuagaugcugucucgugagcaacggaucuuaccugaaugaaacccacuucagcgacgauaucgaacagcaggcugacaacaugauuacggagcugcuccaaaaggaguauaucgaucggcagggcaaaacaccgcuggggcuuguggaccuguuugucuucuccaccucuuuuuaccucauuagcaucuuccugcaccugguuaagauucccacccaucgccacaucauuggaaaaccuugccccaagccucauagacuuaaucacaugggcaucuguuccugcggccucuauaaacaccccggggugccggugaaguggaagcggugaggacuagucccuguucccagagcccacuuuuuuuucuuuuuuugaaauaaaauagccugucuuucagaucucaaaggcucuuuucagagccaccaaaaaaaaaaaaaaaaaaaaaaaaaaaaaaaaaaaaaaaaaaaaaaaaaaaaaaaaaaaaaaaaagaauu

SEQ ID NO: 25305 - RNA, 1733 nt, Artificial Sequence
  mRNA product Design a-2 (hSL-A64-N5) comprising derived and/or modified sequence from LASV(LASV254-NIG-2011;Clade II)__AIT17674__GPCmut3 (opt5)
aggagaguccgcucagccagguugcagaagcggcuuagcguguguccuaaucuucucucugcguguagguaggccugugccgcaaacaagcuuaccaugggccagaucauuaccuucuuucaagaggugccccacgucaucgaagagguuaugaacauugugcugaucgcccucagccugcuugcuauucugaaggggaucuacaauguggccacaugcggacucuucggccuggucuccuuucuucugcucugugggagaucuugcagcacgaccuauaaaggaguguacgaacugcagacacuggagcucgacaugaccaaccugaauaugacaaugccucuuuccuguaccaagaacaauucucaucacuauaucaugguuggcaacgaaacagggcuggagcucacccugacgaauaccagcauuaucaaccauaaauucugcaaucuuuccgaugcgcacaagaaaaaccuguacaaucaugcucucaugucuauuaucagcacauuucaccuguccauuccgaacuucaaucaguaugaggccaugagcugugacuuuaacggaggcaagaucucugugcaguacaaucugucccacagcuaugccgucgaugcugccaaccauugcggcaccauugcuaacggggugcuccaaacauucaugcggauggccuggggaggcucuuacaucgcgcuggacuccgggaagggaaauugggauuguaucaugaccagcuaccaguaucuuauuauccagaacacgacaugggaagaccacugccaguuuucucgccccuccccuauuggcuaccuggggcuccugagccaaagaacccgggauaucuauauuucccgcagacggcgcggaacauucaccuggacccuuucugacagcgagggcaaugaaacacccggcggguacugucugacgagauggaugcucaucgaggccgagcugaaaugcuuuggaaacaccgcuguugccaaguguaaugaaaaacaugaugaggaguucugcgacaugcugcggcucuuugauuucaacaagcaggcuauccgcagacugaaaaccccugcccaggcgaauauucagcuuaucaacaaggccgugaaugcucugauuaacgaccaacucaucaugaagaaucaucugcgggauauuaugggcauccccuauugcaacuacuccaaauauuguuaccuuaaucacacagucacagggaagaccagccugccucgcugcugucucgugucuaacggauccuaccugaaugaaacgcacuucagcgacgacaucgaacagcaggccgauaacaugauuacagagcugcuccaaaaagaguauauggacagacagggcaagaccccgcuggggcuuguggaucuguuugucuucucuaccagcuuuuaccucaucuccauuuuccugcaccugguuaaaauccccacacaucggcacgugauuggaaagccuugccccaaaccucaucgccuuaaccacaugggcaucuguucuugcggccucuauaagcaccccggggugccggucaaguggaaaagaugaggacuagucccuguucccagagcccacuuuuuuuucuuuuuuugaaauaaaauagccugucuuucagaucucaaaggcucuuuucagagccaccaaaaaaaaaaaaaaaaaaaaaaaaaaaaaaaaaaaaaaaaaaaaaaaaaaaaaaaaaaaaaaaaagaauu

SEQ ID NO: 25306 - RNA, 1733 nt, Artificial Sequence
  mRNA product Design a-2 (hSL-A64-N5) comprising derived and/or modified sequence from LASV(Nig08-A19;Clade III)__ADU56618__GPCmut3 (opt5)
aggagaguccgcucagccagguugcagaagcggcuuagcguguguccuaaucuucucucugcguguagguaggccugugccgcaaacaagcuuaccaugggccagaucgugaccuucuuucaagaggucccccacguuauugaagaggugaugaacaucgugcugauugcccucagcauccuggcuauucuuaaggggcuguacaauaucgccacaugcggacucaucggccuggucacguuccuucugcucuccgggagaucuuguagcaugaccuauaaaggaguguacgaacugcagacacuggagcucaacaugaauacccugaacaugacaaugccucuuuccugcaccaagaauaacucucaucacuauauuaugguuggcaaugaaacagggcuggagcucacccugacgaacaccagccuucugcaucacaaauuuuguaaucucuccgacgcgcauaagaaaaaccuguacgaucacacacugaugucuaucauuagcaccuuccaccucuccaucccgaauuuuaaccaguaugaggcuaugagcugcgacuucaauggaggcaagauuacagugcaguacaaccugucucauuccuaugccaucgaugccgcuaaucacuguggcaccgucgccaacggggugcuucaaacguuuaugcggauggcuuggggaggcagcuacauugcccuggacucugggcgcggaaagugggauugcaucaugacauccuaccaguaucucaucauucagaacaccacaugggaagaccauugucaguucagcagacccucuccuaucggcuaccuggggcuucugucccaacggacccgcgauauuuauaucagcagacggcgcagaggaaccuuuacauggacgcucuccgacucugagggcaaugaaacccccggcggguacugccugacacgguggaugcugauugaggcggagcucaaauguuucggaaacaccgccguugcuaagugcaaugaaaaacacgaugaggaauuuugugacaugcugcgccuuuucgauuuuaacaagcaggccaucagacggcugaaagcuccugcccagaugagcauccagcucauuaauaaggcggugaacgcccugaucaaugaccaacuuauuaugaagaaccaucugcgcgauaucaugggcauucccuauugcaauuacuccaaauauugcuaccucaaccacacaagcaccgggagaacgucucugccucgguguugccuggucuccaauggaagcuaccucaacgagacacacuucucugacgacaucgaacagcaggcugauaauaugaucaccgagaugcugcaaaaggaguaucuugaccgccagggcaaaaccccgcuggggcucguggaucuguucguguuuagcacauccuucuaccugauuucuaucuuucuucaucucgucaagauucccacccacagacauaucguuggaaaaccuugucccaagccucaccggcugaaccacaugggcauuugcagcuguggccuguauaaacagcccggggugccggugagauggaagcgcugaggacuagucccuguucccagagcccacuuuuuuuucuuuuuuugaaauaaaauagccugucuuucagaucucaaaggcucuuuucagagccaccaaaaaaaaaaaaaaaaaaaaaaaaaaaaaaaaaaaaaaaaaaaaaaaaaaaaaaaaaaaaaaaaagaauu

SEQ ID NO: 25307 - RNA, 1736 nt, Artificial Sequence
  mRNA product Design a-2 (hSL-A64-N5) comprising derived and/or modified sequence from LASV(G1180-SLE-2010;Clade IV)__AIT17168__GPCmut3 (opt5)
aggagaguccgcucagccagguugcagaagcggcuuagcguguguccuaaucuucucucugcguguagguaggccugugccgcaaacaagcuuaccaugggccagaucgugaccuucuuucaagaggucccccacguuauugaagaggugaugaacaucgugcugauugcccucagcauccuggcuguccuuaaggggcuguacaauuucgccacaugcggacucgugggccugcuuacguuucugcuccugugugggagauccugcaccgcgucucgguauaaaggaguuuacgaacugcagacacucgagcugaacauggaaacccuuaauaugacaaugccucugagcuguaccaagaacaauucccaucacuauauuauggugggcaacgagacagggcucgagcugacccuuacgaauaccucuaucaucaaccauaaauucugcaaucugagcgacgcucacaagaaaaaccucuacgaucaugcccugauguccauuaucucuacauuucaccugagcauuccgaauuucaaccaguaugaagccauguccugugacuuuaauggaggcaagaucagcguccaguacaaccucucucacuccuaugcuggcgaugccgcuaaucauugcgggaccguggccaacggaguucugcaaacauucaugcgcauggcguggggcgggagcuacauugcccuugacucuggacacggcuccugggauuguaucaugaccagcuaccaguaucugauuauccagaacacgacaugggaggaccauugccaguuuucuagacccuccccuaucggguaccucggacugcuuagccaacggacccgcgauauuuauaucuccagacggcgcagaggcacauucaccuggacccugucugacagcgaaggcaaggauacacccgggggauacugucucacgcgguggaugcugauugaggcugagcugaaaugcuuuggcaauaccgccguggcuaaguguaacgaaaaacacgacgaggaguucugcgauaugcuccgccuguuugacuucaauaagcaggccauccagagacuuaaagcgccugcccagauguccauucaacugaucaacaaggcugucaaugcccucaucaacgaucagcugauuaugaagaaucaccuucgggacaucauggggauucccuauugcaacuacagcaaauauuguuaccugaaucauacaaccacaggaaagaccucucucccuaaaugcugucugguguccaacggcagcuaccugaaugaaacgcacuucucugacgauaucgaacagcaagcugacaacaugauuacagagaugcuccagaaggaguauauggaacgccaggggaaaaccccgcugggacuuguggaucuguuugucuucagcaccuccuuuuaccucaucucuaucuuccugcaucugguuaagauucccacacacagacauaucgugggcaaaagcugcccuaagccccaccggcuuaaucacaugggcauuuguuccugcgggcucuauaagcagccuggagugcccgucaaauggaagcgcugaggacuagucccuguucccagagcccacuuuuuuuucuuuuuuugaaauaaaauagccugucuuucagaucucaaaggcucuuuucagagccaccaaaaaaaaaaaaaaaaaaaaaaaaaaaaaaaaaaaaaaaaaaaaaaaaaaaaaaaaaaaaaaaaagaauu

SEQ ID NO: 25308 - RNA, 1736 nt, Artificial Sequence
  mRNA product Design a-2 (hSL-A64-N5) comprising derived and/or modified sequence from LASV(G1442-SLE-2011;Clade IV)__AIT17180__GPCmut3 (opt5)
aggagaguccgcucagccagguugcagaagcggcuuagcguguguccuaaucuucucucugcguguagguaggccugugccgcaaacaagcuuaccaugggccagaucgugaccuucuuucaagaggucccccacguuauugaagaggugaugaacaucgugcugauugcccucagcauccuggcuguccuuaaggggcuguacaauguggccacaugcggacucauuggccugguuacguuccuucugcucugugggagauccugcaccacaacccuguauaaaggaguguacgaacugcagacacucgagcugaacauggaaacccuuaauaugacaaugccucugucuuguaccaagaacaauagccaucacuauauccgggucggcaacgagacggggcucgagcugacccuuacaaauaccuccaucauuaaccauaaauuuugcaaucugucugacgcgcacaagaaaaaccucuacgaucaugcucugaugagcaucauuuccacauuccaccugucuaucccgaauuuuaaccaguaugaagccaugagcugugacuucaauggaggcaagauuuccgugcaguacaaccucagccacucuuaugccggcgaugcugccaaucauugcgggaccguugcuaacggagugcugcaaacguuuaugcgcauggccuggggcggguccuacaucgcgcuugacagcggaagaggcaacugggauuguauuaugacaucuuaccaguaucugaucauccagaauaccacaugggacgaucacugccaguucucccggcccagcccuauuggguaccucggacugcuuucucaacgcaccagagacgucuauaucucccggcgcagacggggcaccuuuacauggacgcugagcgauuccgagggcaaggacacccccgggggauacugucucacacgcuggaugcugauugaagccgagcugaaaugcuucggcaacaccgcuguggccaaguguaaugagaaacaugaugaagaguuuugcgacaugcucagacuguucgauuuuaacaagcaggcuauccagcggcuuaaagccccugcgcagaugucuauucaacugaucaauaaggccgugaacgcucucaucaaugaccagcugauuaugaagaaccaccuucgcgacaucauggggauucccuauugcaauuacagcaaauauuguuaccugaacaauacagccaccggaaagacgucccucccuaaaugcugucugaucagcaacggcucuuaccugaaugaaacacacuucuccgaugacauugagcaggaagcugauaacaugaucaccgagaugcuccaaaaggaguauauggaaagacaggggaaaaccccgcugggacuugucgaccuguucguuuuuagcacaucuuucuaccucaucagcauuuuucugcaucuggugaagauccccacccaccggcauauugugggcaaauccugcccuaagccccaccgccuuaaucauaugggcaucuguucuugcgggcucuauaagcagccuggaguccccgugagauggaaacggugaggacuagucccuguucccagagcccacuuuuuuuucuuuuuuugaaauaaaauagccugucuuucagaucucaaaggcucuuuucagagccaccaaaaaaaaaaaaaaaaaaaaaaaaaaaaaaaaaaaaaaaaaaaaaaaaaaaaaaaaaaaaaaaaagaauu

SEQ ID NO: 25309 - RNA, 1736 nt, Artificial Sequence
  mRNA product Design a-2 (hSL-A64-N5) comprising derived and/or modified sequence from LASV(G3010-SLE-2013;Clade IV)__AIT17344__GPCmut3 (opt5)
aggagaguccgcucagccagguugcagaagcggcuuagcguguguccuaaucuucucucugcguguagguaggccugugccgcaaacaagcuuaccaugggccagaucgugaccuucuuucaagaggucccccacguuauugaagaggugaugaacaucgugcugauugcccucagcauccuggcuguccuuaaggggcuguacaauuucgccacaugcggacucgugggccugguuacguuucuucugcucugugggagauccugcaccacaucucuguauaaaggaguguacgaacugcagacccucgagcugaacauggaaacacuuaauaugaccaugccucugagcuguacaaagaacaauucccaucacuauauuauggucggcaacgagaccgggcucgagcugacgcuuaccaauacaucuaucaucaaccauaaauucugcaaucugagcgacgcgcacaagaaaaaccucuacaaucaugcucugauguccauuaucucuaccuuucaccugagcauuccgaacuucaaucaguaugaagccauguccugugauuuuaacggaggcaagaucagcgugcaguacaaucucucucacuccuaugccggcgacgcugccagccauugcgggacaguugcuaacggagugcugcaaaccuucaugcggauggccuggggcgggucuuacauugcgcuugauuccggauacggcaagugggacuguaucaugacgagcuaucaguaccugauuauccagaacacaaccugggaggaucacugccaguuuucucgccccuccccuaucggguaucucggacugcuuagccaaagaacacgggacauuuacaucucccgcagacggcgcggcaccuucaccuggacacugucugauagcgaaggcaaagacacgcccgggggauauugucucaccagauggaugcugauugaggccgagcugaagugcuuuggcaauacagcugucgccaaauguaacgaaaagcaugaugaggaguucugcgacaugcuccggcuguuugauuucaauaaacaggcuauccagcgccuuaagaccccugcccagauguccauucaacugaucaacaaggcggugaaugcccucaucaacgaccagcugauuaugaaaaaucaccuuagagauaucauggggauucccuacugcaacuauagcaaguacuguuaccugaaucacacaaccacgggaaaaacaucucucccuaagugcugucugguguccaacggcagcuaucugaaugaaacccauuucucugacgacaucgaacagcaagcugauaacaugauuaccgagaugcuccagaaagaguacauggaacggcaggggaagacaccgcugggacuugucgaccuguuuguuuucagcaccuccuuuuaucucaucucuaucuuccugcaccuggugaaaauucccacacaucgccacaucgugggcaagagcugcccuaagccccauagacuuaaucacaugggcauuuguuccugcgggcucuacaaacagccuggaguccccgugcgguggaagcgcugaggacuagucccuguucccagagcccacuuuuuuuucuuuuuuugaaauaaaauagccugucuuucagaucucaaaggcucuuuucagagccaccaaaaaaaaaaaaaaaaaaaaaaaaaaaaaaaaaaaaaaaaaaaaaaaaaaaaaaaaaaaaaaaaagaauu

SEQ ID NO: 25310 - RNA, 1736 nt, Artificial Sequence
  mRNA product Design a-2 (hSL-A64-N5) comprising derived and/or modified sequence from LASV(G502-SLE-2009;Clade IV)__AIT17126__GPCmut3 (opt5)
aggagaguccgcucagccagguugcagaagcggcuuagcguguguccuaaucuucucucugcguguagguaggccugugccgcaaacaagcuuaccaugggccagaucgugaccuucuuucaagaggucccccacguuauugaagaggugaugaacaucgugcugauugcccucagcauccuggcuguccuuaaggggcuguacaauuucgccacaugcggacucgugggccugcuuacguuucugcuccugugugggagauccugcaccacaggacuguauaaaggcguuuacgaacuccagacccuggagcuuaacauggaaacacugaauaugaccaugccucucucuuguacaaagaacaauagccaucacuauauuaugguggggaacgagaccggacuggagcuuacgcugaccaauacauccaucaucaaccauaaauucugcaaucucucugacgcgcacaagaaaaaccuguacgaucaugcucugaugagcauuaucuccaccuuucaccucucuauuccgaauuucaaccaguaugaagccaugagcugugacuuuaauggcggcaagaucuccguccaguacaaccugagccacucuuaugccggggaugcugccgaccauugcggaacaguggcuaauggcguucuucaaaccuucaugcggauggccuggggaggguccuacauugcgcuggauagcggccgcgggagaugggacuguaucaugacgucuuaccaguaucucauuauccagaacacaaccugggaggaucacugccaguuuucccggcccagcccuaucggauaccugggccuucugucucaacgcacaagagacauuuauaucucccggcgcagacggggcaccuucaccuggacacucagcgauuccgaagggaaggacacgcccggaggcuacugucugacccgcuggaugcugauugaggccgagcucaaaugcuuugggaacacagcuguggccaaguguaaugaaaaacaugaugaggaguucugcgacaugcugagacuuuuugauuucaacaagcaggcuauccagcggcugaaagccccugcgcagaugucuauucaacucaucaauaaggccgucaacgcucugaucaaugaccagcuugugaugaagaaccaucugcgcgacauuaugggaauccccuauugcaauuacagcagauauuguuaccucaaccacaccacaaccggccggacgucccugccuaaaugcugucuggugagcaaugggucuuaccucaacgaaacacacuucuccgaugacauugaacagcaagccgauaauaugaucaccgagaugcugcagaaggaguauauggaacgccagggaaaaaccccgcuuggccuggucgaccucuuuguuuucagcacaucuuuuuaccugauuagcaucuuccugcaccuugugaagauccccacccauagacacauugugggcaaauccugcccuaagccccaucggcucaaccacauggggaucuguucuugcggacuguauaaacagccuggcguccccgugaaguggaagagaugaggacuagucccuguucccagagcccacuuuuuuuucuuuuuuugaaauaaaauagccugucuuucagaucucaaaggcucuuuucagagccaccaaaaaaaaaaaaaaaaaaaaaaaaaaaaaaaaaaaaaaaaaaaaaaaaaaaaaaaaaaaaaaaaagaauu

SEQ ID NO: 25311 - RNA, 1736 nt, Artificial Sequence
  mRNA product Design a-2 (hSL-A64-N5) comprising derived and/or modified sequence from LASV(G733-SLE-2010;Clade IV)__AIT17154__GPCmut3 (opt5)
aggagaguccgcucagccagguugcagaagcggcuuagcguguguccuaaucuucucucugcguguagguaggccugugccgcaaacaagcuuaccaugggccagaucgugaccuucuuucaagaggucccccacguuauugaagaggugaugaacaucgugcugauugcccucagcauccuggcuguccuuaaggggcuguacaauuucgccacaugcggaauugugggccucguuuccuuucugcuucugugugggagaucuugcacgaccagccucuauaaaggaguguacgaacugcagacacuggagcucaacauggaaacccugaauaugacaaugccucuuuccuguaccaagaacaauucucaucacuauaucauggucggcaacgagacagggcuggagcucacccugacgaauaccagcaucauuaaccauaaauucugcaaucuuuccgacgcgcacaagaaaaaccuguacgaucaugcucucaugucuaucauuagcacauuucaccuguccaucccgaauuucaaccaguaugaagccaugagcugugacuuuaauggaggcaagauuucugugcaguacaaccugucccacagcuaugccggcgaugcugccaaucauugcgggaccaucgcuaacggaguucuccaaacauucaugcggauggccuggggcgggucuuacauugcgcuggacuccggacgcgauagaugggacuguaucaugaccagcuaccaguaucuuaucauucagaacacgacaugggaggaucacugccaguuuucucggcccuccccuaucggcuaccuggggcuccugagccaacgcaccagagacauuuauaucucccggcgcagacggggaacauucaccuggacccuuucugauagcgaaggcaaggacacacccggcggguacugucugacgcgcuggaugcucauugaggccgagcugaaaugcuuuggaaauaccgcuguggccaaguguaacgaaaaacaugaugaggaguucugcgacaugcugagacucuuugauuucaauaagcaggcuauccagcggcugaaagccccugcgcagauguccauccaacuuauuaacaaggccgucaaugcucugaucaacgaccagcucauuaugaagaaucaucugcgcgacaucaugggcauucccuauugcaacuacagcaaauauuguuaccuuaaucacacaaccacagggaagaccucucugccuaaaugcugucucguguccaacggaagcuaccugaaugaaacgcacuucucugaugacaucgaacagcaagccgauaacaugaucacagagaugcugcagaaggaguauauggaaagacagggcaaaaccccgcucgggcugguggaccuuuuugucuucagcaccuccuuuuaccugauuucuaucuuccuccaccugguuaagauucccacacaucggcacguggugggaaaaagcugcccuaagccccaucgccugaaucacaugggcaucuguuccugcggccuuuaugggcagccuggaguccccgugaaguggaaaagaugaggacuagucccuguucccagagcccacuuuuuuuucuuuuuuugaaauaaaauagccugucuuucagaucucaaaggcucuuuucagagccaccaaaaaaaaaaaaaaaaaaaaaaaaaaaaaaaaaaaaaaaaaaaaaaaaaaaaaaaaaaaaaaaaagaauu

SEQ ID NO: 25312 - RNA, 1736 nt, Artificial Sequence
  mRNA product Design a-2 (hSL-A64-N5) comprising derived and/or modified sequence from MOPV/LASV reassortant(IGS-1;Clade IV)__AFY05576__GPCmut3 (opt5)
aggagaguccgcucagccagguugcagaagcggcuuagcguguguccuaaucuucucucugcguguagguaggccugugccgcaaacaagcuuaccaugggccagaucgugaccuucuuucaagaggucccccacguuauugaagaggugaugaacaucgugcugauugcccucagcguccuggcugugcuuaaggggcuguacaauuucgccacaugcggacucguuggccuggugacguuucuucugcucugugggagauccugcaccacaucucuguauaaaggagucuacgaacugcagacccucgagcugaacauggaaacacuuaauaugaccaugccucugagcuguacaaagaacaauucccaucacuauaucauggugggcaacgagaccgggcucgagcugacgcuuaccaauacaucuauuaucaaccauaaauucugcaaucugagcgacgcgcacaagaaaaaccucuacgaucaugcucugauguccaucauuucuaccuuucaccugagcaucccgaauuucaaccaguaugaagccauguccugugacuuuaauggaggcaagauuagcguucaguacaaccucucucacuccuaugccggcgaugcugccaaucauugcgggacaguggcuaacggaguccugcaaaccuucaugcggauggccuggggcgggagcuacaucgcgcuugacucuggacgcggcaacugggauuguauuaugacguccuaccaguaucugaucauucagaauacaaccugggaggaccacugccaguuuagcagacccucuccuaucggguaccucggacugcuuucccaacggacacgcgauaucuauauuagcagacggcgcagaggcaccuucaccuggacacuguccgacucugaaggcgaggauacgcccgggggauacugucucacccgguggaugcugaucgaggccgaacugaagugcuuuggcaacacagcuguggccaaauguaaugagaagcaugacgaagaguucugcgauaugcuccgccuguuugacuucaacaaacaggcuauucagagacuuaaggccccugcgcagaugagcauccaacugauuaauaaagccgugaacgcucucaucaaugaucagcugaucaugaagaaccaccuucgggacauuauggggauccccuauugcaauuacuccaaguauuguuaccugaaccacaccacaaccggacgcacgagccucccuaaaugcugucuggucucuaauggcuccuaccugaacgaaacacauuucagcgacgauauugagcagcaagccgacaauaugaucaccgagaugcuccagaaggaauauauggagagacaggggaaaaccccgcugggacuuguugaucuguuuguguucucuaccagcuuuuaccucauuuccaucuuccugcaccuggugaagauccccacacaucggcacauugucggcaaaucuugcccuaagccccaucgccuuaaccacaugggcaucuguagcugcgggcucuauaaacagccuggagugcccguuaaguggaagagaugaggacuagucccuguucccagagcccacuuuuuuuucuuuuuuugaaauaaaauagccugucuuucagaucucaaaggcucuuuucagagccaccaaaaaaaaaaaaaaaaaaaaaaaaaaaaaaaaaaaaaaaaaaaaaaaaaaaaaaaaaaaaaaaaagaauu

SEQ ID NO: 25313 - RNA, 1736 nt, Artificial Sequence
  mRNA product Design a-2 (hSL-A64-N5) comprising derived and/or modified sequence from LASV(LM765-SLE-2012;Clade IV)__AIT17814__GPCmut3 (opt5)
aggagaguccgcucagccagguugcagaagcggcuuagcguguguccuaaucuucucucugcguguagguaggccugugccgcaaacaagcuuaccaugggccagaucgugaccuucuuucaagaggucccccacguuauugaagaggugaugaacaucgugcugauugcccucagcauccuggcuguccuuaaggggcuguacaauuucgccacaugcggacucgugggccugguuacguuucuucugcucugugggagauccugcaccacaucucuguauaaaggaguguacgaacugcagacccucgagcugaacauggaaacacuuaauaugaccaugccucugagcuguacaaagaacaauucccaucacuauauuauggucggcaacgagaccgggcucgagcugacgcuuaccaauacaucuaucaucgaccauaaauucugcaaccugagcgaugcgcaccggaagaaucucuacgaccaugcucugauguccauuaucucuaccuuucaccugagcauuccgaacuucaaucaguaugaagccauguccugugauuuuaacggaggcaaaaucagcgugcaguacaaucucucucacuccuaugccaaggacgcugccgaucauugcggcacaguugcuaacggggugcugcaaaccuucaugcgcauggccuggggaggcagcuacauugcgcuugacucugggagaggacggugggauuguaucaugacguccuaccaguaucugauuauccagaauacaaccugggaggaccacugccaguuuagccgccccucuccuaucggcuaccucgggcugcuuucccaaagaacacgggauauuuauaucagccgcagacggcgcggaaccuucaccuggacacuguccgacucugaaggcaaggauacgcccggcggguacugucucaccagauggaugcugauugaggccgagcugaaaugcuuuggaaacacagcugucgccaaguguaacgaaaaacaugacgaggaguucugcgauaugcuccggcuguuugacuucaauaagcaggcuauccagcgccuuaaagccccugcgcagaugagcauucaacugaucaacaaggccgugaaugcucucaucaacgaccagcugauuaugaagaaucaccuuagagauaucaugggcauucccuauugcaacuacuccaaauauuguuaccugaaucacaccacaaccgggaagacgagccucccuaaaugcugucuggugucuaacggauccuaccugaaugaaacacauuucagcgacgauaucgaacagcaagccgacaacaugauuaccgagaugcuccagaaggaguauauggaacggcagggcaaaaccccgcuggggcuugucgaucuguuuguuuucucuaccagcuuuuaccucaucuccaucuuccugcaccuggugaagauucccacacaucgccacaucgugggaaaaccuugccccaagccucauagacuuaaucacaugggcauuuguucuugcggccucuauaagcagcccggggucccggugaaauggaagcggugaggacuagucccuguucccagagcccacuuuuuuuucuuuuuuugaaauaaaauagccugucuuucagaucucaaaggcucuuuucagagccaccaaaaaaaaaaaaaaaaaaaaaaaaaaaaaaaaaaaaaaaaaaaaaaaaaaaaaaaaaaaaaaaaagaauu

SEQ ID NO: 25314 - RNA, 1736 nt, Artificial Sequence
  mRNA product Design a-2 (hSL-A64-N5) comprising derived and/or modified sequence from LASV(LM776-SLE-2012;Clade IV)__AIT17824__GPCmut3 (opt5)
aggagaguccgcucagccagguugcagaagcggcuuagcguguguccuaaucuucucucugcguguagguaggccugugccgcaaacaagcuuaccaugggccagaucgugaccuucuuucaagaggucccccacguuauugaagaggugaugaacaucgugcugauugcccucagcauccuggcuguccuuaaggggcuguacaauuucgccacaugcggacucgugggccugguuacguuucuucugcucugugggagauccugcaccacaucuguguauaaaggagucuacgaacugcagacccuggagcucaacauggaaacacugaauaugaccaugccucuuagcuguacaaagaacaauucccaucacuauauuauggugggcaacgagaccgggcuggagcucacgcugaccaauacaucuaucaucaaccauaaauucugcaaucuuagcgacgcgcacaagaaaaaccuguacgaucaugcucucauguccauuaucucuaccuuucaccugagcauuccgaauuucaaccaguaugaagccauguccugugacuuuaauggaggcaagaucagcguucaguacaaccugucucacuccuaugccggcgaugcugccaaucauugcgggacaguggcuaacggaguccuccaaaccuucaugcggauggccuggggcgggagcuacauugcgcuggacucuggacacggcaagugggauuguaucaugacguccuaccaguaucuuauuauccagaacacaaccugggaggaccauugccaguuuagccgccccucuccuaucggguaccugggacuccugucccaaagaacacgggauauuuauaucagccgcagacggcgcggcaccuucaccuggacacuuuccgacucugaaggcaaagauacgcccgggggauacugucugaccagauggaugcucauugaggccgagcugaagugcuuuggcaauacagcuguggccaaauguaacgaaaagcacgacgaggaguucugcgauaugcugcggcucuuugacuucaauaaacaggcuauccagcgccugaaggccccugcgcagaugagcauucaacuuaucaacaaggccgugaaugcucugaucaacgaucagcucauuaugaaaaaucaccugagagacaucauggggauucccuauugcaacuacuccaaguauuguuaccuuaaucauaccacaaccggaaaaacgagccugccuaagugcugucucgucucuaacggcuccuaccugaaugaaacacacuucagcgacgauaucgaacagcaagccgacaacaugauuaccgagaugcugcagaaagaguauauggaacggcaggggaagaccccgcucggacugguugaucuuuuuguguucucuaccagcuuuuaccugaucuccaucuuccuccaucuggugaaaauucccacacaccgccauaucgucggcaagucuugcccuaagccccacagacugaaucacaugggcauuuguagcugcgggcuuuauaaacagccuggagugcccguucgguggaagcgcugaggacuagucccuguucccagagcccacuuuuuuuucuuuuuuugaaauaaaauagccugucuuucagaucucaaaggcucuuuucagagccaccaaaaaaaaaaaaaaaaaaaaaaaaaaaaaaaaaaaaaaaaaaaaaaaaaaaaaaaaaaaaaaaaagaauu

SEQ ID NO: 25315 - RNA, 1736 nt, Artificial Sequence
  mRNA product Design a-2 (hSL-A64-N5) comprising derived and/or modified sequence from LASV(Mad39;Clade IV)__ANH09722__GPCmut3 (opt5)
aggagaguccgcucagccagguugcagaagcggcuuagcguguguccuaaucuucucucugcguguagguaggccugugccgcaaacaagcuuaccaugggccagaucgugaccuucuuucaagaggucccccacguuauugaagaggugaugaacaucgugcugauugcccucagcauccuggcuguccuuaaggggcuguacaauguggccacaugcggacucauuggccugguuacguuccuucugcucugugggagauccugcaccacaacccuguauaaaggaguguacgaacugcaggcgcucgagcugaacauggaaacacuuaauaugaccaugccucugucuuguacaaagaacaauagccaucacuauauccgggucggcaacgagaccgggcucgagcugacgcuuaccaauacaucccugaucaaccauaaauuuugcaaucucucugacgcucacaagaaaaaccuguacgaucaugcccugaugagcauuaucuccaccuuccaccucucuauuccgaauuuuaaccaguaugaagccaugagcugugacuucaaugauggaaagaucuccgugcaguacaaccugagccacacauaugcuggcgacaccgccaaucauugcggcacgguugcuaacggggugcuucaaacauuuaugcgcauggccuggggaggcucuuacauugcgcuggauuccgggagaggaggcugggacuguaucaugaccagcuaccaguaucucauuauccagaacacaaccugggaggaucacugccaguucucucggcccuccccuaucggguaccugggacuucugagccaacgcaccagagacauuuauaucucucggcgcagacggggcacauuuacguggacccucuccgauagcgaaggcaaggacacacccgggggauacugucugacccgcuggaugcugauugaggccgagcucaaaugcuucggcaauacagcugucgccaaguguaacgaaaaacaugaugaggaauuuugcgacaugcugagacuuuucgauuuuaauaagcaggcuauccagcggcugaaagccccugcgcagauguccauucaacucaucaacaaggccgugaaugcucugaucaacgaccagcuuauuaugaagaaucaucugcgcgacaucauggggauucccuauugcaacuacucuaaauauuguuaccucaaucacaccgugacgggaaagacaagccugccuaaaugcugucuggucuccaacggcagcuaccucaaugagacccacuucucugaugacaucgaacagcaagccgauaacaugauuaccgagaugcugcagaaggaguauauggaaagacaggggaaaacaccgcuuggacugguugaccucuucguguuuuccaccagcuucuaccugaucucuaucuuucugcaccuugugaagauucccacacaucggcacgucgugggcaaaccuugccccaagccucaucgccucaaucacaugggcaucuguagcugcggguucuauaagcagcccggaguuccggugagauggaaacggugaggacuagucccuguucccagagcccacuuuuuuuucuuuuuuugaaauaaaauagccugucuuucagaucucaaaggcucuuuucagagccaccaaaaaaaaaaaaaaaaaaaaaaaaaaaaaaaaaaaaaaaaaaaaaaaaaaaaaaaaaaaaaaaaagaauu

SEQ ID NO: 25316 - RNA, 1736 nt, Artificial Sequence
  mRNA product Design a-2 (hSL-A64-N5) comprising derived and/or modified sequence from LASV(Z0947-SLE-2011;Clade IV)__AIT17840__GPCmut3 (opt5)
aggagaguccgcucagccagguugcagaagcggcuuagcguguguccuaaucuucucucugcguguagguaggccugugccgcaaacaagcuuaccaugggccagaucgugaccuucuuucaagaggucccccacguuauugaagaggugaugaacaucgugcugauugcccucagcauccuggcuguccuuaaggggcuguacaauuucgccacaugcggacucgugggccugguuacguuucuucugcucugugggagauccugcaccauuucucuguauaaaggaguguacgaacugcagacacucgagcugaacauggaaacccuuaauaugacaaugccucugagcuguaccaagaacaauucccaucacuauaucauggucggcaacgagacagggcucgagcugacccuuacgaauaccucuaucauuaaccauaaauucugcaaucugagcgacgcgcacaagaaaaaccucuacgaucaugcucugauguccaucauuucuacauuucaccugagcaucccgaauuucaaccaguaugaagccauguccugugacuuuaauggaggcaagauuagcgugcaguacaaccucucucacuccuaugccggcgaugcugccaaucauugcgggaccguugcuaacggagugcugcaaacauucaugcggauggccuggggcgggagcuacaucgcgcuugacucuggacgcgauagaugggacuguauuaugaccuccuaccaguaucugaucauccagaacacgacaugggaggaucacugccaguuuagccggcccucuccuauuggcuaccucgggcugcuuucccaacgcaccagagacaucuauauuagccggcgcagacggggaacauucaccuggacccuguccgauucugaaggcaaggacacacccggcggguacugucucacgcgcuggaugcugaucgaggccgagcugaaaugcuuuggaaauaccgcugucgccaaguguaacgaaaaacaugaugaggaguucugcgacaugcucagacuguuugauuucaauaagcaggcuauucagcggcuuaaagccccugcgcagaugagcauccaacugaucaacaaggccgugaaugcucucauuaacgaccagcugaucaugaagaaucaccuucgcgacauuaugggcauccccuauugcaacuacuccaaauauuguuaccugaaucacacaaccacagggaagaccagccucccuaaaugcugucuggugucuaacggauccuaccugaaugaaacgcauuucagcgaugacauugaacagcaagccgauaacaugaucacagagaugcuccagaaggaguauauggaaagacagggcaaaaccccgcuggggcuugucgaccuguuuguuuucucuaccagcuuuuaccucaucuccauuuuccugcaccuggugaagauccccacacaucggcacauugugggaaaaccuugccccaagccucaucgccuuaaucacaugggcaucuguucuugcggccucuauaagcagcccggggucccggugaaauggaagagaugaggacuagucccuguucccagagcccacuuuuuuuucuuuuuuugaaauaaaauagccugucuuucagaucucaaaggcucuuuucagagccaccaaaaaaaaaaaaaaaaaaaaaaaaaaaaaaaaaaaaaaaaaaaaaaaaaaaaaaaaaaaaaaaaagaauu

SEQ ID NO: 25317 - RNA, 1767 nt, Artificial Sequence
  mRNA product Design a-2 (hSL-A100) comprising derived and/or modified sequence from LASV(Josiah;Clade IV)__NP_694870__GPCmut3 (opt1)
aggagaguccgcucagccagguugcagaagcggcuuagcguguguccuaaucuucucucugcguguagguaggccugugccgcaaacaagcuuaccaugggccagaucgugaccuucuuccaggaggucccccacgugaucgaggaggugaugaacaucguccugaucgcccucagcgugcuggccgugcugaaggggcucuacaacuucgcgaccugcggccuggucgggcuggugacguuccuccugcugugcggccgcuccugcaccaccagccucuacaaggggguguacgagcugcagacccuggagcucaacauggagacgcugaacaugaccaugccgcuguccugcaccaagaacaacagccaccacuacaucauggucggcaacgagaccggccucgagcugacgcugaccaacaccuccaucaucaaccacaaguucugcaaccucagcgacgcccacaagaagaaccuguacgaccacgcccugauguccaucaucagcaccuuccaccucuccauccccaacuucaaccaguacgaggccaugagcugcgacuucaacgggggcaagaucuccgugcaguacaaccugagccacuccuacgccggggacgcggccaaccacugcggcacgguggccaacgggguccugcagaccuucaugcggauggccuggggcggcagcuacaucgcgcucgacuccgggcgcggcaacugggacugcaucaugaccagcuaccaguaccugaucauccagaacaccacgugggaggaccacugccaguucucccggcccagccccaucggguaccugggccuccugucccagcgcacccgggacaucuacaucagccgccggcgccggggcaccuucaccuggacgcugagcgacuccgaggggaaggacaccccgggcggguacugccugacccgcuggaugcucaucgaggccgagcugaagugcuucggcaacaccgccguggccaagugcaacgagaagcacgacgaggaguucugcgacaugcugcggcuguucgacuucaacaagcaggccauccagcgccugaaggcgcccgcccagaugagcauccagcugaucaacaaggccgugaacgcccucaucaacgaccagcugaucaugaagaaccaccuccgggacaucauggggauccccuacugcaacuacuccaaguacugcuaccucaaccacacgaccaccggccgcaccagccugcccaagugcugccuggucuccaacggcagcuaccucaacgagacgcacuucuccgacgacaucgagcagcaggccgacaacaugaucaccgagaugcugcagaaggaguacauggagcggcaggggaagacgccccugggccucguggaccuguucguguucagcaccuccuucuaccugaucagcaucuuccugcaccucgucaagaucccgacccaccgccacaucguggggaaguccugccccaagccccaccggcugaaccacaugggcaucugcagcugcgggcuguacaagcagcccggcgugccggucaaguggaagcgcugaggacuagucccuguucccagagcccacuuuuuuuucuuuuuuugaaauaaaauagccugucuuucagaucucaaaggcucuuuucagagccaccaaaaaaaaaaaaaaaaaaaaaaaaaaaaaaaaaaaaaaaaaaaaaaaaaaaaaaaaaaaaaaaaaaaaaaaaaaaaaaaaaaaaaaaaaaaaaaaaaaaaa

SEQ ID NO: 25318 - RNA, 1764 nt, Artificial Sequence
  mRNA product Design a-2 (hSL-A100) comprising derived and/or modified sequence from LASV(LP;Clade I)__AAF86701__GPCmut3 (opt1)
aggagaguccgcucagccagguugcagaagcggcuuagcguguguccuaaucuucucucugcguguagguaggccugugccgcaaacaagcuuaccaugggccagaucaucaccuucuuccaggaggugccccacgucaucgaggaggugaugaacaucgugcugaucgcccucagccugcuggccauccucaaggggcuguacaacaucgcgaccugcggcaucaucgggcuggucgccuuccucuuccugugcggcaaguccugcagccugacgcucaagggcggguacgagcugcagacccuggagcucaacauggagacccugaacaugaccaugccgcuguccugcacgaagaacagcucccaccacuacauccgcgugggcaacgagaccgggcucgagcugacccugaccaacacgagcaucaucaaccacaaguucugcaaccucuccgacgcccacaagaagaaccuguacgaccacgcccugaugagcaucaucuccaccuuccaccucagcauccccaacuucaaccaguacgaggccauguccugcgacuucaacggcgggaagaucagcgugcaguacaaccugucccacagcuacgcgggcgacgccgccgagcacugcgggaccgucgccaacggcgugcugcagaccuucaugcggauggcguggggcgggcgcuacaucgcccucgacuccggcaaggggaacugggacugcaucaugacgagcuaccaguaccugaucauccagaacaccaccugggaggaccacugccaguucucccggcccagccccaucggcuaccugggccuccugucccagcgcacccgggacaucuacaucagccgccggcgccgggggacguucaccuggacccugagcgacuccgagggcaacgagacccccgggggcuacugccugacgcgcuggaugcucaucgaggccgagcugaagugcuucgggaacaccgccguggccaagugcaacgagaagcacgacgaggaguucugcgacaugcugcggcuguucgacuucaacaagcaggcgauccgccggcugaaggcccccgcccagaugagcauccagcugaucaacaaggccgucaacgcccucaucaacgaccagcugaucaugaagaaccaccuccgcgacaucaugggcauccccuacugcaacuacuccaaguacugcuaccucaaccacaccagcuccggccggaccagccugcccaagugcugccugaucuccaacgggagcuaccucaacgagacgcaguucuccgacgacaucgagcagcaggcggacaacaugaucaccgagaugcugcagaaggaguacaucgagcgccagggcaagaccccgcuggggcucguggacaucuucaucuucagcaccuccuucuaccugaucagcaucuuccugcaccugaucaagaucccgacgcaccggcacaucgugggcaagcccugccccaagccccaccgccucaaccacaugggggucugcuccugcggccuguacaagcacccgggcgugcccaccaaguggaagcggugaggacuagucccuguucccagagcccacuuuuuuuucuuuuuuugaaauaaaauagccugucuuucagaucucaaaggcucuuuucagagccaccaaaaaaaaaaaaaaaaaaaaaaaaaaaaaaaaaaaaaaaaaaaaaaaaaaaaaaaaaaaaaaaaaaaaaaaaaaaaaaaaaaaaaaaaaaaaaaaaaaaaa

SEQ ID NO: 25319 - RNA, 1764 nt, Artificial Sequence
  mRNA product Design a-2 (hSL-A100) comprising derived and/or modified sequence from LASV(803213;Clade II)__AAF86703__GPCmut3 (opt1)
aggagaguccgcucagccagguugcagaagcggcuuagcguguguccuaaucuucucucugcguguagguaggccugugccgcaaacaagcuuaccaugggccagaucaucaccuucuuccaggaggugccccacgucaucgaggaggugaugaacaucgugcugaucgcccucagccugcuggccauccucaaggggaucuacaacgucgcgaccugcggccuguucgggcugaucuccuuccuccugcugugcggccgcagcugcuccgugacguacaaggggguguacgagcuccagacccuggagcugaacauggccaaccucaacaugaccaugccgcugagcugcaccaagaacaacucccaccacuacaucauggucggcaacgagacgggccuggagcucacccugaccaacaccagcaucaucaaccacaaguucugcaaccuguccgacgcccacaagaagaaccucuacgaccacgcccugaugagcaucaucuccacguuccaccugagcauccccaacuucaaccaguacgaggccauguccugcgacuucaacgggggcaagaucagcgugcaguacaaccucucccacagcuucgcgguggacgccgccaaccacugcgggaccaucgccaacggcguccugcagaccuucaugcggauggcguggggcggguccuacaucgcccuggacagcggcaaggggaacugggacugcaucaugaccuccuaccaguaccucaucauccagaacacgaccugggaggaccacugccaguucagccgccccucccccaucggcuaccuggggcugcucagccagcggacccgcgacaucuacaucagccggcgccgccggggcaccuucacguggacccucuccgacagcgagggcaacgaggcccccgggggcuacugccugacccgguggaugcugaucgaggccgagcucaagugcuucgggaacaccgccguggcgaagugcaacgagaagcacgacgaggaguucugcgacaugcugcgccuguucgacuucaacaagcaggccaucaagcggcucaagacgcccgcccagauguccauccagcugaucaacaaggccgugaacgcccugaucaacgaccagcucaucaugaagaaccaccuccgcgacaucaugggcauccccuacugcaacuacagccgguacugcuaccugaaccacaccgucaccgggaagaccucccugccccgcugcugccuggugagcaacggcuccuaccugaacgagacgcacuucagcgacgacaucgagcagcaggcggacaacaugaucaccgagaugcuccagaaggaguacauggaccggcagggcaagaccccgcuggggcugguggaccucuucgucuucuccaccagcuucuaccugaucuccaucuuccugcaccuggugaagaucccgacgcaccgccacaucgugggcaagcccugccccaagccccaccggcucaaccacauggggaucugcagcugcggccuguacaagcacccggggguccccgugaaguggaagcgcugaggacuagucccuguucccagagcccacuuuuuuuucuuuuuuugaaauaaaauagccugucuuucagaucucaaaggcucuuuucagagccaccaaaaaaaaaaaaaaaaaaaaaaaaaaaaaaaaaaaaaaaaaaaaaaaaaaaaaaaaaaaaaaaaaaaaaaaaaaaaaaaaaaaaaaaaaaaaaaaaaaaaa

SEQ ID NO: 25320 - RNA, 1764 nt, Artificial Sequence
  mRNA product Design a-2 (hSL-A100) comprising derived and/or modified sequence from LASV(GA391;Clade III)__CAA36645__GPCmut3 (opt1)
aggagaguccgcucagccagguugcagaagcggcuuagcguguguccuaaucuucucucugcguguagguaggccugugccgcaaacaagcuuaccaugggccagaucgugaccuucuuccaggaggucccccacgugaucgaggaggugaugaacaucguccugaucgcccucagcauccuggccauccugaaggggcucuacaacguggcgaccugcggccugaucgggcuggugacguuccuccugcuguccggccgcagcugcucccucaucuacaaggggaccuacgagcugcagacccuggagcucaacauggagacccugaacaugacgaugccgcugagcugcaccaagaacaacucccaccacuacauccgggucggcaacgagaccggccucgagcugacccugacgaacaccagcauccucaaccacaaguucugcaaccuguccgacgcccacaagcgcaaccuguacgaccacagccucauguccaucaucagcaccuuccaccuguccauccccaacuucaaccaguacgaggccaugagcugcgacuucaacgggggcaagaucaccgugcaguacaaccugucccacagcuucgccguggacgccgcggggcacugcggcacgcucgccaacgggguccugcagaccuucaugcggauggccuggggcggcuccuacaucgcccuggacagcgggcgcggcaacugggacugcaucaugaccuccuaccaguaccucaucauccagaacaccacgugggacgaccacugccaguucagccggcccucccccaucggguaccugggccugcucagccagcgcacccgggacaucuacaucagccgccggcgccggggcaccuucaccuggacgcucuccgacagcgaggggaacgagaccccgggcggguacugccugacccgcuggaugcugaucgaggcggagcucaagugcuucggcaacaccgccguggccaagugcaacgagaagcacgacgaggaguucugcgacaugcugcggcuguucgacuucaacaagcaggccauccgccggcucaagacgcccgcccagauguccauccagcugaucaacaaggcggugaacgcccugaucaacgaccagcucaucaugaagaaccaccuccgcgacaucauggggauccccuacugcaacuacagccgguacugcuaccugaaccacaccuccaccggcaagaccagccugccccgcugcugccugaucuccaacggcagcuaccugaacgagacgaaguucuccgacgacaucgagcagcaggccgacaacaugaucaccgagaugcuccagaaggaguacaucgaccggcaggggaagacgccccugggccuggucgaccuguucguguucagcaccuccuucuaccucaucagcaucuuccugcaccuggugaagaucccgacccaccgccacaucgucgggaagcccugccccaagccccaccggcucaaccacaugggcaucugcuccugcgggcuguacaagcagccgggcgugcccgugcgcuggaagcggugaggacuagucccuguucccagagcccacuuuuuuuucuuuuuuugaaauaaaauagccugucuuucagaucucaaaggcucuuuucagagccaccaaaaaaaaaaaaaaaaaaaaaaaaaaaaaaaaaaaaaaaaaaaaaaaaaaaaaaaaaaaaaaaaaaaaaaaaaaaaaaaaaaaaaaaaaaaaaaaaaaaaa

SEQ ID NO: 25321 - RNA, 1767 nt, Artificial Sequence
  mRNA product Design a-2 (hSL-A100) comprising derived and/or modified sequence from LASV(AV;Clade V)__CCA30314__GPCmut3 (opt1)
aggagaguccgcucagccagguugcagaagcggcuuagcguguguccuaaucuucucucugcguguagguaggccugugccgcaaacaagcuuaccaugggccagaucgugaccuucuuccaggaggucccccacgugaucgaggaggugaugaacaucguccugaucgcccucagcauccuggccgugcugaaggggcucuacaacaucgcgaccugcggccugaucgggcugaucacguuccuccugcugugcggccgcuccugcagcuccaaccucuacaaggggguguacgagcugcagagccuggaccucaacauggagacccugaacaugaccaugccgcuguccugcaccaagaacaacagccaccacuacauccgggucggcaacgacacgggccucgagcugacccugaccaacaccuccauccucaaccacaaguucugcaaccugagcgacgcccacaagaaggaccuguacgaccacgcccucauguccaucaucagcacguuccaccuguccauccccaacuucaaccaguacgaggccaugagcugcgacuucaacgggggcaagaucuccgugcaguacaaccugagccacuccuacgccaucgacgcggccaaccacugcgggaccguggccaacggcauccuccagaccuucaugcgcauggccuggggcgggagcuacaucgcgcuggacuccggccgggggaacugggacugcaucaugaccagcuaccaguaccugaucauccagaacacgaccugggagaaccacugccaguucucccgccccagccccaucggcuaccucgggcugcugagccagcggacccgcgacaucuacaucucccggcgccgccggggcaccuucacguggacccugagcgacuccgagggcaacgccacccccgggggcuacugccucacccgguggaugcugaucgaggccgagcugaagugcuucgggaacacggccgucgccaagugcaacgagaagcacgacgaggaguucugcgacaugcuccgccuguucgacuucaacaagcaggcgaucagccggcugaagucccccgcccagaugagcauccagcucaucaacaaggccgugaacgcccugaucaacgaccagcugaucaugaagaaccaccuccgcgacaucaugggcauccccuacugcaacuacuccaaguacugcuaccugaaccacaccaucaccgggaagaccagccugcccaagugcugccucguguccaacggcagcuaccugaacgagacgcacuucuccgacgacaucgagcagcaggccgacaacaugaucaccgagaugcugcagaaggaguacauggagcggcagggcaagaccccgcucgggcuggucgaccuguucguguucagcaccuccuucuaccugaucagcaucuuccuccgccuggugaagaucccgacgcaccggcacaucgucggcaagcccugccccaagccccaccgccugaaccacauggggaucugcuccugcggccucuacaagcagccgggggugcccgugcgguggaagcgcugaggacuagucccuguucccagagcccacuuuuuuuucuuuuuuugaaauaaaauagccugucuuucagaucucaaaggcucuuuucagagccaccaaaaaaaaaaaaaaaaaaaaaaaaaaaaaaaaaaaaaaaaaaaaaaaaaaaaaaaaaaaaaaaaaaaaaaaaaaaaaaaaaaaaaaaaaaaaaaaaaaaaa

SEQ ID NO: 25322 - RNA, 1764 nt, Artificial Sequence
  mRNA product Design a-2 (hSL-A100) comprising derived and/or modified sequence from LASV(Togo/2016/7082;Clade VI)__AMR44577__GPCmut3 (opt1)
aggagaguccgcucagccagguugcagaagcggcuuagcguguguccuaaucuucucucugcguguagguaggccugugccgcaaacaagcuuaccaugggccagaucaucaccuucuuccaggaggugccccacgucaucgaggaggugaugaacaucgugcugaucgcccucagccugcuggccauccucaagggggucuacaacguggcgaccugcggcaucaucgggcuggugacguuccuguuccucugcggccgcuccugcagccugaucuacaagggguccuacgagcugcagacccucgagcugaacauggagacccugaacaugaccaugccgcucagcugcacgaagaacuccagccaccacuacauccgggucggcaacgagaccggccuggagcugacccucaccaacacguccaucaucaaccacaaguucugcaaccugagcgacgcccacaagcgcaaccuguacgaccacgcccucauguccauccugagcaccuuccaccuguccauccccaacuucaaccaguacgaggccaugagcugcgacuucaacgggggcaagaucuccgugcaguacaaccucagccacgccuacgcgguggacgccgccgagcacugcgggaccgucgccaacggcgugcugcagaccuucaugcggauggcguggggcggguccuacaucgcccuggacagcggccgcgggaacugggacugcaucaugacguccuaccaguaccucaucauccagaacaccaccugggaggaccacugccaguucagccggcccucccccaucggcuaccuggggcugcucagccagcgcacccgggacaucuacaucagccgccggcgccggggcacguucaccuggacccucuccgacagcgagggcaacgagacccccgggggcuacugccugacgcgcuggaugcugaucgaggccgagcucaagugcuucgggaacaccgccguggccaagugcaacgagaagcacgacgaggaguucugcgacaugcugcggcuguucgacuucaacaagcaggcgauccagcgccucaagucccccgcccagaugagcauccagcugaucaacaaggccgucaacgcccugaucaacgaccagcucaucaugaagaaccaccuccgggacaugaugggcauccccuacugcaacuacuccaaguacugcuaccugaaccacaccagcuccgggcgcaccagccugcccaagugcugccugguguccaacggcagcuaccugaacgagacgcacuucuccgacgacaucgagcagcaggccgacaacaugaucaccgagaugcuccagaaggaguacaucgaccggcagggcaagaccccgcuggggcugguggaccucuucgucuucagcaccuccuucuaccugaucagcaucuuccugcaccugaucaagaucccgacgcaccgccacaucgugggcaagcccugccccaagccccaccggcucaaccacauggggaucugcuccugcggccuguacaagcagccgggggugcccacccgcuggaagcggugaggacuagucccuguucccagagcccacuuuuuuuucuuuuuuugaaauaaaauagccugucuuucagaucucaaaggcucuuuucagagccaccaaaaaaaaaaaaaaaaaaaaaaaaaaaaaaaaaaaaaaaaaaaaaaaaaaaaaaaaaaaaaaaaaaaaaaaaaaaaaaaaaaaaaaaaaaaaaaaaaaaaa

SEQ ID NO: 25323 - RNA, 1764 nt, Artificial Sequence
  mRNA product Design a-2 (hSL-A100) comprising derived and/or modified sequence from LASV(KAK-428;Clade n.d. (VII))__ANH09740__GPCmut3 (opt1)
aggagaguccgcucagccagguugcagaagcggcuuagcguguguccuaaucuucucucugcguguagguaggccugugccgcaaacaagcuuaccaugggccagaucgugaccuucuuccaggaggucccccacgugaucgaggaggugaugaacaucguccugaucgcccucagccugcuggccauccucaaggggcuguacaacuucgcgaccugcggcgugaucgggcugaucacguuccuccugcugugcggccgcuccugcagcgccaccuacaaggggcaguacgagcuccagacccuggagcugaacauggagucccucaacaugaccaugccgcugagcugcacgaagaacaacucccaccacuacauccgggccggcaacaacaccggccuggagcucacccugaccaacacgagcaucaucucccacaaguucugcaaccugagcgacgcccacaagaagaaccucuacgaccacacccugauguccaucaucaccaccuuccaccugagcauccccaacuucaaccaguacgaggccauguccugcgacuucaacgggggcaagaucagcauccaguacaaccucucccacagcuacgcgggggacgccgcccagcacugcggcacgguggccaacgggguccugcagaccuucaugcgcauggcguggggcggcuccuaccuggcccucgacagcgggcggcgcggcugggacugcaucaucuccagcuaccaguaccugaucauccagaacaccaccugggacgaccacugccaguucucccggcccagccccaucggguaccugggcuucgugagccagaagacgcgcgacaucuacaucucccggcgccgccggggcaccuucaccuggacccugagcgacuccgaggggcacgacaugccgggcggguacugccucacgcgguggaugcugaucgaggccgaccugaagugcuucggcaacaccgccguggccaagugcaacgagaagcacgacgaggaguucugcgacauguggcgccucuucgacuucaacaagcaggcgauccagcggcugaaggcccccgcccagaugaacauccagcugaucaacaaggccgucaacgcccucaucaacgaccagcugaugaugaagaaccaccuccgcgacaucauggggauccccuacugcaacuacagcaaguucugcuaccugaacaacaccaccacgggccggaccucccugccccgcugcugccugaucagcaacggcuccuaccucaacgagacccacuucagcgacgacaucgagcagcaggcggacaacaugaucaccgagaugcugcagaaggaguacauggaccggcaggggaagacgccccugggccucguggaccuguucguguucuccaccagcuucuaccugaucaccaucuuccuccaccuggucaagaucccgacccaccgccacaucguggggaagcccugccccaagccccaccggcugaaccacaugggcaucugcuccugcgggcuguacaagcagccgggcgugcccguccgcuggaagcggugaggacuagucccuguucccagagcccacuuuuuuuucuuuuuuugaaauaaaauagccugucuuucagaucucaaaggcucuuuucagagccaccaaaaaaaaaaaaaaaaaaaaaaaaaaaaaaaaaaaaaaaaaaaaaaaaaaaaaaaaaaaaaaaaaaaaaaaaaaaaaaaaaaaaaaaaaaaaaaaaaaaaa

SEQ ID NO: 25324 - RNA, 1764 nt, Artificial Sequence; identical to SEQ ID NO: 25318
  mRNA product Design a-2 (hSL-A100) comprising derived and/or modified sequence from LASV(Pinneo-NIG-1969;Clade I)__AIT17836__GPCmut3 (opt1)

SEQ ID NO: 25325 - RNA, 1764 nt, Artificial Sequence
  mRNA product Design a-2 (hSL-A100) comprising derived and/or modified sequence from LASV(ISTH0009-NIG-2011;Clade II)__AIT17404__GPCmut3 (opt1)
aggagaguccgcucagccagguugcagaagcggcuuagcguguguccuaaucuucucucugcguguagguaggccugugccgcaaacaagcuuaccaugggccagaucaucaccuucuuccaggaggugccccacgucaucgaggaggugaugaacaucgugcugaucgcccucagccugcuggccauccucaaggggaucuacaacgucgcgaccugcggccuguucgggcugguguccuuccuccugcugugcggccgcagcugcuccacgaccuacaaggggguguacgagcuccagacccuggagcuggacauggccagccucaacaugaccaugccgcuguccugcacgaagaacaacagccaccacuacaucauggucggcaacgagaccggccuggagcucacccugaccaacacguccaucaucaaccacaaguucugcaaccugagcgacgcccacaagaagaaccucuacgaccacgcccugauguccaucaucagcaccuuccaccuguccauccccaacuucaaccaguacgaggccaugagcugcgacuucaacgggggcaagaucuccgugcaguacaaccucagccacgcguacgccguggacgccgccaaccacugcgggaccaucgcgaacggcguccugcagaccuucaugcggauggccuggggcggguccuacaucgcccuggacagcggcaagggguccugggacugcaucaugacgagcuaccaguaccucaucauccagaacaccaccugggaggaccacugccaguucucccgccccagccccaucggcuaccuggggcugcucagccagcggacccgcgacaucuacaucucccggcgccgccggggcacguucaccuggacccucagcgacuccgagggcaacgagacccccgggggcuacugccugacgcgguggaugcugaucgaggccgagcucaagugcuucgggaacaccgccguggcgaagugcaacgagaagcacgacgaggaguucugcgacaugcugcgccuguucgacuucaacaagcaggccauccggcgccucaagacccccgcccagaugagcauccagcugaucaacaaggccgugaacgcccugaucaacgaccagcucaucaugaagaaccaccuccgggacaucaugggcaucccguacugcaacuacuccaaguacugcuaccugaaccacaccgucacggggaagaccagccugccccgcugcugccugguguccaacggcagcuaccugaacgagacccacuucuccgacgacaucgagcagcaggcggacaacaugaucaccgagcuccugcagaaggaguacauggaccggcagggcaagacgccccuggggcucguggaccuguucgucuucagcaccuccuucuaccugaucagcaucuuccugcaccucaucaagaucccgacccaccgccacaucaccggcaagcccugccccaagccccaccggcugaaccacauggggaucugcuccugcggccuguacaagcacccgggggugcccgugaaguggaagcgcugaggacuagucccuguucccagagcccacuuuuuuuucuuuuuuugaaauaaaauagccugucuuucagaucucaaaggcucuuuucagagccaccaaaaaaaaaaaaaaaaaaaaaaaaaaaaaaaaaaaaaaaaaaaaaaaaaaaaaaaaaaaaaaaaaaaaaaaaaaaaaaaaaaaaaaaaaaaaaaaaaaaaa

SEQ ID NO: 25326 - RNA, 1764 nt, Artificial Sequence
  mRNA product Design a-2 (hSL-A100) comprising derived and/or modified sequence from LASV(ISTH2010-NIG-2012;Clade II)__AIT17482__GPCmut3 (opt1)
aggagaguccgcucagccagguugcagaagcggcuuagcguguguccuaaucuucucucugcguguagguaggccugugccgcaaacaagcuuaccaugggccagaucaucaccuucuuccaggaggugccccacgucaucgaggaggugaugaacaucgugcugaucgcccucagccugcuggccauccucaaggggaucuacaacgucgcgaccugcggccuguucgggcugguguccuuccuccugcugugcggccgcagcugcuccacgaccuacaaggggguguacgagcuccagacccuggagcuggacauggccagccucaacaugaccaugccgcuguccugcacgaagaacaacagccaccacuacaucauggucggcaacgagaccggccuggagcucacccugaccaacacguccaucaucaaccacaaguucugcaaccugagcgacgcccacaagaagaaccucuacgaccacgcccugauguccaucaucagcaccuuccaccuguccauccccaacuucaaccaguacgaggccaugagcugcgacuucaacgggggcaagaucuccgugcaguacaaccucagccacgcguacgccguggacgccgccaaccacugcgggaccaucgcgaacggcguccugcagaccuucaugcggauggccuggggcggguccuacaucgcccuggacagcggcaagggguccugggacugcaucaugacgagcuaccaguaccucaucauccagaacaucaccugggaggaccacugccaguucucccgccccagccccaucggcuaccuggggcugcucagccagcggacccgcgacaucuacaucucccggcgccgccggggcaccuucacguggacccucagcgacuccgagggcaacgagacccccgggggcuacugccugacccgguggaugcugaucgaggccgagcucaagugcuucgggaacacggccguggcgaagugcaacgagaagcacgacgaggaguucugcgacaugcugcgccuguucgacuucaacaagcaggccauccggcgccucaagacccccgcccagaugagcauccagcugaucaacaaggccgugaacgcccugaucaacgaccagcucaucaugaagaaccaccuccgggacaucaugggcauccccuacugcaacuacuccaaguacugcuaccugaaccacaccgucaccgggaagacgagccugccccgcugcugccugguguccaacggcagcuaccugaacgagacccacuucuccgacgacaucgagcagcaggcggacaacaugaucaccgagcuccugcagaaggaguacaucgaccggcagggcaagaccccgcuggggcucguggaccuguucgucuucagcacguccuucuaccugaucagcaucuuccugcaccucgugaagaucccgacccaccgccacguggucggcaagcccugccccaagccccaccggcugaaccacauggggaucugcuccugcggccuguacaagcacccgggggugcccgugaaguggaagcgcugaggacuagucccuguucccagagcccacuuuuuuuucuuuuuuugaaauaaaauagccugucuuucagaucucaaaggcucuuuucagagccaccaaaaaaaaaaaaaaaaaaaaaaaaaaaaaaaaaaaaaaaaaaaaaaaaaaaaaaaaaaaaaaaaaaaaaaaaaaaaaaaaaaaaaaaaaaaaaaaaaaaaa

SEQ ID NO: 25327 - RNA, 1764 nt, Artificial Sequence
  mRNA product Design a-2 (hSL-A100) comprising derived and/or modified sequence from LASV(Lassa virus/H.sapiens-wt/NGA/2015/ISTH_0543;Clade II)__AVO03639__GPCmut3 (opt1)
aggagaguccgcucagccagguugcagaagcggcuuagcguguguccuaaucuucucucugcguguagguaggccugugccgcaaacaagcuuaccaugggccagaucaucaccuucuuccaggaggugccccacgucaucgaggaggugaugaacaucgugcugaucgcccucagccugcuggccauccucaaggggaucuacaacgucgcgaccugcggccuguucgggcugguguccuuccuccugcugugcggccgcagcugcuccacgaccuacaaggggguguacgagcuccagacccuggagcuggacauggccaaccucaacaugaccaugccgcugagcugcacgaagaacaacucccaccacuacaucauggucggcaacgagaccggccuggagcucacccugaccaacacgagcaucaucaaccacaaguucugcaaccuguccgacgcccacaagaagaaccucuacgaccacgcccugaugagcaucaucuccaccuuccaccugagcauccccaacuucaaccaguacgaggccauguccugcgacuucaacgggggcaagaucagcgugcaguacaaccucucccacaccuacgcgguggacgccgccaaccacugcgggaccaucgccaacggcguccugcagacguucaugcggauggcguggggcgggagcuacaucgcccuggacuccggcaaggggagcugggacugcaucaugaccuccuaccaguaccucgugauccagaacaccaccugggaggaccacugccaguucagccgccccucccccaucggcuaccuggggcugcucagccagcggacgcgcgacaucuacaucagccggcgccgccggggcaccuucaccuggacccucuccgacagcgagggcaacgagacgcccgggggcuacugccugacccgguggaugcugaucgaggccgagcucaagugcuucgggaacaccgccguggccaagugcaacgagaagcacgacgaggaguucugcgacaugcugcgccuguucgacuucaacaagcaggcgauccggcgccucaagacccccgcccagauguccauccagcugaucaacaaggccgucaacgcccugaucaacgaccagcucaucaugaagaaccaccuccgggacaucaugggcauccccuacugcaacuacagcaaguacugcuaccugaaccacacggugaccgggaagaccucccugccccgcugcugccuggugagcaacggcuccuaccugaacgagacccacuucagcgacgacaucgagcagcaggccgacaacaugaucacggagcuccugcagaaggaguacaucgaccggcagggcaagaccccgcuggggcucgucgaccuguucguguucuccaccagcuucuaccugaucuccaucuuccugcaccucgugaagaucccgacccaccgccacaucacgggcaagcccugccccaagccccaccggcugaaccacauggggaucugcagcugcggccuguacaagcacccggggguccccgugaaguggaagcgcugaggacuagucccuguucccagagcccacuuuuuuuucuuuuuuugaaauaaaauagccugucuuucagaucucaaaggcucuuuucagagccaccaaaaaaaaaaaaaaaaaaaaaaaaaaaaaaaaaaaaaaaaaaaaaaaaaaaaaaaaaaaaaaaaaaaaaaaaaaaaaaaaaaaaaaaaaaaaaaaaaaaaa

SEQ ID NO: 25328 - RNA, 1764 nt, Artificial Sequence
  mRNA product Design a-2 (hSL-A100) comprising derived and/or modified sequence from LASV(Lassa virus/H.sapiens-wt/NGA/2016/ISTH_0009;Clade II)__AVO03571__GPCmut3 (opt1)
aggagaguccgcucagccagguugcagaagcggcuuagcguguguccuaaucuucucucugcguguagguaggccugugccgcaaacaagcuuaccaugggccagaucaucaccuucuuccaggaggugccccacgucaucgaggaggugaugaacaucgugcugaucgcccucagccugcuggccauccucaaggggaucuacaacgucgcgaccugcggccugcuggggcucguguccuuccugcugcucugcggccgcagcugcuccacgaccuacaaggggguguacgagcugcagacccuggagcucgacauggccagccugaacaugaccaugccgcuguccugcacgaagaacaacagccaccacuacaucauggucggcaacgagaccggccucgagcugacccugaccaacacguccaucaucaaccacaaguucugcaaccucagcgacgcccacaagaagaaccuguacgaccacgcccugauguccaucaucagcaccuuccaccucuccauccccaacuucaaccaguacgaggccaugagcugcgacuucaacgggggccggaucuccgugcaguacaaccugagccacuccuacgcgguggacgccgccaaccacugcgggaccaucgccaacggcguccugcagaccuucaugcgcauggcguggggcgggagcuacaucgcccucgacuccggcaaggggagcugggacugcaucaugacguccuaccaguaccugaucauccagaacaccaccugggaggaccacugccaguucagccggcccagccccaucggcuaccuggggcuccugucccagcgcacccgggacaucuacaucagccgccggcgccggggcacguucaccuggacccuguccgacagcgagggcaacgagacccccgggggcuacugccugacgcgcuggaugcucaucgaggccgagcugaagugcuucgggaacaccgccguggccaagugcaacgagaagcacgacgaggaguucugcgacaugcugcggcuguucgacuucaacaagcaggcgauccgccggcugaagacccccgcccagauguccauccagcugaucaacaaggccgugaacgcccucaucaacgaccagcugaucaugaagaaccaccuccgcgacaucaugggcaucccguacugcaacuacagcaaguacugcuaccucaaccacaccgucacggggaagaccucccugccccggugcugccuggugagcaacggcuccuaccucaacgagacccacuucagcgacgacaucgagcagcaggccgacaacaugaucaccgagcugcugcagaaggaguacaucgaccgccagggcaagacgccccucgggcugguggaccuguucgucuucuccaccagcuucuaccugaucuccaucuuccuccaccuggugaagaucccgacccaccggcacaucaccggcaagcccugccccaagccccaccgccugaaccacauggggaucugcagcugcggccucuacaaccacccgggggugcccgucaaguggaagcggugaggacuagucccuguucccagagcccacuuuuuuuucuuuuuuugaaauaaaauagccugucuuucagaucucaaaggcucuuuucagagccaccaaaaaaaaaaaaaaaaaaaaaaaaaaaaaaaaaaaaaaaaaaaaaaaaaaaaaaaaaaaaaaaaaaaaaaaaaaaaaaaaaaaaaaaaaaaaaaaaaaaaa

SEQ ID NO: 25329 - RNA, 1764 nt, Artificial Sequence
  mRNA product Design a-2 (hSL-A100) comprising derived and/or modified sequence from LASV(Lassa virus/H.sapiens-wt/NGA/2016/ISTH_0017;Clade II)__AVO03567__GPCmut3 (opt1)
aggagaguccgcucagccagguugcagaagcggcuuagcguguguccuaaucuucucucugcguguagguaggccugugccgcaaacaagcuuaccaugggccagaucaucaccuucuuccaggaggugccccacgucaucgaggaggugaugaacaucgugcugaucgcccucagccugcuggccauccucaaggggaucuacaacgucgcgaccugcggccuguucgggcugguguccuuccuccugcugugcggccgcagcugcuccacgaccuacaaggggguguacgagcuccagacccuggagcuggacauggccagccucaacaugaccaugccgcuguccugcacgaagaacaacagccaccacuacaucauggucggcaacgagaccggccuggagcucacccugaccaacacguccaucaucaaccacaaguucugcaaccugagcgacgcccacaagaagaaccucuacgaccacgcccugauguccaucaucagcaccuuccaccuguccauccccaacuucaaccaguacgaggccaugagcugcgacuucaacgggggcaagaucuccgugcaguacaaccucagccacaccuacgcgaucgacgccgccaaccacugcgggaccaucgccaacggcgugcugcagacguucaugcggauggcguggggcggguccuacaucgcccuggacagcggcaagggguccugggacugcaucaugaccagcuaccaguaccucaucauccagaacaccaccugggaggaccacugccaguucucccgccccagccccaucggcuaccuggggcugcucagccagcggacgcgcgacaucuacaucucccggcgccgccggggcaccuucaccuggacccucagcgacuccgagggcaacgagacgcccgggggcuacugccugacccgguggaugcugaucgaggccgagcucaagugcuucgggaacaccgccgucgccaagugcaacgagaagcacgacgaggaguucugcgacaugcugcgccuguucgacuucaacaagcaggcgauccggcgccucaagacccccgcccagaugagcauccagcugaucaacaaggccgugaacgcccugaucaacgaccagcucaucaugaagaaccaccuccgggacaucaugggcauccccuacugcaacuacuccaaguacugcuaccugaaccacacggugaccgggaagaccagccugccccgcugcugccuggucuccaacggcagcuaccugaacgagacccacuucuccgacgacaucgagcagcaggccgacaacaugaucacggagcuccugcagaaggaguacauggaccggcagggcaagaccccgcuggggcucguggaccuguucguguucagcaccuccuucuaccugaucagcaucuuccugcaccucguccgcaucccgacccaccggcacgugaucggcaagcccugccccaagccccaccgccugaaccacauggggaucugcuccugcggccuguacaagcacccgggggugcccgucaaguggaagcggugaggacuagucccuguucccagagcccacuuuuuuuucuuuuuuugaaauaaaauagccugucuuucagaucucaaaggcucuuuucagagccaccaaaaaaaaaaaaaaaaaaaaaaaaaaaaaaaaaaaaaaaaaaaaaaaaaaaaaaaaaaaaaaaaaaaaaaaaaaaaaaaaaaaaaaaaaaaaaaaaaaaaa

SEQ ID NO: 25330 - RNA, 1764 nt, Artificial Sequence
  mRNA product Design a-2 (hSL-A100) comprising derived and/or modified sequence from LASV(Lassa virus/H.sapiens-wt/NGA/2018/ISTH_0959;Clade II)__AVV65099__GPCmut3 (opt1)
aggagaguccgcucagccagguugcagaagcggcuuagcguguguccuaaucuucucucugcguguagguaggccugugccgcaaacaagcuuaccaugggccagaucaucaccuucuuccaggaggugccccacgucaucgaggaggugaugaacaucgugcugaucgcccucagccugcuggccauccucaaggggaucuacaacgucgugaccugcggccuguucgggcugguguccuuccuccugcugugcggccgcagcugcuccacgaccuacaagggggucuacgagcuccagacccuggagcuggacauggcgagccucaacaugaccaugccgcuguccugcacgaagaacaacagccaccacuacaucauggugggcaacgagaccggccuggagcucacccugaccaacacguccaucaucaaccacaaguucugcaaccugagcgacgcccacaagaagaaccucuacgaccacgcccugauguccaucaucagcaccuuccaccuguccauccccaacuucaaccaguacgaggccaugagcugcgacuucaacgggggcaagaucuccgugcaguacaaccucagccacgccuacgcgaucgacgccgccaaccacugcgggaccaucgccaacggcguccugcagaccuucaugcggauggcguggggcggguccuacaucgcccuggacagcggcaagggguccugggacugcaucaugacgagcuaccaguaccucaucauccagaacaccaccugggaggaccacugccaguucucccgccccagccccaucggcuaccuggggcugcucagccagcggacccgcgacaucuacaucucccggcgccgccggggcacguucaccuggacccucagcgacuccgagggcaacgagacccccgggggcuacugccugacgcgguggaugcugaucgaggccgagcucaagugcuucgggaacaccgccguggccaagugcaacgagaagcacgacgaggaguucugcgacaugcugcgccuguucgacuucaacaagcaggcgauccggcgccucaagacccccgcccagaugagcauccagcugaucaacaaggccgugaacgcccugaucaacgaccagcucaucaugaagaaccaccuccgggacaucaugggcaucccguacugcaacuacuccaaguacugcuaccugaaccacaccgucacggggaagaccagccugccccgcugcugccugguguccaacggcagcuaccugaacgagacccacuucuccgacgacaucgagcagcaggccgacaacaugaucaccgagcuccugcagaaggaguacaucgaccggcagggcaagacgccccuggggcucguggaccuguucgucuucagcaccuccuucuaccugaucagcaucuuccugcaccucgugaagaucccgacccaccgccacgugaucggcaagcccugccccaagccccaccggcugaaccacauggggaucugcuccugcggccuguacaagcacccggggguccccgugaaguggaagcgcugaggacuagucccuguucccagagcccacuuuuuuuucuuuuuuugaaauaaaauagccugucuuucagaucucaaaggcucuuuucagagccaccaaaaaaaaaaaaaaaaaaaaaaaaaaaaaaaaaaaaaaaaaaaaaaaaaaaaaaaaaaaaaaaaaaaaaaaaaaaaaaaaaaaaaaaaaaaaaaaaaaaaa

SEQ ID NO: 25331 - RNA, 1764 nt, Artificial Sequence
  mRNA product Design a-2 (hSL-A100) comprising derived and/or modified sequence from LASV(LASV003-NIG-2008;Clade II)__AIT17580__GPCmut3 (opt1)
aggagaguccgcucagccagguugcagaagcggcuuagcguguguccuaaucuucucucugcguguagguaggccugugccgcaaacaagcuuaccaugggccagaucaucaccuucuuccaggaggugccccacgucaucgaggaggugaugaacaucgugcugaucgcccucagccugcuggccauccucaaggggaucuacaacgucgcgaccugcggccuguucgggcugguguccuuccuccugcugugcggccgcagcugcuccacgaccuacaaggggguguacgagcuccagacccuggagcuggacauggccagccucaacaugaccaugccgcuguccugcacgaagaacaacagccaccacuacaucauggucggcaacgagaccggccuggagcucacccugaccaacacguccaucaucaaccacaaguucugcaaccugagcgacgcccacaagaagaaccucuacgaccacgcccugauguccaucaucagcaccuuccaccuguccauccccaacuucaaccaguacgaggccaugagcugcgacuucaacgggggcaagaucuccgugcaguacaaccucagccacaccuacgcgguggacgccgccaaccacugcgggaccaucgccaacggcguccugcagacguucaugcggauggcguggggcggguccuacaucgcccuggacagcggcaagggguccugggacugcaucaugaccagcuaccaguaccucaucauccagaacaccaccugggaggaccacugccaguucucccgccccagccccaucggcuaccuggggcugcucagccagcggacgcgcgacaucuacaucucccggcgccgccggggcaccuucaccuggacccucagcgacuccgagagcaacgagacgccgggcggguacugccugacccgguggaugcugaucgaggccgagcucaagugcuucggcaacaccgccguggccaagugcaacgagaagcacgacgaggaguucugcgacaugcugcgccuguucgacuucaacaagcaggcgauccggcgccucaaggcccccgcccagauguccauccagcugaucaacaaggccgugaacgcccugaucaacgaccagcucaucaugaagaaccaccuccgggacaucauggggauccccuacugcaacuacagcaaguacugcuaccugaaccacaccgucacgggccgcaccucccugccccggugcugccuggugagcaacggguccuaccugaacgagacccacuucagcgacgacaucgagcagcaggcggacaacaugaucaccgagcuccugcagaaggaguacauggaccgccagggcaagacgccccugggccucguggaccuguucgucuucuccaccagcuucuaccugaucuccaucuuccugcaccucgugaagaucccgacccaccggcacgugaucgggaagcccugccccaagccccaccgccugaaccacaugggcaucugcagcugcgggcuguacaagcacccgggcguccccgugaaguggaagcggugaggacuagucccuguucccagagcccacuuuuuuuucuuuuuuugaaauaaaauagccugucuuucagaucucaaaggcucuuuucagagccaccaaaaaaaaaaaaaaaaaaaaaaaaaaaaaaaaaaaaaaaaaaaaaaaaaaaaaaaaaaaaaaaaaaaaaaaaaaaaaaaaaaaaaaaaaaaaaaaaaaaaa

SEQ ID NO: 25332 - RNA, 1764 nt, Artificial Sequence
  mRNA product Design a-2 (hSL-A100) comprising derived and/or modified sequence from LASV(LASV035-NIG-2009;Clade II)__AIT17588__GPCmut3 (opt1)
aggagaguccgcucagccagguugcagaagcggcuuagcguguguccuaaucuucucucugcguguagguaggccugugccgcaaacaagcuuaccaugggccagaucaucaccuucuuccaggaggugccccacgucaucgaggaggugaugaacaucgugcugaucgcccucagccugcuggccauccucaaggggaucuacaacgucgcgaccugcggccuguucgggcugguguccuuccuccugcugugcggccgcagcugcuccacgaccuacaaggggguguacgagcuccagacccuggagcuggacauggccagccucaacaugaccaugccgcuguccugcacgaagaacaacagccaccacuacaucauggucggcaacgagaccggccuggagcucacccugaccaacacguccaucaucaaccacaaguucugcaaccugagcgacgcccacaagaagaaccucuacgaccacgcccugauguccaucaucagcaccuuccaccuguccauccccaacuucaaccaguacgaggccaugagcugcgacuucaacgggggcaagaucuccgugcaguacaaccucagccacgcguacgccguggacgccgccaaccacugcgggaccaucgcgaacggcguccugcagaccuucaugcggauggccuggggcggguccuacaucgcccuggacagcggcaagggguccugggacugcaucaugacgagcuaccaguaccucaucauccagaacaccaccugggaggaccacugccaguucucccgccccagccccaucggcuaccuggggcugcucagccagcggacccgcgacaucuacaucucccggcgccgccggggcacguucaccuggacccucagcgacuccgagggcaacgagacccccgggggcuacugccugacgcgguggaugcugaucgaggccgagcucaagugcuucgggaacaccgccguggcgaagugcaacgagaagcacgacgaggaguucugcgacaugcugcgccuguucgacuucaacaagcaggccauccggcgccucaaggcccccgcccagaugagcauccagcugaucaacaaggccgugaacgcgcugaucaacgaccagcucaucaugaagaaccaccuccgggacaucaugggcauccccuacugcaacuacuccaaguacugcuaccugaaccacaccgucaccgggaagacgagccugccccgcugcugccugguguccaacggcagcuaccugaacgagacccacuucuccgacgacaucgagcagcaggccgacaacaugaucaccgagcuccugcagaaggaguacaucgaccggcagggcaagaccccgcuggggcucguggaccuguucgucuucagcacguccuucuaccugaucagcaucuuccugcaccucgugaagaucccgacccaccgccacgugaucggcaagcccugccccaagccccaccggcugaaccacauggggaucugcuccugcggccuguacaagcacccggggguccccgugaaguggaagcgcugaggacuagucccuguucccagagcccacuuuuuuuucuuuuuuugaaauaaaauagccugucuuucagaucucaaaggcucuuuucagagccaccaaaaaaaaaaaaaaaaaaaaaaaaaaaaaaaaaaaaaaaaaaaaaaaaaaaaaaaaaaaaaaaaaaaaaaaaaaaaaaaaaaaaaaaaaaaaaaaaaaaaa

SEQ ID NO: 25333 - RNA, 1764 nt, Artificial Sequence
  mRNA product Design a-2 (hSL-A100) comprising derived and/or modified sequence from LASV(LASV1000-NIG-2009;Clade II)__AIT17782__GPCmut3 (opt1)
aggagaguccgcucagccagguugcagaagcggcuuagcguguguccuaaucuucucucugcguguagguaggccugugccgcaaacaagcuuaccaugggccagaucaucaccuucuuccaggaggugccccacgucaucgaggaggugaugaacaucgugcugaucgcccucagccugcuggccauccucaaggggaucuacaacgucgcgaccugcggccuguucgggcugguguccuuccuccugcugugcggccgcagcugcuccacgaccuacaaggggguguacgagcuccagacccuggagcuggacauggccagccucaacaugaccaugccgcuguccugcacgaagaacaacagccaccacuacaucauggucggcaacgagaccggccuggagcucacccugaccaacacguccaucaucaaccacaaguucugcaaccugagcgacgcccacaagaagaaccucuacgaccacgcccugauguccaucaucagcaccuuccaccuguccauccccaacuucaaccaguacgaggccaugagcugcgacuucaacgggggcaagaucuccgugcaguacaaccucagccacaccuacgcgguggacgccgccaaccacugcgggaccaucgccaacggcguccugcagacguucaugcggauggcguggggcggguccuacaucgcccuggacagcggcaagggguccugggacugcaucaugaccagcuaccaguaccucaucauccagaacaccaccugggaggaccacugccaguucucccgccccagccccaucggcuaccuggggcugcucagccagcggacgcgcgacaucuacaucucccggcgccgccggggcaccuucaccuggacccucagcgacuccgagggcaacgagacgcccgggggcuacugccugacccgguggaugcugaucgaggccgagcucaagugcuucgggaacaccgccguggccaagugcaacgagaagcacgacgaggaguucugcgacaugcugcgccuguucgacuucaacaagcaggcgaucaagcggcucaagacccccgcccagaugagcauccagcugaucaacaaggccgugaacgcccugaucaacgaccagcucaucaugaagaaccaccuccgcgacaucaugggcauccccuacugcaacuacuccaaguacugcuaccugaaccacacggucaccgggaagaccagccugccccggugcugccugguguccaacggcagcuaccugaacgagacccacuucuccgacgacaucgagcagcaggccgacaacaugaucacggagcuccugcagaaggaguacaucgaccgccagggcaagaccccgcuggggcucguggaccuguucgucuucagcaccuccuucuaccugaucagcaucuuccugcaccucgugaagaucccgacccaccggcacguggucggcaagcccugccccaagccccaccgccugaaccacauggggaucugcuccugcggccuguacaagcacccgggggugcccgugaaguggaagcggugaggacuagucccuguucccagagcccacuuuuuuuucuuuuuuugaaauaaaauagccugucuuucagaucucaaaggcucuuuucagagccaccaaaaaaaaaaaaaaaaaaaaaaaaaaaaaaaaaaaaaaaaaaaaaaaaaaaaaaaaaaaaaaaaaaaaaaaaaaaaaaaaaaaaaaaaaaaaaaaaaaaaa

SEQ ID NO: 25334 - RNA, 1764 nt, Artificial Sequence
  mRNA product Design a-2 (hSL-A100) comprising derived and/or modified sequence from LASV(LASV221-NIG-2010;Clade II)__AIT17624__GPCmut3 (opt1)
aggagaguccgcucagccagguugcagaagcggcuuagcguguguccuaaucuucucucugcguguagguaggccugugccgcaaacaagcuuaccaugggccagaucaucaccuucuuccaggaggugccccacgucaucgaggaggugaugaacaucgugcugaucgcccucagccugcuggccauccucaaggggaucuacaacgucgcgaccugcggccuguucgggcugguguccuuccuccugcugugcggccgcagcugcuccacgaccuacaaggggguguacgagcuccagacccuggagcuggacauggccagccucaacaugaccaugccgcuguccugcacgaagaacaacagccaccacuacaucauggucggcaacgagaccggccuggagcucacccugaccaacacguccaucaucaaccacaaguucugcaaccugagcgacgcccacaagaagaaccucuacgaccacgcccugauguccaucaucagcaccuuccaccuguccauccccaacuucaaccaguacgaggccaugagcugcgacuucaacgggggcaagaucuccgugcaguacaaccucagccacaccuacgcgaucgacgccgccaaccacugcgggaccaucgccaacggcgugcugcagacguucaugcggauggcguggggcggguccuacaucgcccuggacagcggcaagggguccugggacugcaucaugaccagcuaccaguaccucaucauccagaacaccaccugggaggaccacugccaguucucccgccccagccccaucggcuaccuggggcugcucagccagcggacgcgcgacaucuacaucucccggcgccgccggggcaccuucaccuggacccucagcgacuccgagggcaacgagacgcccgggggcuacugccugacccgguggaugcugaucgaggccgagcucaagugcuucgggaacaccgccgucgccaagugcaacgagaagcacgacgaggaguucugcgacaugcugcgccuguucgacuucaacaagcaggcgauccggcgccucaagacccccgcccagaugagcauccagcugaucaacaaggccgugaacgcccugaucaacgaccagcucaucaugaagaaccaccuccgggacaucaugggcauccccuacugcaacuacuccaaguacugcuaccugaaccacacggugaccgggaagaccagccugccccgcugcugccuggucuccaacggcagcuaccugaacgagacccacuucuccgacgacaucgagcagcaggccgacaacaugaucacggagaugcuccagaaggaguacauggaccggcagggcaagaccccgcuggggcugguggaccucuucguguucagcaccuccuucuaccugaucagcaucuuccugcaccuggucaagaucccgacccaccgccacgugaucggcaagcccugccccaagccccaccggcucaaccacauggggaucugcuccugcggccuguacaagcacccgggggugcccgucaaguggaagcgcugaggacuagucccuguucccagagcccacuuuuuuuucuuuuuuugaaauaaaauagccugucuuucagaucucaaaggcucuuuucagagccaccaaaaaaaaaaaaaaaaaaaaaaaaaaaaaaaaaaaaaaaaaaaaaaaaaaaaaaaaaaaaaaaaaaaaaaaaaaaaaaaaaaaaaaaaaaaaaaaaaaaaa

SEQ ID NO: 25335 - RNA, 1764 nt, Artificial Sequence
  mRNA product Design a-2 (hSL-A100) comprising derived and/or modified sequence from LASV(LASV237-NIG-2010;Clade II)__AIT17638__GPCmut3 (opt1)
aggagaguccgcucagccagguugcagaagcggcuuagcguguguccuaaucuucucucugcguguagguaggccugugccgcaaacaagcuuaccaugggccagaucaucaccuucuuccaggaggugccccacgucaucgaggaggugaugaacaucgugcugaucgcccucagccugcuggccauccucaaggggaucuacaacgucgcgaccugcggccuguucgggcugguguccuuccuccugcugugcggccgcagcugcuccacgaccuacaaggggguguacgagcuccagacccuggagcuggacauggccagccucaacaugaccaugccgcuguccugcacgaagaacaacagccaccacuacaucauggucggcaacgagaccggccuggagcucacccugaccaacacguccaucaucaaccacaaguucugcaaccugagcgacgcccacaagaaggaccucuacgaccacgcccugauguccaucaucagcaccuuccaccuguccauccccaacuucaaccaguacgaggccaugagcugcgacuucaacgggggcaagaucuccgugcaguacaaccucagccacaccuacgcgguggacgccgccaaccacugcgggaccaucgccaacggcguccugcagacguucaugcggauggcguggggcggguccuacaucgcccuggacagcggcaagggguccugggacugcaucaugaccagcuaccaguaccucaucauccagaacaccaccugggaggaccacugccaguucucccgccccagccccaucggcuaccuggggcugcucagccagcggacgcgcgacaucuacaucucccggcgccgccggggcaccuucaccuggacccucagcgacuccgagggcaacgagacgcccgggggcuacugccugacccgguggaugcugaucgaggccgagcucaagugcuucgggaacaccgccguggccaagugcaacgagaagcacgacgaggaguucugcgacaugcugcgccuguucgacuucaacaagcaggcgauccggcgccucaagacccccgcccagaugagcauccagcugaucaacaaggccgugaacgcccugaucaacgaccagcucaucaugaagaaccaccuccgggacaucaugggcauccccuacugcaacuacuccaaguacugcuaccugaaccacacggucaccgggaagaccagccugccccgcugcugccugguguccaacggcagcuaccugaacgagacccacuucuccgacgacaucgagcagcaggccgacaacaugaucacggagcuccugcagaaggaguacauggaccggcagggcaagaccccgcuggggcucguggaccuguucgucuucagcaccuccuucuaccugaucagcaucuuccugcaccucaucaagaucccgacccaccgccacaucacgggcaagcccugccccaagccccaccggcugaaccacauggggaucugcuccugcggccuguacaagcacccgggggugcccgugaaguggaagcgcugaggacuagucccuguucccagagcccacuuuuuuuucuuuuuuugaaauaaaauagccugucuuucagaucucaaaggcucuuuucagagccaccaaaaaaaaaaaaaaaaaaaaaaaaaaaaaaaaaaaaaaaaaaaaaaaaaaaaaaaaaaaaaaaaaaaaaaaaaaaaaaaaaaaaaaaaaaaaaaaaaaaaa

SEQ ID NO: 25336 - RNA, 1764 nt, Artificial Sequence
  mRNA product Design a-2 (hSL-A100) comprising derived and/or modified sequence from LASV(LASV253-NIG-2011;Clade II)__AIT17670__GPCmut3 (opt1)
aggagaguccgcucagccagguugcagaagcggcuuagcguguguccuaaucuucucucugcguguagguaggccugugccgcaaacaagcuuaccaugggccagaucaucaccuucuuccaggaggugccccacgucaucgaggaggugaugaacaucgugcugaucgcccucagccugcuggccauccucaaggggaucuacaacgucgcgaccugcggccuguucgggcugguguccuuccuccugcugugcggccgcagcugcuccacgaccuacaaggggguguacgagcuccagacccuggagcuggacauggccagccucaacaugaccaugccgcuguccugcacgaagaacaacagccaccacuacaucauggucggcaacgagaccggccuggagcucacccugaccaacacguccaucaucaaccacaaguucugcaaccugagcgacgcccacaagaagaaccucuacgaccacgcccugauguccaucaucagcaccuuccaccuguccauccccaacuucaaccaguacgaggccaugagcugcgacuucaacgggggcaagaucuccgugcaguacaaccucagccacaccuacgcgguggacgccgccaaccacugcgggaccaucgccaacggcguccugcagacguucaugcggauggcguggggcggguccuacaucgcccuggacagcggcaagggguccugggacugcaucaugaccagcuaccaguaccucaucauccagaacaccaccugggaggaccacugccaguucucccgccccagccccaucggcuaccuggggcugcucagccagcggacgcgcgacaucuacaucucccggcgccgccggggcaccuucaccuggacccucagcgacuccgagggcaacgagacgcccgggggcuacugccugacccgguggaugcugaucgaggccgagcucaagugcuucgggaacaccgccguggccaagugcaacgagaagcacgacgaggaguucugcgacaugcugcgccuguucgacuucaacaagcaggcgauccggcgccucaaggcccccgcccagaugagcauccagcugaucaacaaggccgugaacgcccugaucaacgaccagcucaucaugaagaaccaccuccgggacaucaugggcaucccguacugcaacuacuccaaguacugcuaccugaaccacaccgucacggggcgcaccagccugccccggugcugccugguguccaacggcagcuaccugaacgagacccacuucuccgacgacaucgagcagcaggcggacaacaugaucaccgagcuccugcagaaggaguacaucgaccgccagggcaagacgccccuggggcucguggaccuguucgucuucagcaccuccuucuaccugaucagcaucuuccugcaccucgugaagaucccgacccaccggcacaucaucggcaagcccugccccaagccccaccgccugaaccacauggggaucugcuccugcggccuguacaagcacccgggggugcccgucaaguggaagcggugaggacuagucccuguucccagagcccacuuuuuuuucuuuuuuugaaauaaaauagccugucuuucagaucucaaaggcucuuuucagagccaccaaaaaaaaaaaaaaaaaaaaaaaaaaaaaaaaaaaaaaaaaaaaaaaaaaaaaaaaaaaaaaaaaaaaaaaaaaaaaaaaaaaaaaaaaaaaaaaaaaaaa

SEQ ID NO: 25337 - RNA, 1764 nt, Artificial Sequence
  mRNA product Design a-2 (hSL-A100) comprising derived and/or modified sequence from LASV(LASV254-NIG-2011;Clade II)__AIT17674__GPCmut3 (opt1)
aggagaguccgcucagccagguugcagaagcggcuuagcguguguccuaaucuucucucugcguguagguaggccugugccgcaaacaagcuuaccaugggccagaucaucaccuucuuccaggaggugccccacgucaucgaggaggugaugaacaucgugcugaucgcccucagccugcuggccauccucaaggggaucuacaacgucgcgaccugcggccuguucgggcugguguccuuccuccugcugugcggccgcagcugcuccacgaccuacaaggggguguacgagcuccagacccuggagcuggacaugaccaaccucaacaugacgaugccgcugagcugcaccaagaacaacucccaccacuacaucauggucggcaacgagaccggccuggagcucacccugacgaacaccagcaucaucaaccacaaguucugcaaccuguccgacgcccacaagaagaaccucuacaaccacgcccugaugagcaucaucuccaccuuccaccugagcauccccaacuucaaccaguacgaggccauguccugcgacuucaacgggggcaagaucagcgugcaguacaaccucucccacagcuacgccguggacgcggccaaccacugcgggaccaucgccaacggcguccugcagacguucaugcggauggccuggggcggguccuacaucgcgcuggacagcggcaaggggaacugggacugcaucaugaccuccuaccaguaccucaucauccagaacaccaccugggaggaccacugccaguucagccgccccucccccaucggcuaccuggggcugcucagccagcggacgcgcgacaucuacaucagccggcgccgccggggcaccuucaccuggacccucuccgacagcgagggcaacgagacgcccgggggcuacugccugacccgguggaugcugaucgaggccgagcucaagugcuucgggaacaccgccguggccaagugcaacgagaagcacgacgaggaguucugcgacaugcugcgccuguucgacuucaacaagcaggccauccggcgccucaagacccccgcgcaggccaacauccagcugaucaacaaggccgugaacgcccugaucaacgaccagcucaucaugaagaaccaccuccgggacaucaugggcauccccuacugcaacuacuccaaguacugcuaccugaaccacacggucaccgggaagaccagccugccccgcugcugccugguguccaacggcagcuaccugaacgagacccacuucuccgacgacaucgagcagcaggccgacaacaugaucacggagcuccugcagaaggaguacauggaccggcagggcaagaccccgcuggggcucguggaccuguucgucuucagcaccuccuucuaccugaucagcaucuuccugcaccucgugaagaucccgacccaccgccacgugaucggcaagcccugccccaagccccaccggcugaaccacauggggaucugcuccugcggccuguacaagcacccggggguccccgugaaguggaagcgcugaggacuagucccuguucccagagcccacuuuuuuuucuuuuuuugaaauaaaauagccugucuuucagaucucaaaggcucuuuucagagccaccaaaaaaaaaaaaaaaaaaaaaaaaaaaaaaaaaaaaaaaaaaaaaaaaaaaaaaaaaaaaaaaaaaaaaaaaaaaaaaaaaaaaaaaaaaaaaaaaaaaaa

SEQ ID NO: 25338 - RNA, 1764 nt, Artificial Sequence
  mRNA product Design a-2 (hSL-A100) comprising derived and/or modified sequence from LASV(Nig08-A19;Clade III)__ADU56618__GPCmut3 (opt1)
aggagaguccgcucagccagguugcagaagcggcuuagcguguguccuaaucuucucucugcguguagguaggccugugccgcaaacaagcuuaccaugggccagaucgugaccuucuuccaggaggucccccacgugaucgaggaggugaugaacaucguccugaucgcccucagcauccuggccauccugaaggggcucuacaacaucgcgaccugcggccugaucgggcuggugacguuccuccugcuguccggccgcagcugcuccaugaccuacaaggggguguacgagcuccagacccuggagcugaacaugaacacccucaacaugacgaugccgcugagcugcaccaagaacaacucccaccacuacaucauggucggcaacgagaccggccuggagcucacccugacgaacaccagccugcuccaccacaaguucugcaaccuguccgacgcccacaagaagaaccuguacgaccacacccucaugagcaucaucuccaccuuccaccugagcauccccaacuucaaccaguacgaggccauguccugcgacuucaacgggggcaagaucacggugcaguacaaccugagccacuccuacgccaucgacgccgcgaaccacugcgggaccguggccaacggcguccuccagaccuucaugcggauggccuggggcgggagcuacaucgcccuggacuccggccgcgggaagugggacugcaucaugaccagcuaccaguaccugaucauccagaacacgaccugggaggaccacugccaguucucccggcccagccccaucggcuaccucgggcugcugucccagcgcacccgggacaucuacaucagccgccggcgccggggcaccuucacguggacccugagcgacuccgagggcaacgagacccccgggggcuacugccucacccgcuggaugcugaucgaggcggagcugaagugcuucgggaacacggccguggccaagugcaacgagaagcacgacgaggaguucugcgacaugcuccggcuguucgacuucaacaagcaggccauccgccggcugaaggcccccgcgcagaugagcauccagcucaucaacaaggccgugaacgcccugaucaacgaccagcugaucaugaagaaccaccuccgcgacaucaugggcauccccuacugcaacuacuccaaguacugcuaccugaaccacaccagcaccgggcggaccucccugccccgcugcugccucgucagcaacggcuccuaccugaacgagacgcacuucagcgacgacaucgagcagcaggccgacaacaugaucaccgagaugcugcagaaggaguaccucgaccggcagggcaagaccccgcuggggcugguggaccuguucguguucuccaccagcuucuaccucaucuccaucuuccugcaccuggucaagaucccgacgcaccgccacaucgugggcaagcccugccccaagccccaccggcucaaccacauggggaucugcagcugcggccuguacaagcagccgggggugcccguccgcuggaagcggugaggacuagucccuguucccagagcccacuuuuuuuucuuuuuuugaaauaaaauagccugucuuucagaucucaaaggcucuuuucagagccaccaaaaaaaaaaaaaaaaaaaaaaaaaaaaaaaaaaaaaaaaaaaaaaaaaaaaaaaaaaaaaaaaaaaaaaaaaaaaaaaaaaaaaaaaaaaaaaaaaaaaa

SEQ ID NO: 25339 - RNA, 1767 nt, Artificial Sequence
  mRNA product Design a-2 (hSL-A100) comprising derived and/or modified sequence from LASV(G1180-SLE-2010;Clade IV)__AIT17168__GPCmut3 (opt1)
aggagaguccgcucagccagguugcagaagcggcuuagcguguguccuaaucuucucucugcguguagguaggccugugccgcaaacaagcuuaccaugggccagaucgugaccuucuuccaggaggucccccacgugaucgaggaggugaugaacaucguccugaucgcccucagcauccuggccgugcugaaggggcucuacaacuucgcgaccugcggccugguggggcugcucaccuuccugcugcucugcggccgcuccugcaccgccagccgguacaagggggucuacgagcugcagacccuggagcucaacauggagacccugaacaugacgaugccgcuguccugcaccaagaacaacagccaccacuacaucauggugggcaacgagaccggccucgagcugacccugacgaacaccuccaucaucaaccacaaguucugcaaccucagcgacgcccacaagaagaaccuguacgaccacgcccugauguccaucaucagcaccuuccaccucuccauccccaacuucaaccaguacgaggccaugagcugcgacuucaacgggggcaagaucuccgugcaguacaaccugagccacuccuacgcgggggacgccgccaaccacugcggcaccgucgccaacggggugcugcagacguucaugcgcauggcguggggcggcagcuacaucgcccucgacuccgggcacggcagcugggacugcaucaugaccuccuaccaguaccugaucauccagaacaccaccugggaggaccacugccaguucagccggcccucccccaucggguaccugggccuccugagccagcgcacgcgggacaucuacaucagccgccggcgccggggcaccuucaccuggacccuguccgacagcgaggggaaggacacgccgggcggguacugccugacccgcuggaugcucaucgaggccgagcugaagugcuucggcaacaccgccguggccaagugcaacgagaagcacgacgaggaguucugcgacaugcugcggcuguucgacuucaacaagcaggcgauccagcgccugaaggcccccgcccagauguccauccagcugaucaacaaggccgucaacgcccucaucaacgaccagcugaucaugaagaaccaccuccgggacaucauggggauccccuacugcaacuacagcaaguacugcuaccucaaccacaccacgaccggcaagaccucccugcccaagugcugccuggugagcaacggcuccuaccucaacgagacccacuucagcgacgacaucgagcagcaggcggacaacaugaucacggagaugcugcagaaggaguacauggagcgccaggggaagacgccccugggccucguggaccuguucgucuucuccaccagcuucuaccugaucuccaucuuccugcaccucgugaagaucccgacccaccggcacaucgugggcaagagcugccccaagccccaccgccugaaccacauggggaucugcuccugcgggcuguacaagcagcccggcgucccggugaaguggaagcggugaggacuagucccuguucccagagcccacuuuuuuuucuuuuuuugaaauaaaauagccugucuuucagaucucaaaggcucuuuucagagccaccaaaaaaaaaaaaaaaaaaaaaaaaaaaaaaaaaaaaaaaaaaaaaaaaaaaaaaaaaaaaaaaaaaaaaaaaaaaaaaaaaaaaaaaaaaaaaaaaaaaaa

SEQ ID NO: 25340 - RNA, 1767 nt, Artificial Sequence
  mRNA product Design a-2 (hSL-A100) comprising derived and/or modified sequence from LASV(G1442-SLE-2011;Clade IV)__AIT17180__GPCmut3 (opt1)
aggagaguccgcucagccagguugcagaagcggcuuagcguguguccuaaucuucucucugcguguagguaggccugugccgcaaacaagcuuaccaugggccagaucgugaccuucuuccaggaggucccccacgugaucgaggaggugaugaacaucguccugaucgcccucagcauccuggccgugcugaaggggcucuacaacguggcgaccugcggccugaucgggcuggucacguuccuccugcugugcggccgcuccugcaccaccacccucuacaaggggguguacgagcugcagacgcuggagcucaacauggagacccugaacaugaccaugccgcugagcugcaccaagaacaacucccaccacuacauccgggugggcaacgagacgggccucgagcugacccugaccaacaccagcaucaucaaccacaaguucugcaaccucuccgacgcccacaagaagaaccuguacgaccacgcccugaugagcaucaucuccacguuccaccucagcauccccaacuucaaccaguacgaggccauguccugcgacuucaacgggggcaagaucagcguccaguacaaccugucccacagcuacgccggggacgcggccaaccacugcggcaccguggccaacggggugcugcagaccuucaugcgcauggccuggggcggcuccuacaucgcgcucgacagcgggcggggcaacugggacugcaucaugaccuccuaccaguaccugaucauccagaacacgaccugggacgaccacugccaguucagccgccccucccccaucggguaccugggccuccugagccagcggacccgcgacgucuacaucucccggcgccgccggggcaccuucacguggacccugagcgacagcgaggggaaggacaccccgggcggguacugccugacccgguggaugcucaucgaggccgagcugaagugcuucggcaacacggccguggccaagugcaacgagaagcacgacgaggaguucugcgacaugcugcgccucuucgacuucaacaagcaggccauccagcggcugaaggcgcccgcccagauguccauccagcugaucaacaaggccgugaacgcccucaucaacgaccagcugaucaugaagaaccaccuccgcgacaucauggggauccccuacugcaacuacagcaaguacugcuaccugaacaacaccgccaccggcaagaccucccugcccaagugcugccugaucagcaacggcuccuaccucaacgagacgcacuucagcgacgacaucgagcaggaggcggacaacaugaucaccgagaugcugcagaaggaguacauggagcggcaggggaagacgccccugggccucgucgaccuguucguguucuccaccagcuucuaccugaucuccaucuuccugcaccucgugaagaucccgacccaccgccacaucgucggcaagagcugccccaagccccaccggcugaaccacauggggaucugcuccugcgggcuguacaagcagcccggcgugccggugcgcuggaagcggugaggacuagucccuguucccagagcccacuuuuuuuucuuuuuuugaaauaaaauagccugucuuucagaucucaaaggcucuuuucagagccaccaaaaaaaaaaaaaaaaaaaaaaaaaaaaaaaaaaaaaaaaaaaaaaaaaaaaaaaaaaaaaaaaaaaaaaaaaaaaaaaaaaaaaaaaaaaaaaaaaaaaa

SEQ ID NO: 25341 - RNA, 1767 nt, Artificial Sequence
  mRNA product Design a-2 (hSL-A100) comprising derived and/or modified sequence from LASV(G3010-SLE-2013;Clade IV)__AIT17344__GPCmut3 (opt1)
aggagaguccgcucagccagguugcagaagcggcuuagcguguguccuaaucuucucucugcguguagguaggccugugccgcaaacaagcuuaccaugggccagaucgugaccuucuuccaggaggucccccacgugaucgaggaggugaugaacaucguccugaucgcccucagcauccuggccgugcugaaggggcucuacaacuucgcgaccugcggccugguggggcuggucacguuccuccugcugugcggccgcuccugcaccaccagccucuacaaggggguguacgagcugcagacccuggagcucaacauggagacgcugaacaugaccaugccgcuguccugcaccaagaacaacagccaccacuacaucauggugggcaacgagaccggccucgagcugacgcugaccaacaccuccaucaucaaccacaaguucugcaaccucagcgacgcccacaagaagaaccuguacaaccacgcccugauguccaucaucagcaccuuccaccucuccauccccaacuucaaccaguacgaggccaugagcugcgacuucaacgggggcaagaucuccguccaguacaaccugagccacuccuacgccggggacgcggccagccacugcggcacgguggccaacggggugcugcagaccuucaugcggauggccuggggcggcuccuacaucgcgcucgacagcggguacggcaagugggacugcaucaugaccuccuaccaguaccugaucauccagaacaccacgugggaggaccacugccaguucagccgccccucccccaucggguaccugggccuccugagccagcggacccgcgacaucuacaucagccggcgccgccggggcaccuucaccuggacgcuguccgacagcgaggggaaggacaccccgggcggguacugccugacccgguggaugcucaucgaggccgagcugaagugcuucggcaacaccgccgucgccaagugcaacgagaagcacgacgaggaguucugcgacaugcugcgccucuucgacuucaacaagcaggccauccagcggcugaagacgcccgcgcagauguccauccagcugaucaacaaggccgugaacgcccucaucaacgaccagcugaucaugaagaaccaccuccgcgacaucauggggauccccuacugcaacuacagcaaguacugcuaccugaaccacaccaccaccggcaagacgucccugcccaagugcugccuggugagcaacggcuccuaccucaacgagacccacuucagcgacgacaucgagcagcaggccgacaacaugaucaccgagaugcugcagaaggaguacauggagcggcaggggaagacgccccugggccucgucgaccuguucguguucuccaccagcuucuaccugaucuccaucuuccugcaccucgugaagaucccgacccaccgccacaucgucggcaagagcugccccaagccccaccggcugaaccacauggggaucugcuccugcgggcuguacaagcagcccggcgugccggugcgcuggaagcggugaggacuagucccuguucccagagcccacuuuuuuuucuuuuuuugaaauaaaauagccugucuuucagaucucaaaggcucuuuucagagccaccaaaaaaaaaaaaaaaaaaaaaaaaaaaaaaaaaaaaaaaaaaaaaaaaaaaaaaaaaaaaaaaaaaaaaaaaaaaaaaaaaaaaaaaaaaaaaaaaaaaaa

SEQ ID NO: 25342 - RNA, 1767 nt, Artificial Sequence
  mRNA product Design a-2 (hSL-A100) comprising derived and/or modified sequence from LASV(G502-SLE-2009;Clade IV)__AIT17126__GPCmut3 (opt1)
aggagaguccgcucagccagguugcagaagcggcuuagcguguguccuaaucuucucucugcguguagguaggccugugccgcaaacaagcuuaccaugggccagaucgugaccuucuuccaggaggucccccacgugaucgaggaggugaugaacaucguccugaucgcccucagcauccuggccgugcugaaggggcucuacaacuucgcgaccugcggccugguggggcugcucacguuccugcugcucugcggccgcuccugcaccaccgggcuguacaagggcgucuacgagcugcagacccucgagcugaacauggagacgcugaacaugaccaugccgcucagcugcaccaagaacaacucccaccacuacaucauggugggcaacgagaccgggcuggagcugacgcucaccaacaccagcaucaucaaccacaaguucugcaaccuguccgacgcccacaagaagaaccuguacgaccacgcccucaugagcaucaucuccaccuuccaccugagcauccccaacuucaaccaguacgaggccauguccugcgacuucaacggcgggaagaucagcgugcaguacaaccugucccacagcuacgccggcgacgcggccgaccacugcgggacggucgccaacggcgugcuccagaccuucaugcggauggccuggggcggguccuacaucgcgcuggacagcggccgcgggcggugggacugcaucaugaccuccuaccaguaccugaucauccagaacaccacgugggaggaccacugccaguucagccgccccucccccaucggcuaccucggccugcugagccagcggacccgcgacaucuacaucucccggcgccgccgggggaccuucaccuggacgcugagcgacagcgagggcaaggacacccccgggggcuacugccucacccgguggaugcugaucgaggccgagcugaagugcuucgggaacaccgccguggccaagugcaacgagaagcacgacgaggaguucugcgacaugcuccgccuguucgacuucaacaagcaggccauccagcggcugaaggcgcccgcccagauguccauccagcucaucaacaaggccgucaacgcccugaucaacgaccagcuggugaugaagaaccaccuccgcgacaucaugggcauccccuacugcaacuacagccgguacugcuaccugaaccacacgaccaccggccgcaccucccugcccaagugcugccucgugagcaacggguccuaccugaacgagacgcacuucagcgacgacaucgagcagcaggccgacaacaugaucaccgagaugcugcagaaggaguacauggagcggcagggcaagaccccgcucgggcuggucgaccuguucguguucuccaccagcuucuaccugaucuccaucuuccuccaccuggugaagaucccgacgcaccgccacaucgucggcaagagcugccccaagccccaccggcugaaccacauggggaucugcuccugcggccucuacaagcagcccggcgugccggugaaguggaagcgcugaggacuagucccuguucccagagcccacuuuuuuuucuuuuuuugaaauaaaauagccugucuuucagaucucaaaggcucuuuucagagccaccaaaaaaaaaaaaaaaaaaaaaaaaaaaaaaaaaaaaaaaaaaaaaaaaaaaaaaaaaaaaaaaaaaaaaaaaaaaaaaaaaaaaaaaaaaaaaaaaaaaaa

SEQ ID NO: 25343 - RNA, 1767 nt, Artificial Sequence
  mRNA product Design a-2 (hSL-A100) comprising derived and/or modified sequence from LASV(G733-SLE-2010;Clade IV)__AIT17154__GPCmut3 (opt1)
aggagaguccgcucagccagguugcagaagcggcuuagcguguguccuaaucuucucucugcguguagguaggccugugccgcaaacaagcuuaccaugggccagaucgugaccuucuuccaggaggucccccacgugaucgaggaggugaugaacaucguccugaucgcccucagcauccuggccgugcugaaggggcucuacaacuucgcgaccugcggcaucguggggcuggucuccuuccugcuccugugcggccgcagcugcacgaccucccuguacaaggggguguacgagcuccagacccuggagcugaacauggagacccucaacaugacgaugccgcugagcugcaccaagaacaacucccaccacuacaucauggugggcaacgagaccggccuggagcucacccugacgaacaccagcaucaucaaccacaaguucugcaaccuguccgacgcccacaagaagaaccucuacgaccacgcccugaugagcaucaucuccaccuuccaccugagcauccccaacuucaaccaguacgaggccauguccugcgacuucaacgggggcaagaucagcguccaguacaaccucucccacagcuacgccggggacgcggccaaccacugcggcaccaucgccaacggggugcugcagacguucaugcggauggccuggggcggcuccuacaucgcgcuggacagcgggcgcgaccggugggacugcaucaugaccuccuaccaguaccucaucauccagaacaccaccugggaggaccacugccaguucagccgccccucccccaucggcuaccuggggcugcucagccagcggacgcgcgacaucuacaucagccggcgccgccggggcaccuucaccuggacccucuccgacagcgagggcaaggacacgcccgggggcuacugccugacccgguggaugcugaucgaggccgagcucaagugcuucgggaacaccgccguggccaagugcaacgagaagcacgacgaggaguucugcgacaugcugcgccuguucgacuucaacaagcaggccauccagcggcucaaggcgcccgcccagauguccauccagcugaucaacaaggccgucaacgcccugaucaacgaccagcucaucaugaagaaccaccuccgcgacaucaugggcauccccuacugcaacuacagcaaguacugcuaccugaaccacaccacgaccgggaagaccucccugcccaagugcugccuggugagcaacggcuccuaccugaacgagacccacuucagcgacgacaucgagcagcaggccgacaacaugaucacggagaugcuccagaaggaguacauggagcggcagggcaagaccccgcuggggcugguggaccucuucgucuucuccaccagcuucuaccugaucuccaucuuccugcaccuggugaagaucccgacccaccgccacguggucggcaagagcugccccaagccccaccggcucaaccacauggggaucugcuccugcggccuguacgggcagcccggcgugccggugaaguggaagcgcugaggacuagucccuguucccagagcccacuuuuuuuucuuuuuuugaaauaaaauagccugucuuucagaucucaaaggcucuuuucagagccaccaaaaaaaaaaaaaaaaaaaaaaaaaaaaaaaaaaaaaaaaaaaaaaaaaaaaaaaaaaaaaaaaaaaaaaaaaaaaaaaaaaaaaaaaaaaaaaaaaaaaa

SEQ ID NO: 25344 - RNA, 1767 nt, Artificial Sequence
  mRNA product Design a-2 (hSL-A100) comprising derived and/or modified sequence from MOPV/LASV reassortant(IGS-1;Clade IV)__AFY05576__GPCmut3 (opt1)
aggagaguccgcucagccagguugcagaagcggcuuagcguguguccuaaucuucucucugcguguagguaggccugugccgcaaacaagcuuaccaugggccagaucgugaccuucuuccaggaggucccccacgugaucgaggaggugaugaacaucguccugaucgcccucagcgugcuggccgugcugaaggggcucuacaacuucgcgaccugcggccuggucgggcuggugacguuccuccugcugugcggccgcuccugcaccaccagccucuacaaggggguguacgagcugcagacccuggagcucaacauggagacgcugaacaugaccaugccgcuguccugcaccaagaacaacagccaccacuacaucauggucggcaacgagaccggccucgagcugacgcugaccaacaccuccaucaucaaccacaaguucugcaaccucagcgacgcccacaagaagaaccuguacgaccacgcccugauguccaucaucagcaccuuccaccucuccauccccaacuucaaccaguacgaggccaugagcugcgacuucaacgggggcaagaucuccgugcaguacaaccugagccacuccuacgccggggacgcggccaaccacugcggcacgguggccaacgggguccugcagaccuucaugcggauggccuggggcggcagcuacaucgcgcucgacuccgggcgcggcaacugggacugcaucaugaccagcuaccaguaccugaucauccagaacaccacgugggaggaccacugccaguucucccggcccagccccaucggguaccugggccuccugucccagcgcacccgggacaucuacaucagccgccggcgccggggcaccuucaccuggacgcugagcgacuccgagggggaggacaccccgggcggguacugccugacccgcuggaugcucaucgaggccgagcugaagugcuucggcaacaccgccguggccaagugcaacgagaagcacgacgaggaguucugcgacaugcugcggcuguucgacuucaacaagcaggccauccagcgccugaaggcgcccgcccagaugagcauccagcugaucaacaaggccgugaacgcccucaucaacgaccagcugaucaugaagaaccaccuccgggacaucauggggauccccuacugcaacuacuccaaguacugcuaccucaaccacacgaccaccggccgcaccagccugcccaagugcugccuggucuccaacggcagcuaccucaacgagacgcacuucuccgacgacaucgagcagcaggccgacaacaugaucaccgagaugcugcagaaggaguacauggagcggcaggggaagacgccccugggccucguggaccuguucguguucagcaccuccuucuaccugaucagcaucuuccugcaccucgucaagaucccgacccaccgccacaucguggggaaguccugccccaagccccaccggcugaaccacaugggcaucugcagcugcgggcuguacaagcagcccggcgugccggucaaguggaagcgcugaggacuagucccuguucccagagcccacuuuuuuuucuuuuuuugaaauaaaauagccugucuuucagaucucaaaggcucuuuucagagccaccaaaaaaaaaaaaaaaaaaaaaaaaaaaaaaaaaaaaaaaaaaaaaaaaaaaaaaaaaaaaaaaaaaaaaaaaaaaaaaaaaaaaaaaaaaaaaaaaaaaaa

SEQ ID NO: 25345 - RNA, 1767 nt, Artificial Sequence
  mRNA product Design a-2 (hSL-A100) comprising derived and/or modified sequence from LASV(LM765-SLE-2012;Clade IV)__AIT17814__GPCmut3 (opt1)
aggagaguccgcucagccagguugcagaagcggcuuagcguguguccuaaucuucucucugcguguagguaggccugugccgcaaacaagcuuaccaugggccagaucgugaccuucuuccaggaggucccccacgugaucgaggaggugaugaacaucguccugaucgcccucagcauccuggccgugcugaaggggcucuacaacuucgcgaccugcggccugguggggcuggucacguuccuccugcugugcggccgcuccugcaccaccagccucuacaaggggguguacgagcugcagacccuggagcucaacauggagacgcugaacaugaccaugccgcuguccugcaccaagaacaacagccaccacuacaucauggugggcaacgagaccggccucgagcugacgcugaccaacaccuccaucaucgaccacaaguucugcaaccucagcgacgcccaccggaagaaccuguacgaccacgcccugauguccaucaucagcaccuuccaccucuccauccccaacuucaaccaguacgaggccaugagcugcgacuucaacgggggcaagaucuccguccaguacaaccugagccacuccuacgccaaggacgcggccgaccacugcgggacgguggccaacggcgugcugcagaccuucaugcgcauggccuggggcgggagcuacaucgcgcucgacuccggccgggggcgcugggacugcaucaugaccagcuaccaguaccugaucauccagaacaccacgugggaggaccacugccaguucucccggcccagccccaucggcuaccuggggcuccugucccagcgcacccgggacaucuacaucagccgccggcgccggggcaccuucaccuggacgcugagcgacuccgagggcaaggacacccccgggggcuacugccugacccgcuggaugcucaucgaggccgagcugaagugcuucgggaacaccgccgucgccaagugcaacgagaagcacgacgaggaguucugcgacaugcugcggcuguucgacuucaacaagcaggccauccagcgccugaaggcgcccgcccagaugagcauccagcugaucaacaaggccgugaacgcccucaucaacgaccagcugaucaugaagaaccaccuccgggacaucaugggcauccccuacugcaacuacuccaaguacugcuaccucaaccacacgaccaccgggaagaccagccugcccaagugcugccugguguccaacggcagcuaccucaacgagacgcacuucuccgacgacaucgagcagcaggccgacaacaugaucaccgagaugcugcagaaggaguacauggagcgccagggcaagaccccgcuggggcucgucgaccuguucguguucagcaccuccuucuaccugaucagcaucuuccugcaccucgugaagaucccgacgcaccggcacaucgucggcaagcccugccccaagccccaccgccugaaccacauggggaucugcuccugcggccuguacaagcagccgggggugcccgugaaguggaagcggugaggacuagucccuguucccagagcccacuuuuuuuucuuuuuuugaaauaaaauagccugucuuucagaucucaaaggcucuuuucagagccaccaaaaaaaaaaaaaaaaaaaaaaaaaaaaaaaaaaaaaaaaaaaaaaaaaaaaaaaaaaaaaaaaaaaaaaaaaaaaaaaaaaaaaaaaaaaaaaaaaaaaa

SEQ ID NO: 25346 - RNA, 1767 nt, Artificial Sequence
  mRNA product Design a-2 (hSL-A100) comprising derived and/or modified sequence from LASV(LM776-SLE-2012;Clade IV)__AIT17824__GPCmut3 (opt1)
aggagaguccgcucagccagguugcagaagcggcuuagcguguguccuaaucuucucucugcguguagguaggccugugccgcaaacaagcuuaccaugggccagaucgugaccuucuuccaggaggucccccacgugaucgaggaggugaugaacaucguccugaucgcccucagcauccuggccgugcugaaggggcucuacaacuucgcgaccugcggccugguggggcuggucacguuccuccugcugugcggccgcuccugcaccaccagcguguacaaggggguguacgagcuccagacccuggagcugaacauggagacgcucaacaugaccaugccgcuguccugcaccaagaacaacagccaccacuacaucauggucggcaacgagaccggccuggagcucacgcugaccaacaccuccaucaucaaccacaaguucugcaaccugagcgacgcccacaagaagaaccucuacgaccacgcccugauguccaucaucagcaccuuccaccuguccauccccaacuucaaccaguacgaggccaugagcugcgacuucaacgggggcaagaucuccgugcaguacaaccucagccacuccuacgccggggacgcggccaaccacugcggcacgguggccaacgggguccugcagaccuucaugcggauggccuggggcggcagcuacaucgcgcuggacuccgggcacggcaagugggacugcaucaugaccagcuaccaguaccucaucauccagaacaccacgugggaggaccacugccaguucucccgccccagccccaucggguaccugggccugcucucccagcggacccgcgacaucuacaucagccggcgccgccggggcaccuucaccuggacgcucagcgacuccgaggggaaggacaccccgggcggguacugccugacccgguggaugcugaucgaggccgagcucaagugcuucggcaacaccgccguggccaagugcaacgagaagcacgacgaggaguucugcgacaugcugcgccuguucgacuucaacaagcaggccauccagcggcucaaggcgcccgcccagaugagcauccagcugaucaacaaggccgugaacgcccugaucaacgaccagcucaucaugaagaaccaccuccgcgacaucauggggauccccuacugcaacuacuccaaguacugcuaccugaaccacacgaccaccggcaagaccagccugcccaagugcugccuggucuccaacggcagcuaccugaacgagacgcacuucuccgacgacaucgagcagcaggccgacaacaugaucaccgagaugcuccagaaggaguacauggagcggcaggggaagacgccccugggccugguggaccucuucguguucagcaccuccuucuaccugaucagcaucuuccugcaccuggucaagaucccgacccaccgccacaucguggggaaguccugccccaagccccaccggcucaaccacaugggcaucugcagcugcgggcuguacaagcagcccggcgugccgguccgcuggaagcggugaggacuagucccuguucccagagcccacuuuuuuuucuuuuuuugaaauaaaauagccugucuuucagaucucaaaggcucuuuucagagccaccaaaaaaaaaaaaaaaaaaaaaaaaaaaaaaaaaaaaaaaaaaaaaaaaaaaaaaaaaaaaaaaaaaaaaaaaaaaaaaaaaaaaaaaaaaaaaaaaaaaaa

SEQ ID NO: 25347 - RNA, 1767 nt, Artificial Sequence
  mRNA product Design a-2 (hSL-A100) comprising derived and/or modified sequence from LASV(Mad39;Clade IV)__ANH09722__GPCmut3 (opt1)
aggagaguccgcucagccagguugcagaagcggcuuagcguguguccuaaucuucucucugcguguagguaggccugugccgcaaacaagcuuaccaugggccagaucgugaccuucuuccaggaggucccccacgugaucgaggaggugaugaacaucguccugaucgcccucagcauccuggccgugcugaaggggcucuacaacguggcgaccugcggccugaucgggcuggucacguuccuccugcugugcggccgcuccugcaccaccacccucuacaaggggguguacgagcugcaggcccuggagcucaacauggagacgcugaacaugaccaugccgcugagcugcaccaagaacaacucccaccacuacauccgggugggcaacgagaccggccucgagcugacgcugaccaacaccagccucaucaaccacaaguucugcaaccuguccgacgcccacaagaagaaccuguacgaccacgcccucaugagcaucaucuccaccuuccaccugagcauccccaacuucaaccaguacgaggccauguccugcgacuucaacgacgggaagaucagcguccaguacaaccugucccacacguacgcgggcgacaccgccaaccacugcgggaccguggccaacggcgugcuccagaccuucaugcgcauggccuggggcgggagcuacaucgcgcuggacuccggccgcgggggcugggacugcaucaugacgagcuaccaguaccugaucauccagaacaccaccugggaggaccacugccaguucucccggcccagccccaucggguaccucggccugcugucccagcggacccgcgacaucuacaucagccggcgccgccggggcacguucaccuggacccuguccgacagcgaggggaaggacaccccgggcggguacugccucacgcgguggaugcugaucgaggccgagcugaagugcuucggcaacaccgccgucgccaagugcaacgagaagcacgacgaggaguucugcgacaugcuccgccuguucgacuucaacaagcaggccauccagcggcugaaggcgcccgcccagaugagcauccagcucaucaacaaggccgugaacgcccugaucaacgaccagcugaucaugaagaaccaccuccgcgacaucauggggauccccuacugcaacuacuccaaguacugcuaccugaaccacaccgugaccggcaagacgagccugcccaagugcugccucgucuccaacggcagcuaccugaacgagacccacuucuccgacgacaucgagcagcaggccgacaacaugaucaccgagaugcugcagaaggaguacauggagcggcaggggaagacgccccucggccugguggaccuguucguguucagcaccuccuucuaccugaucagcaucuuccuccaccuggucaagaucccgacccaccgccacgugguggggaagcccugccccaagccccaccggcugaaccacaugggcaucugcuccugcggguucuacaagcagccgggcguccccgugcgcuggaagcggugaggacuagucccuguucccagagcccacuuuuuuuucuuuuuuugaaauaaaauagccugucuuucagaucucaaaggcucuuuucagagccaccaaaaaaaaaaaaaaaaaaaaaaaaaaaaaaaaaaaaaaaaaaaaaaaaaaaaaaaaaaaaaaaaaaaaaaaaaaaaaaaaaaaaaaaaaaaaaaaaaaaaa

SEQ ID NO: 25348 - RNA, 1767 nt, Artificial Sequence
  mRNA product Design a-2 (hSL-A100) comprising derived and/or modified sequence from LASV(Z0947-SLE-2011;Clade IV)__AIT17840__GPCmut3 (opt1)
aggagaguccgcucagccagguugcagaagcggcuuagcguguguccuaaucuucucucugcguguagguaggccugugccgcaaacaagcuuaccaugggccagaucgugaccuucuuccaggaggucccccacgugaucgaggaggugaugaacaucguccugaucgcccucagcauccuggccgugcugaaggggcucuacaacuucgcgaccugcggccugguggggcuggucacguuccuccugcugugcggccgcuccugcaccaucagccucuacaaggggguguacgagcugcagacccuggagcucaacauggagacccugaacaugacgaugccgcuguccugcaccaagaacaacagccaccacuacaucauggugggcaacgagaccggccucgagcugacccugacgaacaccuccaucaucaaccacaaguucugcaaccucagcgacgcccacaagaagaaccuguacgaccacgcccugauguccaucaucagcaccuuccaccucuccauccccaacuucaaccaguacgaggccaugagcugcgacuucaacgggggcaagaucuccguccaguacaaccugagccacuccuacgccggggacgcggccaaccacugcggcaccguggccaacggggugcugcagacguucaugcggauggccuggggcggcagcuacaucgcgcucgacuccgggcgcgaccggugggacugcaucaugaccagcuaccaguaccugaucauccagaacaccaccugggaggaccacugccaguucucccgccccagccccaucggcuaccuggggcuccugucccagcggacgcgcgacaucuacaucagccggcgccgccggggcaccuucaccuggacccugagcgacuccgagggcaaggacacgcccgggggcuacugccugacccgguggaugcucaucgaggccgagcugaagugcuucgggaacaccgccgucgccaagugcaacgagaagcacgacgaggaguucugcgacaugcugcgccucuucgacuucaacaagcaggccauccagcggcugaaggcgcccgcccagaugagcauccagcugaucaacaaggccgugaacgcccucaucaacgaccagcugaucaugaagaaccaccuccgcgacaucaugggcauccccuacugcaacuacuccaaguacugcuaccugaaccacaccacgaccgggaagaccagccugcccaagugcugccugguguccaacggcagcuaccucaacgagacccacuucuccgacgacaucgagcagcaggccgacaacaugaucacggagaugcugcagaaggaguacauggagcggcagggcaagaccccgcuggggcucgucgaccuguucguguucagcaccuccuucuaccugaucagcaucuuccugcaccucgugaagaucccgacccaccgccacaucgucggcaagcccugccccaagccccaccggcugaaccacauggggaucugcuccugcggccuguacaagcagccgggggugcccgugaaguggaagcgcugaggacuagucccuguucccagagcccacuuuuuuuucuuuuuuugaaauaaaauagccugucuuucagaucucaaaggcucuuuucagagccaccaaaaaaaaaaaaaaaaaaaaaaaaaaaaaaaaaaaaaaaaaaaaaaaaaaaaaaaaaaaaaaaaaaaaaaaaaaaaaaaaaaaaaaaaaaaaaaaaaaaaa

SEQ ID NO: 25349 - RNA, 1767 nt, Artificial Sequence
  mRNA product Design a-2 (hSL-A100) comprising derived and/or modified sequence from LASV(Josiah;Clade IV)__NP_694870__GPCmut3 (opt1)
aggagaguccgcucagccagguugcagaagcggcuuagcguguguccuaaucuucucucugcguguagguaggccugugccgcaaacaagcuuaccaugggccagaucgugaccuucuuccaggaggucccccacgugaucgaggaggugaugaacaucguccugaucgcccucagcgugcuggccgugcugaaggggcucuacaacuucgcgaccugcggccuggucgggcuggugacguuccuccugcugugcggccgcuccugcaccaccagccucuacaaggggguguacgagcugcagacccuggagcucaacauggagacgcugaacaugaccaugccgcuguccugcaccaagaacaacagccaccacuacaucauggucggcaacgagaccggccucgagcugacgcugaccaacaccuccaucaucaaccacaaguucugcaaccucagcgacgcccacaagaagaaccuguacgaccacgcccugauguccaucaucagcaccuuccaccucuccauccccaacuucaaccaguacgaggccaugagcugcgacuucaacgggggcaagaucuccgugcaguacaaccugagccacuccuacgccggggacgcggccaaccacugcggcacgguggccaacgggguccugcagaccuucaugcggauggccuggggcggcagcuacaucgcgcucgacuccgggcgcggcaacugggacugcaucaugaccagcuaccaguaccugaucauccagaacaccacgugggaggaccacugccaguucucccggcccagccccaucggguaccugggccuccugucccagcgcacccgggacaucuacaucagccgccggcgccggggcaccuucaccuggacgcugagcgacuccgaggggaaggacaccccgggcggguacugccucacccgcuggaugcugaucgaggccgagcugaagugcuucggcaacaccgccguggccaagugcaacgagaagcacgacgaggaguucugcgacaugcuccggcuguucgacuucaacaagcaggccauccagcgccugaaggcgcccgcccagaugagcauccagcucaucaacaaggccgugaacgcccugaucaacgaccagcugaucaugaagaaccaccuccgggacaucauggggauccccuacugcaacuacuccaaguacugcuaccugaaccacacgaccaccggccgcaccagccugcccaagugcugccucgucuccaacggcagcuaccugaacgagacgcacuucuccgacgacaucgagcagcaggccgacaacaugaucaccgagaugcugcagaaggaguacauggagcggcaggggaagaccccgcucggccugguggaccuguucguguucagcaccuccuucuaccugaucagcaucuuccuccaccuggucaagauccccacgcaccgccacaucguggggaaguccugccccaagccccaccggcugaaccacaugggcaucugcagcugcgggcucuacaagcagccgggcgugcccgucaaguggaagcgcugaggacuagucccuguucccagagcccacuuuuuuuucuuuuuuugaaauaaaauagccugucuuucagaucucaaaggcucuuuucagagccaccaaaaaaaaaaaaaaaaaaaaaaaaaaaaaaaaaaaaaaaaaaaaaaaaaaaaaaaaaaaaaaaaaaaaaaaaaaaaaaaaaaaaaaaaaaaaaaaaaaaaa

SEQ ID NO: 25350 - RNA, 1764 nt, Artificial Sequence
  mRNA product Design a-2 (hSL-A100) comprising derived and/or modified sequence from LASV(LP;Clade I)__AAF86701__GPCmut3 (opt1)
aggagaguccgcucagccagguugcagaagcggcuuagcguguguccuaaucuucucucugcguguagguaggccugugccgcaaacaagcuuaccaugggccagaucaucaccuucuuccaggaggugccccacgucaucgaggaggugaugaacaucgugcugaucgcccucagccugcuggccauccucaaggggcuguacaacaucgcgaccugcggcaucaucgggcuggucgccuuccucuuccugugcggcaaguccugcagccugacgcucaagggcggguacgagcugcagacccuggagcucaacauggagacccugaacaugaccaugccgcuguccugcacgaagaacagcucccaccacuacauccgcgugggcaacgagaccgggcucgagcugacccugaccaacacgagcaucaucaaccacaaguucugcaaccucuccgacgcccacaagaagaaccuguacgaccacgcccugaugagcaucaucuccaccuuccaccucagcauccccaacuucaaccaguacgaggccauguccugcgacuucaacggcgggaagaucagcgugcaguacaaccugucccacagcuacgcgggcgacgccgccgagcacugcgggaccgucgccaacggcgugcugcagaccuucaugcggauggcguggggcgggcgcuacaucgcccucgacuccggcaaggggaacugggacugcaucaugacgagcuaccaguaccugaucauccagaacaccaccugggaggaccacugccaguucucccggcccagccccaucggcuaccugggccuccugucccagcgcacccgggacaucuacaucagccgccggcgccgggggacguucaccuggacccugagcgacuccgagggcaacgagacccccgggggcuacugccucacgcgcuggaugcugaucgaggccgagcugaagugcuucgggaacaccgccguggccaagugcaacgagaagcacgacgaggaguucugcgacaugcuccggcuguucgacuucaacaagcaggcgauccgccggcugaaggccccggcccagaugagcauccagcucaucaacaaggccgucaacgcccugaucaacgaccagcugaucaugaagaaccaccuccgcgacaucaugggcauccccuacugcaacuacuccaaguacugcuaccugaaccacaccagcuccggccggaccagccugcccaagugcugccucaucuccaacgggagcuaccugaacgagacgcaguucuccgacgacaucgagcagcaggcggacaacaugaucaccgagaugcugcagaaggaguacaucgagcgccagggcaagaccccgcucgggcugguggacaucuucaucuucagcaccuccuucuaccugaucagcaucuuccugcaccucaucaagauccccacgcaccggcacaucgugggcaagcccugccccaagccgcaccgccugaaccacaugggggucugcuccugcggccuguacaagcaccccggcgugcccaccaaguggaagcggugaggacuagucccuguucccagagcccacuuuuuuuucuuuuuuugaaauaaaauagccugucuuucagaucucaaaggcucuuuucagagccaccaaaaaaaaaaaaaaaaaaaaaaaaaaaaaaaaaaaaaaaaaaaaaaaaaaaaaaaaaaaaaaaaaaaaaaaaaaaaaaaaaaaaaaaaaaaaaaaaaaaaa

SEQ ID NO: 25351 - RNA, 1764 nt, Artificial Sequence
  mRNA product Design a-2 (hSL-A100) comprising derived and/or modified sequence from LASV(803213;Clade II)__AAF86703__GPCmut3 (opt1)
aggagaguccgcucagccagguugcagaagcggcuuagcguguguccuaaucuucucucugcguguagguaggccugugccgcaaacaagcuuaccaugggccagaucaucaccuucuuccaggaggugccccacgucaucgaggaggugaugaacaucgugcugaucgcccucagccugcuggccauccucaaggggaucuacaacgucgcgaccugcggccuguucgggcugaucuccuuccuccugcugugcggccgcagcugcuccgugacguacaaggggguguacgagcuccagacccuggagcugaacauggccaaccucaacaugaccaugccgcugagcugcaccaagaacaacucccaccacuacaucauggucggcaacgagacgggccuggagcucacccugaccaacaccagcaucaucaaccacaaguucugcaaccuguccgacgcccacaagaagaaccucuacgaccacgcccugaugagcaucaucuccacguuccaccugagcauccccaacuucaaccaguacgaggccauguccugcgacuucaacgggggcaagaucagcgugcaguacaaccucucccacagcuucgcgguggacgccgccaaccacugcgggaccaucgccaacggcguccugcagaccuucaugcggauggcguggggcggguccuacaucgcccuggacagcggcaaggggaacugggacugcaucaugaccuccuaccaguaccucaucauccagaacacgaccugggaggaccacugccaguucagccgccccucccccaucggcuaccuggggcugcucagccagcggacccgcgacaucuacaucagccggcgccggcgcggcaccuucacguggacccuguccgacagcgagggcaacgaggcccccgggggcuacugccugacccgguggaugcucaucgaggccgagcugaagugcuucgggaacaccgccguggcgaagugcaacgagaagcacgacgaggaguucugcgacaugcugcgccucuucgacuucaacaagcaggccaucaagcggcugaagacgccggcccagauguccauccagcugaucaacaaggccgugaacgcccucaucaacgaccagcugaucaugaagaaccaccuccgcgacaucaugggcauccccuacugcaacuacagccgguacugcuaccugaaccacaccgucaccgggaagaccucccugccccgcugcugccuggugagcaacggcuccuaccucaacgagacgcacuucagcgacgacaucgagcagcaggcggacaacaugaucaccgagaugcugcagaaggaguacauggaccggcagggcaagaccccgcuggggcucguggaccuguucgucuucuccaccagcuucuaccugaucuccaucuuccugcaccucgugaagauccccacgcaccgccacaucgugggcaagcccugccccaagccgcaccggcugaaccacauggggaucugcagcugcggccuguacaagcaccccgggguccccgugaaguggaagcgcugaggacuagucccuguucccagagcccacuuuuuuuucuuuuuuugaaauaaaauagccugucuuucagaucucaaaggcucuuuucagagccaccaaaaaaaaaaaaaaaaaaaaaaaaaaaaaaaaaaaaaaaaaaaaaaaaaaaaaaaaaaaaaaaaaaaaaaaaaaaaaaaaaaaaaaaaaaaaaaaaaaaaa

SEQ ID NO: 25352 - RNA, 1764 nt, Artificial Sequence
  mRNA product Design a-2 (hSL-A100) comprising derived and/or modified sequence from LASV(GA391;Clade III)__CAA36645__GPCmut3 (opt1)
aggagaguccgcucagccagguugcagaagcggcuuagcguguguccuaaucuucucucugcguguagguaggccugugccgcaaacaagcuuaccaugggccagaucgugaccuucuuccaggaggucccccacgugaucgaggaggugaugaacaucguccugaucgcccucagcauccuggccauccugaaggggcucuacaacguggcgaccugcggccugaucgggcuggugacguuccuccugcuguccggccgcagcugcucccucaucuacaaggggaccuacgagcugcagacccuggagcucaacauggagacccugaacaugacgaugccgcugagcugcaccaagaacaacucccaccacuacauccgggucggcaacgagaccggccucgagcugacccugacgaacaccagcauccucaaccacaaguucugcaaccuguccgacgcccacaagcgcaaccuguacgaccacagccucauguccaucaucagcaccuuccaccuguccauccccaacuucaaccaguacgaggccaugagcugcgacuucaacgggggcaagaucaccgugcaguacaaccugucccacagcuucgccguggacgccgcggggcacugcggcacgcucgccaacgggguccugcagaccuucaugcggauggccuggggcggcuccuacaucgcccuggacagcgggcgcggcaacugggacugcaucaugaccuccuaccaguaccucaucauccagaacaccacgugggacgaccacugccaguucagccggcccucccccaucggguaccugggccugcucagccagcgcacccgggacaucuacaucagccgccggcgccggggcaccuucaccuggacgcuguccgacagcgaggggaacgagaccccgggcggguacugccugacccgcuggaugcucaucgaggcggagcugaagugcuucggcaacaccgccguggccaagugcaacgagaagcacgacgaggaguucugcgacaugcugcggcuguucgacuucaacaagcaggccauccgccggcugaagacgcccgcccagauguccauccagcugaucaacaaggcggugaacgcccucaucaacgaccagcugaucaugaagaaccaccuccgcgacaucauggggauccccuacugcaacuacagccgguacugcuaccucaaccacaccuccaccggcaagaccagccugccccgcugcugccugaucuccaacggcagcuaccucaacgagacgaaguucuccgacgacaucgagcagcaggccgacaacaugaucaccgagaugcugcagaaggaguacaucgaccggcaggggaagaccccgcugggccuggucgaccucuucguguucagcaccuccuucuaccugaucagcaucuuccugcaccucgugaagauccccacgcaccgccacaucgucgggaagcccugccccaagccgcaccggcugaaccacaugggcaucugcuccugcgggcuguacaagcagcccggcgugcccgugcgcuggaagcgcugaggacuagucccuguucccagagcccacuuuuuuuucuuuuuuugaaauaaaauagccugucuuucagaucucaaaggcucuuuucagagccaccaaaaaaaaaaaaaaaaaaaaaaaaaaaaaaaaaaaaaaaaaaaaaaaaaaaaaaaaaaaaaaaaaaaaaaaaaaaaaaaaaaaaaaaaaaaaaaaaaaaaa

SEQ ID NO: 25353 - RNA, 1767 nt, Artificial Sequence
  mRNA product Design a-2 (hSL-A100) comprising derived and/or modified sequence from LASV(AV;Clade V)__CCA30314__GPCmut3 (opt1)
aggagaguccgcucagccagguugcagaagcggcuuagcguguguccuaaucuucucucugcguguagguaggccugugccgcaaacaagcuuaccaugggccagaucgugaccuucuuccaggaggucccccacgugaucgaggaggugaugaacaucguccugaucgcccucagcauccuggccgugcugaaggggcucuacaacaucgcgaccugcggccugaucgggcugaucacguuccuccugcugugcggccgcuccugcagcuccaaccucuacaaggggguguacgagcugcagagccuggaccucaacauggagacccugaacaugaccaugccgcuguccugcaccaagaacaacagccaccacuacauccgggucggcaacgacacgggccucgagcugacccugaccaacaccuccauccucaaccacaaguucugcaaccugagcgacgcccacaagaaggaccuguacgaccacgcccucauguccaucaucagcacguuccaccuguccauccccaacuucaaccaguacgaggccaugagcugcgacuucaacgggggcaagaucuccgugcaguacaaccugagccacuccuacgccaucgacgcggccaaccacugcgggaccguggccaacggcauccuccagaccuucaugcgcauggccuggggcgggagcuacaucgcgcuggacuccggccgggggaacugggacugcaucaugaccagcuaccaguaccugaucauccagaacacgaccugggagaaccacugccaguucucccgccccagccccaucggcuaccucgggcugcugagccagcggacccgcgacaucuacaucucccggcgccggcgcggcaccuucacguggacccucagcgacuccgagggcaacgccacccccgggggcuacugccugacccgguggaugcugaucgaggccgagcucaagugcuucgggaacacggccgucgccaagugcaacgagaagcacgacgaggaguucugcgacaugcugcgccuguucgacuucaacaagcaggcgaucagccggcucaaguccccggcccagaugagcauccagcugaucaacaaggccgugaacgcccugaucaacgaccagcucaucaugaagaaccaccuccgcgacaucaugggcauccccuacugcaacuacuccaaguacugcuaccugaaccacaccaucaccgggaagaccagccugcccaagugcugccugguguccaacggcagcuaccugaacgagacgcacuucuccgacgacaucgagcagcaggccgacaacaugaucaccgagaugcuccagaaggaguacauggagcggcagggcaagaccccgcuggggcuggucgaccuguucguguucagcaccuccuucuaccucaucagcaucuuccugcgccuggugaagauccccacgcaccggcacaucgucggcaagcccugccccaagccgcaccgccucaaccacauggggaucugcuccugcggccuguacaagcagcccggggugcccgugcgguggaagcgcugaggacuagucccuguucccagagcccacuuuuuuuucuuuuuuugaaauaaaauagccugucuuucagaucucaaaggcucuuuucagagccaccaaaaaaaaaaaaaaaaaaaaaaaaaaaaaaaaaaaaaaaaaaaaaaaaaaaaaaaaaaaaaaaaaaaaaaaaaaaaaaaaaaaaaaaaaaaaaaaaaaaaa

SEQ ID NO: 25354 - RNA, 1764 nt, Artificial Sequence
  mRNA product Design a-2 (hSL-A100) comprising derived and/or modified sequence from LASV(Togo/2016/7082;Clade VI)__AMR44577__GPCmut3 (opt1)
aggagaguccgcucagccagguugcagaagcggcuuagcguguguccuaaucuucucucugcguguagguaggccugugccgcaaacaagcuuaccaugggccagaucaucaccuucuuccaggaggugccccacgucaucgaggaggugaugaacaucgugcugaucgcccucagccugcuggccauccucaagggggucuacaacguggcgaccugcggcaucaucgggcuggugacguuccuguuccucugcggccgcuccugcagccugaucuacaagggguccuacgagcugcagacccucgagcugaacauggagacccugaacaugaccaugccgcucagcugcacgaagaacuccagccaccacuacauccgggucggcaacgagaccggccuggagcugacccucaccaacacguccaucaucaaccacaaguucugcaaccugagcgacgcccacaagcgcaaccuguacgaccacgcccucauguccauccugagcaccuuccaccuguccauccccaacuucaaccaguacgaggccaugagcugcgacuucaacgggggcaagaucuccgugcaguacaaccucagccacgccuacgcgguggacgccgccgagcacugcgggaccgucgccaacggcgugcugcagaccuucaugcggauggcguggggcggguccuacaucgcccuggacagcggccgcgggaacugggacugcaucaugacguccuaccaguaccucaucauccagaacaccaccugggaggaccacugccaguucagccggcccucccccaucggcuaccuggggcugcucagccagcgcacccgggacaucuacaucagccgccggcgccggggcacguucaccuggacccuguccgacagcgagggcaacgagacccccgggggcuacugccugacgcgcuggaugcucaucgaggccgagcugaagugcuucgggaacaccgccguggccaagugcaacgagaagcacgacgaggaguucugcgacaugcugcggcuguucgacuucaacaagcaggcgauccagcgccugaaguccccggcccagaugagcauccagcugaucaacaaggccgucaacgcccucaucaacgaccagcugaucaugaagaaccaccuccgggacaugaugggcauccccuacugcaacuacuccaaguacugcuaccucaaccacaccagcuccgggcgcaccagccugcccaagugcugccugguguccaacggcagcuaccucaacgagacgcacuucuccgacgacaucgagcagcaggccgacaacaugaucaccgagaugcugcagaaggaguacaucgaccggcagggcaagaccccgcuggggcucguggaccuguucgucuucagcaccuccuucuaccugaucagcaucuuccugcaccucaucaagauccccacgcaccgccacaucgugggcaagcccugccccaagccgcaccggcugaaccacauggggaucugcuccugcggccuguacaagcagcccggggugcccacccgcuggaagcggugaggacuagucccuguucccagagcccacuuuuuuuucuuuuuuugaaauaaaauagccugucuuucagaucucaaaggcucuuuucagagccaccaaaaaaaaaaaaaaaaaaaaaaaaaaaaaaaaaaaaaaaaaaaaaaaaaaaaaaaaaaaaaaaaaaaaaaaaaaaaaaaaaaaaaaaaaaaaaaaaaaaaa

SEQ ID NO: 25355 - RNA, 1764 nt, Artificial Sequence
  mRNA product Design a-2 (hSL-A100) comprising derived and/or modified sequence from LASV(KAK-428;Clade n.d. (VII))__ANH09740__GPCmut3 (opt1)
aggagaguccgcucagccagguugcagaagcggcuuagcguguguccuaaucuucucucugcguguagguaggccugugccgcaaacaagcuuaccaugggccagaucgugaccuucuuccaggaggucccccacgugaucgaggaggugaugaacaucguccugaucgcccucagccugcuggccauccucaaggggcuguacaacuucgcgaccugcggcgugaucgggcugaucacguuccuccugcugugcggccgcuccugcagcgccaccuacaaggggcaguacgagcuccagacccuggagcugaacauggagucccucaacaugaccaugccgcugagcugcacgaagaacaacucccaccacuacauccgggccggcaacaacaccggccuggagcucacccugaccaacacgagcaucaucucccacaaguucugcaaccugagcgacgcccacaagaagaaccucuacgaccacacccugauguccaucaucaccaccuuccaccugagcauccccaacuucaaccaguacgaggccauguccugcgacuucaacgggggcaagaucagcauccaguacaaccucucccacagcuacgcgggggacgccgcccagcacugcggcacgguggccaacgggguccugcagaccuucaugcgcauggcguggggcggcuccuaccuggcccucgacagcgggcggcgcggcugggacugcaucaucuccagcuaccaguaccugaucauccagaacaccaccugggacgaccacugccaguucucccggcccagccccaucggguaccugggcuucgugagccagaagacgcgcgacaucuacaucucccggcgccggcgcggcaccuucaccuggacccucagcgacuccgaggggcacgacaugccgggcggguacugccugacgcgguggaugcugaucgaggccgaccucaagugcuucggcaacaccgccguggccaagugcaacgagaagcacgacgaggaguucugcgacauguggcgccuguucgacuucaacaagcaggcgauccagcggcugaaggcccccgcccagaugaacauccagcucaucaacaaggccgucaacgcccugaucaacgaccagcugaugaugaagaaccaccuccgcgacaucauggggauccccuacugcaacuacagcaaguucugcuaccugaacaacaccaccacgggccggaccucccugccccgcugcugccucaucagcaacggcuccuaccugaacgagacccacuucagcgacgacaucgagcagcaggcggacaacaugaucaccgagaugcugcagaaggaguacauggaccggcaggggaagacgccgcucggccugguggaccuguucguguucuccaccagcuucuaccucaucaccaucuuccugcaccuggucaagauccccacccaccgccacaucguggggaagcccugccccaagccgcaccggcugaaccacaugggcaucugcuccugcgggcucuacaagcagcccggcgugcccguccgcuggaagcggugaggacuagucccuguucccagagcccacuuuuuuuucuuuuuuugaaauaaaauagccugucuuucagaucucaaaggcucuuuucagagccaccaaaaaaaaaaaaaaaaaaaaaaaaaaaaaaaaaaaaaaaaaaaaaaaaaaaaaaaaaaaaaaaaaaaaaaaaaaaaaaaaaaaaaaaaaaaaaaaaaaaaa

SEQ ID NO: 25356 - RNA, 1764 nt, Artificial Sequence; identical to SEQ ID NO: 25350
  mRNA product Design a-2 (hSL-A100) comprising derived and/or modified sequence from LASV(Pinneo-NIG-1969;Clade I)__AIT17836__GPCmut3 (opt1)

SEQ ID NO: 25357 - RNA, 1764 nt, Artificial Sequence
  mRNA product Design a-2 (hSL-A100) comprising derived and/or modified sequence from LASV(ISTH0009-NIG-2011;Clade II)__AIT17404__GPCmut3 (opt1)
aggagaguccgcucagccagguugcagaagcggcuuagcguguguccuaaucuucucucugcguguagguaggccugugccgcaaacaagcuuaccaugggccagaucaucaccuucuuccaggaggugccccacgucaucgaggaggugaugaacaucgugcugaucgcccucagccugcuggccauccucaaggggaucuacaacgucgcgaccugcggccuguucgggcugguguccuuccuccugcugugcggccgcagcugcuccacgaccuacaaggggguguacgagcuccagacccuggagcuggacauggccagccucaacaugaccaugccgcuguccugcacgaagaacaacagccaccacuacaucauggucggcaacgagaccggccuggagcucacccugaccaacacguccaucaucaaccacaaguucugcaaccugagcgacgcccacaagaagaaccucuacgaccacgcccugauguccaucaucagcaccuuccaccuguccauccccaacuucaaccaguacgaggccaugagcugcgacuucaacgggggcaagaucuccgugcaguacaaccucagccacgcguacgccguggacgccgccaaccacugcgggaccaucgcgaacggcguccugcagaccuucaugcggauggccuggggcggguccuacaucgcccuggacagcggcaagggguccugggacugcaucaugacgagcuaccaguaccucaucauccagaacaccaccugggaggaccacugccaguucucccgccccagccccaucggcuaccuggggcugcucagccagcggacccgcgacaucuacaucucccggcgccggcgcggcacguucaccuggacccugagcgacuccgagggcaacgagacccccgggggcuacugccugacgcgguggaugcucaucgaggccgagcugaagugcuucgggaacaccgccguggcgaagugcaacgagaagcacgacgaggaguucugcgacaugcugcgccucuucgacuucaacaagcaggccauccggcgccugaagaccccggcccagaugagcauccagcugaucaacaaggccgugaacgcccucaucaacgaccagcugaucaugaagaaccaccuccgggacaucaugggcauccccuacugcaacuacuccaaguacugcuaccugaaccacaccgucacggggaagaccagccugccccgcugcugccugguguccaacggcagcuaccucaacgagacccacuucuccgacgacaucgagcagcaggcggacaacaugaucaccgagcugcugcagaaggaguacauggaccggcagggcaagacgccgcucgggcugguggaccuguucgucuucagcaccuccuucuaccugaucagcaucuuccuccaccugaucaagauccccacccaccgccacaucaccggcaagcccugccccaagccgcaccggcugaaccacauggggaucugcuccugcggccucuacaagcaccccggggugcccgugaaguggaagcgcugaggacuagucccuguucccagagcccacuuuuuuuucuuuuuuugaaauaaaauagccugucuuucagaucucaaaggcucuuuucagagccaccaaaaaaaaaaaaaaaaaaaaaaaaaaaaaaaaaaaaaaaaaaaaaaaaaaaaaaaaaaaaaaaaaaaaaaaaaaaaaaaaaaaaaaaaaaaaaaaaaaaaa

SEQ ID NO: 25358 - RNA, 1764 nt, Artificial Sequence
  mRNA product Design a-2 (hSL-A100) comprising derived and/or modified sequence from LASV(ISTH2010-NIG-2012;Clade II)__AIT17482__GPCmut3 (opt1)
aggagaguccgcucagccagguugcagaagcggcuuagcguguguccuaaucuucucucugcguguagguaggccugugccgcaaacaagcuuaccaugggccagaucaucaccuucuuccaggaggugccccacgucaucgaggaggugaugaacaucgugcugaucgcccucagccugcuggccauccucaaggggaucuacaacgucgcgaccugcggccuguucgggcugguguccuuccuccugcugugcggccgcagcugcuccacgaccuacaaggggguguacgagcuccagacccuggagcuggacauggccagccucaacaugaccaugccgcuguccugcacgaagaacaacagccaccacuacaucauggucggcaacgagaccggccuggagcucacccugaccaacacguccaucaucaaccacaaguucugcaaccugagcgacgcccacaagaagaaccucuacgaccacgcccugauguccaucaucagcaccuuccaccuguccauccccaacuucaaccaguacgaggccaugagcugcgacuucaacgggggcaagaucuccgugcaguacaaccucagccacgcguacgccguggacgccgccaaccacugcgggaccaucgcgaacggcguccugcagaccuucaugcggauggccuggggcggguccuacaucgcccuggacagcggcaagggguccugggacugcaucaugacgagcuaccaguaccucaucauccagaacaucaccugggaggaccacugccaguucucccgccccagccccaucggcuaccuggggcugcucagccagcggacccgcgacaucuacaucucccggcgccggcgcggcaccuucacguggacccugagcgacuccgagggcaacgagacccccgggggcuacugccugacccgguggaugcucaucgaggccgagcugaagugcuucgggaacacggccguggcgaagugcaacgagaagcacgacgaggaguucugcgacaugcugcgccucuucgacuucaacaagcaggccauccggcgccugaagaccccggcccagaugagcauccagcugaucaacaaggccgugaacgcccucaucaacgaccagcugaucaugaagaaccaccuccgggacaucaugggcauccccuacugcaacuacuccaaguacugcuaccugaaccacaccgucaccgggaagacgagccugccccgcugcugccugguguccaacggcagcuaccucaacgagacccacuucuccgacgacaucgagcagcaggcggacaacaugaucaccgagcugcugcagaaggaguacaucgaccggcagggcaagaccccgcucgggcugguggaccuguucgucuucagcacguccuucuaccugaucagcaucuuccuccaccuggugaagauccccacccaccgccacguggucggcaagcccugccccaagccgcaccggcugaaccacauggggaucugcuccugcggccucuacaagcaccccggggugcccgugaaguggaagcgcugaggacuagucccuguucccagagcccacuuuuuuuucuuuuuuugaaauaaaauagccugucuuucagaucucaaaggcucuuuucagagccaccaaaaaaaaaaaaaaaaaaaaaaaaaaaaaaaaaaaaaaaaaaaaaaaaaaaaaaaaaaaaaaaaaaaaaaaaaaaaaaaaaaaaaaaaaaaaaaaaaaaaa

SEQ ID NO: 25359 - RNA, 1764 nt, Artificial Sequence
  mRNA product Design a-2 (hSL-A100) comprising derived and/or modified sequence from LASV(Lassa virus/H.sapiens-wt/NGA/2015/ISTH_0543;Clade II)__AVO03639__GPCmut3 (opt1)
aggagaguccgcucagccagguugcagaagcggcuuagcguguguccuaaucuucucucugcguguagguaggccugugccgcaaacaagcuuaccaugggccagaucaucaccuucuuccaggaggugccccacgucaucgaggaggugaugaacaucgugcugaucgcccucagccugcuggccauccucaaggggaucuacaacgucgcgaccugcggccuguucgggcugguguccuuccuccugcugugcggccgcagcugcuccacgaccuacaaggggguguacgagcuccagacccuggagcuggacauggccaaccucaacaugaccaugccgcugagcugcacgaagaacaacucccaccacuacaucauggucggcaacgagaccggccuggagcucacccugaccaacacgagcaucaucaaccacaaguucugcaaccuguccgacgcccacaagaagaaccucuacgaccacgcccugaugagcaucaucuccaccuuccaccugagcauccccaacuucaaccaguacgaggccauguccugcgacuucaacgggggcaagaucagcgugcaguacaaccucucccacaccuacgcgguggacgccgccaaccacugcgggaccaucgccaacggcguccugcagacguucaugcggauggcguggggcgggagcuacaucgcccuggacuccggcaaggggagcugggacugcaucaugaccuccuaccaguaccucgugauccagaacaccaccugggaggaccacugccaguucagccgccccucccccaucggcuaccuggggcugcucagccagcggacgcgcgacaucuacaucagccggcgccggcgcggcaccuucaccuggacccuguccgacagcgagggcaacgagacgcccgggggcuacugccugacccgguggaugcucaucgaggccgagcugaagugcuucgggaacaccgccguggccaagugcaacgagaagcacgacgaggaguucugcgacaugcugcgccucuucgacuucaacaagcaggcgauccggcgccugaagaccccggcccagauguccauccagcugaucaacaaggccgucaacgcccucaucaacgaccagcugaucaugaagaaccaccuccgggacaucaugggcauccccuacugcaacuacagcaaguacugcuaccugaaccacacggugaccgggaagaccucccugccccgcugcugccuggugagcaacggcuccuaccucaacgagacccacuucagcgacgacaucgagcagcaggccgacaacaugaucacggagcugcugcagaaggaguacaucgaccggcagggcaagaccccgcucgggcuggucgaccuguucguguucuccaccagcuucuaccugaucuccaucuuccuccaccuggugaagauccccacccaccgccacaucacgggcaagcccugccccaagccgcaccggcugaaccacauggggaucugcagcugcggccucuacaagcaccccgggguccccgugaaguggaagcgcugaggacuagucccuguucccagagcccacuuuuuuuucuuuuuuugaaauaaaauagccugucuuucagaucucaaaggcucuuuucagagccaccaaaaaaaaaaaaaaaaaaaaaaaaaaaaaaaaaaaaaaaaaaaaaaaaaaaaaaaaaaaaaaaaaaaaaaaaaaaaaaaaaaaaaaaaaaaaaaaaaaaaa

SEQ ID NO: 25360 - RNA, 1764 nt, Artificial Sequence
  mRNA product Design a-2 (hSL-A100) comprising derived and/or modified sequence from LASV(Lassa virus/H.sapiens-wt/NGA/2016/ISTH_0009;Clade II)__AVO03571__GPCmut3 (opt1)
aggagaguccgcucagccagguugcagaagcggcuuagcguguguccuaaucuucucucugcguguagguaggccugugccgcaaacaagcuuaccaugggccagaucaucaccuucuuccaggaggugccccacgucaucgaggaggugaugaacaucgugcugaucgcccucagccugcuggccauccucaaggggaucuacaacgucgcgaccugcggccugcuggggcucguguccuuccugcugcucugcggccgcagcugcuccacgaccuacaaggggguguacgagcugcagacccuggagcucgacauggccagccugaacaugaccaugccgcuguccugcacgaagaacaacagccaccacuacaucauggucggcaacgagaccggccucgagcugacccugaccaacacguccaucaucaaccacaaguucugcaaccucagcgacgcccacaagaagaaccuguacgaccacgcccugauguccaucaucagcaccuuccaccucuccauccccaacuucaaccaguacgaggccaugagcugcgacuucaacgggggccggaucuccgugcaguacaaccugagccacuccuacgcgguggacgccgccaaccacugcgggaccaucgccaacggcguccugcagaccuucaugcgcauggcguggggcgggagcuacaucgcccucgacuccggcaaggggagcugggacugcaucaugacguccuaccaguaccugaucauccagaacaccaccugggaggaccacugccaguucagccggcccagccccaucggcuaccuggggcuccugucccagcgcacccgggacaucuacaucagccgccggcgccggggcacguucaccuggacccuguccgacagcgagggcaacgagacccccgggggcuacugccucacgcgcuggaugcugaucgaggccgagcugaagugcuucgggaacaccgccguggccaagugcaacgagaagcacgacgaggaguucugcgacaugcuccggcuguucgacuucaacaagcaggcgauccgccggcugaagaccccggcccagauguccauccagcucaucaacaaggccgugaacgcccugaucaacgaccagcugaucaugaagaaccaccuccgcgacaucaugggcauccccuacugcaacuacagcaaguacugcuaccugaaccacaccgucacggggaagaccucccugccccggugcugccucgugagcaacggcuccuaccugaacgagacccacuucagcgacgacaucgagcagcaggccgacaacaugaucaccgagcugcuccagaaggaguacaucgaccgccagggcaagacgccgcuggggcugguggaccuguucgucuucuccaccagcuucuaccucaucuccaucuuccugcaccuggugaagauccccacccaccggcacaucaccggcaagcccugccccaagccgcaccgccucaaccacauggggaucugcagcugcggccuguacaaccaccccggggugcccgucaaguggaagcggugaggacuagucccuguucccagagcccacuuuuuuuucuuuuuuugaaauaaaauagccugucuuucagaucucaaaggcucuuuucagagccaccaaaaaaaaaaaaaaaaaaaaaaaaaaaaaaaaaaaaaaaaaaaaaaaaaaaaaaaaaaaaaaaaaaaaaaaaaaaaaaaaaaaaaaaaaaaaaaaaaaaaa

SEQ ID NO: 25361 - RNA, 1764 nt, Artificial Sequence
  mRNA product Design a-2 (hSL-A100) comprising derived and/or modified sequence from LASV(Lassa virus/H.sapiens-wt/NGA/2016/ISTH_0017;Clade II)__AVO03567__GPCmut3 (opt1)
aggagaguccgcucagccagguugcagaagcggcuuagcguguguccuaaucuucucucugcguguagguaggccugugccgcaaacaagcuuaccaugggccagaucaucaccuucuuccaggaggugccccacgucaucgaggaggugaugaacaucgugcugaucgcccucagccugcuggccauccucaaggggaucuacaacgucgcgaccugcggccuguucgggcugguguccuuccuccugcugugcggccgcagcugcuccacgaccuacaaggggguguacgagcuccagacccuggagcuggacauggccagccucaacaugaccaugccgcuguccugcacgaagaacaacagccaccacuacaucauggucggcaacgagaccggccuggagcucacccugaccaacacguccaucaucaaccacaaguucugcaaccugagcgacgcccacaagaagaaccucuacgaccacgcccugauguccaucaucagcaccuuccaccuguccauccccaacuucaaccaguacgaggccaugagcugcgacuucaacgggggcaagaucuccgugcaguacaaccucagccacaccuacgcgaucgacgccgccaaccacugcgggaccaucgccaacggcgugcugcagacguucaugcggauggcguggggcggguccuacaucgcccuggacagcggcaagggguccugggacugcaucaugaccagcuaccaguaccucaucauccagaacaccaccugggaggaccacugccaguucucccgccccagccccaucggcuaccuggggcugcucagccagcggacgcgcgacaucuacaucucccggcgccggcgcggcaccuucaccuggacccugagcgacuccgagggcaacgagacgcccgggggcuacugccugacccgguggaugcucaucgaggccgagcugaagugcuucgggaacaccgccgucgccaagugcaacgagaagcacgacgaggaguucugcgacaugcugcgccucuucgacuucaacaagcaggcgauccggcgccugaagaccccggcccagaugagcauccagcugaucaacaaggccgugaacgcccucaucaacgaccagcugaucaugaagaaccaccuccgggacaucaugggcauccccuacugcaacuacuccaaguacugcuaccugaaccacacggugaccgggaagaccagccugccccgcugcugccuggucuccaacggcagcuaccucaacgagacccacuucuccgacgacaucgagcagcaggccgacaacaugaucacggagcugcugcagaaggaguacauggaccggcagggcaagaccccgcucgggcugguggaccuguucguguucagcaccuccuucuaccugaucagcaucuuccuccaccugguccgcauccccacccaccggcacgugaucggcaagcccugccccaagccgcaccgccugaaccacauggggaucugcuccugcggccucuacaagcaccccggggugcccgucaaguggaagcggugaggacuagucccuguucccagagcccacuuuuuuuucuuuuuuugaaauaaaauagccugucuuucagaucucaaaggcucuuuucagagccaccaaaaaaaaaaaaaaaaaaaaaaaaaaaaaaaaaaaaaaaaaaaaaaaaaaaaaaaaaaaaaaaaaaaaaaaaaaaaaaaaaaaaaaaaaaaaaaaaaaaaa

SEQ ID NO: 25362 - RNA, 1764 nt, Artificial Sequence
  mRNA product Design a-2 (hSL-A100) comprising derived and/or modified sequence from LASV(Lassa virus/H.sapiens-wt/NGA/2018/ISTH_0959;Clade II)__AVV65099__GPCmut3 (opt1)
aggagaguccgcucagccagguugcagaagcggcuuagcguguguccuaaucuucucucugcguguagguaggccugugccgcaaacaagcuuaccaugggccagaucaucaccuucuuccaggaggugccccacgucaucgaggaggugaugaacaucgugcugaucgcccucagccugcuggccauccucaaggggaucuacaacgucgugaccugcggccuguucgggcugguguccuuccuccugcugugcggccgcagcugcuccacgaccuacaagggggucuacgagcuccagacccuggagcuggacauggcgagccucaacaugaccaugccgcuguccugcacgaagaacaacagccaccacuacaucauggugggcaacgagaccggccuggagcucacccugaccaacacguccaucaucaaccacaaguucugcaaccugagcgacgcccacaagaagaaccucuacgaccacgcccugauguccaucaucagcaccuuccaccuguccauccccaacuucaaccaguacgaggccaugagcugcgacuucaacgggggcaagaucuccgugcaguacaaccucagccacgccuacgcgaucgacgccgccaaccacugcgggaccaucgccaacggcguccugcagaccuucaugcggauggcguggggcggguccuacaucgcccuggacagcggcaagggguccugggacugcaucaugacgagcuaccaguaccucaucauccagaacaccaccugggaggaccacugccaguucucccgccccagccccaucggcuaccuggggcugcucagccagcggacccgcgacaucuacaucucccggcgccggcgcggcacguucaccuggacccugagcgacuccgagggcaacgagacccccgggggcuacugccugacgcgguggaugcucaucgaggccgagcugaagugcuucgggaacaccgccguggccaagugcaacgagaagcacgacgaggaguucugcgacaugcugcgccucuucgacuucaacaagcaggcgauccggcgccugaagaccccggcccagaugagcauccagcugaucaacaaggccgugaacgcccucaucaacgaccagcugaucaugaagaaccaccuccgggacaucaugggcauccccuacugcaacuacuccaaguacugcuaccugaaccacaccgucacggggaagaccagccugccccgcugcugccugguguccaacggcagcuaccucaacgagacccacuucuccgacgacaucgagcagcaggccgacaacaugaucaccgagcugcugcagaaggaguacaucgaccggcagggcaagacgccgcucgggcugguggaccuguucgucuucagcaccuccuucuaccugaucagcaucuuccuccaccuggugaagauccccacccaccgccacgugaucggcaagcccugccccaagccgcaccggcugaaccacauggggaucugcuccugcggccucuacaagcaccccgggguccccgugaaguggaagcgcugaggacuagucccuguucccagagcccacuuuuuuuucuuuuuuugaaauaaaauagccugucuuucagaucucaaaggcucuuuucagagccaccaaaaaaaaaaaaaaaaaaaaaaaaaaaaaaaaaaaaaaaaaaaaaaaaaaaaaaaaaaaaaaaaaaaaaaaaaaaaaaaaaaaaaaaaaaaaaaaaaaaaa

SEQ ID NO: 25363 - RNA, 1764 nt, Artificial Sequence
  mRNA product Design a-2 (hSL-A100) comprising derived and/or modified sequence from LASV(LASV003-NIG-2008;Clade II)__AIT17580__GPCmut3 (opt1)
aggagaguccgcucagccagguugcagaagcggcuuagcguguguccuaaucuucucucugcguguagguaggccugugccgcaaacaagcuuaccaugggccagaucaucaccuucuuccaggaggugccccacgucaucgaggaggugaugaacaucgugcugaucgcccucagccugcuggccauccucaaggggaucuacaacgucgcgaccugcggccuguucgggcugguguccuuccuccugcugugcggccgcagcugcuccacgaccuacaaggggguguacgagcuccagacccuggagcuggacauggccagccucaacaugaccaugccgcuguccugcacgaagaacaacagccaccacuacaucauggucggcaacgagaccggccuggagcucacccugaccaacacguccaucaucaaccacaaguucugcaaccugagcgacgcccacaagaagaaccucuacgaccacgcccugauguccaucaucagcaccuuccaccuguccauccccaacuucaaccaguacgaggccaugagcugcgacuucaacgggggcaagaucuccgugcaguacaaccucagccacaccuacgcgguggacgccgccaaccacugcgggaccaucgccaacggcguccugcagacguucaugcggauggcguggggcggguccuacaucgcccuggacagcggcaagggguccugggacugcaucaugaccagcuaccaguaccucaucauccagaacaccaccugggaggaccacugccaguucucccgccccagccccaucggcuaccuggggcugcucagccagcggacgcgcgacaucuacaucucccggcgccggcgcggcaccuucaccuggacccugagcgacuccgagagcaacgagacgccgggcggguacugccugacccgguggaugcucaucgaggccgagcugaagugcuucggcaacaccgccguggccaagugcaacgagaagcacgacgaggaguucugcgacaugcugcgccucuucgacuucaacaagcaggcgauccggcgccugaaggcccccgcccagauguccauccagcugaucaacaaggccgugaacgcccucaucaacgaccagcugaucaugaagaaccaccuccgggacaucauggggauccccuacugcaacuacagcaaguacugcuaccugaaccacaccgucacgggccgcaccucccugccccggugcugccuggugagcaacggguccuaccucaacgagacccacuucagcgacgacaucgagcagcaggcggacaacaugaucaccgagcugcugcagaaggaguacauggaccgccagggcaagacgccgcucggccugguggaccuguucgucuucuccaccagcuucuaccugaucuccaucuuccuccaccuggugaagauccccacccaccggcacgugaucgggaagcccugccccaagccgcaccgccugaaccacaugggcaucugcagcugcgggcucuacaagcaccccggcguccccgugaaguggaagcggugaggacuagucccuguucccagagcccacuuuuuuuucuuuuuuugaaauaaaauagccugucuuucagaucucaaaggcucuuuucagagccaccaaaaaaaaaaaaaaaaaaaaaaaaaaaaaaaaaaaaaaaaaaaaaaaaaaaaaaaaaaaaaaaaaaaaaaaaaaaaaaaaaaaaaaaaaaaaaaaaaaaaa

SEQ ID NO: 25364 - RNA, 1764 nt, Artificial Sequence
  mRNA product Design a-2 (hSL-A100) comprising derived and/or modified sequence from LASV(LASV035-NIG-2009;Clade II)__AIT17588__GPCmut3 (opt1)
aggagaguccgcucagccagguugcagaagcggcuuagcguguguccuaaucuucucucugcguguagguaggccugugccgcaaacaagcuuaccaugggccagaucaucaccuucuuccaggaggugccccacgucaucgaggaggugaugaacaucgugcugaucgcccucagccugcuggccauccucaaggggaucuacaacgucgcgaccugcggccuguucgggcugguguccuuccuccugcugugcggccgcagcugcuccacgaccuacaaggggguguacgagcuccagacccuggagcuggacauggccagccucaacaugaccaugccgcuguccugcacgaagaacaacagccaccacuacaucauggucggcaacgagaccggccuggagcucacccugaccaacacguccaucaucaaccacaaguucugcaaccugagcgacgcccacaagaagaaccucuacgaccacgcccugauguccaucaucagcaccuuccaccuguccauccccaacuucaaccaguacgaggccaugagcugcgacuucaacgggggcaagaucuccgugcaguacaaccucagccacgcguacgccguggacgccgccaaccacugcgggaccaucgcgaacggcguccugcagaccuucaugcggauggccuggggcggguccuacaucgcccuggacagcggcaagggguccugggacugcaucaugacgagcuaccaguaccucaucauccagaacaccaccugggaggaccacugccaguucucccgccccagccccaucggcuaccuggggcugcucagccagcggacccgcgacaucuacaucucccggcgccggcgcggcacguucaccuggacccugagcgacuccgagggcaacgagacccccgggggcuacugccugacgcgguggaugcucaucgaggccgagcugaagugcuucgggaacaccgccguggcgaagugcaacgagaagcacgacgaggaguucugcgacaugcugcgccucuucgacuucaacaagcaggccauccggcgccugaaggccccggcccagaugagcauccagcugaucaacaaggccgugaacgcgcucaucaacgaccagcugaucaugaagaaccaccuccgggacaucaugggcauccccuacugcaacuacuccaaguacugcuaccugaaccacaccgucaccgggaagacgagccugccccgcugcugccugguguccaacggcagcuaccucaacgagacccacuucuccgacgacaucgagcagcaggccgacaacaugaucaccgagcugcugcagaaggaguacaucgaccggcagggcaagaccccgcucgggcugguggaccuguucgucuucagcacguccuucuaccugaucagcaucuuccuccaccuggugaagauccccacccaccgccacgugaucggcaagcccugccccaagccgcaccggcugaaccacauggggaucugcuccugcggccucuacaagcaccccgggguccccgugaaguggaagcgcugaggacuagucccuguucccagagcccacuuuuuuuucuuuuuuugaaauaaaauagccugucuuucagaucucaaaggcucuuuucagagccaccaaaaaaaaaaaaaaaaaaaaaaaaaaaaaaaaaaaaaaaaaaaaaaaaaaaaaaaaaaaaaaaaaaaaaaaaaaaaaaaaaaaaaaaaaaaaaaaaaaaaa

SEQ ID NO: 25365 - RNA, 1764 nt, Artificial Sequence
  mRNA product Design a-2 (hSL-A100) comprising derived and/or modified sequence from LASV(LASV1000-NIG-2009;Clade II)__AIT17782__GPCmut3 (opt1)
aggagaguccgcucagccagguugcagaagcggcuuagcguguguccuaaucuucucucugcguguagguaggccugugccgcaaacaagcuuaccaugggccagaucaucaccuucuuccaggaggugccccacgucaucgaggaggugaugaacaucgugcugaucgcccucagccugcuggccauccucaaggggaucuacaacgucgcgaccugcggccuguucgggcugguguccuuccuccugcugugcggccgcagcugcuccacgaccuacaaggggguguacgagcuccagacccuggagcuggacauggccagccucaacaugaccaugccgcuguccugcacgaagaacaacagccaccacuacaucauggucggcaacgagaccggccuggagcucacccugaccaacacguccaucaucaaccacaaguucugcaaccugagcgacgcccacaagaagaaccucuacgaccacgcccugauguccaucaucagcaccuuccaccuguccauccccaacuucaaccaguacgaggccaugagcugcgacuucaacgggggcaagaucuccgugcaguacaaccucagccacaccuacgcgguggacgccgccaaccacugcgggaccaucgccaacggcguccugcagacguucaugcggauggcguggggcggguccuacaucgcccuggacagcggcaagggguccugggacugcaucaugaccagcuaccaguaccucaucauccagaacaccaccugggaggaccacugccaguucucccgccccagccccaucggcuaccuggggcugcucagccagcggacgcgcgacaucuacaucucccggcgccggcgcggcaccuucaccuggacccugagcgacuccgagggcaacgagacgcccgggggcuacugccugacccgguggaugcucaucgaggccgagcugaagugcuucgggaacaccgccguggccaagugcaacgagaagcacgacgaggaguucugcgacaugcugcgccucuucgacuucaacaagcaggcgaucaagcggcugaagaccccggcccagaugagcauccagcugaucaacaaggccgugaacgcccucaucaacgaccagcugaucaugaagaaccaccuccgcgacaucaugggcauccccuacugcaacuacuccaaguacugcuaccugaaccacacggucaccgggaagaccagccugccccggugcugccugguguccaacggcagcuaccucaacgagacccacuucuccgacgacaucgagcagcaggccgacaacaugaucacggagcugcugcagaaggaguacaucgaccgccagggcaagaccccgcucgggcugguggaccuguucgucuucagcaccuccuucuaccugaucagcaucuuccuccaccuggugaagauccccacccaccggcacguggucggcaagcccugccccaagccgcaccgccugaaccacauggggaucugcuccugcggccucuacaagcaccccggggugcccgugaaguggaagcggugaggacuagucccuguucccagagcccacuuuuuuuucuuuuuuugaaauaaaauagccugucuuucagaucucaaaggcucuuuucagagccaccaaaaaaaaaaaaaaaaaaaaaaaaaaaaaaaaaaaaaaaaaaaaaaaaaaaaaaaaaaaaaaaaaaaaaaaaaaaaaaaaaaaaaaaaaaaaaaaaaaaaa

SEQ ID NO: 25366 - RNA, 1764 nt, Artificial Sequence
  mRNA product Design a-2 (hSL-A100) comprising derived and/or modified sequence from LASV(LASV221-NIG-2010;Clade II)__AIT17624__GPCmut3 (opt1)
aggagaguccgcucagccagguugcagaagcggcuuagcguguguccuaaucuucucucugcguguagguaggccugugccgcaaacaagcuuaccaugggccagaucaucaccuucuuccaggaggugccccacgucaucgaggaggugaugaacaucgugcugaucgcccucagccugcuggccauccucaaggggaucuacaacgucgcgaccugcggccuguucgggcugguguccuuccuccugcugugcggccgcagcugcuccacgaccuacaaggggguguacgagcuccagacccuggagcuggacauggccagccucaacaugaccaugccgcuguccugcacgaagaacaacagccaccacuacaucauggucggcaacgagaccggccuggagcucacccugaccaacacguccaucaucaaccacaaguucugcaaccugagcgacgcccacaagaagaaccucuacgaccacgcccugauguccaucaucagcaccuuccaccuguccauccccaacuucaaccaguacgaggccaugagcugcgacuucaacgggggcaagaucuccgugcaguacaaccucagccacaccuacgcgaucgacgccgccaaccacugcgggaccaucgccaacggcgugcugcagacguucaugcggauggcguggggcggguccuacaucgcccuggacagcggcaagggguccugggacugcaucaugaccagcuaccaguaccucaucauccagaacaccaccugggaggaccacugccaguucucccgccccagccccaucggcuaccuggggcugcucagccagcggacgcgcgacaucuacaucucccggcgccggcgcggcaccuucaccuggacccugagcgacuccgagggcaacgagacgcccgggggcuacugccugacccgguggaugcucaucgaggccgagcugaagugcuucgggaacaccgccgucgccaagugcaacgagaagcacgacgaggaguucugcgacaugcugcgccucuucgacuucaacaagcaggcgauccggcgccugaagaccccggcccagaugagcauccagcugaucaacaaggccgugaacgcccucaucaacgaccagcugaucaugaagaaccaccuccgggacaucaugggcauccccuacugcaacuacuccaaguacugcuaccugaaccacacggugaccgggaagaccagccugccccgcugcugccuggucuccaacggcagcuaccucaacgagacccacuucuccgacgacaucgagcagcaggccgacaacaugaucacggagaugcugcagaaggaguacauggaccggcagggcaagaccccgcuggggcucguggaccuguucguguucagcaccuccuucuaccugaucagcaucuuccugcaccucgucaagauccccacccaccgccacgugaucggcaagcccugccccaagccgcaccggcugaaccacauggggaucugcuccugcggccuguacaagcaccccggggugcccgucaaguggaagcgcugaggacuagucccuguucccagagcccacuuuuuuuucuuuuuuugaaauaaaauagccugucuuucagaucucaaaggcucuuuucagagccaccaaaaaaaaaaaaaaaaaaaaaaaaaaaaaaaaaaaaaaaaaaaaaaaaaaaaaaaaaaaaaaaaaaaaaaaaaaaaaaaaaaaaaaaaaaaaaaaaaaaaa

SEQ ID NO: 25367 - RNA, 1764 nt, Artificial Sequence
  mRNA product Design a-2 (hSL-A100) comprising derived and/or modified sequence from LASV(LASV237-NIG-2010;Clade II)__AIT17638__GPCmut3 (opt1)
aggagaguccgcucagccagguugcagaagcggcuuagcguguguccuaaucuucucucugcguguagguaggccugugccgcaaacaagcuuaccaugggccagaucaucaccuucuuccaggaggugccccacgucaucgaggaggugaugaacaucgugcugaucgcccucagccugcuggccauccucaaggggaucuacaacgucgcgaccugcggccuguucgggcugguguccuuccuccugcugugcggccgcagcugcuccacgaccuacaaggggguguacgagcuccagacccuggagcuggacauggccagccucaacaugaccaugccgcuguccugcacgaagaacaacagccaccacuacaucauggucggcaacgagaccggccuggagcucacccugaccaacacguccaucaucaaccacaaguucugcaaccugagcgacgcccacaagaaggaccucuacgaccacgcccugauguccaucaucagcaccuuccaccuguccauccccaacuucaaccaguacgaggccaugagcugcgacuucaacgggggcaagaucuccgugcaguacaaccucagccacaccuacgcgguggacgccgccaaccacugcgggaccaucgccaacggcguccugcagacguucaugcggauggcguggggcggguccuacaucgcccuggacagcggcaagggguccugggacugcaucaugaccagcuaccaguaccucaucauccagaacaccaccugggaggaccacugccaguucucccgccccagccccaucggcuaccuggggcugcucagccagcggacgcgcgacaucuacaucucccggcgccggcgcggcaccuucaccuggacccugagcgacuccgagggcaacgagacgcccgggggcuacugccugacccgguggaugcucaucgaggccgagcugaagugcuucgggaacaccgccguggccaagugcaacgagaagcacgacgaggaguucugcgacaugcugcgccucuucgacuucaacaagcaggcgauccggcgccugaagaccccggcccagaugagcauccagcugaucaacaaggccgugaacgcccucaucaacgaccagcugaucaugaagaaccaccuccgggacaucaugggcauccccuacugcaacuacuccaaguacugcuaccugaaccacacggucaccgggaagaccagccugccccgcugcugccugguguccaacggcagcuaccucaacgagacccacuucuccgacgacaucgagcagcaggccgacaacaugaucacggagcugcugcagaaggaguacauggaccggcagggcaagaccccgcucgggcugguggaccuguucgucuucagcaccuccuucuaccugaucagcaucuuccuccaccugaucaagauccccacccaccgccacaucacgggcaagcccugccccaagccgcaccggcugaaccacauggggaucugcuccugcggccucuacaagcaccccggggugcccgugaaguggaagcgcugaggacuagucccuguucccagagcccacuuuuuuuucuuuuuuugaaauaaaauagccugucuuucagaucucaaaggcucuuuucagagccaccaaaaaaaaaaaaaaaaaaaaaaaaaaaaaaaaaaaaaaaaaaaaaaaaaaaaaaaaaaaaaaaaaaaaaaaaaaaaaaaaaaaaaaaaaaaaaaaaaaaaa

SEQ ID NO: 25368 - RNA, 1764 nt, Artificial Sequence
  mRNA product Design a-2 (hSL-A100) comprising derived and/or modified sequence from LASV(LASV253-NIG-2011;Clade II)__AIT17670__GPCmut3 (opt1)
aggagaguccgcucagccagguugcagaagcggcuuagcguguguccuaaucuucucucugcguguagguaggccugugccgcaaacaagcuuaccaugggccagaucaucaccuucuuccaggaggugccccacgucaucgaggaggugaugaacaucgugcugaucgcccucagccugcuggccauccucaaggggaucuacaacgucgcgaccugcggccuguucgggcugguguccuuccuccugcugugcggccgcagcugcuccacgaccuacaaggggguguacgagcuccagacccuggagcuggacauggccagccucaacaugaccaugccgcuguccugcacgaagaacaacagccaccacuacaucauggucggcaacgagaccggccuggagcucacccugaccaacacguccaucaucaaccacaaguucugcaaccugagcgacgcccacaagaagaaccucuacgaccacgcccugauguccaucaucagcaccuuccaccuguccauccccaacuucaaccaguacgaggccaugagcugcgacuucaacgggggcaagaucuccgugcaguacaaccucagccacaccuacgcgguggacgccgccaaccacugcgggaccaucgccaacggcguccugcagacguucaugcggauggcguggggcggguccuacaucgcccuggacagcggcaagggguccugggacugcaucaugaccagcuaccaguaccucaucauccagaacaccaccugggaggaccacugccaguucucccgccccagccccaucggcuaccuggggcugcucagccagcggacgcgcgacaucuacaucucccggcgccggcgcggcaccuucaccuggacccugagcgacuccgagggcaacgagacgcccgggggcuacugccugacccgguggaugcucaucgaggccgagcugaagugcuucgggaacaccgccguggccaagugcaacgagaagcacgacgaggaguucugcgacaugcugcgccucuucgacuucaacaagcaggcgauccggcgccugaaggccccggcccagaugagcauccagcugaucaacaaggccgugaacgcccucaucaacgaccagcugaucaugaagaaccaccuccgggacaucaugggcauccccuacugcaacuacuccaaguacugcuaccugaaccacaccgucacggggcgcaccagccugccccggugcugccugguguccaacggcagcuaccucaacgagacccacuucuccgacgacaucgagcagcaggcggacaacaugaucaccgagcugcugcagaaggaguacaucgaccgccagggcaagacgccgcucgggcugguggaccuguucgucuucagcaccuccuucuaccugaucagcaucuuccuccaccuggugaagauccccacccaccggcacaucaucggcaagcccugccccaagccgcaccgccugaaccacauggggaucugcuccugcggccucuacaagcaccccggggugcccgucaaguggaagcggugaggacuagucccuguucccagagcccacuuuuuuuucuuuuuuugaaauaaaauagccugucuuucagaucucaaaggcucuuuucagagccaccaaaaaaaaaaaaaaaaaaaaaaaaaaaaaaaaaaaaaaaaaaaaaaaaaaaaaaaaaaaaaaaaaaaaaaaaaaaaaaaaaaaaaaaaaaaaaaaaaaaaa

SEQ ID NO: 25369 - RNA, 1764 nt, Artificial Sequence
  mRNA product Design a-2 (hSL-A100) comprising derived and/or modified sequence from LASV(LASV254-NIG-2011;Clade II)__AIT17674__GPCmut3 (opt1)
aggagaguccgcucagccagguugcagaagcggcuuagcguguguccuaaucuucucucugcguguagguaggccugugccgcaaacaagcuuaccaugggccagaucaucaccuucuuccaggaggugccccacgucaucgaggaggugaugaacaucgugcugaucgcccucagccugcuggccauccucaaggggaucuacaacgucgcgaccugcggccuguucgggcugguguccuuccuccugcugugcggccgcagcugcuccacgaccuacaaggggguguacgagcuccagacccuggagcuggacaugaccaaccucaacaugacgaugccgcugagcugcaccaagaacaacucccaccacuacaucauggucggcaacgagaccggccuggagcucacccugacgaacaccagcaucaucaaccacaaguucugcaaccuguccgacgcccacaagaagaaccucuacaaccacgcccugaugagcaucaucuccaccuuccaccugagcauccccaacuucaaccaguacgaggccauguccugcgacuucaacgggggcaagaucagcgugcaguacaaccucucccacagcuacgccguggacgcggccaaccacugcgggaccaucgccaacggcguccugcagacguucaugcggauggccuggggcggguccuacaucgcgcuggacagcggcaaggggaacugggacugcaucaugaccuccuaccaguaccucaucauccagaacaccaccugggaggaccacugccaguucagccgccccucccccaucggcuaccuggggcugcucagccagcggacgcgcgacaucuacaucagccggcgccggcgcggcaccuucaccuggacccuguccgacagcgagggcaacgagacgcccgggggcuacugccugacccgguggaugcucaucgaggccgagcugaagugcuucgggaacaccgccguggccaagugcaacgagaagcacgacgaggaguucugcgacaugcugcgccucuucgacuucaacaagcaggccauccggcgccugaagaccccggcgcaggccaacauccagcugaucaacaaggccgugaacgcccucaucaacgaccagcugaucaugaagaaccaccuccgggacaucaugggcauccccuacugcaacuacuccaaguacugcuaccugaaccacacggucaccgggaagaccagccugccccgcugcugccugguguccaacggcagcuaccucaacgagacccacuucuccgacgacaucgagcagcaggccgacaacaugaucacggagcugcugcagaaggaguacauggaccggcagggcaagaccccgcucgggcugguggaccuguucgucuucagcaccuccuucuaccugaucagcaucuuccuccaccuggugaagauccccacccaccgccacgugaucggcaagcccugccccaagccgcaccggcugaaccacauggggaucugcuccugcggccucuacaagcaccccgggguccccgugaaguggaagcgcugaggacuagucccuguucccagagcccacuuuuuuuucuuuuuuugaaauaaaauagccugucuuucagaucucaaaggcucuuuucagagccaccaaaaaaaaaaaaaaaaaaaaaaaaaaaaaaaaaaaaaaaaaaaaaaaaaaaaaaaaaaaaaaaaaaaaaaaaaaaaaaaaaaaaaaaaaaaaaaaaaaaaa

SEQ ID NO: 25370 - RNA, 1764 nt, Artificial Sequence
  mRNA product Design a-2 (hSL-A100) comprising derived and/or modified sequence from LASV(Nig08-A19;Clade III)__ADU56618__GPCmut3 (opt1)
aggagaguccgcucagccagguugcagaagcggcuuagcguguguccuaaucuucucucugcguguagguaggccugugccgcaaacaagcuuaccaugggccagaucgugaccuucuuccaggaggucccccacgugaucgaggaggugaugaacaucguccugaucgcccucagcauccuggccauccugaaggggcucuacaacaucgcgaccugcggccugaucgggcuggugacguuccuccugcuguccggccgcagcugcuccaugaccuacaaggggguguacgagcuccagacccuggagcugaacaugaacacccucaacaugacgaugccgcugagcugcaccaagaacaacucccaccacuacaucauggucggcaacgagaccggccuggagcucacccugacgaacaccagccugcuccaccacaaguucugcaaccuguccgacgcccacaagaagaaccuguacgaccacacccucaugagcaucaucuccaccuuccaccugagcauccccaacuucaaccaguacgaggccauguccugcgacuucaacgggggcaagaucacggugcaguacaaccugagccacuccuacgccaucgacgccgcgaaccacugcgggaccguggccaacggcguccuccagaccuucaugcggauggccuggggcgggagcuacaucgcccuggacuccggccgcgggaagugggacugcaucaugaccagcuaccaguaccugaucauccagaacacgaccugggaggaccacugccaguucucccggcccagccccaucggcuaccucgggcugcugucccagcgcacccgggacaucuacaucagccgccggcgccggggcaccuucacguggacccucagcgacuccgagggcaacgagacccccgggggcuacugccugacccgcuggaugcugaucgaggcggagcucaagugcuucgggaacacggccguggccaagugcaacgagaagcacgacgaggaguucugcgacaugcugcggcuguucgacuucaacaagcaggccauccgccggcucaaggccccggcgcagaugagcauccagcugaucaacaaggccgugaacgcccugaucaacgaccagcucaucaugaagaaccaccuccgcgacaucaugggcauccccuacugcaacuacuccaaguacugcuaccugaaccacaccagcaccgggcggaccucccugccccgcugcugccuggucagcaacggcuccuaccugaacgagacgcacuucagcgacgacaucgagcagcaggccgacaacaugaucaccgagaugcuccagaaggaguaccuggaccggcagggcaagaccccgcuggggcugguggaccucuucguguucuccaccagcuucuaccugaucuccaucuuccugcaccucgucaagauccccacgcaccgccacaucgugggcaagcccugccccaagccgcaccggcugaaccacauggggaucugcagcugcggccuguacaagcagcccggggugcccguccgcuggaagcggugaggacuagucccuguucccagagcccacuuuuuuuucuuuuuuugaaauaaaauagccugucuuucagaucucaaaggcucuuuucagagccaccaaaaaaaaaaaaaaaaaaaaaaaaaaaaaaaaaaaaaaaaaaaaaaaaaaaaaaaaaaaaaaaaaaaaaaaaaaaaaaaaaaaaaaaaaaaaaaaaaaaaa

SEQ ID NO: 25371 - RNA, 1767 nt, Artificial Sequence
  mRNA product Design a-2 (hSL-A100) comprising derived and/or modified sequence from LASV(G1180-SLE-2010;Clade IV)__AIT17168__GPCmut3 (opt1)
aggagaguccgcucagccagguugcagaagcggcuuagcguguguccuaaucuucucucugcguguagguaggccugugccgcaaacaagcuuaccaugggccagaucgugaccuucuuccaggaggucccccacgugaucgaggaggugaugaacaucguccugaucgcccucagcauccuggccgugcugaaggggcucuacaacuucgcgaccugcggccugguggggcugcucacguuccugcugcucugcggccgcuccugcaccgccagccgguacaagggggucuacgagcugcagacccuggagcucaacauggagacccugaacaugacgaugccgcuguccugcaccaagaacaacagccaccacuacaucauggugggcaacgagaccggccucgagcugacccugacgaacaccuccaucaucaaccacaaguucugcaaccucagcgacgcccacaagaagaaccuguacgaccacgcccugauguccaucaucagcaccuuccaccucuccauccccaacuucaaccaguacgaggccaugagcugcgacuucaacgggggcaagaucuccgugcaguacaaccugagccacuccuacgcgggggacgccgccaaccacugcggcaccgucgccaacggggugcugcagacguucaugcgcauggcguggggcggcagcuacaucgcccucgacuccgggcacggcagcugggacugcaucaugaccuccuaccaguaccugaucauccagaacaccaccugggaggaccacugccaguucagccggcccucccccaucggguaccugggccuccugagccagcgcacgcgggacaucuacaucagccgccggcgccggggcaccuucaccuggacccuguccgacagcgaggggaaggacacgccgggcggguacugccucacccgcuggaugcugaucgaggccgagcugaagugcuucggcaacaccgccguggccaagugcaacgagaagcacgacgaggaguucugcgacaugcuccggcuguucgacuucaacaagcaggcgauccagcgccugaaggcccccgcccagauguccauccagcucaucaacaaggccgucaacgcccugaucaacgaccagcugaucaugaagaaccaccuccgggacaucauggggauccccuacugcaacuacagcaaguacugcuaccugaaccacaccacgaccggcaagaccucccugcccaagugcugccucgugagcaacggcuccuaccugaacgagacccacuucagcgacgacaucgagcagcaggcggacaacaugaucacggagaugcugcagaaggaguacauggagcgccaggggaagaccccgcucggccugguggaccuguucgucuucuccaccagcuucuaccugaucuccaucuuccuccaccuggugaagauccccacccaccggcacaucgugggcaagagcugccccaagccccaccgccugaaccacauggggaucugcuccugcgggcucuacaagcagccgggcguccccgugaaguggaagcggugaggacuagucccuguucccagagcccacuuuuuuuucuuuuuuugaaauaaaauagccugucuuucagaucucaaaggcucuuuucagagccaccaaaaaaaaaaaaaaaaaaaaaaaaaaaaaaaaaaaaaaaaaaaaaaaaaaaaaaaaaaaaaaaaaaaaaaaaaaaaaaaaaaaaaaaaaaaaaaaaaaaaa

SEQ ID NO: 25372 - RNA, 1767 nt, Artificial Sequence
  mRNA product Design a-2 (hSL-A100) comprising derived and/or modified sequence from LASV(G1442-SLE-2011;Clade IV)__AIT17180__GPCmut3 (opt1)
aggagaguccgcucagccagguugcagaagcggcuuagcguguguccuaaucuucucucugcguguagguaggccugugccgcaaacaagcuuaccaugggccagaucgugaccuucuuccaggaggucccccacgugaucgaggaggugaugaacaucguccugaucgcccucagcauccuggccgugcugaaggggcucuacaacguggcgaccugcggccugaucgggcuggucacguuccuccugcugugcggccgcuccugcaccaccacccucuacaaggggguguacgagcugcagacgcuggagcucaacauggagacccugaacaugaccaugccgcugagcugcaccaagaacaacucccaccacuacauccgggugggcaacgagacgggccucgagcugacccugaccaacaccagcaucaucaaccacaaguucugcaaccucuccgacgcccacaagaagaaccuguacgaccacgcccugaugagcaucaucuccacguuccaccucagcauccccaacuucaaccaguacgaggccauguccugcgacuucaacgggggcaagaucagcguccaguacaaccugucccacagcuacgccggggacgcggccaaccacugcggcaccguggccaacggggugcugcagaccuucaugcgcauggccuggggcggcuccuacaucgcgcucgacagcgggcggggcaacugggacugcaucaugaccuccuaccaguaccugaucauccagaacacgaccugggacgaccacugccaguucagccgccccucccccaucggguaccugggccuccugagccagcggacccgcgacgucuacaucucccggcgccggcgcggcaccuucacguggacccugagcgacagcgaggggaaggacaccccgggcggguacugccucacccgguggaugcugaucgaggccgagcugaagugcuucggcaacacggccguggccaagugcaacgagaagcacgacgaggaguucugcgacaugcuccgccuguucgacuucaacaagcaggccauccagcggcugaaggcgcccgcccagauguccauccagcucaucaacaaggccgugaacgcccugaucaacgaccagcugaucaugaagaaccaccuccgcgacaucauggggauccccuacugcaacuacagcaaguacugcuaccugaacaacaccgccaccggcaagaccucccugcccaagugcugccucaucagcaacggcuccuaccugaacgagacgcacuucagcgacgacaucgagcaggaggcggacaacaugaucaccgagaugcugcagaaggaguacauggagcggcaggggaagaccccgcucggccuggucgaccuguucguguucuccaccagcuucuaccugaucuccaucuuccuccaccuggugaagauccccacgcaccgccacaucgucggcaagagcugccccaagccccaccggcugaaccacauggggaucugcuccugcgggcucuacaagcagccgggcgugcccgugcgcuggaagcggugaggacuagucccuguucccagagcccacuuuuuuuucuuuuuuugaaauaaaauagccugucuuucagaucucaaaggcucuuuucagagccaccaaaaaaaaaaaaaaaaaaaaaaaaaaaaaaaaaaaaaaaaaaaaaaaaaaaaaaaaaaaaaaaaaaaaaaaaaaaaaaaaaaaaaaaaaaaaaaaaaaaaa

SEQ ID NO: 25373 - RNA, 1767 nt, Artificial Sequence
  mRNA product Design a-2 (hSL-A100) comprising derived and/or modified sequence from LASV(G3010-SLE-2013;Clade IV)__AIT17344__GPCmut3 (opt1)
aggagaguccgcucagccagguugcagaagcggcuuagcguguguccuaaucuucucucugcguguagguaggccugugccgcaaacaagcuuaccaugggccagaucgugaccuucuuccaggaggucccccacgugaucgaggaggugaugaacaucguccugaucgcccucagcauccuggccgugcugaaggggcucuacaacuucgcgaccugcggccugguggggcuggucacguuccuccugcugugcggccgcuccugcaccaccagccucuacaaggggguguacgagcugcagacccuggagcucaacauggagacgcugaacaugaccaugccgcuguccugcaccaagaacaacagccaccacuacaucauggugggcaacgagaccggccucgagcugacgcugaccaacaccuccaucaucaaccacaaguucugcaaccucagcgacgcccacaagaagaaccuguacaaccacgcccugauguccaucaucagcaccuuccaccucuccauccccaacuucaaccaguacgaggccaugagcugcgacuucaacgggggcaagaucuccguccaguacaaccugagccacuccuacgccggggacgcggccagccacugcggcacgguggccaacggggugcugcagaccuucaugcggauggccuggggcggcuccuacaucgcgcucgacagcggguacggcaagugggacugcaucaugaccuccuaccaguaccugaucauccagaacaccacgugggaggaccacugccaguucagccgccccucccccaucggguaccugggccuccugagccagcggacccgcgacaucuacaucagccggcgccggcgcggcaccuucaccuggacgcuguccgacagcgaggggaaggacaccccgggcggguacugccucacccgguggaugcugaucgaggccgagcugaagugcuucggcaacaccgccgucgccaagugcaacgagaagcacgacgaggaguucugcgacaugcuccgccuguucgacuucaacaagcaggccauccagcggcugaagacgcccgcgcagauguccauccagcucaucaacaaggccgugaacgcccugaucaacgaccagcugaucaugaagaaccaccuccgcgacaucauggggauccccuacugcaacuacagcaaguacugcuaccugaaccacaccaccaccggcaagacgucccugcccaagugcugccucgugagcaacggcuccuaccugaacgagacccacuucagcgacgacaucgagcagcaggccgacaacaugaucaccgagaugcugcagaaggaguacauggagcggcaggggaagaccccgcucggccuggucgaccuguucguguucuccacgagcuucuaccugaucuccaucuuccuccaccuggugaagauccccacccaccgccacaucgucggcaagagcugccccaagccccaccggcugaaccacauggggaucugcuccugcgggcucuacaagcagccgggcgugcccgugcgcuggaagcggugaggacuagucccuguucccagagcccacuuuuuuuucuuuuuuugaaauaaaauagccugucuuucagaucucaaaggcucuuuucagagccaccaaaaaaaaaaaaaaaaaaaaaaaaaaaaaaaaaaaaaaaaaaaaaaaaaaaaaaaaaaaaaaaaaaaaaaaaaaaaaaaaaaaaaaaaaaaaaaaaaaaaa

SEQ ID NO: 25374 - RNA, 1767 nt, Artificial Sequence
  mRNA product Design a-2 (hSL-A100) comprising derived and/or modified sequence from LASV(G502-SLE-2009;Clade IV)__AIT17126__GPCmut3 (opt1)
aggagaguccgcucagccagguugcagaagcggcuuagcguguguccuaaucuucucucugcguguagguaggccugugccgcaaacaagcuuaccaugggccagaucgugaccuucuuccaggaggucccccacgugaucgaggaggugaugaacaucguccugaucgcccucagcauccuggccgugcugaaggggcucuacaacuucgcgaccugcggccugguggggcugcucacguuccugcugcucugcggccgcuccugcaccaccgggcuguacaagggcgucuacgagcugcagacccucgagcugaacauggagacgcugaacaugaccaugccgcucagcugcaccaagaacaacucccaccacuacaucauggugggcaacgagaccgggcuggagcugacgcucaccaacaccagcaucaucaaccacaaguucugcaaccuguccgacgcccacaagaagaaccuguacgaccacgcccucaugagcaucaucuccaccuuccaccugagcauccccaacuucaaccaguacgaggccauguccugcgacuucaacggcgggaagaucagcgugcaguacaaccugucccacagcuacgccggcgacgcggccgaccacugcgggacggucgccaacggcgugcuccagaccuucaugcggauggccuggggcggguccuacaucgcgcuggacagcggccgcgggcggugggacugcaucaugaccuccuaccaguaccugaucauccagaacaccacgugggaggaccacugccaguucagccgccccucccccaucggcuaccucggccugcugagccagcggacccgcgacaucuacaucucccggcgccggcgcgggaccuucaccuggacgcucagcgacagcgagggcaaggacacccccgggggcuacugccugacccgguggaugcugaucgaggccgagcucaagugcuucgggaacaccgccguggccaagugcaacgagaagcacgacgaggaguucugcgacaugcugcgccuguucgacuucaacaagcaggccauccagcggcucaaggcgccggcccagauguccauccagcugaucaacaaggccgucaacgcccugaucaacgaccagcucgugaugaagaaccaccuccgcgacaucaugggcauccccuacugcaacuacagccgguacugcuaccugaaccacacgaccaccggccgcaccucccugcccaagugcugccuggugagcaacggguccuaccugaacgagacgcacuucagcgacgacaucgagcagcaggccgacaacaugaucaccgagaugcuccagaaggaguacauggagcggcagggcaagaccccgcuggggcuggucgaccuguucguguucuccaccagcuucuaccucaucuccaucuuccugcaccuggugaagauccccacgcaccgccacaucgucggcaagagcugccccaagccccaccggcucaaccacauggggaucugcuccugcggccuguacaagcagccgggcgugcccgugaaguggaagcgcugaggacuagucccuguucccagagcccacuuuuuuuucuuuuuuugaaauaaaauagccugucuuucagaucucaaaggcucuuuucagagccaccaaaaaaaaaaaaaaaaaaaaaaaaaaaaaaaaaaaaaaaaaaaaaaaaaaaaaaaaaaaaaaaaaaaaaaaaaaaaaaaaaaaaaaaaaaaaaaaaaaaaa

SEQ ID NO: 25375 - RNA, 1767 nt, Artificial Sequence
  mRNA product Design a-2 (hSL-A100) comprising derived and/or modified sequence from LASV(G733-SLE-2010;Clade IV)__AIT17154__GPCmut3 (opt1)
aggagaguccgcucagccagguugcagaagcggcuuagcguguguccuaaucuucucucugcguguagguaggccugugccgcaaacaagcuuaccaugggccagaucgugaccuucuuccaggaggucccccacgugaucgaggaggugaugaacaucguccugaucgcccucagcauccuggccgugcugaaggggcucuacaacuucgcgaccugcggcaucguggggcuggucuccuuccugcuccugugcggccgcagcugcacgaccucccuguacaaggggguguacgagcuccagacccuggagcugaacauggagacccucaacaugacgaugccgcugagcugcaccaagaacaacucccaccacuacaucauggugggcaacgagaccggccuggagcucacccugacgaacaccagcaucaucaaccacaaguucugcaaccuguccgacgcccacaagaagaaccucuacgaccacgcccugaugagcaucaucuccaccuuccaccugagcauccccaacuucaaccaguacgaggccauguccugcgacuucaacgggggcaagaucagcguccaguacaaccucucccacagcuacgccggggacgcggccaaccacugcggcaccaucgccaacggggugcugcagacguucaugcggauggccuggggcggcuccuacaucgcgcuggacagcgggcgcgaccggugggacugcaucaugaccuccuaccaguaccucaucauccagaacaccaccugggaggaccacugccaguucagccgccccucccccaucggcuaccuggggcugcucagccagcggacgcgcgacaucuacaucagccggcgccggcgcggcaccuucaccuggacccuguccgacagcgagggcaaggacacgcccgggggcuacugccugacccgguggaugcucaucgaggccgagcugaagugcuucgggaacaccgccguggccaagugcaacgagaagcacgacgaggaguucugcgacaugcugcgccucuucgacuucaacaagcaggccauccagcggcugaaggcgccggcccagauguccauccagcugaucaacaaggccgucaacgcccucaucaacgaccagcugaucaugaagaaccaccuccgcgacaucaugggcauccccuacugcaacuacagcaaguacugcuaccugaaccacaccacgaccgggaagaccucccugcccaagugcugccuggugagcaacggcuccuaccucaacgagacccacuucagcgacgacaucgagcagcaggccgacaacaugaucacggagaugcugcagaaggaguacauggagcggcagggcaagaccccgcuggggcucguggaccuguucgucuucuccaccagcuucuaccugaucuccaucuuccugcaccucgugaagauccccacccaccgccacguggucggcaagagcugccccaagccccaccggcugaaccacauggggaucugcuccugcggccuguacgggcagccgggcgugcccgugaaguggaagcgcugaggacuagucccuguucccagagcccacuuuuuuuucuuuuuuugaaauaaaauagccugucuuucagaucucaaaggcucuuuucagagccaccaaaaaaaaaaaaaaaaaaaaaaaaaaaaaaaaaaaaaaaaaaaaaaaaaaaaaaaaaaaaaaaaaaaaaaaaaaaaaaaaaaaaaaaaaaaaaaaaaaaaa

SEQ ID NO: 25376 - RNA, 1767 nt, Artificial Sequence
  mRNA product Design a-2 (hSL-A100) comprising derived and/or modified sequence from MOPV/LASV reassortant(IGS-1;Clade IV)__AFY05576__GPCmut3 (opt1)
aggagaguccgcucagccagguugcagaagcggcuuagcguguguccuaaucuucucucugcguguagguaggccugugccgcaaacaagcuuaccaugggccagaucgugaccuucuuccaggaggucccccacgugaucgaggaggugaugaacaucguccugaucgcccucagcgugcuggccgugcugaaggggcucuacaacuucgcgaccugcggccuggucgggcuggugacguuccuccugcugugcggccgcuccugcaccaccagccucuacaaggggguguacgagcugcagacccuggagcucaacauggagacgcugaacaugaccaugccgcuguccugcaccaagaacaacagccaccacuacaucauggucggcaacgagaccggccucgagcugacgcugaccaacaccuccaucaucaaccacaaguucugcaaccucagcgacgcccacaagaagaaccuguacgaccacgcccugauguccaucaucagcaccuuccaccucuccauccccaacuucaaccaguacgaggccaugagcugcgacuucaacgggggcaagaucuccgugcaguacaaccugagccacuccuacgccggggacgcggccaaccacugcggcacgguggccaacgggguccugcagaccuucaugcggauggccuggggcggcagcuacaucgcgcucgacuccgggcgcggcaacugggacugcaucaugaccagcuaccaguaccugaucauccagaacaccacgugggaggaccacugccaguucucccggcccagccccaucggguaccugggccuccugucccagcgcacccgggacaucuacaucagccgccggcgccggggcaccuucaccuggacgcugagcgacuccgagggggaggacaccccgggcggguacugccucacccgcuggaugcugaucgaggccgagcugaagugcuucggcaacaccgccguggccaagugcaacgagaagcacgacgaggaguucugcgacaugcuccggcuguucgacuucaacaagcaggccauccagcgccugaaggcgcccgcccagaugagcauccagcucaucaacaaggccgugaacgcccugaucaacgaccagcugaucaugaagaaccaccuccgggacaucauggggauccccuacugcaacuacuccaaguacugcuaccugaaccacacgaccaccggccgcaccagccugcccaagugcugccucgucuccaacggcagcuaccugaacgagacgcacuucuccgacgacaucgagcagcaggccgacaacaugaucaccgagaugcugcagaaggaguacauggagcggcaggggaagaccccgcucggccugguggaccuguucguguucagcaccuccuucuaccugaucagcaucuuccuccaccuggucaagauccccacgcaccgccacaucguggggaaguccugccccaagccccaccggcugaaccacaugggcaucugcagcugcgggcucuacaagcagccgggcgugcccgucaaguggaagcgcugaggacuagucccuguucccagagcccacuuuuuuuucuuuuuuugaaauaaaauagccugucuuucagaucucaaaggcucuuuucagagccaccaaaaaaaaaaaaaaaaaaaaaaaaaaaaaaaaaaaaaaaaaaaaaaaaaaaaaaaaaaaaaaaaaaaaaaaaaaaaaaaaaaaaaaaaaaaaaaaaaaaaa

SEQ ID NO: 25377 - RNA, 1767 nt, Artificial Sequence
  mRNA product Design a-2 (hSL-A100) comprising derived and/or modified sequence from LASV(LM765-SLE-2012;Clade IV)__AIT17814__GPCmut3 (opt1)
aggagaguccgcucagccagguugcagaagcggcuuagcguguguccuaaucuucucucugcguguagguaggccugugccgcaaacaagcuuaccaugggccagaucgugaccuucuuccaggaggucccccacgugaucgaggaggugaugaacaucguccugaucgcccucagcauccuggccgugcugaaggggcucuacaacuucgcgaccugcggccugguggggcuggucacguuccuccugcugugcggccgcuccugcaccaccagccucuacaaggggguguacgagcugcagacccuggagcucaacauggagacgcugaacaugaccaugccgcuguccugcaccaagaacaacagccaccacuacaucauggugggcaacgagaccggccucgagcugacgcugaccaacaccuccaucaucgaccacaaguucugcaaccucagcgacgcccaccggaagaaccuguacgaccacgcccugauguccaucaucagcaccuuccaccucuccauccccaacuucaaccaguacgaggccaugagcugcgacuucaacgggggcaagaucuccguccaguacaaccugagccacuccuacgccaaggacgcggccgaccacugcgggacgguggccaacggcgugcugcagaccuucaugcgcauggccuggggcgggagcuacaucgcgcucgacuccggccgggggcgcugggacugcaucaugaccagcuaccaguaccugaucauccagaacaccacgugggaggaccacugccaguucucccggcccagccccaucggcuaccuggggcuccugucccagcgcacccgggacaucuacaucagccgccggcgccggggcaccuucaccuggacgcugagcgacuccgagggcaaggacacccccgggggcuacugccucacccgcuggaugcugaucgaggccgagcugaagugcuucgggaacaccgccgucgccaagugcaacgagaagcacgacgaggaguucugcgacaugcuccggcuguucgacuucaacaagcaggccauccagcgccugaaggcgccggcccagaugagcauccagcucaucaacaaggccgugaacgcccugaucaacgaccagcugaucaugaagaaccaccuccgggacaucaugggcauccccuacugcaacuacuccaaguacugcuaccugaaccacacgaccaccgggaagaccagccugcccaagugcugccucguguccaacggcagcuaccugaacgagacgcacuucuccgacgacaucgagcagcaggccgacaacaugaucaccgagaugcugcagaaggaguacauggagcgccagggcaagaccccgcucgggcuggucgaccuguucguguucagcaccuccuucuaccugaucagcaucuuccuccaccuggugaagauccccacgcaccggcacaucgucggcaagcccugccccaagccgcaccgccugaaccacauggggaucugcuccugcggccucuacaagcagcccggggugcccgugaaguggaagcggugaggacuagucccuguucccagagcccacuuuuuuuucuuuuuuugaaauaaaauagccugucuuucagaucucaaaggcucuuuucagagccaccaaaaaaaaaaaaaaaaaaaaaaaaaaaaaaaaaaaaaaaaaaaaaaaaaaaaaaaaaaaaaaaaaaaaaaaaaaaaaaaaaaaaaaaaaaaaaaaaaaaaa

SEQ ID NO: 25378 - RNA, 1767 nt, Artificial Sequence
  mRNA product Design a-2 (hSL-A100) comprising derived and/or modified sequence from LASV(LM776-SLE-2012;Clade IV)__AIT17824__GPCmut3 (opt1)
aggagaguccgcucagccagguugcagaagcggcuuagcguguguccuaaucuucucucugcguguagguaggccugugccgcaaacaagcuuaccaugggccagaucgugaccuucuuccaggaggucccccacgugaucgaggaggugaugaacaucguccugaucgcccucagcauccuggccgugcugaaggggcucuacaacuucgcgaccugcggccugguggggcuggucacguuccuccugcugugcggccgcuccugcaccaccagcguguacaaggggguguacgagcuccagacccuggagcugaacauggagacgcucaacaugaccaugccgcuguccugcaccaagaacaacagccaccacuacaucauggucggcaacgagaccggccuggagcucacgcugaccaacaccuccaucaucaaccacaaguucugcaaccugagcgacgcccacaagaagaaccucuacgaccacgcccugauguccaucaucagcaccuuccaccuguccauccccaacuucaaccaguacgaggccaugagcugcgacuucaacgggggcaagaucuccgugcaguacaaccucagccacuccuacgccggggacgcggccaaccacugcggcacgguggccaacgggguccugcagaccuucaugcggauggccuggggcggcagcuacaucgcgcuggacuccgggcacggcaagugggacugcaucaugaccagcuaccaguaccucaucauccagaacaccacgugggaggaccacugccaguucucccgccccagccccaucggguaccugggccugcucucccagcggacccgcgacaucuacaucagccggcgccggcgcggcaccuucaccuggacgcugagcgacuccgaggggaaggacaccccgggcggguacugccugacccgguggaugcucaucgaggccgagcugaagugcuucggcaacaccgccguggccaagugcaacgagaagcacgacgaggaguucugcgacaugcugcgccucuucgacuucaacaagcaggccauccagcggcugaaggcgcccgcccagaugagcauccagcugaucaacaaggccgugaacgcccucaucaacgaccagcugaucaugaagaaccaccuccgcgacaucauggggauccccuacugcaacuacuccaaguacugcuaccugaaccacacgaccaccggcaagaccagccugcccaagugcugccuggucuccaacggcagcuaccucaacgagacgcacuucuccgacgacaucgagcagcaggccgacaacaugaucaccgagaugcugcagaaggaguacauggagcggcaggggaagaccccgcugggccucguggaccuguucguguucagcaccuccuucuaccugaucagcaucuuccugcaccucgucaagauccccacgcaccgccacaucguggggaaguccugccccaagccccaccggcugaaccacaugggcaucugcagcugcgggcuguacaagcagccgggcgugcccguccgcuggaagcggugaggacuagucccuguucccagagcccacuuuuuuuucuuuuuuugaaauaaaauagccugucuuucagaucucaaaggcucuuuucagagccaccaaaaaaaaaaaaaaaaaaaaaaaaaaaaaaaaaaaaaaaaaaaaaaaaaaaaaaaaaaaaaaaaaaaaaaaaaaaaaaaaaaaaaaaaaaaaaaaaaaaaa

SEQ ID NO: 25379 - RNA, 1767 nt, Artificial Sequence
  mRNA product Design a-2 (hSL-A100) comprising derived and/or modified sequence from LASV(Mad39;Clade IV)__ANH09722__GPCmut3 (opt1)
aggagaguccgcucagccagguugcagaagcggcuuagcguguguccuaaucuucucucugcguguagguaggccugugccgcaaacaagcuuaccaugggccagaucgugaccuucuuccaggaggucccccacgugaucgaggaggugaugaacaucguccugaucgcccucagcauccuggccgugcugaaggggcucuacaacguggcgaccugcggccugaucgggcuggucacguuccuccugcugugcggccgcuccugcaccaccacccucuacaaggggguguacgagcugcaggcccuggagcucaacauggagacgcugaacaugaccaugccgcugagcugcaccaagaacaacucccaccacuacauccgggugggcaacgagaccggccucgagcugacgcugaccaacaccagccucaucaaccacaaguucugcaaccuguccgacgcccacaagaagaaccuguacgaccacgcccucaugagcaucaucuccaccuuccaccugagcauccccaacuucaaccaguacgaggccauguccugcgacuucaacgacgggaagaucagcguccaguacaaccugucccacacguacgcgggcgacaccgccaaccacugcgggaccguggccaacggcgugcuccagaccuucaugcgcauggccuggggcgggagcuacaucgcgcuggacuccggccgcgggggcugggacugcaucaugacgagcuaccaguaccugaucauccagaacaccaccugggaggaccacugccaguucucccggcccagccccaucggguaccucggccugcugucccagcggacccgcgacaucuacaucagccggcgccggcgcggcacguucaccuggacccucuccgacagcgaggggaaggacaccccgggcggguacugccugacgcgguggaugcugaucgaggccgagcucaagugcuucggcaacaccgccgucgccaagugcaacgagaagcacgacgaggaguucugcgacaugcugcgccuguucgacuucaacaagcaggccauccagcggcucaaggcgcccgcccagaugagcauccagcugaucaacaaggccgugaacgcccugaucaacgaccagcucaucaugaagaaccaccuccgcgacaucauggggauccccuacugcaacuacuccaaguacugcuaccugaaccacaccgugaccggcaagacgagccugcccaagugcugccuggucuccaacggcagcuaccugaacgagacccacuucuccgacgacaucgagcagcaggccgacaacaugaucaccgagaugcuccagaaggaguacauggagcggcaggggaagaccccgcugggccugguggaccuguucguguucagcacguccuucuaccucaucagcaucuuccugcaccuggucaagauccccacccaccgccacgugguggggaagcccugccccaagccgcaccggcucaaccacaugggcaucugcuccugcggguucuacaagcagcccggcguccccgugcgcuggaagcggugaggacuagucccuguucccagagcccacuuuuuuuucuuuuuuugaaauaaaauagccugucuuucagaucucaaaggcucuuuucagagccaccaaaaaaaaaaaaaaaaaaaaaaaaaaaaaaaaaaaaaaaaaaaaaaaaaaaaaaaaaaaaaaaaaaaaaaaaaaaaaaaaaaaaaaaaaaaaaaaaaaaaa

SEQ ID NO: 25380 - RNA, 1767 nt, Artificial Sequence
  mRNA product Design a-2 (hSL-A100) comprising derived and/or modified sequence from LASV(Z0947-SLE-2011;Clade IV)__AIT17840__GPCmut3 (opt1)
aggagaguccgcucagccagguugcagaagcggcuuagcguguguccuaaucuucucucugcguguagguaggccugugccgcaaacaagcuuaccaugggccagaucgugaccuucuuccaggaggucccccacgugaucgaggaggugaugaacaucguccugaucgcccucagcauccuggccgugcugaaggggcucuacaacuucgcgaccugcggccugguggggcuggucacguuccuccugcugugcggccgcuccugcaccaucagccucuacaaggggguguacgagcugcagacccuggagcucaacauggagacccugaacaugacgaugccgcuguccugcaccaagaacaacagccaccacuacaucauggugggcaacgagaccggccucgagcugacccugacgaacaccuccaucaucaaccacaaguucugcaaccucagcgacgcccacaagaagaaccuguacgaccacgcccugauguccaucaucagcaccuuccaccucuccauccccaacuucaaccaguacgaggccaugagcugcgacuucaacgggggcaagaucuccguccaguacaaccugagccacuccuacgccggggacgcggccaaccacugcggcaccguggccaacggggugcugcagacguucaugcggauggccuggggcggcagcuacaucgcgcucgacuccgggcgcgaccggugggacugcaucaugaccagcuaccaguaccugaucauccagaacaccaccugggaggaccacugccaguucucccgccccagccccaucggcuaccuggggcuccugucccagcggacgcgcgacaucuacaucagccggcgccggcgcggcaccuucaccuggacccugagcgacuccgagggcaaggacacgcccgggggcuacugccucacccgguggaugcugaucgaggccgagcugaagugcuucgggaacaccgccgucgccaagugcaacgagaagcacgacgaggaguucugcgacaugcuccgccuguucgacuucaacaagcaggccauccagcggcugaaggcgccggcccagaugagcauccagcucaucaacaaggccgugaacgcccugaucaacgaccagcugaucaugaagaaccaccuccgcgacaucaugggcauccccuacugcaacuacuccaaguacugcuaccugaaccacaccacgaccgggaagaccagccugcccaagugcugccucguguccaacggcagcuaccugaacgagacccacuucuccgacgacaucgagcagcaggccgacaacaugaucacggagaugcugcagaaggaguacauggagcggcagggcaagaccccgcucgggcuggucgaccuguucguguucagcaccuccuucuaccugaucagcaucuuccuccaccuggugaagauccccacccaccgccacaucgucggcaagcccugccccaagccgcaccggcugaaccacauggggaucugcuccugcggccucuacaagcagcccggggugcccgugaaguggaagcgcugaggacuagucccuguucccagagcccacuuuuuuuucuuuuuuugaaauaaaauagccugucuuucagaucucaaaggcucuuuucagagccaccaaaaaaaaaaaaaaaaaaaaaaaaaaaaaaaaaaaaaaaaaaaaaaaaaaaaaaaaaaaaaaaaaaaaaaaaaaaaaaaaaaaaaaaaaaaaaaaaaaaaa

SEQ ID NO: 25381 - RNA, 1767 nt, Artificial Sequence
  mRNA product Design a-2 (hSL-A100) comprising derived and/or modified sequence from LASV(Josiah;Clade IV)__NP_694870__GPCmut3 (opt4)
aggagaguccgcucagccagguugcagaagcggcuuagcguguguccuaaucuucucucugcguguagguaggccugugccgcaaacaagcuuaccaugggccagaucgugaccuucuuccaggaggugccccacgugaucgaggaggugaugaacaucgugcugaucgcccugagcgugcuggccgugcugaagggccuguacaacuucgccaccugcggccuggugggccuggugaccuuccugcugcugugcggcagaagcugcaccaccagccuguacaagggcguguacgagcugcagacccuggagcugaacauggagacccugaacaugaccaugccccugagcugcaccaagaacaacagccaccacuacaucauggugggcaacgagaccggccuggagcugacccugaccaacaccagcaucaucaaccacaaguucugcaaccugagcgacgcccacaagaagaaccuguacgaccacgcccugaugagcaucaucagcaccuuccaccugagcauccccaacuucaaccaguacgaggccaugagcugcgacuucaacggcggcaagaucagcgugcaguacaaccugagccacagcuacgccggcgacgccgccaaccacugcggcaccguggccaacggcgugcugcagaccuucaugagaauggccuggggcggcagcuacaucgcccuggacagcggcagaggcaacugggacugcaucaugaccagcuaccaguaccugaucauccagaacaccaccugggaggaccacugccaguucagcagacccagccccaucggcuaccugggccugcugagccagagaaccagagacaucuacaucagcagaagaagaagaggcaccuucaccuggacccugagcgacagcgagggcaaggacacccccggcggcuacugccugaccagauggaugcugaucgaggccgagcugaagugcuucggcaacaccgccguggccaagugcaacgagaagcacgacgaggaguucugcgacaugcugagacuguucgacuucaacaagcaggccauccagagacugaaggcccccgcccagaugagcauccagcugaucaacaaggccgugaacgcccugaucaacgaccagcugaucaugaagaaccaccugagagacaucaugggcauccccuacugcaacuacagcaaguacugcuaccugaaccacaccaccaccggcagaaccagccugcccaagugcugccuggugagcaacggcagcuaccugaacgagacccacuucagcgacgacaucgagcagcaggccgacaacaugaucaccgagaugcugcagaaggaguacauggagagacagggcaagaccccccugggccugguggaccuguucguguucagcaccagcuucuaccugaucagcaucuuccugcaccuggugaagauccccacccacagacacaucgugggcaagagcugccccaagccccacagacugaaccacaugggcaucugcagcugcggccuguacaagcagcccggcgugcccgugaaguggaagagaugaggacuagucccuguucccagagcccacuuuuuuuucuuuuuuugaaauaaaauagccugucuuucagaucucaaaggcucuuuucagagccaccaaaaaaaaaaaaaaaaaaaaaaaaaaaaaaaaaaaaaaaaaaaaaaaaaaaaaaaaaaaaaaaaaaaaaaaaaaaaaaaaaaaaaaaaaaaaaaaaaaaaa

SEQ ID NO: 25382 - RNA, 1764 nt, Artificial Sequence
  mRNA product Design a-2 (hSL-A100) comprising derived and/or modified sequence from LASV(LP;Clade I)__AAF86701__GPCmut3 (opt4)
aggagaguccgcucagccagguugcagaagcggcuuagcguguguccuaaucuucucucugcguguagguaggccugugccgcaaacaagcuuaccaugggccagaucaucaccuucuuccaggaggugccccacgugaucgaggaggugaugaacaucgugcugaucgcccugagccugcuggccauccugaagggccuguacaacaucgccaccugcggcaucaucggccugguggccuuccuguuccugugcggcaagagcugcagccugacccugaagggcggcuacgagcugcagacccuggagcugaacauggagacccugaacaugaccaugccccugagcugcaccaagaacagcagccaccacuacaucagagugggcaacgagaccggccuggagcugacccugaccaacaccagcaucaucaaccacaaguucugcaaccugagcgacgcccacaagaagaaccuguacgaccacgcccugaugagcaucaucagcaccuuccaccugagcauccccaacuucaaccaguacgaggccaugagcugcgacuucaacggcggcaagaucagcgugcaguacaaccugagccacagcuacgccggcgacgccgccgagcacugcggcaccguggccaacggcgugcugcagaccuucaugagaauggccuggggcggcagauacaucgcccuggacagcggcaagggcaacugggacugcaucaugaccagcuaccaguaccugaucauccagaacaccaccugggaggaccacugccaguucagcagacccagccccaucggcuaccugggccugcugagccagagaaccagagacaucuacaucagcagaagaagaagaggcaccuucaccuggacccugagcgacagcgagggcaacgagacccccggcggcuacugccugaccagauggaugcugaucgaggccgagcugaagugcuucggcaacaccgccguggccaagugcaacgagaagcacgacgaggaguucugcgacaugcugagacuguucgacuucaacaagcaggccaucagaagacugaaggcccccgcccagaugagcauccagcugaucaacaaggccgugaacgcccugaucaacgaccagcugaucaugaagaaccaccugagagacaucaugggcauccccuacugcaacuacagcaaguacugcuaccugaaccacaccagcagcggcagaaccagccugcccaagugcugccugaucagcaacggcagcuaccugaacgagacccaguucagcgacgacaucgagcagcaggccgacaacaugaucaccgagaugcugcagaaggaguacaucgagagacagggcaagaccccccugggccugguggacaucuucaucuucagcaccagcuucuaccugaucagcaucuuccugcaccugaucaagauccccacccacagacacaucgugggcaagcccugccccaagccccacagacugaaccacaugggcgugugcagcugcggccuguacaagcaccccggcgugcccaccaaguggaagagaugaggacuagucccuguucccagagcccacuuuuuuuucuuuuuuugaaauaaaauagccugucuuucagaucucaaaggcucuuuucagagccaccaaaaaaaaaaaaaaaaaaaaaaaaaaaaaaaaaaaaaaaaaaaaaaaaaaaaaaaaaaaaaaaaaaaaaaaaaaaaaaaaaaaaaaaaaaaaaaaaaaaaa

SEQ ID NO: 25383 - RNA, 1764 nt, Artificial Sequence
  mRNA product Design a-2 (hSL-A100) comprising derived and/or modified sequence from LASV(803213;Clade II)__AAF86703__GPCmut3 (opt4)
aggagaguccgcucagccagguugcagaagcggcuuagcguguguccuaaucuucucucugcguguagguaggccugugccgcaaacaagcuuaccaugggccagaucaucaccuucuuccaggaggugccccacgugaucgaggaggugaugaacaucgugcugaucgcccugagccugcuggccauccugaagggcaucuacaacguggccaccugcggccuguucggccugaucagcuuccugcugcugugcggcagaagcugcagcgugaccuacaagggcguguacgagcugcagacccuggagcugaacauggccaaccugaacaugaccaugccccugagcugcaccaagaacaacagccaccacuacaucauggugggcaacgagaccggccuggagcugacccugaccaacaccagcaucaucaaccacaaguucugcaaccugagcgacgcccacaagaagaaccuguacgaccacgcccugaugagcaucaucagcaccuuccaccugagcauccccaacuucaaccaguacgaggccaugagcugcgacuucaacggcggcaagaucagcgugcaguacaaccugagccacagcuucgccguggacgccgccaaccacugcggcaccaucgccaacggcgugcugcagaccuucaugagaauggccuggggcggcagcuacaucgcccuggacagcggcaagggcaacugggacugcaucaugaccagcuaccaguaccugaucauccagaacaccaccugggaggaccacugccaguucagcagacccagccccaucggcuaccugggccugcugagccagagaaccagagacaucuacaucagcagaagaagaagaggcaccuucaccuggacccugagcgacagcgagggcaacgaggcccccggcggcuacugccugaccagauggaugcugaucgaggccgagcugaagugcuucggcaacaccgccguggccaagugcaacgagaagcacgacgaggaguucugcgacaugcugagacuguucgacuucaacaagcaggccaucaagagacugaagacccccgcccagaugagcauccagcugaucaacaaggccgugaacgcccugaucaacgaccagcugaucaugaagaaccaccugagagacaucaugggcauccccuacugcaacuacagcagauacugcuaccugaaccacaccgugaccggcaagaccagccugcccagaugcugccuggugagcaacggcagcuaccugaacgagacccacuucagcgacgacaucgagcagcaggccgacaacaugaucaccgagaugcugcagaaggaguacauggacagacagggcaagaccccccugggccugguggaccuguucguguucagcaccagcuucuaccugaucagcaucuuccugcaccuggugaagauccccacccacagacacaucgugggcaagcccugccccaagccccacagacugaaccacaugggcaucugcagcugcggccuguacaagcaccccggcgugcccgugaaguggaagagaugaggacuagucccuguucccagagcccacuuuuuuuucuuuuuuugaaauaaaauagccugucuuucagaucucaaaggcucuuuucagagccaccaaaaaaaaaaaaaaaaaaaaaaaaaaaaaaaaaaaaaaaaaaaaaaaaaaaaaaaaaaaaaaaaaaaaaaaaaaaaaaaaaaaaaaaaaaaaaaaaaaaaa

SEQ ID NO: 25384 - RNA, 1764 nt, Artificial Sequence
  mRNA product Design a-2 (hSL-A100) comprising derived and/or modified sequence from LASV(GA391;Clade III)__CAA36645__GPCmut3 (opt4)
aggagaguccgcucagccagguugcagaagcggcuuagcguguguccuaaucuucucucugcguguagguaggccugugccgcaaacaagcuuaccaugggccagaucgugaccuucuuccaggaggugccccacgugaucgaggaggugaugaacaucgugcugaucgcccugagcauccuggccauccugaagggccuguacaacguggccaccugcggccugaucggccuggugaccuuccugcugcugagcggcagaagcugcagccugaucuacaagggcaccuacgagcugcagacccuggagcugaacauggagacccugaacaugaccaugccccugagcugcaccaagaacaacagccaccacuacaucagagugggcaacgagaccggccuggagcugacccugaccaacaccagcauccugaaccacaaguucugcaaccugagcgacgcccacaagagaaaccuguacgaccacagccugaugagcaucaucagcaccuuccaccugagcauccccaacuucaaccaguacgaggccaugagcugcgacuucaacggcggcaagaucaccgugcaguacaaccugagccacagcuucgccguggacgccgccggccacugcggcacccuggccaacggcgugcugcagaccuucaugagaauggccuggggcggcagcuacaucgcccuggacagcggcagaggcaacugggacugcaucaugaccagcuaccaguaccugaucauccagaacaccaccugggacgaccacugccaguucagcagacccagccccaucggcuaccugggccugcugagccagagaaccagagacaucuacaucagcagaagaagaagaggcaccuucaccuggacccugagcgacagcgagggcaacgagacccccggcggcuacugccugaccagauggaugcugaucgaggccgagcugaagugcuucggcaacaccgccguggccaagugcaacgagaagcacgacgaggaguucugcgacaugcugagacuguucgacuucaacaagcaggccaucagaagacugaagacccccgcccagaugagcauccagcugaucaacaaggccgugaacgcccugaucaacgaccagcugaucaugaagaaccaccugagagacaucaugggcauccccuacugcaacuacagcagauacugcuaccugaaccacaccagcaccggcaagaccagccugcccagaugcugccugaucagcaacggcagcuaccugaacgagaccaaguucagcgacgacaucgagcagcaggccgacaacaugaucaccgagaugcugcagaaggaguacaucgacagacagggcaagaccccccugggccugguggaccuguucguguucagcaccagcuucuaccugaucagcaucuuccugcaccuggugaagauccccacccacagacacaucgugggcaagcccugccccaagccccacagacugaaccacaugggcaucugcagcugcggccuguacaagcagcccggcgugcccgugagauggaagagaugaggacuagucccuguucccagagcccacuuuuuuuucuuuuuuugaaauaaaauagccugucuuucagaucucaaaggcucuuuucagagccaccaaaaaaaaaaaaaaaaaaaaaaaaaaaaaaaaaaaaaaaaaaaaaaaaaaaaaaaaaaaaaaaaaaaaaaaaaaaaaaaaaaaaaaaaaaaaaaaaaaaaa

SEQ ID NO: 25385 - RNA, 1767 nt, Artificial Sequence
  mRNA product Design a-2 (hSL-A100) comprising derived and/or modified sequence from LASV(AV;Clade V)__CCA30314__GPCmut3 (opt4)
aggagaguccgcucagccagguugcagaagcggcuuagcguguguccuaaucuucucucugcguguagguaggccugugccgcaaacaagcuuaccaugggccagaucgugaccuucuuccaggaggugccccacgugaucgaggaggugaugaacaucgugcugaucgcccugagcauccuggccgugcugaagggccuguacaacaucgccaccugcggccugaucggccugaucaccuuccugcugcugugcggcagaagcugcagcagcaaccuguacaagggcguguacgagcugcagagccuggaccugaacauggagacccugaacaugaccaugccccugagcugcaccaagaacaacagccaccacuacaucagagugggcaacgacaccggccuggagcugacccugaccaacaccagcauccugaaccacaaguucugcaaccugagcgacgcccacaagaaggaccuguacgaccacgcccugaugagcaucaucagcaccuuccaccugagcauccccaacuucaaccaguacgaggccaugagcugcgacuucaacggcggcaagaucagcgugcaguacaaccugagccacagcuacgccaucgacgccgccaaccacugcggcaccguggccaacggcauccugcagaccuucaugagaauggccuggggcggcagcuacaucgcccuggacagcggcagaggcaacugggacugcaucaugaccagcuaccaguaccugaucauccagaacaccaccugggagaaccacugccaguucagcagacccagccccaucggcuaccugggccugcugagccagagaaccagagacaucuacaucagcagaagaagaagaggcaccuucaccuggacccugagcgacagcgagggcaacgccacccccggcggcuacugccugaccagauggaugcugaucgaggccgagcugaagugcuucggcaacaccgccguggccaagugcaacgagaagcacgacgaggaguucugcgacaugcugagacuguucgacuucaacaagcaggccaucagcagacugaagagccccgcccagaugagcauccagcugaucaacaaggccgugaacgcccugaucaacgaccagcugaucaugaagaaccaccugagagacaucaugggcauccccuacugcaacuacagcaaguacugcuaccugaaccacaccaucaccggcaagaccagccugcccaagugcugccuggugagcaacggcagcuaccugaacgagacccacuucagcgacgacaucgagcagcaggccgacaacaugaucaccgagaugcugcagaaggaguacauggagagacagggcaagaccccccugggccugguggaccuguucguguucagcaccagcuucuaccugaucagcaucuuccugagacuggugaagauccccacccacagacacaucgugggcaagcccugccccaagccccacagacugaaccacaugggcaucugcagcugcggccuguacaagcagcccggcgugcccgugagauggaagagaugaggacuagucccuguucccagagcccacuuuuuuuucuuuuuuugaaauaaaauagccugucuuucagaucucaaaggcucuuuucagagccaccaaaaaaaaaaaaaaaaaaaaaaaaaaaaaaaaaaaaaaaaaaaaaaaaaaaaaaaaaaaaaaaaaaaaaaaaaaaaaaaaaaaaaaaaaaaaaaaaaaaaa

SEQ ID NO: 25386 - RNA, 1764 nt, Artificial Sequence
  mRNA product Design a-2 (hSL-A100) comprising derived and/or modified sequence from LASV(Togo/2016/7082;Clade VI)__AMR44577__GPCmut3 (opt4)
aggagaguccgcucagccagguugcagaagcggcuuagcguguguccuaaucuucucucugcguguagguaggccugugccgcaaacaagcuuaccaugggccagaucaucaccuucuuccaggaggugccccacgugaucgaggaggugaugaacaucgugcugaucgcccugagccugcuggccauccugaagggcguguacaacguggccaccugcggcaucaucggccuggugaccuuccuguuccugugcggcagaagcugcagccugaucuacaagggcagcuacgagcugcagacccuggagcugaacauggagacccugaacaugaccaugccccugagcugcaccaagaacagcagccaccacuacaucagagugggcaacgagaccggccuggagcugacccugaccaacaccagcaucaucaaccacaaguucugcaaccugagcgacgcccacaagagaaaccuguacgaccacgcccugaugagcauccugagcaccuuccaccugagcauccccaacuucaaccaguacgaggccaugagcugcgacuucaacggcggcaagaucagcgugcaguacaaccugagccacgccuacgccguggacgccgccgagcacugcggcaccguggccaacggcgugcugcagaccuucaugagaauggccuggggcggcagcuacaucgcccuggacagcggcagaggcaacugggacugcaucaugaccagcuaccaguaccugaucauccagaacaccaccugggaggaccacugccaguucagcagacccagccccaucggcuaccugggccugcugagccagagaaccagagacaucuacaucagcagaagaagaagaggcaccuucaccuggacccugagcgacagcgagggcaacgagacccccggcggcuacugccugaccagauggaugcugaucgaggccgagcugaagugcuucggcaacaccgccguggccaagugcaacgagaagcacgacgaggaguucugcgacaugcugagacuguucgacuucaacaagcaggccauccagagacugaagagccccgcccagaugagcauccagcugaucaacaaggccgugaacgcccugaucaacgaccagcugaucaugaagaaccaccugagagacaugaugggcauccccuacugcaacuacagcaaguacugcuaccugaaccacaccagcagcggcagaaccagccugcccaagugcugccuggugagcaacggcagcuaccugaacgagacccacuucagcgacgacaucgagcagcaggccgacaacaugaucaccgagaugcugcagaaggaguacaucgacagacagggcaagaccccccugggccugguggaccuguucguguucagcaccagcuucuaccugaucagcaucuuccugcaccugaucaagauccccacccacagacacaucgugggcaagcccugccccaagccccacagacugaaccacaugggcaucugcagcugcggccuguacaagcagcccggcgugcccaccagauggaagagaugaggacuagucccuguucccagagcccacuuuuuuuucuuuuuuugaaauaaaauagccugucuuucagaucucaaaggcucuuuucagagccaccaaaaaaaaaaaaaaaaaaaaaaaaaaaaaaaaaaaaaaaaaaaaaaaaaaaaaaaaaaaaaaaaaaaaaaaaaaaaaaaaaaaaaaaaaaaaaaaaaaaaa

SEQ ID NO: 25387 - RNA, 1764 nt, Artificial Sequence
  mRNA product Design a-2 (hSL-A100) comprising derived and/or modified sequence from LASV(KAK-428;Clade n.d. (VII))__ANH09740__GPCmut3 (opt4)
aggagaguccgcucagccagguugcagaagcggcuuagcguguguccuaaucuucucucugcguguagguaggccugugccgcaaacaagcuuaccaugggccagaucgugaccuucuuccaggaggugccccacgugaucgaggaggugaugaacaucgugcugaucgcccugagccugcuggccauccugaagggccuguacaacuucgccaccugcggcgugaucggccugaucaccuuccugcugcugugcggcagaagcugcagcgccaccuacaagggccaguacgagcugcagacccuggagcugaacauggagagccugaacaugaccaugccccugagcugcaccaagaacaacagccaccacuacaucagagccggcaacaacaccggccuggagcugacccugaccaacaccagcaucaucagccacaaguucugcaaccugagcgacgcccacaagaagaaccuguacgaccacacccugaugagcaucaucaccaccuuccaccugagcauccccaacuucaaccaguacgaggccaugagcugcgacuucaacggcggcaagaucagcauccaguacaaccugagccacagcuacgccggcgacgccgcccagcacugcggcaccguggccaacggcgugcugcagaccuucaugagaauggccuggggcggcagcuaccuggcccuggacagcggcagaagaggcugggacugcaucaucagcagcuaccaguaccugaucauccagaacaccaccugggacgaccacugccaguucagcagacccagccccaucggcuaccugggcuucgugagccagaagaccagagacaucuacaucagcagaagaagaagaggcaccuucaccuggacccugagcgacagcgagggccacgacaugcccggcggcuacugccugaccagauggaugcugaucgaggccgaccugaagugcuucggcaacaccgccguggccaagugcaacgagaagcacgacgaggaguucugcgacauguggagacuguucgacuucaacaagcaggccauccagagacugaaggcccccgcccagaugaacauccagcugaucaacaaggccgugaacgcccugaucaacgaccagcugaugaugaagaaccaccugagagacaucaugggcauccccuacugcaacuacagcaaguucugcuaccugaacaacaccaccaccggcagaaccagccugcccagaugcugccugaucagcaacggcagcuaccugaacgagacccacuucagcgacgacaucgagcagcaggccgacaacaugaucaccgagaugcugcagaaggaguacauggacagacagggcaagaccccccugggccugguggaccuguucguguucagcaccagcuucuaccugaucaccaucuuccugcaccuggugaagauccccacccacagacacaucgugggcaagcccugccccaagccccacagacugaaccacaugggcaucugcagcugcggccuguacaagcagcccggcgugcccgugagauggaagagaugaggacuagucccuguucccagagcccacuuuuuuuucuuuuuuugaaauaaaauagccugucuuucagaucucaaaggcucuuuucagagccaccaaaaaaaaaaaaaaaaaaaaaaaaaaaaaaaaaaaaaaaaaaaaaaaaaaaaaaaaaaaaaaaaaaaaaaaaaaaaaaaaaaaaaaaaaaaaaaaaaaaaa

SEQ ID NO: 25388 - RNA, 1764 nt, Artificial Sequence; identical to SEQ ID NO: 25382
  mRNA product Design a-2 (hSL-A100) comprising derived and/or modified sequence from LASV(Pinneo-NIG-1969;Clade I)__AIT17836__GPCmut3 (opt4)

SEQ ID NO: 25389 - RNA, 1764 nt, Artificial Sequence
  mRNA product Design a-2 (hSL-A100) comprising derived and/or modified sequence from LASV(ISTH0009-NIG-2011;Clade II)__AIT17404__GPCmut3 (opt4)
aggagaguccgcucagccagguugcagaagcggcuuagcguguguccuaaucuucucucugcguguagguaggccugugccgcaaacaagcuuaccaugggccagaucaucaccuucuuccaggaggugccccacgugaucgaggaggugaugaacaucgugcugaucgcccugagccugcuggccauccugaagggcaucuacaacguggccaccugcggccuguucggccuggugagcuuccugcugcugugcggcagaagcugcagcaccaccuacaagggcguguacgagcugcagacccuggagcuggacauggccagccugaacaugaccaugccccugagcugcaccaagaacaacagccaccacuacaucauggugggcaacgagaccggccuggagcugacccugaccaacaccagcaucaucaaccacaaguucugcaaccugagcgacgcccacaagaagaaccuguacgaccacgcccugaugagcaucaucagcaccuuccaccugagcauccccaacuucaaccaguacgaggccaugagcugcgacuucaacggcggcaagaucagcgugcaguacaaccugagccacgccuacgccguggacgccgccaaccacugcggcaccaucgccaacggcgugcugcagaccuucaugagaauggccuggggcggcagcuacaucgcccuggacagcggcaagggcagcugggacugcaucaugaccagcuaccaguaccugaucauccagaacaccaccugggaggaccacugccaguucagcagacccagccccaucggcuaccugggccugcugagccagagaaccagagacaucuacaucagcagaagaagaagaggcaccuucaccuggacccugagcgacagcgagggcaacgagacccccggcggcuacugccugaccagauggaugcugaucgaggccgagcugaagugcuucggcaacaccgccguggccaagugcaacgagaagcacgacgaggaguucugcgacaugcugagacuguucgacuucaacaagcaggccaucagaagacugaagacccccgcccagaugagcauccagcugaucaacaaggccgugaacgcccugaucaacgaccagcugaucaugaagaaccaccugagagacaucaugggcauccccuacugcaacuacagcaaguacugcuaccugaaccacaccgugaccggcaagaccagccugcccagaugcugccuggugagcaacggcagcuaccugaacgagacccacuucagcgacgacaucgagcagcaggccgacaacaugaucaccgagcugcugcagaaggaguacauggacagacagggcaagaccccccugggccugguggaccuguucguguucagcaccagcuucuaccugaucagcaucuuccugcaccugaucaagauccccacccacagacacaucaccggcaagcccugccccaagccccacagacugaaccacaugggcaucugcagcugcggccuguacaagcaccccggcgugcccgugaaguggaagagaugaggacuagucccuguucccagagcccacuuuuuuuucuuuuuuugaaauaaaauagccugucuuucagaucucaaaggcucuuuucagagccaccaaaaaaaaaaaaaaaaaaaaaaaaaaaaaaaaaaaaaaaaaaaaaaaaaaaaaaaaaaaaaaaaaaaaaaaaaaaaaaaaaaaaaaaaaaaaaaaaaaaaa

SEQ ID NO: 25390 - RNA, 1764 nt, Artificial Sequence
  mRNA product Design a-2 (hSL-A100) comprising derived and/or modified sequence from LASV(ISTH2010-NIG-2012;Clade II)__AIT17482__GPCmut3 (opt4)
aggagaguccgcucagccagguugcagaagcggcuuagcguguguccuaaucuucucucugcguguagguaggccugugccgcaaacaagcuuaccaugggccagaucaucaccuucuuccaggaggugccccacgugaucgaggaggugaugaacaucgugcugaucgcccugagccugcuggccauccugaagggcaucuacaacguggccaccugcggccuguucggccuggugagcuuccugcugcugugcggcagaagcugcagcaccaccuacaagggcguguacgagcugcagacccuggagcuggacauggccagccugaacaugaccaugccccugagcugcaccaagaacaacagccaccacuacaucauggugggcaacgagaccggccuggagcugacccugaccaacaccagcaucaucaaccacaaguucugcaaccugagcgacgcccacaagaagaaccuguacgaccacgcccugaugagcaucaucagcaccuuccaccugagcauccccaacuucaaccaguacgaggccaugagcugcgacuucaacggcggcaagaucagcgugcaguacaaccugagccacgccuacgccguggacgccgccaaccacugcggcaccaucgccaacggcgugcugcagaccuucaugagaauggccuggggcggcagcuacaucgcccuggacagcggcaagggcagcugggacugcaucaugaccagcuaccaguaccugaucauccagaacaucaccugggaggaccacugccaguucagcagacccagccccaucggcuaccugggccugcugagccagagaaccagagacaucuacaucagcagaagaagaagaggcaccuucaccuggacccugagcgacagcgagggcaacgagacccccggcggcuacugccugaccagauggaugcugaucgaggccgagcugaagugcuucggcaacaccgccguggccaagugcaacgagaagcacgacgaggaguucugcgacaugcugagacuguucgacuucaacaagcaggccaucagaagacugaagacccccgcccagaugagcauccagcugaucaacaaggccgugaacgcccugaucaacgaccagcugaucaugaagaaccaccugagagacaucaugggcauccccuacugcaacuacagcaaguacugcuaccugaaccacaccgugaccggcaagaccagccugcccagaugcugccuggugagcaacggcagcuaccugaacgagacccacuucagcgacgacaucgagcagcaggccgacaacaugaucaccgagcugcugcagaaggaguacaucgacagacagggcaagaccccccugggccugguggaccuguucguguucagcaccagcuucuaccugaucagcaucuuccugcaccuggugaagauccccacccacagacacguggugggcaagcccugccccaagccccacagacugaaccacaugggcaucugcagcugcggccuguacaagcaccccggcgugcccgugaaguggaagagaugaggacuagucccuguucccagagcccacuuuuuuuucuuuuuuugaaauaaaauagccugucuuucagaucucaaaggcucuuuucagagccaccaaaaaaaaaaaaaaaaaaaaaaaaaaaaaaaaaaaaaaaaaaaaaaaaaaaaaaaaaaaaaaaaaaaaaaaaaaaaaaaaaaaaaaaaaaaaaaaaaaaaa

SEQ ID NO: 25391 - RNA, 1764 nt, Artificial Sequence
  mRNA product Design a-2 (hSL-A100) comprising derived and/or modified sequence from LASV(Lassa virus/H.sapiens-wt/NGA/2015/ISTH_0543;Clade II)__AVO03639__GPCmut3 (opt4)
aggagaguccgcucagccagguugcagaagcggcuuagcguguguccuaaucuucucucugcguguagguaggccugugccgcaaacaagcuuaccaugggccagaucaucaccuucuuccaggaggugccccacgugaucgaggaggugaugaacaucgugcugaucgcccugagccugcuggccauccugaagggcaucuacaacguggccaccugcggccuguucggccuggugagcuuccugcugcugugcggcagaagcugcagcaccaccuacaagggcguguacgagcugcagacccuggagcuggacauggccaaccugaacaugaccaugccccugagcugcaccaagaacaacagccaccacuacaucauggugggcaacgagaccggccuggagcugacccugaccaacaccagcaucaucaaccacaaguucugcaaccugagcgacgcccacaagaagaaccuguacgaccacgcccugaugagcaucaucagcaccuuccaccugagcauccccaacuucaaccaguacgaggccaugagcugcgacuucaacggcggcaagaucagcgugcaguacaaccugagccacaccuacgccguggacgccgccaaccacugcggcaccaucgccaacggcgugcugcagaccuucaugagaauggccuggggcggcagcuacaucgcccuggacagcggcaagggcagcugggacugcaucaugaccagcuaccaguaccuggugauccagaacaccaccugggaggaccacugccaguucagcagacccagccccaucggcuaccugggccugcugagccagagaaccagagacaucuacaucagcagaagaagaagaggcaccuucaccuggacccugagcgacagcgagggcaacgagacccccggcggcuacugccugaccagauggaugcugaucgaggccgagcugaagugcuucggcaacaccgccguggccaagugcaacgagaagcacgacgaggaguucugcgacaugcugagacuguucgacuucaacaagcaggccaucagaagacugaagacccccgcccagaugagcauccagcugaucaacaaggccgugaacgcccugaucaacgaccagcugaucaugaagaaccaccugagagacaucaugggcauccccuacugcaacuacagcaaguacugcuaccugaaccacaccgugaccggcaagaccagccugcccagaugcugccuggugagcaacggcagcuaccugaacgagacccacuucagcgacgacaucgagcagcaggccgacaacaugaucaccgagcugcugcagaaggaguacaucgacagacagggcaagaccccccugggccugguggaccuguucguguucagcaccagcuucuaccugaucagcaucuuccugcaccuggugaagauccccacccacagacacaucaccggcaagcccugccccaagccccacagacugaaccacaugggcaucugcagcugcggccuguacaagcaccccggcgugcccgugaaguggaagagaugaggacuagucccuguucccagagcccacuuuuuuuucuuuuuuugaaauaaaauagccugucuuucagaucucaaaggcucuuuucagagccaccaaaaaaaaaaaaaaaaaaaaaaaaaaaaaaaaaaaaaaaaaaaaaaaaaaaaaaaaaaaaaaaaaaaaaaaaaaaaaaaaaaaaaaaaaaaaaaaaaaaaa

SEQ ID NO: 25392 - RNA, 1764 nt, Artificial Sequence
  mRNA product Design a-2 (hSL-A100) comprising derived and/or modified sequence from LASV(Lassa virus/H.sapiens-wt/NGA/2016/ISTH_0009;Clade II)__AVO03571__GPCmut3 (opt4)
aggagaguccgcucagccagguugcagaagcggcuuagcguguguccuaaucuucucucugcguguagguaggccugugccgcaaacaagcuuaccaugggccagaucaucaccuucuuccaggaggugccccacgugaucgaggaggugaugaacaucgugcugaucgcccugagccugcuggccauccugaagggcaucuacaacguggccaccugcggccugcugggccuggugagcuuccugcugcugugcggcagaagcugcagcaccaccuacaagggcguguacgagcugcagacccuggagcuggacauggccagccugaacaugaccaugccccugagcugcaccaagaacaacagccaccacuacaucauggugggcaacgagaccggccuggagcugacccugaccaacaccagcaucaucaaccacaaguucugcaaccugagcgacgcccacaagaagaaccuguacgaccacgcccugaugagcaucaucagcaccuuccaccugagcauccccaacuucaaccaguacgaggccaugagcugcgacuucaacggcggcagaaucagcgugcaguacaaccugagccacagcuacgccguggacgccgccaaccacugcggcaccaucgccaacggcgugcugcagaccuucaugagaauggccuggggcggcagcuacaucgcccuggacagcggcaagggcagcugggacugcaucaugaccagcuaccaguaccugaucauccagaacaccaccugggaggaccacugccaguucagcagacccagccccaucggcuaccugggccugcugagccagagaaccagagacaucuacaucagcagaagaagaagaggcaccuucaccuggacccugagcgacagcgagggcaacgagacccccggcggcuacugccugaccagauggaugcugaucgaggccgagcugaagugcuucggcaacaccgccguggccaagugcaacgagaagcacgacgaggaguucugcgacaugcugagacuguucgacuucaacaagcaggccaucagaagacugaagacccccgcccagaugagcauccagcugaucaacaaggccgugaacgcccugaucaacgaccagcugaucaugaagaaccaccugagagacaucaugggcauccccuacugcaacuacagcaaguacugcuaccugaaccacaccgugaccggcaagaccagccugcccagaugcugccuggugagcaacggcagcuaccugaacgagacccacuucagcgacgacaucgagcagcaggccgacaacaugaucaccgagcugcugcagaaggaguacaucgacagacagggcaagaccccccugggccugguggaccuguucguguucagcaccagcuucuaccugaucagcaucuuccugcaccuggugaagauccccacccacagacacaucaccggcaagcccugccccaagccccacagacugaaccacaugggcaucugcagcugcggccuguacaaccaccccggcgugcccgugaaguggaagagaugaggacuagucccuguucccagagcccacuuuuuuuucuuuuuuugaaauaaaauagccugucuuucagaucucaaaggcucuuuucagagccaccaaaaaaaaaaaaaaaaaaaaaaaaaaaaaaaaaaaaaaaaaaaaaaaaaaaaaaaaaaaaaaaaaaaaaaaaaaaaaaaaaaaaaaaaaaaaaaaaaaaaa

SEQ ID NO: 25393 - RNA, 1764 nt, Artificial Sequence
  mRNA product Design a-2 (hSL-A100) comprising derived and/or modified sequence from LASV(Lassa virus/H.sapiens-wt/NGA/2016/ISTH_0017;Clade II)__AVO03567__GPCmut3 (opt4)
aggagaguccgcucagccagguugcagaagcggcuuagcguguguccuaaucuucucucugcguguagguaggccugugccgcaaacaagcuuaccaugggccagaucaucaccuucuuccaggaggugccccacgugaucgaggaggugaugaacaucgugcugaucgcccugagccugcuggccauccugaagggcaucuacaacguggccaccugcggccuguucggccuggugagcuuccugcugcugugcggcagaagcugcagcaccaccuacaagggcguguacgagcugcagacccuggagcuggacauggccagccugaacaugaccaugccccugagcugcaccaagaacaacagccaccacuacaucauggugggcaacgagaccggccuggagcugacccugaccaacaccagcaucaucaaccacaaguucugcaaccugagcgacgcccacaagaagaaccuguacgaccacgcccugaugagcaucaucagcaccuuccaccugagcauccccaacuucaaccaguacgaggccaugagcugcgacuucaacggcggcaagaucagcgugcaguacaaccugagccacaccuacgccaucgacgccgccaaccacugcggcaccaucgccaacggcgugcugcagaccuucaugagaauggccuggggcggcagcuacaucgcccuggacagcggcaagggcagcugggacugcaucaugaccagcuaccaguaccugaucauccagaacaccaccugggaggaccacugccaguucagcagacccagccccaucggcuaccugggccugcugagccagagaaccagagacaucuacaucagcagaagaagaagaggcaccuucaccuggacccugagcgacagcgagggcaacgagacccccggcggcuacugccugaccagauggaugcugaucgaggccgagcugaagugcuucggcaacaccgccguggccaagugcaacgagaagcacgacgaggaguucugcgacaugcugagacuguucgacuucaacaagcaggccaucagaagacugaagacccccgcccagaugagcauccagcugaucaacaaggccgugaacgcccugaucaacgaccagcugaucaugaagaaccaccugagagacaucaugggcauccccuacugcaacuacagcaaguacugcuaccugaaccacaccgugaccggcaagaccagccugcccagaugcugccuggugagcaacggcagcuaccugaacgagacccacuucagcgacgacaucgagcagcaggccgacaacaugaucaccgagcugcugcagaaggaguacauggacagacagggcaagaccccccugggccugguggaccuguucguguucagcaccagcuucuaccugaucagcaucuuccugcaccuggugagaauccccacccacagacacgugaucggcaagcccugccccaagccccacagacugaaccacaugggcaucugcagcugcggccuguacaagcaccccggcgugcccgugaaguggaagagaugaggacuagucccuguucccagagcccacuuuuuuuucuuuuuuugaaauaaaauagccugucuuucagaucucaaaggcucuuuucagagccaccaaaaaaaaaaaaaaaaaaaaaaaaaaaaaaaaaaaaaaaaaaaaaaaaaaaaaaaaaaaaaaaaaaaaaaaaaaaaaaaaaaaaaaaaaaaaaaaaaaaaa

SEQ ID NO: 25394 - RNA, 1764 nt, Artificial Sequence
  mRNA product Design a-2 (hSL-A100) comprising derived and/or modified sequence from LASV(Lassa virus/H.sapiens-wt/NGA/2018/ISTH_0959;Clade II)__AVV65099__GPCmut3 (opt4)
aggagaguccgcucagccagguugcagaagcggcuuagcguguguccuaaucuucucucugcguguagguaggccugugccgcaaacaagcuuaccaugggccagaucaucaccuucuuccaggaggugccccacgugaucgaggaggugaugaacaucgugcugaucgcccugagccugcuggccauccugaagggcaucuacaacguggugaccugcggccuguucggccuggugagcuuccugcugcugugcggcagaagcugcagcaccaccuacaagggcguguacgagcugcagacccuggagcuggacauggccagccugaacaugaccaugccccugagcugcaccaagaacaacagccaccacuacaucauggugggcaacgagaccggccuggagcugacccugaccaacaccagcaucaucaaccacaaguucugcaaccugagcgacgcccacaagaagaaccuguacgaccacgcccugaugagcaucaucagcaccuuccaccugagcauccccaacuucaaccaguacgaggccaugagcugcgacuucaacggcggcaagaucagcgugcaguacaaccugagccacgccuacgccaucgacgccgccaaccacugcggcaccaucgccaacggcgugcugcagaccuucaugagaauggccuggggcggcagcuacaucgcccuggacagcggcaagggcagcugggacugcaucaugaccagcuaccaguaccugaucauccagaacaccaccugggaggaccacugccaguucagcagacccagccccaucggcuaccugggccugcugagccagagaaccagagacaucuacaucagcagaagaagaagaggcaccuucaccuggacccugagcgacagcgagggcaacgagacccccggcggcuacugccugaccagauggaugcugaucgaggccgagcugaagugcuucggcaacaccgccguggccaagugcaacgagaagcacgacgaggaguucugcgacaugcugagacuguucgacuucaacaagcaggccaucagaagacugaagacccccgcccagaugagcauccagcugaucaacaaggccgugaacgcccugaucaacgaccagcugaucaugaagaaccaccugagagacaucaugggcauccccuacugcaacuacagcaaguacugcuaccugaaccacaccgugaccggcaagaccagccugcccagaugcugccuggugagcaacggcagcuaccugaacgagacccacuucagcgacgacaucgagcagcaggccgacaacaugaucaccgagcugcugcagaaggaguacaucgacagacagggcaagaccccccugggccugguggaccuguucguguucagcaccagcuucuaccugaucagcaucuuccugcaccuggugaagauccccacccacagacacgugaucggcaagcccugccccaagccccacagacugaaccacaugggcaucugcagcugcggccuguacaagcaccccggcgugcccgugaaguggaagagaugaggacuagucccuguucccagagcccacuuuuuuuucuuuuuuugaaauaaaauagccugucuuucagaucucaaaggcucuuuucagagccaccaaaaaaaaaaaaaaaaaaaaaaaaaaaaaaaaaaaaaaaaaaaaaaaaaaaaaaaaaaaaaaaaaaaaaaaaaaaaaaaaaaaaaaaaaaaaaaaaaaaaa

SEQ ID NO: 25395 - RNA, 1764 nt, Artificial Sequence
  mRNA product Design a-2 (hSL-A100) comprising derived and/or modified sequence from LASV(LASV003-NIG-2008;Clade II)__AIT17580__GPCmut3 (opt4)
aggagaguccgcucagccagguugcagaagcggcuuagcguguguccuaaucuucucucugcguguagguaggccugugccgcaaacaagcuuaccaugggccagaucaucaccuucuuccaggaggugccccacgugaucgaggaggugaugaacaucgugcugaucgcccugagccugcuggccauccugaagggcaucuacaacguggccaccugcggccuguucggccuggugagcuuccugcugcugugcggcagaagcugcagcaccaccuacaagggcguguacgagcugcagacccuggagcuggacauggccagccugaacaugaccaugccccugagcugcaccaagaacaacagccaccacuacaucauggugggcaacgagaccggccuggagcugacccugaccaacaccagcaucaucaaccacaaguucugcaaccugagcgacgcccacaagaagaaccuguacgaccacgcccugaugagcaucaucagcaccuuccaccugagcauccccaacuucaaccaguacgaggccaugagcugcgacuucaacggcggcaagaucagcgugcaguacaaccugagccacaccuacgccguggacgccgccaaccacugcggcaccaucgccaacggcgugcugcagaccuucaugagaauggccuggggcggcagcuacaucgcccuggacagcggcaagggcagcugggacugcaucaugaccagcuaccaguaccugaucauccagaacaccaccugggaggaccacugccaguucagcagacccagccccaucggcuaccugggccugcugagccagagaaccagagacaucuacaucagcagaagaagaagaggcaccuucaccuggacccugagcgacagcgagagcaacgagacccccggcggcuacugccugaccagauggaugcugaucgaggccgagcugaagugcuucggcaacaccgccguggccaagugcaacgagaagcacgacgaggaguucugcgacaugcugagacuguucgacuucaacaagcaggccaucagaagacugaaggcccccgcccagaugagcauccagcugaucaacaaggccgugaacgcccugaucaacgaccagcugaucaugaagaaccaccugagagacaucaugggcauccccuacugcaacuacagcaaguacugcuaccugaaccacaccgugaccggcagaaccagccugcccagaugcugccuggugagcaacggcagcuaccugaacgagacccacuucagcgacgacaucgagcagcaggccgacaacaugaucaccgagcugcugcagaaggaguacauggacagacagggcaagaccccccugggccugguggaccuguucguguucagcaccagcuucuaccugaucagcaucuuccugcaccuggugaagauccccacccacagacacgugaucggcaagcccugccccaagccccacagacugaaccacaugggcaucugcagcugcggccuguacaagcaccccggcgugcccgugaaguggaagagaugaggacuagucccuguucccagagcccacuuuuuuuucuuuuuuugaaauaaaauagccugucuuucagaucucaaaggcucuuuucagagccaccaaaaaaaaaaaaaaaaaaaaaaaaaaaaaaaaaaaaaaaaaaaaaaaaaaaaaaaaaaaaaaaaaaaaaaaaaaaaaaaaaaaaaaaaaaaaaaaaaaaaa

SEQ ID NO: 25396 - RNA, 1764 nt, Artificial Sequence
  mRNA product Design a-2 (hSL-A100) comprising derived and/or modified sequence from LASV(LASV035-NIG-2009;Clade II)__AIT17588__GPCmut3 (opt4)
aggagaguccgcucagccagguugcagaagcggcuuagcguguguccuaaucuucucucugcguguagguaggccugugccgcaaacaagcuuaccaugggccagaucaucaccuucuuccaggaggugccccacgugaucgaggaggugaugaacaucgugcugaucgcccugagccugcuggccauccugaagggcaucuacaacguggccaccugcggccuguucggccuggugagcuuccugcugcugugcggcagaagcugcagcaccaccuacaagggcguguacgagcugcagacccuggagcuggacauggccagccugaacaugaccaugccccugagcugcaccaagaacaacagccaccacuacaucauggugggcaacgagaccggccuggagcugacccugaccaacaccagcaucaucaaccacaaguucugcaaccugagcgacgcccacaagaagaaccuguacgaccacgcccugaugagcaucaucagcaccuuccaccugagcauccccaacuucaaccaguacgaggccaugagcugcgacuucaacggcggcaagaucagcgugcaguacaaccugagccacgccuacgccguggacgccgccaaccacugcggcaccaucgccaacggcgugcugcagaccuucaugagaauggccuggggcggcagcuacaucgcccuggacagcggcaagggcagcugggacugcaucaugaccagcuaccaguaccugaucauccagaacaccaccugggaggaccacugccaguucagcagacccagccccaucggcuaccugggccugcugagccagagaaccagagacaucuacaucagcagaagaagaagaggcaccuucaccuggacccugagcgacagcgagggcaacgagacccccggcggcuacugccugaccagauggaugcugaucgaggccgagcugaagugcuucggcaacaccgccguggccaagugcaacgagaagcacgacgaggaguucugcgacaugcugagacuguucgacuucaacaagcaggccaucagaagacugaaggcccccgcccagaugagcauccagcugaucaacaaggccgugaacgcccugaucaacgaccagcugaucaugaagaaccaccugagagacaucaugggcauccccuacugcaacuacagcaaguacugcuaccugaaccacaccgugaccggcaagaccagccugcccagaugcugccuggugagcaacggcagcuaccugaacgagacccacuucagcgacgacaucgagcagcaggccgacaacaugaucaccgagcugcugcagaaggaguacaucgacagacagggcaagaccccccugggccugguggaccuguucguguucagcaccagcuucuaccugaucagcaucuuccugcaccuggugaagauccccacccacagacacgugaucggcaagcccugccccaagccccacagacugaaccacaugggcaucugcagcugcggccuguacaagcaccccggcgugcccgugaaguggaagagaugaggacuagucccuguucccagagcccacuuuuuuuucuuuuuuugaaauaaaauagccugucuuucagaucucaaaggcucuuuucagagccaccaaaaaaaaaaaaaaaaaaaaaaaaaaaaaaaaaaaaaaaaaaaaaaaaaaaaaaaaaaaaaaaaaaaaaaaaaaaaaaaaaaaaaaaaaaaaaaaaaaaaa

SEQ ID NO: 25397 - RNA, 1764 nt, Artificial Sequence
  mRNA product Design a-2 (hSL-A100) comprising derived and/or modified sequence from LASV(LASV1000-NIG-2009;Clade II)__AIT17782__GPCmut3 (opt4)
aggagaguccgcucagccagguugcagaagcggcuuagcguguguccuaaucuucucucugcguguagguaggccugugccgcaaacaagcuuaccaugggccagaucaucaccuucuuccaggaggugccccacgugaucgaggaggugaugaacaucgugcugaucgcccugagccugcuggccauccugaagggcaucuacaacguggccaccugcggccuguucggccuggugagcuuccugcugcugugcggcagaagcugcagcaccaccuacaagggcguguacgagcugcagacccuggagcuggacauggccagccugaacaugaccaugccccugagcugcaccaagaacaacagccaccacuacaucauggugggcaacgagaccggccuggagcugacccugaccaacaccagcaucaucaaccacaaguucugcaaccugagcgacgcccacaagaagaaccuguacgaccacgcccugaugagcaucaucagcaccuuccaccugagcauccccaacuucaaccaguacgaggccaugagcugcgacuucaacggcggcaagaucagcgugcaguacaaccugagccacaccuacgccguggacgccgccaaccacugcggcaccaucgccaacggcgugcugcagaccuucaugagaauggccuggggcggcagcuacaucgcccuggacagcggcaagggcagcugggacugcaucaugaccagcuaccaguaccugaucauccagaacaccaccugggaggaccacugccaguucagcagacccagccccaucggcuaccugggccugcugagccagagaaccagagacaucuacaucagcagaagaagaagaggcaccuucaccuggacccugagcgacagcgagggcaacgagacccccggcggcuacugccugaccagauggaugcugaucgaggccgagcugaagugcuucggcaacaccgccguggccaagugcaacgagaagcacgacgaggaguucugcgacaugcugagacuguucgacuucaacaagcaggccaucaagagacugaagacccccgcccagaugagcauccagcugaucaacaaggccgugaacgcccugaucaacgaccagcugaucaugaagaaccaccugagagacaucaugggcauccccuacugcaacuacagcaaguacugcuaccugaaccacaccgugaccggcaagaccagccugcccagaugcugccuggugagcaacggcagcuaccugaacgagacccacuucagcgacgacaucgagcagcaggccgacaacaugaucaccgagcugcugcagaaggaguacaucgacagacagggcaagaccccccugggccugguggaccuguucguguucagcaccagcuucuaccugaucagcaucuuccugcaccuggugaagauccccacccacagacacguggugggcaagcccugccccaagccccacagacugaaccacaugggcaucugcagcugcggccuguacaagcaccccggcgugcccgugaaguggaagagaugaggacuagucccuguucccagagcccacuuuuuuuucuuuuuuugaaauaaaauagccugucuuucagaucucaaaggcucuuuucagagccaccaaaaaaaaaaaaaaaaaaaaaaaaaaaaaaaaaaaaaaaaaaaaaaaaaaaaaaaaaaaaaaaaaaaaaaaaaaaaaaaaaaaaaaaaaaaaaaaaaaaaa

SEQ ID NO: 25398 - RNA, 1764 nt, Artificial Sequence
  mRNA product Design a-2 (hSL-A100) comprising derived and/or modified sequence from LASV(LASV221-NIG-2010;Clade II)__AIT17624__GPCmut3 (opt4)
aggagaguccgcucagccagguugcagaagcggcuuagcguguguccuaaucuucucucugcguguagguaggccugugccgcaaacaagcuuaccaugggccagaucaucaccuucuuccaggaggugccccacgugaucgaggaggugaugaacaucgugcugaucgcccugagccugcuggccauccugaagggcaucuacaacguggccaccugcggccuguucggccuggugagcuuccugcugcugugcggcagaagcugcagcaccaccuacaagggcguguacgagcugcagacccuggagcuggacauggccagccugaacaugaccaugccccugagcugcaccaagaacaacagccaccacuacaucauggugggcaacgagaccggccuggagcugacccugaccaacaccagcaucaucaaccacaaguucugcaaccugagcgacgcccacaagaagaaccuguacgaccacgcccugaugagcaucaucagcaccuuccaccugagcauccccaacuucaaccaguacgaggccaugagcugcgacuucaacggcggcaagaucagcgugcaguacaaccugagccacaccuacgccaucgacgccgccaaccacugcggcaccaucgccaacggcgugcugcagaccuucaugagaauggccuggggcggcagcuacaucgcccuggacagcggcaagggcagcugggacugcaucaugaccagcuaccaguaccugaucauccagaacaccaccugggaggaccacugccaguucagcagacccagccccaucggcuaccugggccugcugagccagagaaccagagacaucuacaucagcagaagaagaagaggcaccuucaccuggacccugagcgacagcgagggcaacgagacccccggcggcuacugccugaccagauggaugcugaucgaggccgagcugaagugcuucggcaacaccgccguggccaagugcaacgagaagcacgacgaggaguucugcgacaugcugagacuguucgacuucaacaagcaggccaucagaagacugaagacccccgcccagaugagcauccagcugaucaacaaggccgugaacgcccugaucaacgaccagcugaucaugaagaaccaccugagagacaucaugggcauccccuacugcaacuacagcaaguacugcuaccugaaccacaccgugaccggcaagaccagccugcccagaugcugccuggugagcaacggcagcuaccugaacgagacccacuucagcgacgacaucgagcagcaggccgacaacaugaucaccgagaugcugcagaaggaguacauggacagacagggcaagaccccccugggccugguggaccuguucguguucagcaccagcuucuaccugaucagcaucuuccugcaccuggugaagauccccacccacagacacgugaucggcaagcccugccccaagccccacagacugaaccacaugggcaucugcagcugcggccuguacaagcaccccggcgugcccgugaaguggaagagaugaggacuagucccuguucccagagcccacuuuuuuuucuuuuuuugaaauaaaauagccugucuuucagaucucaaaggcucuuuucagagccaccaaaaaaaaaaaaaaaaaaaaaaaaaaaaaaaaaaaaaaaaaaaaaaaaaaaaaaaaaaaaaaaaaaaaaaaaaaaaaaaaaaaaaaaaaaaaaaaaaaaaa

SEQ ID NO: 25399 - RNA, 1764 nt, Artificial Sequence
  mRNA product Design a-2 (hSL-A100) comprising derived and/or modified sequence from LASV(LASV237-NIG-2010;Clade II)__AIT17638__GPCmut3 (opt4)
aggagaguccgcucagccagguugcagaagcggcuuagcguguguccuaaucuucucucugcguguagguaggccugugccgcaaacaagcuuaccaugggccagaucaucaccuucuuccaggaggugccccacgugaucgaggaggugaugaacaucgugcugaucgcccugagccugcuggccauccugaagggcaucuacaacguggccaccugcggccuguucggccuggugagcuuccugcugcugugcggcagaagcugcagcaccaccuacaagggcguguacgagcugcagacccuggagcuggacauggccagccugaacaugaccaugccccugagcugcaccaagaacaacagccaccacuacaucauggugggcaacgagaccggccuggagcugacccugaccaacaccagcaucaucaaccacaaguucugcaaccugagcgacgcccacaagaaggaccuguacgaccacgcccugaugagcaucaucagcaccuuccaccugagcauccccaacuucaaccaguacgaggccaugagcugcgacuucaacggcggcaagaucagcgugcaguacaaccugagccacaccuacgccguggacgccgccaaccacugcggcaccaucgccaacggcgugcugcagaccuucaugagaauggccuggggcggcagcuacaucgcccuggacagcggcaagggcagcugggacugcaucaugaccagcuaccaguaccugaucauccagaacaccaccugggaggaccacugccaguucagcagacccagccccaucggcuaccugggccugcugagccagagaaccagagacaucuacaucagcagaagaagaagaggcaccuucaccuggacccugagcgacagcgagggcaacgagacccccggcggcuacugccugaccagauggaugcugaucgaggccgagcugaagugcuucggcaacaccgccguggccaagugcaacgagaagcacgacgaggaguucugcgacaugcugagacuguucgacuucaacaagcaggccaucagaagacugaagacccccgcccagaugagcauccagcugaucaacaaggccgugaacgcccugaucaacgaccagcugaucaugaagaaccaccugagagacaucaugggcauccccuacugcaacuacagcaaguacugcuaccugaaccacaccgugaccggcaagaccagccugcccagaugcugccuggugagcaacggcagcuaccugaacgagacccacuucagcgacgacaucgagcagcaggccgacaacaugaucaccgagcugcugcagaaggaguacauggacagacagggcaagaccccccugggccugguggaccuguucguguucagcaccagcuucuaccugaucagcaucuuccugcaccugaucaagauccccacccacagacacaucaccggcaagcccugccccaagccccacagacugaaccacaugggcaucugcagcugcggccuguacaagcaccccggcgugcccgugaaguggaagagaugaggacuagucccuguucccagagcccacuuuuuuuucuuuuuuugaaauaaaauagccugucuuucagaucucaaaggcucuuuucagagccaccaaaaaaaaaaaaaaaaaaaaaaaaaaaaaaaaaaaaaaaaaaaaaaaaaaaaaaaaaaaaaaaaaaaaaaaaaaaaaaaaaaaaaaaaaaaaaaaaaaaaa

SEQ ID NO: 25400 - RNA, 1764 nt, Artificial Sequence
  mRNA product Design a-2 (hSL-A100) comprising derived and/or modified sequence from LASV(LASV253-NIG-2011;Clade II)__AIT17670__GPCmut3 (opt4)
aggagaguccgcucagccagguugcagaagcggcuuagcguguguccuaaucuucucucugcguguagguaggccugugccgcaaacaagcuuaccaugggccagaucaucaccuucuuccaggaggugccccacgugaucgaggaggugaugaacaucgugcugaucgcccugagccugcuggccauccugaagggcaucuacaacguggccaccugcggccuguucggccuggugagcuuccugcugcugugcggcagaagcugcagcaccaccuacaagggcguguacgagcugcagacccuggagcuggacauggccagccugaacaugaccaugccccugagcugcaccaagaacaacagccaccacuacaucauggugggcaacgagaccggccuggagcugacccugaccaacaccagcaucaucaaccacaaguucugcaaccugagcgacgcccacaagaagaaccuguacgaccacgcccugaugagcaucaucagcaccuuccaccugagcauccccaacuucaaccaguacgaggccaugagcugcgacuucaacggcggcaagaucagcgugcaguacaaccugagccacaccuacgccguggacgccgccaaccacugcggcaccaucgccaacggcgugcugcagaccuucaugagaauggccuggggcggcagcuacaucgcccuggacagcggcaagggcagcugggacugcaucaugaccagcuaccaguaccugaucauccagaacaccaccugggaggaccacugccaguucagcagacccagccccaucggcuaccugggccugcugagccagagaaccagagacaucuacaucagcagaagaagaagaggcaccuucaccuggacccugagcgacagcgagggcaacgagacccccggcggcuacugccugaccagauggaugcugaucgaggccgagcugaagugcuucggcaacaccgccguggccaagugcaacgagaagcacgacgaggaguucugcgacaugcugagacuguucgacuucaacaagcaggccaucagaagacugaaggcccccgcccagaugagcauccagcugaucaacaaggccgugaacgcccugaucaacgaccagcugaucaugaagaaccaccugagagacaucaugggcauccccuacugcaacuacagcaaguacugcuaccugaaccacaccgugaccggcagaaccagccugcccagaugcugccuggugagcaacggcagcuaccugaacgagacccacuucagcgacgacaucgagcagcaggccgacaacaugaucaccgagcugcugcagaaggaguacaucgacagacagggcaagaccccccugggccugguggaccuguucguguucagcaccagcuucuaccugaucagcaucuuccugcaccuggugaagauccccacccacagacacaucaucggcaagcccugccccaagccccacagacugaaccacaugggcaucugcagcugcggccuguacaagcaccccggcgugcccgugaaguggaagagaugaggacuagucccuguucccagagcccacuuuuuuuucuuuuuuugaaauaaaauagccugucuuucagaucucaaaggcucuuuucagagccaccaaaaaaaaaaaaaaaaaaaaaaaaaaaaaaaaaaaaaaaaaaaaaaaaaaaaaaaaaaaaaaaaaaaaaaaaaaaaaaaaaaaaaaaaaaaaaaaaaaaaa

SEQ ID NO: 25401 - RNA, 1764 nt, Artificial Sequence
  mRNA product Design a-2 (hSL-A100) comprising derived and/or modified sequence from LASV(LASV254-NIG-2011;Clade II)__AIT17674__GPCmut3 (opt4)
aggagaguccgcucagccagguugcagaagcggcuuagcguguguccuaaucuucucucugcguguagguaggccugugccgcaaacaagcuuaccaugggccagaucaucaccuucuuccaggaggugccccacgugaucgaggaggugaugaacaucgugcugaucgcccugagccugcuggccauccugaagggcaucuacaacguggccaccugcggccuguucggccuggugagcuuccugcugcugugcggcagaagcugcagcaccaccuacaagggcguguacgagcugcagacccuggagcuggacaugaccaaccugaacaugaccaugccccugagcugcaccaagaacaacagccaccacuacaucauggugggcaacgagaccggccuggagcugacccugaccaacaccagcaucaucaaccacaaguucugcaaccugagcgacgcccacaagaagaaccuguacaaccacgcccugaugagcaucaucagcaccuuccaccugagcauccccaacuucaaccaguacgaggccaugagcugcgacuucaacggcggcaagaucagcgugcaguacaaccugagccacagcuacgccguggacgccgccaaccacugcggcaccaucgccaacggcgugcugcagaccuucaugagaauggccuggggcggcagcuacaucgcccuggacagcggcaagggcaacugggacugcaucaugaccagcuaccaguaccugaucauccagaacaccaccugggaggaccacugccaguucagcagacccagccccaucggcuaccugggccugcugagccagagaaccagagacaucuacaucagcagaagaagaagaggcaccuucaccuggacccugagcgacagcgagggcaacgagacccccggcggcuacugccugaccagauggaugcugaucgaggccgagcugaagugcuucggcaacaccgccguggccaagugcaacgagaagcacgacgaggaguucugcgacaugcugagacuguucgacuucaacaagcaggccaucagaagacugaagacccccgcccaggccaacauccagcugaucaacaaggccgugaacgcccugaucaacgaccagcugaucaugaagaaccaccugagagacaucaugggcauccccuacugcaacuacagcaaguacugcuaccugaaccacaccgugaccggcaagaccagccugcccagaugcugccuggugagcaacggcagcuaccugaacgagacccacuucagcgacgacaucgagcagcaggccgacaacaugaucaccgagcugcugcagaaggaguacauggacagacagggcaagaccccccugggccugguggaccuguucguguucagcaccagcuucuaccugaucagcaucuuccugcaccuggugaagauccccacccacagacacgugaucggcaagcccugccccaagccccacagacugaaccacaugggcaucugcagcugcggccuguacaagcaccccggcgugcccgugaaguggaagagaugaggacuagucccuguucccagagcccacuuuuuuuucuuuuuuugaaauaaaauagccugucuuucagaucucaaaggcucuuuucagagccaccaaaaaaaaaaaaaaaaaaaaaaaaaaaaaaaaaaaaaaaaaaaaaaaaaaaaaaaaaaaaaaaaaaaaaaaaaaaaaaaaaaaaaaaaaaaaaaaaaaaaa

SEQ ID NO: 25402 - RNA, 1764 nt, Artificial Sequence
  mRNA product Design a-2 (hSL-A100) comprising derived and/or modified sequence from LASV(Nig08-A19;Clade III)__ADU56618__GPCmut3 (opt4)
aggagaguccgcucagccagguugcagaagcggcuuagcguguguccuaaucuucucucugcguguagguaggccugugccgcaaacaagcuuaccaugggccagaucgugaccuucuuccaggaggugccccacgugaucgaggaggugaugaacaucgugcugaucgcccugagcauccuggccauccugaagggccuguacaacaucgccaccugcggccugaucggccuggugaccuuccugcugcugagcggcagaagcugcagcaugaccuacaagggcguguacgagcugcagacccuggagcugaacaugaacacccugaacaugaccaugccccugagcugcaccaagaacaacagccaccacuacaucauggugggcaacgagaccggccuggagcugacccugaccaacaccagccugcugcaccacaaguucugcaaccugagcgacgcccacaagaagaaccuguacgaccacacccugaugagcaucaucagcaccuuccaccugagcauccccaacuucaaccaguacgaggccaugagcugcgacuucaacggcggcaagaucaccgugcaguacaaccugagccacagcuacgccaucgacgccgccaaccacugcggcaccguggccaacggcgugcugcagaccuucaugagaauggccuggggcggcagcuacaucgcccuggacagcggcagaggcaagugggacugcaucaugaccagcuaccaguaccugaucauccagaacaccaccugggaggaccacugccaguucagcagacccagccccaucggcuaccugggccugcugagccagagaaccagagacaucuacaucagcagaagaagaagaggcaccuucaccuggacccugagcgacagcgagggcaacgagacccccggcggcuacugccugaccagauggaugcugaucgaggccgagcugaagugcuucggcaacaccgccguggccaagugcaacgagaagcacgacgaggaguucugcgacaugcugagacuguucgacuucaacaagcaggccaucagaagacugaaggcccccgcccagaugagcauccagcugaucaacaaggccgugaacgcccugaucaacgaccagcugaucaugaagaaccaccugagagacaucaugggcauccccuacugcaacuacagcaaguacugcuaccugaaccacaccagcaccggcagaaccagccugcccagaugcugccuggugagcaacggcagcuaccugaacgagacccacuucagcgacgacaucgagcagcaggccgacaacaugaucaccgagaugcugcagaaggaguaccuggacagacagggcaagaccccccugggccugguggaccuguucguguucagcaccagcuucuaccugaucagcaucuuccugcaccuggugaagauccccacccacagacacaucgugggcaagcccugccccaagccccacagacugaaccacaugggcaucugcagcugcggccuguacaagcagcccggcgugcccgugagauggaagagaugaggacuagucccuguucccagagcccacuuuuuuuucuuuuuuugaaauaaaauagccugucuuucagaucucaaaggcucuuuucagagccaccaaaaaaaaaaaaaaaaaaaaaaaaaaaaaaaaaaaaaaaaaaaaaaaaaaaaaaaaaaaaaaaaaaaaaaaaaaaaaaaaaaaaaaaaaaaaaaaaaaaaa

SEQ ID NO: 25403 - RNA, 1767 nt, Artificial Sequence
  mRNA product Design a-2 (hSL-A100) comprising derived and/or modified sequence from LASV(G1180-SLE-2010;Clade IV)__AIT17168__GPCmut3 (opt4)
aggagaguccgcucagccagguugcagaagcggcuuagcguguguccuaaucuucucucugcguguagguaggccugugccgcaaacaagcuuaccaugggccagaucgugaccuucuuccaggaggugccccacgugaucgaggaggugaugaacaucgugcugaucgcccugagcauccuggccgugcugaagggccuguacaacuucgccaccugcggccuggugggccugcugaccuuccugcugcugugcggcagaagcugcaccgccagcagauacaagggcguguacgagcugcagacccuggagcugaacauggagacccugaacaugaccaugccccugagcugcaccaagaacaacagccaccacuacaucauggugggcaacgagaccggccuggagcugacccugaccaacaccagcaucaucaaccacaaguucugcaaccugagcgacgcccacaagaagaaccuguacgaccacgcccugaugagcaucaucagcaccuuccaccugagcauccccaacuucaaccaguacgaggccaugagcugcgacuucaacggcggcaagaucagcgugcaguacaaccugagccacagcuacgccggcgacgccgccaaccacugcggcaccguggccaacggcgugcugcagaccuucaugagaauggccuggggcggcagcuacaucgcccuggacagcggccacggcagcugggacugcaucaugaccagcuaccaguaccugaucauccagaacaccaccugggaggaccacugccaguucagcagacccagccccaucggcuaccugggccugcugagccagagaaccagagacaucuacaucagcagaagaagaagaggcaccuucaccuggacccugagcgacagcgagggcaaggacacccccggcggcuacugccugaccagauggaugcugaucgaggccgagcugaagugcuucggcaacaccgccguggccaagugcaacgagaagcacgacgaggaguucugcgacaugcugagacuguucgacuucaacaagcaggccauccagagacugaaggcccccgcccagaugagcauccagcugaucaacaaggccgugaacgcccugaucaacgaccagcugaucaugaagaaccaccugagagacaucaugggcauccccuacugcaacuacagcaaguacugcuaccugaaccacaccaccaccggcaagaccagccugcccaagugcugccuggugagcaacggcagcuaccugaacgagacccacuucagcgacgacaucgagcagcaggccgacaacaugaucaccgagaugcugcagaaggaguacauggagagacagggcaagaccccccugggccugguggaccuguucguguucagcaccagcuucuaccugaucagcaucuuccugcaccuggugaagauccccacccacagacacaucgugggcaagagcugccccaagccccacagacugaaccacaugggcaucugcagcugcggccuguacaagcagcccggcgugcccgugaaguggaagagaugaggacuagucccuguucccagagcccacuuuuuuuucuuuuuuugaaauaaaauagccugucuuucagaucucaaaggcucuuuucagagccaccaaaaaaaaaaaaaaaaaaaaaaaaaaaaaaaaaaaaaaaaaaaaaaaaaaaaaaaaaaaaaaaaaaaaaaaaaaaaaaaaaaaaaaaaaaaaaaaaaaaaa

SEQ ID NO: 25404 - RNA, 1767 nt, Artificial Sequence
  mRNA product Design a-2 (hSL-A100) comprising derived and/or modified sequence from LASV(G1442-SLE-2011;Clade IV)__AIT17180__GPCmut3 (opt4)
aggagaguccgcucagccagguugcagaagcggcuuagcguguguccuaaucuucucucugcguguagguaggccugugccgcaaacaagcuuaccaugggccagaucgugaccuucuuccaggaggugccccacgugaucgaggaggugaugaacaucgugcugaucgcccugagcauccuggccgugcugaagggccuguacaacguggccaccugcggccugaucggccuggugaccuuccugcugcugugcggcagaagcugcaccaccacccuguacaagggcguguacgagcugcagacccuggagcugaacauggagacccugaacaugaccaugccccugagcugcaccaagaacaacagccaccacuacaucagagugggcaacgagaccggccuggagcugacccugaccaacaccagcaucaucaaccacaaguucugcaaccugagcgacgcccacaagaagaaccuguacgaccacgcccugaugagcaucaucagcaccuuccaccugagcauccccaacuucaaccaguacgaggccaugagcugcgacuucaacggcggcaagaucagcgugcaguacaaccugagccacagcuacgccggcgacgccgccaaccacugcggcaccguggccaacggcgugcugcagaccuucaugagaauggccuggggcggcagcuacaucgcccuggacagcggcagaggcaacugggacugcaucaugaccagcuaccaguaccugaucauccagaacaccaccugggacgaccacugccaguucagcagacccagccccaucggcuaccugggccugcugagccagagaaccagagacguguacaucagcagaagaagaagaggcaccuucaccuggacccugagcgacagcgagggcaaggacacccccggcggcuacugccugaccagauggaugcugaucgaggccgagcugaagugcuucggcaacaccgccguggccaagugcaacgagaagcacgacgaggaguucugcgacaugcugagacuguucgacuucaacaagcaggccauccagagacugaaggcccccgcccagaugagcauccagcugaucaacaaggccgugaacgcccugaucaacgaccagcugaucaugaagaaccaccugagagacaucaugggcauccccuacugcaacuacagcaaguacugcuaccugaacaacaccgccaccggcaagaccagccugcccaagugcugccugaucagcaacggcagcuaccugaacgagacccacuucagcgacgacaucgagcaggaggccgacaacaugaucaccgagaugcugcagaaggaguacauggagagacagggcaagaccccccugggccugguggaccuguucguguucagcaccagcuucuaccugaucagcaucuuccugcaccuggugaagauccccacccacagacacaucgugggcaagagcugccccaagccccacagacugaaccacaugggcaucugcagcugcggccuguacaagcagcccggcgugcccgugagauggaagagaugaggacuagucccuguucccagagcccacuuuuuuuucuuuuuuugaaauaaaauagccugucuuucagaucucaaaggcucuuuucagagccaccaaaaaaaaaaaaaaaaaaaaaaaaaaaaaaaaaaaaaaaaaaaaaaaaaaaaaaaaaaaaaaaaaaaaaaaaaaaaaaaaaaaaaaaaaaaaaaaaaaaaa

SEQ ID NO: 25405 - RNA, 1767 nt, Artificial Sequence
  mRNA product Design a-2 (hSL-A100) comprising derived and/or modified sequence from LASV(G3010-SLE-2013;Clade IV)__AIT17344__GPCmut3 (opt4)
aggagaguccgcucagccagguugcagaagcggcuuagcguguguccuaaucuucucucugcguguagguaggccugugccgcaaacaagcuuaccaugggccagaucgugaccuucuuccaggaggugccccacgugaucgaggaggugaugaacaucgugcugaucgcccugagcauccuggccgugcugaagggccuguacaacuucgccaccugcggccuggugggccuggugaccuuccugcugcugugcggcagaagcugcaccaccagccuguacaagggcguguacgagcugcagacccuggagcugaacauggagacccugaacaugaccaugccccugagcugcaccaagaacaacagccaccacuacaucauggugggcaacgagaccggccuggagcugacccugaccaacaccagcaucaucaaccacaaguucugcaaccugagcgacgcccacaagaagaaccuguacaaccacgcccugaugagcaucaucagcaccuuccaccugagcauccccaacuucaaccaguacgaggccaugagcugcgacuucaacggcggcaagaucagcgugcaguacaaccugagccacagcuacgccggcgacgccgccagccacugcggcaccguggccaacggcgugcugcagaccuucaugagaauggccuggggcggcagcuacaucgcccuggacagcggcuacggcaagugggacugcaucaugaccagcuaccaguaccugaucauccagaacaccaccugggaggaccacugccaguucagcagacccagccccaucggcuaccugggccugcugagccagagaaccagagacaucuacaucagcagaagaagaagaggcaccuucaccuggacccugagcgacagcgagggcaaggacacccccggcggcuacugccugaccagauggaugcugaucgaggccgagcugaagugcuucggcaacaccgccguggccaagugcaacgagaagcacgacgaggaguucugcgacaugcugagacuguucgacuucaacaagcaggccauccagagacugaagacccccgcccagaugagcauccagcugaucaacaaggccgugaacgcccugaucaacgaccagcugaucaugaagaaccaccugagagacaucaugggcauccccuacugcaacuacagcaaguacugcuaccugaaccacaccaccaccggcaagaccagccugcccaagugcugccuggugagcaacggcagcuaccugaacgagacccacuucagcgacgacaucgagcagcaggccgacaacaugaucaccgagaugcugcagaaggaguacauggagagacagggcaagaccccccugggccugguggaccuguucguguucagcaccagcuucuaccugaucagcaucuuccugcaccuggugaagauccccacccacagacacaucgugggcaagagcugccccaagccccacagacugaaccacaugggcaucugcagcugcggccuguacaagcagcccggcgugcccgugagauggaagagaugaggacuagucccuguucccagagcccacuuuuuuuucuuuuuuugaaauaaaauagccugucuuucagaucucaaaggcucuuuucagagccaccaaaaaaaaaaaaaaaaaaaaaaaaaaaaaaaaaaaaaaaaaaaaaaaaaaaaaaaaaaaaaaaaaaaaaaaaaaaaaaaaaaaaaaaaaaaaaaaaaaaaa

SEQ ID NO: 25406 - RNA, 1767 nt, Artificial Sequence
  mRNA product Design a-2 (hSL-A100) comprising derived and/or modified sequence from LASV(G502-SLE-2009;Clade IV)__AIT17126__GPCmut3 (opt4)
aggagaguccgcucagccagguugcagaagcggcuuagcguguguccuaaucuucucucugcguguagguaggccugugccgcaaacaagcuuaccaugggccagaucgugaccuucuuccaggaggugccccacgugaucgaggaggugaugaacaucgugcugaucgcccugagcauccuggccgugcugaagggccuguacaacuucgccaccugcggccuggugggccugcugaccuuccugcugcugugcggcagaagcugcaccaccggccuguacaagggcguguacgagcugcagacccuggagcugaacauggagacccugaacaugaccaugccccugagcugcaccaagaacaacagccaccacuacaucauggugggcaacgagaccggccuggagcugacccugaccaacaccagcaucaucaaccacaaguucugcaaccugagcgacgcccacaagaagaaccuguacgaccacgcccugaugagcaucaucagcaccuuccaccugagcauccccaacuucaaccaguacgaggccaugagcugcgacuucaacggcggcaagaucagcgugcaguacaaccugagccacagcuacgccggcgacgccgccgaccacugcggcaccguggccaacggcgugcugcagaccuucaugagaauggccuggggcggcagcuacaucgcccuggacagcggcagaggcagaugggacugcaucaugaccagcuaccaguaccugaucauccagaacaccaccugggaggaccacugccaguucagcagacccagccccaucggcuaccugggccugcugagccagagaaccagagacaucuacaucagcagaagaagaagaggcaccuucaccuggacccugagcgacagcgagggcaaggacacccccggcggcuacugccugaccagauggaugcugaucgaggccgagcugaagugcuucggcaacaccgccguggccaagugcaacgagaagcacgacgaggaguucugcgacaugcugagacuguucgacuucaacaagcaggccauccagagacugaaggcccccgcccagaugagcauccagcugaucaacaaggccgugaacgcccugaucaacgaccagcuggugaugaagaaccaccugagagacaucaugggcauccccuacugcaacuacagcagauacugcuaccugaaccacaccaccaccggcagaaccagccugcccaagugcugccuggugagcaacggcagcuaccugaacgagacccacuucagcgacgacaucgagcagcaggccgacaacaugaucaccgagaugcugcagaaggaguacauggagagacagggcaagaccccccugggccugguggaccuguucguguucagcaccagcuucuaccugaucagcaucuuccugcaccuggugaagauccccacccacagacacaucgugggcaagagcugccccaagccccacagacugaaccacaugggcaucugcagcugcggccuguacaagcagcccggcgugcccgugaaguggaagagaugaggacuagucccuguucccagagcccacuuuuuuuucuuuuuuugaaauaaaauagccugucuuucagaucucaaaggcucuuuucagagccaccaaaaaaaaaaaaaaaaaaaaaaaaaaaaaaaaaaaaaaaaaaaaaaaaaaaaaaaaaaaaaaaaaaaaaaaaaaaaaaaaaaaaaaaaaaaaaaaaaaaaa

SEQ ID NO: 25407 - RNA, 1767 nt, Artificial Sequence
  mRNA product Design a-2 (hSL-A100) comprising derived and/or modified sequence from LASV(G733-SLE-2010;Clade IV)__AIT17154__GPCmut3 (opt4)
aggagaguccgcucagccagguugcagaagcggcuuagcguguguccuaaucuucucucugcguguagguaggccugugccgcaaacaagcuuaccaugggccagaucgugaccuucuuccaggaggugccccacgugaucgaggaggugaugaacaucgugcugaucgcccugagcauccuggccgugcugaagggccuguacaacuucgccaccugcggcaucgugggccuggugagcuuccugcugcugugcggcagaagcugcaccaccagccuguacaagggcguguacgagcugcagacccuggagcugaacauggagacccugaacaugaccaugccccugagcugcaccaagaacaacagccaccacuacaucauggugggcaacgagaccggccuggagcugacccugaccaacaccagcaucaucaaccacaaguucugcaaccugagcgacgcccacaagaagaaccuguacgaccacgcccugaugagcaucaucagcaccuuccaccugagcauccccaacuucaaccaguacgaggccaugagcugcgacuucaacggcggcaagaucagcgugcaguacaaccugagccacagcuacgccggcgacgccgccaaccacugcggcaccaucgccaacggcgugcugcagaccuucaugagaauggccuggggcggcagcuacaucgcccuggacagcggcagagacagaugggacugcaucaugaccagcuaccaguaccugaucauccagaacaccaccugggaggaccacugccaguucagcagacccagccccaucggcuaccugggccugcugagccagagaaccagagacaucuacaucagcagaagaagaagaggcaccuucaccuggacccugagcgacagcgagggcaaggacacccccggcggcuacugccugaccagauggaugcugaucgaggccgagcugaagugcuucggcaacaccgccguggccaagugcaacgagaagcacgacgaggaguucugcgacaugcugagacuguucgacuucaacaagcaggccauccagagacugaaggcccccgcccagaugagcauccagcugaucaacaaggccgugaacgcccugaucaacgaccagcugaucaugaagaaccaccugagagacaucaugggcauccccuacugcaacuacagcaaguacugcuaccugaaccacaccaccaccggcaagaccagccugcccaagugcugccuggugagcaacggcagcuaccugaacgagacccacuucagcgacgacaucgagcagcaggccgacaacaugaucaccgagaugcugcagaaggaguacauggagagacagggcaagaccccccugggccugguggaccuguucguguucagcaccagcuucuaccugaucagcaucuuccugcaccuggugaagauccccacccacagacacguggugggcaagagcugccccaagccccacagacugaaccacaugggcaucugcagcugcggccuguacggccagcccggcgugcccgugaaguggaagagaugaggacuagucccuguucccagagcccacuuuuuuuucuuuuuuugaaauaaaauagccugucuuucagaucucaaaggcucuuuucagagccaccaaaaaaaaaaaaaaaaaaaaaaaaaaaaaaaaaaaaaaaaaaaaaaaaaaaaaaaaaaaaaaaaaaaaaaaaaaaaaaaaaaaaaaaaaaaaaaaaaaaaa

SEQ ID NO: 25408 - RNA, 1767 nt, Artificial Sequence
  mRNA product Design a-2 (hSL-A100) comprising derived and/or modified sequence from MOPV/LASV reassortant(IGS-1;Clade IV)__AFY05576__GPCmut3 (opt4)
aggagaguccgcucagccagguugcagaagcggcuuagcguguguccuaaucuucucucugcguguagguaggccugugccgcaaacaagcuuaccaugggccagaucgugaccuucuuccaggaggugccccacgugaucgaggaggugaugaacaucgugcugaucgcccugagcgugcuggccgugcugaagggccuguacaacuucgccaccugcggccuggugggccuggugaccuuccugcugcugugcggcagaagcugcaccaccagccuguacaagggcguguacgagcugcagacccuggagcugaacauggagacccugaacaugaccaugccccugagcugcaccaagaacaacagccaccacuacaucauggugggcaacgagaccggccuggagcugacccugaccaacaccagcaucaucaaccacaaguucugcaaccugagcgacgcccacaagaagaaccuguacgaccacgcccugaugagcaucaucagcaccuuccaccugagcauccccaacuucaaccaguacgaggccaugagcugcgacuucaacggcggcaagaucagcgugcaguacaaccugagccacagcuacgccggcgacgccgccaaccacugcggcaccguggccaacggcgugcugcagaccuucaugagaauggccuggggcggcagcuacaucgcccuggacagcggcagaggcaacugggacugcaucaugaccagcuaccaguaccugaucauccagaacaccaccugggaggaccacugccaguucagcagacccagccccaucggcuaccugggccugcugagccagagaaccagagacaucuacaucagcagaagaagaagaggcaccuucaccuggacccugagcgacagcgagggcgaggacacccccggcggcuacugccugaccagauggaugcugaucgaggccgagcugaagugcuucggcaacaccgccguggccaagugcaacgagaagcacgacgaggaguucugcgacaugcugagacuguucgacuucaacaagcaggccauccagagacugaaggcccccgcccagaugagcauccagcugaucaacaaggccgugaacgcccugaucaacgaccagcugaucaugaagaaccaccugagagacaucaugggcauccccuacugcaacuacagcaaguacugcuaccugaaccacaccaccaccggcagaaccagccugcccaagugcugccuggugagcaacggcagcuaccugaacgagacccacuucagcgacgacaucgagcagcaggccgacaacaugaucaccgagaugcugcagaaggaguacauggagagacagggcaagaccccccugggccugguggaccuguucguguucagcaccagcuucuaccugaucagcaucuuccugcaccuggugaagauccccacccacagacacaucgugggcaagagcugccccaagccccacagacugaaccacaugggcaucugcagcugcggccuguacaagcagcccggcgugcccgugaaguggaagagaugaggacuagucccuguucccagagcccacuuuuuuuucuuuuuuugaaauaaaauagccugucuuucagaucucaaaggcucuuuucagagccaccaaaaaaaaaaaaaaaaaaaaaaaaaaaaaaaaaaaaaaaaaaaaaaaaaaaaaaaaaaaaaaaaaaaaaaaaaaaaaaaaaaaaaaaaaaaaaaaaaaaaa

SEQ ID NO: 25409 - RNA, 1767 nt, Artificial Sequence
  mRNA product Design a-2 (hSL-A100) comprising derived and/or modified sequence from LASV(LM765-SLE-2012;Clade IV)__AIT17814__GPCmut3 (opt4)
aggagaguccgcucagccagguugcagaagcggcuuagcguguguccuaaucuucucucugcguguagguaggccugugccgcaaacaagcuuaccaugggccagaucgugaccuucuuccaggaggugccccacgugaucgaggaggugaugaacaucgugcugaucgcccugagcauccuggccgugcugaagggccuguacaacuucgccaccugcggccuggugggccuggugaccuuccugcugcugugcggcagaagcugcaccaccagccuguacaagggcguguacgagcugcagacccuggagcugaacauggagacccugaacaugaccaugccccugagcugcaccaagaacaacagccaccacuacaucauggugggcaacgagaccggccuggagcugacccugaccaacaccagcaucaucgaccacaaguucugcaaccugagcgacgcccacagaaagaaccuguacgaccacgcccugaugagcaucaucagcaccuuccaccugagcauccccaacuucaaccaguacgaggccaugagcugcgacuucaacggcggcaagaucagcgugcaguacaaccugagccacagcuacgccaaggacgccgccgaccacugcggcaccguggccaacggcgugcugcagaccuucaugagaauggccuggggcggcagcuacaucgcccuggacagcggcagaggcagaugggacugcaucaugaccagcuaccaguaccugaucauccagaacaccaccugggaggaccacugccaguucagcagacccagccccaucggcuaccugggccugcugagccagagaaccagagacaucuacaucagcagaagaagaagaggcaccuucaccuggacccugagcgacagcgagggcaaggacacccccggcggcuacugccugaccagauggaugcugaucgaggccgagcugaagugcuucggcaacaccgccguggccaagugcaacgagaagcacgacgaggaguucugcgacaugcugagacuguucgacuucaacaagcaggccauccagagacugaaggcccccgcccagaugagcauccagcugaucaacaaggccgugaacgcccugaucaacgaccagcugaucaugaagaaccaccugagagacaucaugggcauccccuacugcaacuacagcaaguacugcuaccugaaccacaccaccaccggcaagaccagccugcccaagugcugccuggugagcaacggcagcuaccugaacgagacccacuucagcgacgacaucgagcagcaggccgacaacaugaucaccgagaugcugcagaaggaguacauggagagacagggcaagaccccccugggccugguggaccuguucguguucagcaccagcuucuaccugaucagcaucuuccugcaccuggugaagauccccacccacagacacaucgugggcaagcccugccccaagccccacagacugaaccacaugggcaucugcagcugcggccuguacaagcagcccggcgugcccgugaaguggaagagaugaggacuagucccuguucccagagcccacuuuuuuuucuuuuuuugaaauaaaauagccugucuuucagaucucaaaggcucuuuucagagccaccaaaaaaaaaaaaaaaaaaaaaaaaaaaaaaaaaaaaaaaaaaaaaaaaaaaaaaaaaaaaaaaaaaaaaaaaaaaaaaaaaaaaaaaaaaaaaaaaaaaaa

SEQ ID NO: 25410 - RNA, 1767 nt, Artificial Sequence
  mRNA product Design a-2 (hSL-A100) comprising derived and/or modified sequence from LASV(LM776-SLE-2012;Clade IV)__AIT17824__GPCmut3 (opt4)
aggagaguccgcucagccagguugcagaagcggcuuagcguguguccuaaucuucucucugcguguagguaggccugugccgcaaacaagcuuaccaugggccagaucgugaccuucuuccaggaggugccccacgugaucgaggaggugaugaacaucgugcugaucgcccugagcauccuggccgugcugaagggccuguacaacuucgccaccugcggccuggugggccuggugaccuuccugcugcugugcggcagaagcugcaccaccagcguguacaagggcguguacgagcugcagacccuggagcugaacauggagacccugaacaugaccaugccccugagcugcaccaagaacaacagccaccacuacaucauggugggcaacgagaccggccuggagcugacccugaccaacaccagcaucaucaaccacaaguucugcaaccugagcgacgcccacaagaagaaccuguacgaccacgcccugaugagcaucaucagcaccuuccaccugagcauccccaacuucaaccaguacgaggccaugagcugcgacuucaacggcggcaagaucagcgugcaguacaaccugagccacagcuacgccggcgacgccgccaaccacugcggcaccguggccaacggcgugcugcagaccuucaugagaauggccuggggcggcagcuacaucgcccuggacagcggccacggcaagugggacugcaucaugaccagcuaccaguaccugaucauccagaacaccaccugggaggaccacugccaguucagcagacccagccccaucggcuaccugggccugcugagccagagaaccagagacaucuacaucagcagaagaagaagaggcaccuucaccuggacccugagcgacagcgagggcaaggacacccccggcggcuacugccugaccagauggaugcugaucgaggccgagcugaagugcuucggcaacaccgccguggccaagugcaacgagaagcacgacgaggaguucugcgacaugcugagacuguucgacuucaacaagcaggccauccagagacugaaggcccccgcccagaugagcauccagcugaucaacaaggccgugaacgcccugaucaacgaccagcugaucaugaagaaccaccugagagacaucaugggcauccccuacugcaacuacagcaaguacugcuaccugaaccacaccaccaccggcaagaccagccugcccaagugcugccuggugagcaacggcagcuaccugaacgagacccacuucagcgacgacaucgagcagcaggccgacaacaugaucaccgagaugcugcagaaggaguacauggagagacagggcaagaccccccugggccugguggaccuguucguguucagcaccagcuucuaccugaucagcaucuuccugcaccuggugaagauccccacccacagacacaucgugggcaagagcugccccaagccccacagacugaaccacaugggcaucugcagcugcggccuguacaagcagcccggcgugcccgugagauggaagagaugaggacuagucccuguucccagagcccacuuuuuuuucuuuuuuugaaauaaaauagccugucuuucagaucucaaaggcucuuuucagagccaccaaaaaaaaaaaaaaaaaaaaaaaaaaaaaaaaaaaaaaaaaaaaaaaaaaaaaaaaaaaaaaaaaaaaaaaaaaaaaaaaaaaaaaaaaaaaaaaaaaaaa

SEQ ID NO: 25411 - RNA, 1767 nt, Artificial Sequence
  mRNA product Design a-2 (hSL-A100) comprising derived and/or modified sequence from LASV(Mad39;Clade IV)__ANH09722__GPCmut3 (opt4)
aggagaguccgcucagccagguugcagaagcggcuuagcguguguccuaaucuucucucugcguguagguaggccugugccgcaaacaagcuuaccaugggccagaucgugaccuucuuccaggaggugccccacgugaucgaggaggugaugaacaucgugcugaucgcccugagcauccuggccgugcugaagggccuguacaacguggccaccugcggccugaucggccuggugaccuuccugcugcugugcggcagaagcugcaccaccacccuguacaagggcguguacgagcugcaggcccuggagcugaacauggagacccugaacaugaccaugccccugagcugcaccaagaacaacagccaccacuacaucagagugggcaacgagaccggccuggagcugacccugaccaacaccagccugaucaaccacaaguucugcaaccugagcgacgcccacaagaagaaccuguacgaccacgcccugaugagcaucaucagcaccuuccaccugagcauccccaacuucaaccaguacgaggccaugagcugcgacuucaacgacggcaagaucagcgugcaguacaaccugagccacaccuacgccggcgacaccgccaaccacugcggcaccguggccaacggcgugcugcagaccuucaugagaauggccuggggcggcagcuacaucgcccuggacagcggcagaggcggcugggacugcaucaugaccagcuaccaguaccugaucauccagaacaccaccugggaggaccacugccaguucagcagacccagccccaucggcuaccugggccugcugagccagagaaccagagacaucuacaucagcagaagaagaagaggcaccuucaccuggacccugagcgacagcgagggcaaggacacccccggcggcuacugccugaccagauggaugcugaucgaggccgagcugaagugcuucggcaacaccgccguggccaagugcaacgagaagcacgacgaggaguucugcgacaugcugagacuguucgacuucaacaagcaggccauccagagacugaaggcccccgcccagaugagcauccagcugaucaacaaggccgugaacgcccugaucaacgaccagcugaucaugaagaaccaccugagagacaucaugggcauccccuacugcaacuacagcaaguacugcuaccugaaccacaccgugaccggcaagaccagccugcccaagugcugccuggugagcaacggcagcuaccugaacgagacccacuucagcgacgacaucgagcagcaggccgacaacaugaucaccgagaugcugcagaaggaguacauggagagacagggcaagaccccccugggccugguggaccuguucguguucagcaccagcuucuaccugaucagcaucuuccugcaccuggugaagauccccacccacagacacguggugggcaagcccugccccaagccccacagacugaaccacaugggcaucugcagcugcggcuucuacaagcagcccggcgugcccgugagauggaagagaugaggacuagucccuguucccagagcccacuuuuuuuucuuuuuuugaaauaaaauagccugucuuucagaucucaaaggcucuuuucagagccaccaaaaaaaaaaaaaaaaaaaaaaaaaaaaaaaaaaaaaaaaaaaaaaaaaaaaaaaaaaaaaaaaaaaaaaaaaaaaaaaaaaaaaaaaaaaaaaaaaaaaa

SEQ ID NO: 25412 - RNA, 1767 nt, Artificial Sequence
  mRNA product Design a-2 (hSL-A100) comprising derived and/or modified sequence from LASV(Z0947-SLE-2011;Clade IV)__AIT17840__GPCmut3 (opt4)
aggagaguccgcucagccagguugcagaagcggcuuagcguguguccuaaucuucucucugcguguagguaggccugugccgcaaacaagcuuaccaugggccagaucgugaccuucuuccaggaggugccccacgugaucgaggaggugaugaacaucgugcugaucgcccugagcauccuggccgugcugaagggccuguacaacuucgccaccugcggccuggugggccuggugaccuuccugcugcugugcggcagaagcugcaccaucagccuguacaagggcguguacgagcugcagacccuggagcugaacauggagacccugaacaugaccaugccccugagcugcaccaagaacaacagccaccacuacaucauggugggcaacgagaccggccuggagcugacccugaccaacaccagcaucaucaaccacaaguucugcaaccugagcgacgcccacaagaagaaccuguacgaccacgcccugaugagcaucaucagcaccuuccaccugagcauccccaacuucaaccaguacgaggccaugagcugcgacuucaacggcggcaagaucagcgugcaguacaaccugagccacagcuacgccggcgacgccgccaaccacugcggcaccguggccaacggcgugcugcagaccuucaugagaauggccuggggcggcagcuacaucgcccuggacagcggcagagacagaugggacugcaucaugaccagcuaccaguaccugaucauccagaacaccaccugggaggaccacugccaguucagcagacccagccccaucggcuaccugggccugcugagccagagaaccagagacaucuacaucagcagaagaagaagaggcaccuucaccuggacccugagcgacagcgagggcaaggacacccccggcggcuacugccugaccagauggaugcugaucgaggccgagcugaagugcuucggcaacaccgccguggccaagugcaacgagaagcacgacgaggaguucugcgacaugcugagacuguucgacuucaacaagcaggccauccagagacugaaggcccccgcccagaugagcauccagcugaucaacaaggccgugaacgcccugaucaacgaccagcugaucaugaagaaccaccugagagacaucaugggcauccccuacugcaacuacagcaaguacugcuaccugaaccacaccaccaccggcaagaccagccugcccaagugcugccuggugagcaacggcagcuaccugaacgagacccacuucagcgacgacaucgagcagcaggccgacaacaugaucaccgagaugcugcagaaggaguacauggagagacagggcaagaccccccugggccugguggaccuguucguguucagcaccagcuucuaccugaucagcaucuuccugcaccuggugaagauccccacccacagacacaucgugggcaagcccugccccaagccccacagacugaaccacaugggcaucugcagcugcggccuguacaagcagcccggcgugcccgugaaguggaagagaugaggacuagucccuguucccagagcccacuuuuuuuucuuuuuuugaaauaaaauagccugucuuucagaucucaaaggcucuuuucagagccaccaaaaaaaaaaaaaaaaaaaaaaaaaaaaaaaaaaaaaaaaaaaaaaaaaaaaaaaaaaaaaaaaaaaaaaaaaaaaaaaaaaaaaaaaaaaaaaaaaaaaa

SEQ ID NO: 25413 - RNA, 1767 nt, Artificial Sequence
  mRNA product Design a-2 (hSL-A100) comprising derived and/or modified sequence from LASV(Josiah;Clade IV)__NP_694870__GPCmut3 (opt5)
aggagaguccgcucagccagguugcagaagcggcuuagcguguguccuaaucuucucucugcguguagguaggccugugccgcaaacaagcuuaccaugggccagaucgugaccuucuuucaagaggucccccacguuauugaagaggugaugaacaucgugcugauugcccucagcguccuggcugugcuuaaggggcuguacaauuucgccacaugcggacucguuggccuggugacguuucuucugcucugugggagauccugcaccacaucucuguauaaaggagucuacgaacugcagacccucgagcugaacauggaaacacuuaauaugaccaugccucugagcuguacaaagaacaauucccaucacuauaucauggugggcaacgagaccgggcucgagcugacgcuuaccaauacaucuauuaucaaccauaaauucugcaaucugagcgacgcgcacaagaaaaaccucuacgaucaugcucugauguccaucauuucuaccuuucaccugagcaucccgaauuucaaccaguaugaagccauguccugugacuuuaauggaggcaagauuagcguucaguacaaccucucucacuccuaugccggcgaugcugccaaucauugcgggacaguggcuaacggaguccugcaaaccuucaugcggauggccuggggcgggagcuacaucgcgcuugacucuggacgcggcaacugggauuguauuaugacguccuaccaguaucugaucauucagaauacaaccugggaggaccacugccaguuuagcagacccucuccuaucggguaccucggacugcuuucccaacggacacgcgauaucuauauuagcagacggcgcagaggcaccuucaccuggacacuguccgacucugaaggcaaggauacgcccgggggauacugucucacccgguggaugcugaucgaggccgagcugaaaugcuuuggcaacacagcuguggccaaguguaaugaaaaacaugacgaggaguucugcgauaugcuccgccuguuugacuucaacaagcaggcuauucagagacuuaaagccccugcgcagaugagcauccaacugauuaauaaggccgugaacgcucucaucaaugaucagcugaucaugaagaaccaccuucgggacauuauggggauccccuauugcaauuacuccaaauauuguuaccugaaccacaccacaaccggacgcacgagccucccuaagugcugucuggucucuaauggcuccuaccugaacgaaacacauuucagcgacgauauugaacagcaagccgacaauaugaucaccgagaugcuccagaaagaguauauggaaagacaggggaagaccccgcugggacuuguugaucuguuuguguucucuaccagcuuuuaccucauuuccaucuuccugcaccuggugaaaauccccacacaucggcacauugucggcaagucuugcccuaaaccccaucgccuuaaccacaugggcaucuguagcugcgggcucuauaagcagccuggagugcccguuaaguggaaaagaugaggacuagucccuguucccagagcccacuuuuuuuucuuuuuuugaaauaaaauagccugucuuucagaucucaaaggcucuuuucagagccaccaaaaaaaaaaaaaaaaaaaaaaaaaaaaaaaaaaaaaaaaaaaaaaaaaaaaaaaaaaaaaaaaaaaaaaaaaaaaaaaaaaaaaaaaaaaaaaaaaaaaa

SEQ ID NO: 25414 - RNA, 1764 nt, Artificial Sequence
  mRNA product Design a-2 (hSL-A100) comprising derived and/or modified sequence from LASV(LP;Clade I)__AAF86701__GPCmut3 (opt5)
aggagaguccgcucagccagguugcagaagcggcuuagcguguguccuaaucuucucucugcguguagguaggccugugccgcaaacaagcuuaccaugggccagaucauuaccuucuuucaagaggugccccacgucaucgaagagguuaugaacauugugcugaucgcccucagccugcuugcuauucugaaggggcucuacaauaucgccacaugcggaaucauuggccugguggcguuccuuuuucugugugggaaauccugcucucucacgcugaagggaggcuaugaacugcagacccucgagcugaacauggaaacacuuaauaugaccaugccucugagcuguaccaaaaacuccucucaucacuacaucagagucgggaaugagacaggacucgagcugacacuuaccaacacgagcauuaucaaucauaaguucugcaaccuguccgacgcucacaaaaagaaucucuaugaucaugcccugaugucuauuaucagcaccuuucaccuguccauuccgaacuucaaucaguacgaagccaugagcugugacuuuaacggcggcaagaucucugugcaguauaaucucucccacagcuacgcuggggaugccgcugagcauugcggaacaguugccaacggcgugcugcaaaccuucaugcggauggcguggggagggcgcuauaucgcccuugacucuggcaaagggaauugggauuguauuaugacauccuaccaguaccugaucauucagaacaccacgugggaagaccacugccaguuuagcagacccucuccuaucggauaucucggccugcuuucccaacggacacgcgauauuuacaucagcagacggcgcagaggcaccuucacauggacccuguccgacucugaggggaacgagacccccggaggcuauugucucacacgguggaugcugaucgaagcugagcugaagugcuuugggaauacggccgucgcuaaauguaacgaaaagcaugaugaggaguucugcgacaugcuccgccuguuugauuucaauaaacaggccauuagacggcuuaaggcgccugcccagaugagcauccagcugauuaacaaggcugugaaugcccucaucaacgaccaacugauuaugaaaaaucaccuucgcgauaucaugggaauccccuacugcaacuauuccaaguacuguuaucugaaucacaccagcucuggcagaacaucccucccuaaaugcugucugauuagcaacgggucuuaccugaaugaaacccaguucagcgacgacaucgagcagcaagcugauaacaugauuacagaaaugcuccagaaggaguacaucgaacggcagggaaaaaccccgcugggccuuguugacauuuuuaucuucuccacgucuuuuuaucugauuagcaucuuccuccaucugaucaagauucccacacaccgccauaucgugggcaaaccuugccccaagccucacagacugaaucauaugggggucuguuccugcggacuuuacaagcaccccggcgugccgaccaaauggaagcggugaggacuagucccuguucccagagcccacuuuuuuuucuuuuuuugaaauaaaauagccugucuuucagaucucaaaggcucuuuucagagccaccaaaaaaaaaaaaaaaaaaaaaaaaaaaaaaaaaaaaaaaaaaaaaaaaaaaaaaaaaaaaaaaaaaaaaaaaaaaaaaaaaaaaaaaaaaaaaaaaaaaaa

SEQ ID NO: 25415 - RNA, 1764 nt, Artificial Sequence
  mRNA product Design a-2 (hSL-A100) comprising derived and/or modified sequence from LASV(803213;Clade II)__AAF86703__GPCmut3 (opt5)
aggagaguccgcucagccagguugcagaagcggcuuagcguguguccuaaucuucucucugcguguagguaggccugugccgcaaacaagcuuaccaugggccagaucauuaccuucuuucaagaggugccccacgucaucgaagagguuaugaacauugugcugaucgcccucagccugcuugcuauucugaaggggaucuacaauguggccacaugcggacucuucggccugaucuccuuucuucugcucugugggagaucuugcagcgucacguauaaaggaguguacgaacugcagacccuggagcucaacauggcgaaucugaacaugacaaugccucuuuccuguaccaagaauaacucucaucacuauauuaugguuggcaaugaaacagggcuggagcucacccugacaaacaccagcaucauuaaucauaaauucugcaaccuuuccgacgcucacaagaaaaaucuguacgaucaugcccucaugucuaucauuagcacguuucaccuguccaucccgaacuucaaucaguaugaggccaugagcugugacuuuaacggaggcaagauuucugugcaguacaaucugucccacagcuucgcugucgaugccgcuaaccauugcggcaccaucgccaacggggugcuccaaacauuuaugcggauggcguggggaggcucuuauaucgcccuggacuccgggaagggaaauugggauuguauuaugaccagcuaccaguaccuuaucauucagaacacaaccugggaagaccacugccaguucucucgccccuccccuaucggcuaucuggggcuccugagccaaagaacgcgggauauuuacaucucccgcagacggcgcggaacauuuaccuggacacuuucugacagcgagggcaaugaagcucccggcggguauugucugaccagauggaugcucaucgaggccgagcugaaaugcuucggaaacaccgcuguugccaaguguaaugaaaaacaugaugaggaauuuugcgacaugcugcgccucuucgauuucaacaagcaggcgauuaaacggcugaagacgccugcccagauguccauccagcuuauuaauaaggcugugaacgcccugaucaaugaccaacucauuaugaaaaaccaccugagagauaucaugggcauccccuacugcaauuauagccgguacuguuaucuuaaccacacagucaccgggaagacaucucugccucgcugcugucucguguccaauggaagcuaccugaacgagacccauuuuucugacgacauugaacagcaggcugauaauaugaucacagagaugcugcaaaaagaguacauggacagacagggcaagaccccgcucgggcugguggaucuuuucgucuuuagcacguccuucuaucugauuucuaucuuucuccaccugguuaaaauucccacacaucggcacaucgugggaaagccuugccccaaaccucaucgccugaaccacaugggcauuuguagcugcggccuuuacaagcaccccggggugccggucaaguggaaaagaugaggacuagucccuguucccagagcccacuuuuuuuucuuuuuuugaaauaaaauagccugucuuucagaucucaaaggcucuuuucagagccaccaaaaaaaaaaaaaaaaaaaaaaaaaaaaaaaaaaaaaaaaaaaaaaaaaaaaaaaaaaaaaaaaaaaaaaaaaaaaaaaaaaaaaaaaaaaaaaaaaaaaa

SEQ ID NO: 25416 - RNA, 1764 nt, Artificial Sequence
  mRNA product Design a-2 (hSL-A100) comprising derived and/or modified sequence from LASV(GA391;Clade III)__CAA36645__GPCmut3 (opt5)
aggagaguccgcucagccagguugcagaagcggcuuagcguguguccuaaucuucucucugcguguagguaggccugugccgcaaacaagcuuaccaugggccagaucgugaccuucuuucaagaggucccccacguuauugaagaggugaugaacaucgugcugauugcccucagcauccuggcuauucuuaaggggcuguacaaugucgccacaugcggacucaucggccuggugacguuccuucugcucuccgggagaucuuguagccugaucuauaaaggaaccuacgaacugcagacacucgagcugaacauggaaacccuuaauaugacaaugccucuguccugcaccaagaacaauucucaucacuauauucggguuggcaacgagacagggcucgagcugacccuuacgaauaccagcauccugaaccauaaauuuuguaaucucuccgacgcgcacaagcgcaaccuguacgaucauucucugaugagcauuaucuccacauuccaccucagcauuccgaauuuuaaccaguaugaagcuaugucuugcgacuucaauggaggcaaaaucaccgugcaguacaaccugucccacagcuuugccgucgaugccgcuggccauugugggacacuugccaauggagugcugcaaaccuucaugagaauggcuuggggcgggucuuauauugcccucgacuccggacggggcaacugggauugcaucaugacgagcuaccaguaccugaucauucagaacacaaccugggacgaucacugucaguuuucucgccccuccccuaucggguaucuuggacugcucagccaaagaacacgggacauuuacaucucccgcagacggcgcggcaccuucaccuggacacugucugauagcgagggcaaugaaacgcccgggggauauugccugaccagauggaugcucauugaggcggagcugaaguguuuuggcaacacagccguugcuaagugcaaugaaaaacaugacgaggaguucugugauaugcuucggcuguuugacuucaacaagcaggccauccgcagacucaaaaccccugcucagauguccauccagcugauuaauaaggccgugaacgcgcuuaucaaugaucaacugauuaugaaaaaccaccuccgggacaucauggggauucccuacugcaauuauagccgcuacugcuaucugaaccacacaucuaccggaaagacgucccugccuagauguugccucaucagcaauggcucuuaccugaacgaaacaaaguucagcgacgauaucgaacagcaggccgacaauaugauuaccgagaugcuucaaaaagaguacaucgaucggcaggggaagaccccgcugggacucgucgaccuguuuguguucuccacaucuuuuuaucugauuagcaucuuccuucaucucgugaaaauucccacccacagacauaucgucggcaagccuugucccaaaccucaccgccugaaccauaugggcauuugcuccugugggcuguacaagcagcccggaguuccggugcgguggaaaagaugaggacuagucccuguucccagagcccacuuuuuuuucuuuuuuugaaauaaaauagccugucuuucagaucucaaaggcucuuuucagagccaccaaaaaaaaaaaaaaaaaaaaaaaaaaaaaaaaaaaaaaaaaaaaaaaaaaaaaaaaaaaaaaaaaaaaaaaaaaaaaaaaaaaaaaaaaaaaaaaaaaaaa

SEQ ID NO: 25417 - RNA, 1767 nt, Artificial Sequence
  mRNA product Design a-2 (hSL-A100) comprising derived and/or modified sequence from LASV(AV;Clade V)__CCA30314__GPCmut3 (opt5)
aggagaguccgcucagccagguugcagaagcggcuuagcguguguccuaaucuucucucugcguguagguaggccugugccgcaaacaagcuuaccaugggccagaucgugaccuucuuucaagaggucccccacguuauugaagaggugaugaacaucgugcugauugcccucagcauccuggcuguccuuaaggggcuguacaauauugccacaugcggacucaucggccugaucacguuccuucugcucugugggagauccugcucuagcaaccuguauaaaggaguguacgaacugcagucccucgaccugaauauggagacccuuaacaugacaaugccucugucuuguaccaagaauaacagccaucacuauauucggguuggcaaugauacagggcucgaacugacccuuacaaacaccuccauccugaaucauaaauuuugcaaccucucugacgcgcacaagaaagaucuguacgaccaugcucugaugagcauuaucuccacguuccaccucagcauuccgaauuuuaaccaguaugaggccaugucuugugauuucaauggaggcaagaucuccgugcaguacaaccugagccacucuuaugccauugacgcugccaaucauugcggcaccgucgcuaacgggauccuucaaacauuuaugcgcauggccuggggaggcuccuacaucgcgcuggauagcgggagaggaaacugggacuguauuaugaccucuuaccaguaucucaucauucagaauacaaccugggagaaccacugccaguucucccggcccagcccuaucggcuaccuggggcuucugucccaacgcacgagagauauuuauaucucucggcgcagacggggaacauuuaccuggacacucagcgacuccgaaggcaaugccacccccggcggguacugucugacccgcuggaugcugaucgaggcugaacucaagugcuucggaaacacagccguggcuaaauguaaugagaagcaugaugaggaauuuugcgacaugcugagacuuuucgauuuuaacaaacaggccauuagccggcugaagucuccugcgcagauguccauccagcucauuaauaaagccguuaacgcucugaucaaugaccaacuuauuaugaagaaccaucugcgcgacaucaugggcauccccuauugcaauuacagcaaguauuguuaccucaaccacacgauuaccgggaaaacaucucugccuaagugcugucuggugagcaauggauccuaccucaacgagacccacuucucugaugacaucgaacagcaggccgauaauaugauuacagagaugcugcaaaaagaauauauggagagacagggcaagaccccgcuugggcuggucgaccucuucguguuuagcacguccuucuaccugaucagcauuuuucugcggcuugugaaaauccccacacaccgccauauugucggaaagccuugccccaaaccucacagacucaaccauaugggcaucuguucuugcggccuguauaagcagcccgggguuccggugcgguggaagagaugaggacuagucccuguucccagagcccacuuuuuuuucuuuuuuugaaauaaaauagccugucuuucagaucucaaaggcucuuuucagagccaccaaaaaaaaaaaaaaaaaaaaaaaaaaaaaaaaaaaaaaaaaaaaaaaaaaaaaaaaaaaaaaaaaaaaaaaaaaaaaaaaaaaaaaaaaaaaaaaaaaaaa

SEQ ID NO: 25418 - RNA, 1764 nt, Artificial Sequence
  mRNA product Design a-2 (hSL-A100) comprising derived and/or modified sequence from LASV(Togo/2016/7082;Clade VI)__AMR44577__GPCmut3 (opt5)
aggagaguccgcucagccagguugcagaagcggcuuagcguguguccuaaucuucucucugcguguagguaggccugugccgcaaacaagcuuaccaugggccagaucauuaccuucuuucaagaggugccccacgucaucgaagagguuaugaacauugugcugaucgcccucagccugcuugcuauucugaaggggguguacaaugucgccacaugcggaaucaucggccucgugacguuccuguuucuuugugggagauccugcucucugauuuauaaaggaagcuacgaacuccagacccuggagcugaacauggaaacacucaauaugaccaugccucuguccuguacaaagaacucuagccaucacuauauccggguuggcaaugagaccgggcuugagcugacacucaccaacacguccauuaucaaucauaaauucugcaaccugucugacgcgcacaagcgcaaucuuuacgaucaugcucugaugagcauucucuccaccuuucaccugagcaucccgaacuucaaucaguaugaagccaugucuugugacuuuaacggaggcaaaauuuccgugcaguacaaucugagccacgccuaugcugucgaugccgcugagcauugcggcacaguggccaacgggguucuccaaaccuucaugagaauggcguggggaggcucuuacaucgcccuggacuccgggcggggaaauugggauuguaucaugacaagcuaccaguaucuuauuauccagaacaccacgugggaagaccacugccaguuuucucgccccuccccuauuggcuaccuggggcuccugagccaaagaacacgggauaucuauauuucccgcagacggcgcggaaccuucacauggacccuuucugacagcgagggcaacgagacccccggcggguacugucugacaagauggaugcucaucgaagcugagcugaagugcuuuggaaauacggccguggcuaaguguaacgaaaaacaugaugaggaguucugcgacaugcugcggcucuuugauuucaauaagcaggccauccagcgccugaaauccccugcgcagaugagcauucaacuuaucaacaaggccgucaaugcucugauuaacgaccagcucaucaugaaaaaucaccugagagauaugaugggcauucccuauugcaacuacucuaaguauuguuaccuuaaucacaccuccagcgggcggacaucucugccuaagugcugucucgugagcaacggauccuaccugaaugaaacccauuucucugacgacaucgagcagcaagccgauaacaugaucacagaaaugcugcagaaagaguauauugaccgccagggcaagaccccgcucgggcugguggaucuuuuugucuucagcacguccuuuuaccugaucagcauuuuccuccaccugaucaaaauucccacacauagacacaucguuggaaagccuugccccaaaccucaucggcugaaucacaugggcauuuguucuugcggccuuuauaagcagcccggggugccgaccagauggaaacgcugaggacuagucccuguucccagagcccacuuuuuuuucuuuuuuugaaauaaaauagccugucuuucagaucucaaaggcucuuuucagagccaccaaaaaaaaaaaaaaaaaaaaaaaaaaaaaaaaaaaaaaaaaaaaaaaaaaaaaaaaaaaaaaaaaaaaaaaaaaaaaaaaaaaaaaaaaaaaaaaaaaaaa

SEQ ID NO: 25419 - RNA, 1764 nt, Artificial Sequence
  mRNA product Design a-2 (hSL-A100) comprising derived and/or modified sequence from LASV(KAK-428;Clade n.d. (VII))__ANH09740__GPCmut3 (opt5)
aggagaguccgcucagccagguugcagaagcggcuuagcguguguccuaaucuucucucugcguguagguaggccugugccgcaaacaagcuuaccaugggccagaucgugaccuucuuucaagaggucccccacguuauugaagaggugaugaacaucgugcugauugcccucagccugcuugcuauccugaaggggcucuacaauuucgccacaugcggagucauuggccugaucacguuucuucugcucugugggagauccugcucugcgaccuauaaaggacaguacgaacugcagacacuggagcucaacauggaaagccugaauaugaccaugccucuuuccuguacaaagaacaauucucaucacuauauccgggcuggcaacaauaccgggcuggagcucacacugaccaacacgagcauuaucucccauaaauucugcaaucuuucugacgcccacaagaaaaaccuguacgaucauacccucaugagcauuaucacaaccuuucaccuguccauuccgaauuucaaccaguaugaggccaugagcugugacuuuaauggaggcaagaucucuauucaauacaaccugucccacagcuaugcuggcgaugccgcucagcauugcgggacaguggccaauggaguucuccagaccuucaugcgcauggcguggggcgggucuuaccuggcccuugacuccggaagacggggcugggauuguaucaucagcucuuaccaguaucugauuauccaaaacacgacaugggacgaucacugccaguuuucccgccccagcccuauuggguaccucggauucgugucccagaagaccagagacaucuauauuucucggcgcagacggggcacauuuaccuggacccugagcgauuccgaaggccaugacaugcccgggggauacugucuuacacgcuggaugcugaucgaggcugaucucaaaugcuucggcaacacggccgucgcuaaguguaaugaaaaacacgacgaggaguuuugcgauauguggagacuguucgacuucaacaagcaggccauccaacggcugaaagcgccugcccagaugaauauucagcucaucaacaaggcugugaaugcccugauuaacgaccaacuuaugaugaagaaucaucugcgcgauaucauggggauucccuauugcaacuacagcaaauuuuguuaucucaauaacaccacaaccggaagaacaucucugccucggugcugucuuaucuccaauggcagcuaccugaacgaaacccacuucucugacgauaucgagcagcaggcugacaauaugauuacggaaaugcuccagaaggaguacauggaucgccaagggaaaacaccgcugggacugguugaccucuuuguguucagcaccuccuuuuaucugaucaccauuuuccuucaccuggucaagauccccacacauagacacauugugggcaaaccuugccccaagccucaucggcucaaccacaugggcaucuguucuugcgggcuguacaaacagcccggagugccggucagauggaagcgcugaggacuagucccuguucccagagcccacuuuuuuuucuuuuuuugaaauaaaauagccugucuuucagaucucaaaggcucuuuucagagccaccaaaaaaaaaaaaaaaaaaaaaaaaaaaaaaaaaaaaaaaaaaaaaaaaaaaaaaaaaaaaaaaaaaaaaaaaaaaaaaaaaaaaaaaaaaaaaaaaaaaaa

SEQ ID NO: 25420 - RNA, 1764 nt, Artificial Sequence; identical to SEQ ID NO: 25414
  mRNA product Design a-2 (hSL-A100) comprising derived and/or modified sequence from LASV(Pinneo-NIG-1969;Clade I)__AIT17836__GPCmut3 (opt5)

SEQ ID NO: 25421 - RNA, 1764 nt, Artificial Sequence
  mRNA product Design a-2 (hSL-A100) comprising derived and/or modified sequence from LASV(ISTH0009-NIG-2011;Clade II)__AIT17404__GPCmut3 (opt5)
aggagaguccgcucagccagguugcagaagcggcuuagcguguguccuaaucuucucucugcguguagguaggccugugccgcaaacaagcuuaccaugggccagaucauuaccuucuuucaagaggugccccacgucaucgaagagguuaugaacauugugcugaucgcccucagccugcuugcuauucugaaggggaucuacaauguggccacaugcggacucuucggccuggucuccuuucuucugcucugugggagaucuugcagcacgaccuauaaaggaguguacgaacugcagacacuggagcucgacauggcgucccugaacaugaccaugccucuuucuuguacaaagaauaacagccaucacuauaucaugguuggcaaugaaaccgggcuggagcucacacugaccaacacguccauuaucaaucauaaauucugcaaccuuucugaugcucacaagaaaaaucuguacgaccaugcccucaugagcauuaucuccaccuuucaccugagcauuccgaacuucaaucaguaugaggccaugucuugugauuuuaacggaggcaagaucuccgugcaguacaaucugagccacgcuuaugccgucgacgcugccaaccauugcggcacaauugcgaauggggugcuccaaaccuucaugcggauggccuggggaggcucuuacaucgcucuggauuccgggaagggaagcugggacuguaucaugacaucuuaccaguaucuuauuauccagaacaccacgugggaagaucacugccaguuuucccgccccagcccuauuggcuaccuggggcuccugucccaaagaacacgggacaucuauauuucucgcagacggcgcggaaccuucacauggacccuuagcgauuccgagggcaacgaaacccccggcggguacugucugacaagauggaugcucaucgaggccgagcugaaaugcuuuggaaauacggcuguugccaaguguaacgaaaaacaugacgaggaguucugcgauaugcugcggcucuuugacuucaauaagcaggcgauccgcagacugaaaaccccugcccagaugagcauucagcuuaucaacaaggcugugaaugcccugauuaacgaucaacucaucaugaagaaucaucugcgggacauuaugggcauccccuauugcaacuacucuaaauauuguuaccuuaaucacacagucaccgggaagacaucccugccucgcugcugucucgugagcaacggaucuuaccugaaugaaacccacuucagcgacgauaucgaacagcaggcugacaacaugauuacggagcugcuccaaaaagaguauauggauagacagggcaagacaccgcuggggcuuguggaccuguuugucuucuccaccucuuuuuaccucaucagcauuuuccugcaccugaucaaaauucccacccaucggcacaucacaggaaagccuugccccaaaccucaucgccuuaaucacaugggcauuuguuccugcggccucuauaagcaccccgggguuccggugaaguggaaaagaugaggacuagucccuguucccagagcccacuuuuuuuucuuuuuuugaaauaaaauagccugucuuucagaucucaaaggcucuuuucagagccaccaaaaaaaaaaaaaaaaaaaaaaaaaaaaaaaaaaaaaaaaaaaaaaaaaaaaaaaaaaaaaaaaaaaaaaaaaaaaaaaaaaaaaaaaaaaaaaaaaaaaa

SEQ ID NO: 25422 - RNA, 1764 nt, Artificial Sequence
  mRNA product Design a-2 (hSL-A100) comprising derived and/or modified sequence from LASV(ISTH2010-NIG-2012;Clade II)__AIT17482__GPCmut3 (opt5)
aggagaguccgcucagccagguugcagaagcggcuuagcguguguccuaaucuucucucugcguguagguaggccugugccgcaaacaagcuuaccaugggccagaucauuaccuucuuucaagaggugccccacgucaucgaagagguuaugaacauugugcugaucgcccucagccugcuugcuauucugaaggggaucuacaauguggccacaugcggacucuucggccuggucuccuuucuucugcucugugggagaucuugcagcacgaccuauaaaggaguguacgaacugcagacacuggagcucgacauggcgucccugaacaugaccaugccucuuucuuguacaaagaauaacagccaucacuauaucaugguuggcaaugaaaccgggcuggagcucacacugaccaacacguccauuaucaaucauaaauucugcaaccuuucugaugcucacaagaaaaaucuguacgaccaugcccucaugagcauuaucuccaccuuucaccugagcauuccgaacuucaaucaguaugaggccaugucuugugauuuuaacggaggcaagaucuccgugcaguacaaucugagccacgcuuaugccgucgacgcugccaaccauugcggcacaauugcgaauggggugcuccaaaccuucaugcggauggccuggggaggcucuuacaucgcucuggauuccgggaagggaagcugggacuguaucaugacaucuuaccaguaucuuauuauccagaacauuaccugggaagaucacugccaguuuucccgccccagcccuaucggcuaccuggggcuccugucccaaagaacgcgggacauuuauaucucucgcagacggcgcggaacauucaccuggacacuuagcgauuccgagggcaacgaaacccccggcggguacugucugaccagauggaugcucaucgaggccgagcugaaaugcuuuggaaauacagcuguugccaaguguaacgaaaaacaugacgaggaguucugcgauaugcugcggcucuuugacuucaauaagcaggcgauucgcagacugaaaacgccugcccagaugagcauccagcuuauuaacaaggcugugaaugcccugaucaacgaucaacucauuaugaagaaucaucugcgggacaucaugggcauccccuauugcaacuacucuaaauauuguuaccuuaaucacaccgucacagggaagaccucccugccucgcugcugucucgugagcaacggaucuuaccugaaugaaacacacuucagcgacgauauugaacagcaggcugacaacaugaucaccgagcugcuccaaaaagaguauauugauagacagggcaagacgccgcuggggcuuguggaccuguuugucuucuccacaucuuuuuaccucaucagcauuuuccugcaccugguuaaaauccccacccaucggcacguggugggaaagccuugccccaaaccucaucgccuuaaucacaugggcauuuguuccugcggccucuauaagcaccccggggucccggugaaguggaaaagaugaggacuagucccuguucccagagcccacuuuuuuuucuuuuuuugaaauaaaauagccugucuuucagaucucaaaggcucuuuucagagccaccaaaaaaaaaaaaaaaaaaaaaaaaaaaaaaaaaaaaaaaaaaaaaaaaaaaaaaaaaaaaaaaaaaaaaaaaaaaaaaaaaaaaaaaaaaaaaaaaaaaaa

SEQ ID NO: 25423 - RNA, 1764 nt, Artificial Sequence
  mRNA product Design a-2 (hSL-A100) comprising derived and/or modified sequence from LASV(Lassa virus/H.sapiens-wt/NGA/2015/ISTH_0543;Clade II)__AVO03639__GPCmut3 (opt5)
aggagaguccgcucagccagguugcagaagcggcuuagcguguguccuaaucuucucucugcguguagguaggccugugccgcaaacaagcuuaccaugggccagaucauuaccuucuuucaagaggugccccacgucaucgaagagguuaugaacauugugcugaucgcccucagccugcuugcuauucugaaggggaucuacaauguggccacaugcggacucuucggccuggucuccuuucuucugcucugugggagaucuugcagcacgaccuauaaaggaguguacgaacugcagacacuggagcucgacauggcgaaccugaauaugaccaugccucuuuccuguacaaagaacaauucucaucacuauaucaugguuggcaacgaaaccgggcuggagcucacacugaccaauacgagcauuaucaaccauaaauucugcaaucuuuccgaugcucacaagaaaaaccuguacgaccaugcccucaugucuauuaucagcaccuuucaccuguccauuccgaauuucaaccaguaugaggccaugagcugugauuuuaauggaggcaagaucucugugcaguacaaccugucccacacauaugcugucgacgccgcuaaucauugcggcaccauugccaacggggugcuccaaacauucaugcggauggcguggggaggcagcuacaucgcccuggauucugggaagggauccugggacuguaucaugaccagcuaccaguaucuuguuauucagaacacgacaugggaagaucacugccaguuuucucgccccuccccuaucggcuaccuggggcuccugagccaaagaacccgggacauuuauaucucccgcagacggcgcggaacauucaccuggacccuuucugauagcgagggcaaugaaacacccggcggguacugucugacgagauggaugcucauugaggcugagcugaaaugcuuuggaaacaccgccguggcuaaguguaaugaaaaacaugacgaggaguucugcgauaugcugcggcucuuugacuucaacaagcaggccauccgcagacugaaaaccccugcgcagauguccauccagcuuauuaauaaggccgucaacgcucugaucaaugaucaacucauuaugaagaaccaucugcgggacaucaugggcauucccuauugcaauuacagcaaauauuguuaccuuaaccacacagugacagggaagaccucucugccucgcugcugucucguguccaauggaagcuaccugaacgaaacgcacuucucugacgauaucgaacagcaggccgacaauaugaucacagagcugcuccaaaaagaguauauugauagacagggcaagaccccgcuggggcuugucgaccuguuuguuuucagcaccuccuuuuaccucaucucuauuuuccugcaccuggugaaaauccccacacaucggcacauuaccggaaagccuugccccaaaccucaucgccuuaaccacaugggcaucuguagcugcggccucuauaagcaccccggggugccggucaaguggaaaagaugaggacuagucccuguucccagagcccacuuuuuuuucuuuuuuugaaauaaaauagccugucuuucagaucucaaaggcucuuuucagagccaccaaaaaaaaaaaaaaaaaaaaaaaaaaaaaaaaaaaaaaaaaaaaaaaaaaaaaaaaaaaaaaaaaaaaaaaaaaaaaaaaaaaaaaaaaaaaaaaaaaaaa

SEQ ID NO: 25424 - RNA, 1764 nt, Artificial Sequence
  mRNA product Design a-2 (hSL-A100) comprising derived and/or modified sequence from LASV(Lassa virus/H.sapiens-wt/NGA/2016/ISTH_0009;Clade II)__AVO03571__GPCmut3 (opt5)
aggagaguccgcucagccagguugcagaagcggcuuagcguguguccuaaucuucucucugcguguagguaggccugugccgcaaacaagcuuaccaugggccagaucauuaccuucuuucaagaggugccccacgucaucgaagagguuaugaacauugugcugaucgcccucagccugcuugcuauucugaaggggaucuacaauguggccacaugcggacuccugggccuugucuccuuccugcuccugugugggagaucuugcagcacgaccuauaaaggaguguacgaacugcagacacucgagcuggacauggcgucccuuaacaugaccaugccucugucuuguacaaagaauaacagccaucacuauaucaugguuggcaaugaaaccgggcucgagcugacacuuaccaacacguccauuaucaaucauaaauuuugcaaccugucugaugcucacaagaaaaaucucuacgaccaugcccugaugagcauuaucuccaccuuccaccugagcauuccgaacuuuaaucaguaugaggccaugucuugugauuucaacggaggccggaucuccgugcaguacaaucucagccacucuuaugcugucgacgccgcuaaccauugcggcacaauugccaauggggugcugcaaaccuuuaugcgcauggcguggggaggcuccuacaucgcccuugauagcgggaagggaucuugggacuguaucaugacauccuaccaguaucugauuauccagaacaccacgugggaagaucacugccaguucagcagacccuccccuauuggcuaccucgggcugcuuucucaacggacacgcgacaucuauauuagcagacggcgcagaggaaccuuuacauggacccuguccgauagcgagggcaacgaaacccccggcggguacugucucacacgguggaugcugaucgaggcugagcugaagugcuucggaaauacggccguugcuaaauguaacgaaaagcaugacgaggaauuuugcgauaugcuccgccuguucgacuuuaauaaacaggccaucagacggcuuaagaccccugcgcagaugucuauucagcugaucaacaaagccgugaaugcucucauuaacgaucaacugaucaugaagaaucaccuucgcgacauuaugggcauccccuauugcaacuacuccaaguauuguuaccugaaucacacagucaccgggaaaacaagccucccuagaugcugucuggugucuaacggaagcuaccugaaugagacccauuucuccgacgauaucgaacagcaggccgacaacaugauuacggagcuccugcaaaaggaguauaucgaucggcagggcaaaacaccgcuugggcugguggaccucuucgucuuuucuaccagcuucuaccugauuuccaucuuucugcaccuuguuaagauucccacccaucgccacaucacaggaaaaccuugccccaagccucauagacucaaucacaugggcauuuguagcugcggccuguauaaccaccccggggugccggugaaauggaagcggugaggacuagucccuguucccagagcccacuuuuuuuucuuuuuuugaaauaaaauagccugucuuucagaucucaaaggcucuuuucagagccaccaaaaaaaaaaaaaaaaaaaaaaaaaaaaaaaaaaaaaaaaaaaaaaaaaaaaaaaaaaaaaaaaaaaaaaaaaaaaaaaaaaaaaaaaaaaaaaaaaaaaa

SEQ ID NO: 25425 - RNA, 1764 nt, Artificial Sequence
  mRNA product Design a-2 (hSL-A100) comprising derived and/or modified sequence from LASV(Lassa virus/H.sapiens-wt/NGA/2016/ISTH_0017;Clade II)__AVO03567__GPCmut3 (opt5)
aggagaguccgcucagccagguugcagaagcggcuuagcguguguccuaaucuucucucugcguguagguaggccugugccgcaaacaagcuuaccaugggccagaucauuaccuucuuucaagaggugccccacgucaucgaagagguuaugaacauugugcugaucgcccucagccugcuugcuauucugaaggggaucuacaauguggccacaugcggacucuucggccuggucuccuuucuucugcucugugggagaucuugcagcacgaccuauaaaggaguguacgaacugcagacacuggagcucgacauggcgucccugaacaugaccaugccucuuucuuguacaaagaauaacagccaucacuauaucaugguuggcaaugaaaccgggcuggagcucacacugaccaacacguccauuaucaaucauaaauucugcaaccuuucugaugcucacaagaaaaaucuguacgaccaugcccucaugagcauuaucuccaccuuucaccugagcauuccgaacuucaaucaguaugaggccaugucuugugauuuuaacggaggcaagaucuccgugcaguacaaucugagccacacauaugcuauugacgccgcuaaccauugcggcaccaucgccaaugggguccuccaaacauucaugcggauggcguggggaggcucuuacaucgcccuggauuccgggaagggaagcugggacuguauuaugaccucuuaccaguaucuuaucauucagaacacgacaugggaagaucacugccaguuuucccgccccagcccuaucggcuaccuggggcuccugucccaaagaacccgggacauuuauaucucucgcagacggcgcggaacauucaccuggacccuuagcgauuccgagggcaacgaaacacccggcggguacugucugacgagauggaugcucaucgaggcugagcugaaaugcuuuggaaauaccgccguggcuaaguguaacgaaaaacaugacgaggaguucugcgauaugcugcggcucuuugacuucaauaagcaggccauucgcagacugaaaaccccugcgcagaugagcauccagcuuauuaacaaggccguuaaugcucugaucaacgaucaacucauuaugaagaaucaucugcgggacaucaugggcauccccuauugcaacuacucuaaauauuguuaccuuaaucacacagugacagggaagaccucccugccucgcugcugucucgucagcaacggaucuuaccugaaugaaacgcacuucagcgacgauauugaacagcaggccgacaacaugaucacagagcugcuccaaaaagaguauauggauagacagggcaagaccccgcuggggcuuguggaccuguuuguguucuccaccucuuuuuaccucauuagcaucuuccugcaccugguccggauucccacacaucgccacguuaucggaaaaccuugccccaagccucauagacuuaaucacaugggcauuuguuccugcggccucuauaaacaccccggggugccggugaaguggaagcggugaggacuagucccuguucccagagcccacuuuuuuuucuuuuuuugaaauaaaauagccugucuuucagaucucaaaggcucuuuucagagccaccaaaaaaaaaaaaaaaaaaaaaaaaaaaaaaaaaaaaaaaaaaaaaaaaaaaaaaaaaaaaaaaaaaaaaaaaaaaaaaaaaaaaaaaaaaaaaaaaaaaaa

SEQ ID NO: 25426 - RNA, 1764 nt, Artificial Sequence
  mRNA product Design a-2 (hSL-A100) comprising derived and/or modified sequence from LASV(Lassa virus/H.sapiens-wt/NGA/2018/ISTH_0959;Clade II)__AVV65099__GPCmut3 (opt5)
aggagaguccgcucagccagguugcagaagcggcuuagcguguguccuaaucuucucucugcguguagguaggccugugccgcaaacaagcuuaccaugggccagaucauuaccuucuuucaagaggugccccacgucaucgaagagguuaugaacauugugcugaucgcccucagccugcuugcuauucugaaggggaucuacaauguggucacaugcggacucuucggccugguguccuuucuucugcucugugggagaucuugcagcacgaccuauaaaggaguuuacgaacugcagacacuggagcucgacauggccucccugaacaugaccaugccucuuucuuguacaaagaauaacagccaucacuauaucauggugggcaaugaaaccgggcuggagcucacacugaccaacacguccauuaucaaucauaaauucugcaaccuuucugaugcgcacaagaaaaaucuguacgaccaugcucucaugagcauuaucuccaccuuucaccugagcauuccgaacuucaaucaguaugaggccaugucuugugauuuuaacggaggcaagaucuccguccaguacaaucugagccacgccuaugcuauugacgccgcuaaccauugcggcacaaucgccaauggggugcuccaaaccuucaugcggauggcguggggaggcucuuacaucgcccuggauuccgggaagggaagcugggacuguauuaugacaucuuaccaguaucuuaucauucagaacaccacgugggaagaucacugccaguuuucccgccccagcccuaucggcuaccuggggcuccugucccaaagaacacgggacauuuauaucucucgcagacggcgcggaaccuucacauggacccuuagcgauuccgagggcaacgaaacccccggcggguacugucugacaagauggaugcucaucgaggcugagcugaaaugcuuuggaaauacggccguugcuaaguguaacgaaaaacaugacgaggaguucugcgauaugcugcggcucuuugacuucaauaagcaggccauucgcagacugaaaaccccugcgcagaugagcauccagcuuauuaacaaggccgugaaugcucugaucaacgaucaacucauuaugaagaaucaucugcgggacaucaugggcauccccuauugcaacuacucuaaauauuguuaccuuaaucacacagucaccgggaagacaucccugccucgcugcugucucgugagcaacggaucuuaccugaaugaaacccacuucagcgacgauauugaacagcaggccgacaacaugaucacggagcugcuccaaaaagaguauauugauagacagggcaagacaccgcuggggcuuguggaccuguuugucuucuccaccucuuuuuaccucaucagcauuuuccugcaccugguuaaaauccccacccaucggcacgugauuggaaagccuugccccaaaccucaucgccuuaaucacaugggcaucuguuccugcggccucuauaagcaccccggggugccggucaaguggaaaagaugaggacuagucccuguucccagagcccacuuuuuuuucuuuuuuugaaauaaaauagccugucuuucagaucucaaaggcucuuuucagagccaccaaaaaaaaaaaaaaaaaaaaaaaaaaaaaaaaaaaaaaaaaaaaaaaaaaaaaaaaaaaaaaaaaaaaaaaaaaaaaaaaaaaaaaaaaaaaaaaaaaaaa

SEQ ID NO: 25427 - RNA, 1764 nt, Artificial Sequence
  mRNA product Design a-2 (hSL-A100) comprising derived and/or modified sequence from LASV(LASV003-NIG-2008;Clade II)__AIT17580__GPCmut3 (opt5)
aggagaguccgcucagccagguugcagaagcggcuuagcguguguccuaaucuucucucugcguguagguaggccugugccgcaaacaagcuuaccaugggccagaucauuaccuucuuucaagaggugccccacgucaucgaagagguuaugaacauugugcugaucgcccucagccugcuugcuauucugaaggggaucuacaauguggccacaugcggacucuucggccuggucuccuuucuucugcucugugggagaucuugcagcacgaccuauaaaggaguguacgaacugcagacacuggagcucgacauggcgucccugaacaugaccaugccucuuucuuguacaaagaauaacagccaucacuauaucaugguuggcaaugaaaccgggcuggagcucacacugaccaacacguccauuaucaaucauaaauucugcaaccuuucugaugcucacaagaaaaaucuguacgaccaugcccucaugagcauuaucuccaccuuucaccugagcauuccgaacuucaaucaguaugaggccaugucuugugauuuuaacggaggcaagaucuccgugcaguacaaucugagccacacauaugcugucgacgccgcuaaccauugcggcaccauugccaauggggugcuccaaacauucaugcggauggcguggggaggcucuuacaucgcccuggauuccgggaagggaagcugggacuguaucaugaccucuuaccaguaucuuauuauccagaacacgacaugggaagaucacugccaguuuucccgccccagcccuauuggcuaccuggggcuccugucccaaagaacccgggacaucuauauuucucgcagacggcgcggaacauucaccuggacccuuagcgauuccgagagcaacgaaacacccggcggcuacugucugacgagauggaugcucaucgaggcugagcugaaaugcuuugggaauaccgccguugcuaaguguaacgaaaaacaugacgaggaguucugcgauaugcugcggcucuuugacuucaauaagcaggccauccgcagacugaaagcgccugcccagaugucuauucagcuuaucaacaaggcugugaaugcccugauuaacgaucaacucaucaugaagaaucaucugcgggacauuaugggaauccccuauugcaacuacuccaaauauuguuaccuuaaucacacagucaccggccgcacaagccugccuagaugcugucucgugucuaacgggagcuaccugaaugaaacccacuucuccgacgauaucgaacagcaggcugacaacaugauuacggagcugcuccaaaaggaguauauggaucggcagggaaaaacaccgcugggccuuguggaccuguuugucuucucuaccagcuuuuaccucaucuccauuuuccugcaccugguuaagauccccacccaucgccacgugauugggaaaccuugccccaagccucauagacuuaaucacaugggaaucuguagcugcggccucuauaaacaccccggcgugccggucaaguggaagcggugaggacuagucccuguucccagagcccacuuuuuuuucuuuuuuugaaauaaaauagccugucuuucagaucucaaaggcucuuuucagagccaccaaaaaaaaaaaaaaaaaaaaaaaaaaaaaaaaaaaaaaaaaaaaaaaaaaaaaaaaaaaaaaaaaaaaaaaaaaaaaaaaaaaaaaaaaaaaaaaaaaaaa

SEQ ID NO: 25428 - RNA, 1764 nt, Artificial Sequence
  mRNA product Design a-2 (hSL-A100) comprising derived and/or modified sequence from LASV(LASV035-NIG-2009;Clade II)__AIT17588__GPCmut3 (opt5)
aggagaguccgcucagccagguugcagaagcggcuuagcguguguccuaaucuucucucugcguguagguaggccugugccgcaaacaagcuuaccaugggccagaucauuaccuucuuucaagaggugccccacgucaucgaagagguuaugaacauugugcugaucgcccucagccugcuugcuauucugaaggggaucuacaauguggccacaugcggacucuucggccuggucuccuuucuucugcucugugggagaucuugcagcacgaccuauaaaggaguguacgaacugcagacacuggagcucgacauggcgucccugaacaugaccaugccucuuucuuguacaaagaauaacagccaucacuauaucaugguuggcaaugaaaccgggcuggagcucacacugaccaacacguccauuaucaaucauaaauucugcaaccuuucugaugcucacaagaaaaaucuguacgaccaugcccucaugagcauuaucuccaccuuucaccugagcauuccgaacuucaaucaguaugaggccaugucuugugauuuuaacggaggcaagaucuccgugcaguacaaucugagccacgcuuaugccgucgacgcugccaaccauugcggcacaauugcgaauggggugcuccaaaccuucaugcggauggccuggggaggcucuuacaucgcucuggauuccgggaagggaagcugggacuguaucaugacaucuuaccaguaucuuauuauccagaacaccacgugggaagaucacugccaguuuucccgccccagcccuauuggcuaccuggggcuccugucccaaagaacacgggacaucuauauuucucgcagacggcgcggaaccuucacauggacccuuagcgauuccgagggcaacgaaacccccggcggguacugucugacaagauggaugcucaucgaggccgagcugaaaugcuuuggaaauacggcuguugccaaguguaacgaaaaacaugacgaggaguucugcgauaugcugcggcucuuugacuucaauaagcaggcgauccgcagacugaaagccccugcucagaugagcauucagcuuaucaacaaggccgugaaugcucugauuaacgaucaacucaucaugaagaaucaucugcgggacauuaugggcauccccuauugcaacuacucuaaauauuguuaccuuaaucacaccgucacagggaagaccucccugccucgcugcugucucgugagcaacggaucuuaccugaaugaaacacacuucagcgacgauaucgaacagcaggccgacaacaugauuaccgagcugcuccaaaaagaguauaucgauagacagggcaagacgccgcuggggcuuguggaccuguuugucuucuccacaucuuuuuaccucauuagcaucuuccugcaccugguuaaaauucccacccaucggcacgugaucggaaagccuugccccaaaccucaucgccuuaaucacaugggcauuuguuccugcggccucuauaagcaccccggggugccggucaaguggaaaagaugaggacuagucccuguucccagagcccacuuuuuuuucuuuuuuugaaauaaaauagccugucuuucagaucucaaaggcucuuuucagagccaccaaaaaaaaaaaaaaaaaaaaaaaaaaaaaaaaaaaaaaaaaaaaaaaaaaaaaaaaaaaaaaaaaaaaaaaaaaaaaaaaaaaaaaaaaaaaaaaaaaaaa

SEQ ID NO: 25429 - RNA, 1764 nt, Artificial Sequence
  mRNA product Design a-2 (hSL-A100) comprising derived and/or modified sequence from LASV(LASV1000-NIG-2009;Clade II)__AIT17782__GPCmut3 (opt5)
aggagaguccgcucagccagguugcagaagcggcuuagcguguguccuaaucuucucucugcguguagguaggccugugccgcaaacaagcuuaccaugggccagaucauuaccuucuuucaagaggugccccacgucaucgaagagguuaugaacauugugcugaucgcccucagccugcuugcuauucugaaggggaucuacaauguggccacaugcggacucuucggccuggucuccuuucuucugcucugugggagaucuugcagcacgaccuauaaaggaguguacgaacugcagacacuggagcucgacauggcgucccugaacaugaccaugccucuuucuuguacaaagaauaacagccaucacuauaucaugguuggcaaugaaaccgggcuggagcucacacugaccaacacguccauuaucaaucauaaauucugcaaccuuucugaugcucacaagaaaaaucuguacgaccaugcccucaugagcauuaucuccaccuuucaccugagcauuccgaacuucaaucaguaugaggccaugucuugugauuuuaacggaggcaagaucuccgugcaguacaaucugagccacacauaugcugucgacgccgcuaaccauugcggcaccauugccaauggggugcuccaaacauucaugcggauggcguggggaggcucuuacaucgcccuggauuccgggaagggaagcugggacuguaucaugaccucuuaccaguaucuuauuauccagaacacgacaugggaagaucacugccaguuuucccgccccagcccuauuggcuaccuggggcuccugucccaaagaacccgggacaucuauauuucucgcagacggcgcggaacauucaccuggacccuuagcgauuccgagggcaacgaaacacccggcggguacugucugacgagauggaugcucaucgaggcugagcugaaaugcuuuggaaauaccgccguugcuaaguguaacgaaaaacaugacgaggaguucugcgauaugcugcggcucuuugacuucaauaagcaggccaucaaacgccugaagaccccugcgcagaugagcauucagcuuaucaacaaggccgugaaugcucugauuaacgaucaacucaucaugaaaaaucaccugagagacauuaugggcauccccuauugcaacuacucuaaguauuguuaccuuaaucacacagucacagggaaaaccucccugccucggugcugucucgugagcaacggaucuuaccugaaugaaacgcauuucagcgacgauaucgaacagcaggccgacaacaugauuacagagcugcuccaaaaggaguauaucgaucgccagggcaaaaccccgcuggggcuuguggaccuguuugucuucuccaccucuuuuuaccucauuagcaucuuccugcaccugguuaagauucccacacauagacacguggugggaaaaccuugccccaagccucaucggcuuaaucacaugggcaucuguuccugcggccucuauaagcaccccggggucccggugaaauggaagcgcugaggacuagucccuguucccagagcccacuuuuuuuucuuuuuuugaaauaaaauagccugucuuucagaucucaaaggcucuuuucagagccaccaaaaaaaaaaaaaaaaaaaaaaaaaaaaaaaaaaaaaaaaaaaaaaaaaaaaaaaaaaaaaaaaaaaaaaaaaaaaaaaaaaaaaaaaaaaaaaaaaaaaa

SEQ ID NO: 25430 - RNA, 1764 nt, Artificial Sequence
  mRNA product Design a-2 (hSL-A100) comprising derived and/or modified sequence from LASV(LASV221-NIG-2010;Clade II)__AIT17624__GPCmut3 (opt5)
aggagaguccgcucagccagguugcagaagcggcuuagcguguguccuaaucuucucucugcguguagguaggccugugccgcaaacaagcuuaccaugggccagaucauuaccuucuuucaagaggugccccacgucaucgaagagguuaugaacauugugcugaucgcccucagccugcuugcuauucugaaggggaucuacaauguggccacaugcggacucuucggccuggucuccuuucuucugcucugugggagaucuugcagcacgaccuauaaaggaguguacgaacugcagacacuggagcucgacauggcgucccugaacaugaccaugccucuuucuuguacaaagaauaacagccaucacuauaucaugguuggcaaugaaaccgggcuggagcucacacugaccaacacguccauuaucaaucauaaauucugcaaccuuucugaugcucacaagaaaaaucuguacgaccaugcccucaugagcauuaucuccaccuuucaccugagcauuccgaacuucaaucaguaugaggccaugucuugugauuuuaacggaggcaagaucuccgugcaguacaaucugagccacacauaugcuauugacgccgcuaaccauugcggcaccaucgccaaugggguccuccaaacauucaugcggauggcguggggaggcucuuacaucgcccuggauuccgggaagggaagcugggacuguauuaugaccucuuaccaguaucuuaucauucagaacacgacaugggaagaucacugccaguuuucccgccccagcccuaucggcuaccuggggcuccugucccaaagaacccgggacauuuauaucucucgcagacggcgcggaacauucaccuggacccuuagcgauuccgagggcaacgaaacacccggcggguacugucugacgagauggaugcucaucgaggcugagcugaaaugcuuuggaaauaccgccguggcuaaguguaacgaaaaacaugacgaggaguucugcgauaugcugcggcucuuugacuucaauaagcaggccauucgcagacugaaaaccccugcgcagaugagcauccagcuuauuaacaaggccguuaaugcucugaucaacgaucaacucauuaugaagaaucaucugcgggacaucaugggcauccccuauugcaacuacucuaaauauuguuaccuuaaucacacagugacagggaagaccucccugccucgcugcugucucgucagcaacggaucuuaccugaaugaaacgcacuucagcgacgauauugaacagcaggccgacaacaugaucacagagaugcugcaaaaagaguauauggauagacagggcaagaccccgcucgggcugguggaccuuuuuguguucuccaccucuuuuuaccugauuagcaucuuccuccaccuggucaaaauucccacacaucggcacguuaucggaaagccuugccccaaaccucaucgccugaaucacaugggcauuuguuccugcggccuuuauaagcaccccggggugccggugaaguggaaaagaugaggacuagucccuguucccagagcccacuuuuuuuucuuuuuuugaaauaaaauagccugucuuucagaucucaaaggcucuuuucagagccaccaaaaaaaaaaaaaaaaaaaaaaaaaaaaaaaaaaaaaaaaaaaaaaaaaaaaaaaaaaaaaaaaaaaaaaaaaaaaaaaaaaaaaaaaaaaaaaaaaaaaa

SEQ ID NO: 25431 - RNA, 1764 nt, Artificial Sequence
  mRNA product Design a-2 (hSL-A100) comprising derived and/or modified sequence from LASV(LASV237-NIG-2010;Clade II)__AIT17638__GPCmut3 (opt5)
aggagaguccgcucagccagguugcagaagcggcuuagcguguguccuaaucuucucucugcguguagguaggccugugccgcaaacaagcuuaccaugggccagaucauuaccuucuuucaagaggugccccacgucaucgaagagguuaugaacauugugcugaucgcccucagccugcuugcuauucugaaggggaucuacaauguggccacaugcggacucuucggccuggucuccuuucuucugcucugugggagaucuugcagcacgaccuauaaaggaguguacgaacugcagacacuggagcucgacauggcgucccugaacaugaccaugccucuuucuuguacaaagaauaacagccaucacuauaucaugguuggcaaugaaaccgggcuggagcucacacugaccaacacguccauuaucaaucauaaauucugcaaccuuucugaugcucacaagaaagaccuguacgaucaugcccucaugagcauuaucuccaccuuucaccugagcauuccgaauuucaaccaguaugaggccaugucuugugacuuuaauggaggcaagaucuccgugcaguacaaccugagccacacauaugcugucgaugccgcuaaucauugcggcaccauugccaacggggugcuccaaacauucaugcggauggcguggggaggcucuuacaucgcccuggacuccgggaagggaagcugggauuguaucaugaccucuuaccaguaucuuauuauccagaauacgacaugggaagaccacugccaguuuucccgccccagcccuauuggcuaccuggggcuccugucccaaagaacccgggauaucuauauuucucgcagacggcgcggaacauucaccuggacccuuagcgacuccgagggcaacgaaacacccggcggguacugucugacgagauggaugcucaucgaggcugagcugaaaugcuuuggaaacaccgccguugcuaaguguaaugaaaaacaugaugaggaguucugcgacaugcugcggcucuuugauuucaacaagcaggccauccgcagacugaaaaccccugcgcagaugagcauucagcuuaucaauaaggccgugaacgcucugauuaaugaccaacucaucaugaagaaccaucugcgggacauuaugggcauccccuauugcaauuacucuaaauauuguuaccuuaaccacacagucacagggaagaccucccugccucgcugcugucucgugagcaauggaucuuaccugaacgaaacgcacuucagcgaugacaucgaacagcaggccgauaauaugauuacagagcugcuccaaaaagaguauauggacagacagggcaagaccccgcuggggcuuguggaucuguuugucuucuccaccucuuuuuaccucaucagcauuuuccugcaccugaucaaaauucccacacaucggcacaucaccggaaagccuugccccaaaccucaucgccuuaaccacaugggcauuuguuccugcggccucuauaagcaccccgggguuccggugaaguggaaaagaugaggacuagucccuguucccagagcccacuuuuuuuucuuuuuuugaaauaaaauagccugucuuucagaucucaaaggcucuuuucagagccaccaaaaaaaaaaaaaaaaaaaaaaaaaaaaaaaaaaaaaaaaaaaaaaaaaaaaaaaaaaaaaaaaaaaaaaaaaaaaaaaaaaaaaaaaaaaaaaaaaaaaa

SEQ ID NO: 25432 - RNA, 1764 nt, Artificial Sequence
  mRNA product Design a-2 (hSL-A100) comprising derived and/or modified sequence from LASV(LASV253-NIG-2011;Clade II)__AIT17670__GPCmut3 (opt5)
aggagaguccgcucagccagguugcagaagcggcuuagcguguguccuaaucuucucucugcguguagguaggccugugccgcaaacaagcuuaccaugggccagaucauuaccuucuuucaagaggugccccacgucaucgaagagguuaugaacauugugcugaucgcccucagccugcuugcuauucugaaggggaucuacaauguggccacaugcggacucuucggccuggucuccuuucuucugcucugugggagaucuugcagcacgaccuauaaaggaguguacgaacugcagacacuggagcucgacauggcgucccugaacaugaccaugccucuuucuuguacaaagaauaacagccaucacuauaucaugguuggcaaugaaaccgggcuggagcucacacugaccaacacguccauuaucaaucauaaauucugcaaccuuucugaugcucacaagaaaaaucuguacgaccaugcccucaugagcauuaucuccaccuuucaccugagcauuccgaacuucaaucaguaugaggccaugucuugugauuuuaacggaggcaagaucuccgugcaguacaaucugagccacacauaugcugucgacgccgcuaaccauugcggcaccauugccaauggggugcuccaaacauucaugcggauggcguggggaggcucuuacaucgcccuggauuccgggaagggaagcugggacuguaucaugaccucuuaccaguaucuuauuauccagaacacgacaugggaagaucacugccaguuuucccgccccagcccuauuggcuaccuggggcuccugucccaaagaacccgggacaucuauauuucucgcagacggcgcggaacauucaccuggacccuuagcgauuccgagggcaacgaaacacccggcggguacugucugacgagauggaugcucaucgaggcugagcugaaaugcuuuggaaauaccgccguugcuaaguguaacgaaaaacaugacgaggaguucugcgauaugcugcggcucuuugacuucaauaagcaggccauccgcagacugaaagcgccugcccagaugagcauucagcuuaucaacaaggcugugaaugcccugauuaacgaucaacucaucaugaagaaucaucugcgggacauuaugggcauccccuauugcaacuacucuaaauauuguuaccuuaaucacacagucaccgggcgcacaucccugccuagaugcugucucgugagcaacggaucuuaccugaaugaaacccacuucagcgacgauaucgaacagcaggcugacaacaugauuacggagcugcuccaaaaggaguauaucgaucggcagggcaaaacaccgcuggggcuuguggaccuguuugucuucuccaccucuuuuuaccucauuagcaucuuccugcaccugguuaagauucccacccaucgccacaucauuggaaaaccuugccccaagccucauagacuuaaucacaugggcaucuguuccugcggccucuauaaacaccccggggugccggugaaguggaagcggugaggacuagucccuguucccagagcccacuuuuuuuucuuuuuuugaaauaaaauagccugucuuucagaucucaaaggcucuuuucagagccaccaaaaaaaaaaaaaaaaaaaaaaaaaaaaaaaaaaaaaaaaaaaaaaaaaaaaaaaaaaaaaaaaaaaaaaaaaaaaaaaaaaaaaaaaaaaaaaaaaaaaa

SEQ ID NO: 25433 - RNA, 1764 nt, Artificial Sequence
  mRNA product Design a-2 (hSL-A100) comprising derived and/or modified sequence from LASV(LASV254-NIG-2011;Clade II)__AIT17674__GPCmut3 (opt5)
aggagaguccgcucagccagguugcagaagcggcuuagcguguguccuaaucuucucucugcguguagguaggccugugccgcaaacaagcuuaccaugggccagaucauuaccuucuuucaagaggugccccacgucaucgaagagguuaugaacauugugcugaucgcccucagccugcuugcuauucugaaggggaucuacaauguggccacaugcggacucuucggccuggucuccuuucuucugcucugugggagaucuugcagcacgaccuauaaaggaguguacgaacugcagacacuggagcucgacaugaccaaccugaauaugacaaugccucuuuccuguaccaagaacaauucucaucacuauaucaugguuggcaacgaaacagggcuggagcucacccugacgaauaccagcauuaucaaccauaaauucugcaaucuuuccgaugcgcacaagaaaaaccuguacaaucaugcucucaugucuauuaucagcacauuucaccuguccauuccgaacuucaaucaguaugaggccaugagcugugacuuuaacggaggcaagaucucugugcaguacaaucugucccacagcuaugccgucgaugcugccaaccauugcggcaccauugcuaacggggugcuccaaacauucaugcggauggccuggggaggcucuuacaucgcgcuggacuccgggaagggaaauugggauuguaucaugaccagcuaccaguaucuuauuauccagaacacgacaugggaagaccacugccaguuuucucgccccuccccuauuggcuaccuggggcuccugagccaaagaacccgggauaucuauauuucccgcagacggcgcggaacauucaccuggacccuuucugacagcgagggcaaugaaacacccggcggguacugucugacgagauggaugcucaucgaggccgagcugaaaugcuuuggaaacaccgcuguugccaaguguaaugaaaaacaugaugaggaguucugcgacaugcugcggcucuuugauuucaacaagcaggcuauccgcagacugaaaaccccugcccaggcgaauauucagcuuaucaacaaggccgugaaugcucugauuaacgaccaacucaucaugaagaaucaucugcgggauauuaugggcauccccuauugcaacuacuccaaauauuguuaccuuaaucacacagucacagggaagaccagccugccucgcugcugucucgugucuaacggauccuaccugaaugaaacgcacuucagcgacgacaucgaacagcaggccgauaacaugauuacagagcugcuccaaaaagaguauauggacagacagggcaagaccccgcuggggcuuguggaucuguuugucuucucuaccagcuuuuaccucaucuccauuuuccugcaccugguuaaaauccccacacaucggcacgugauuggaaagccuugccccaaaccucaucgccuuaaccacaugggcaucuguucuugcggccucuauaagcaccccggggugccggucaaguggaaaagaugaggacuagucccuguucccagagcccacuuuuuuuucuuuuuuugaaauaaaauagccugucuuucagaucucaaaggcucuuuucagagccaccaaaaaaaaaaaaaaaaaaaaaaaaaaaaaaaaaaaaaaaaaaaaaaaaaaaaaaaaaaaaaaaaaaaaaaaaaaaaaaaaaaaaaaaaaaaaaaaaaaaaa

SEQ ID NO: 25434 - RNA, 1764 nt, Artificial Sequence
  mRNA product Design a-2 (hSL-A100) comprising derived and/or modified sequence from LASV(Nig08-A19;Clade III)__ADU56618__GPCmut3 (opt5)
aggagaguccgcucagccagguugcagaagcggcuuagcguguguccuaaucuucucucugcguguagguaggccugugccgcaaacaagcuuaccaugggccagaucgugaccuucuuucaagaggucccccacguuauugaagaggugaugaacaucgugcugauugcccucagcauccuggcuauucuuaaggggcuguacaauaucgccacaugcggacucaucggccuggucacguuccuucugcucuccgggagaucuuguagcaugaccuauaaaggaguguacgaacugcagacacuggagcucaacaugaauacccugaacaugacaaugccucuuuccugcaccaagaauaacucucaucacuauauuaugguuggcaaugaaacagggcuggagcucacccugacgaacaccagccuucugcaucacaaauuuuguaaucucuccgacgcgcauaagaaaaaccuguacgaucacacacugaugucuaucauuagcaccuuccaccucuccaucccgaauuuuaaccaguaugaggcuaugagcugcgacuucaauggaggcaagauuacagugcaguacaaccugucucauuccuaugccaucgaugccgcuaaucacuguggcaccgucgccaacggggugcuucaaacguuuaugcggauggcuuggggaggcagcuacauugcccuggacucugggcgcggaaagugggauugcaucaugacauccuaccaguaucucaucauucagaacaccacaugggaagaccauugucaguucagcagacccucuccuaucggcuaccuggggcuucugucccaacggacccgcgauauuuauaucagcagacggcgcagaggaaccuuuacauggacgcucuccgacucugagggcaaugaaacccccggcggguacugccugacacgguggaugcugauugaggcggagcucaaauguuucggaaacaccgccguugcuaagugcaaugaaaaacacgaugaggaauuuugugacaugcugcgccuuuucgauuuuaacaagcaggccaucagacggcugaaagcuccugcccagaugagcauccagcucauuaauaaggcggugaacgcccugaucaaugaccaacuuauuaugaagaaccaucugcgcgauaucaugggcauucccuauugcaauuacuccaaauauugcuaccucaaccacacaagcaccgggagaacgucucugccucgguguugccuggucuccaauggaagcuaccucaacgagacacacuucucugacgacaucgaacagcaggcugauaauaugaucaccgagaugcugcaaaaggaguaucuugaccgccagggcaaaaccccgcuggggcucguggaucuguucguguuuagcacauccuucuaccugauuucuaucuuucuucaucucgucaagauucccacccacagacauaucguuggaaaaccuugucccaagccucaccggcugaaccacaugggcauuugcagcuguggccuguauaaacagcccggggugccggugagauggaagcgcugaggacuagucccuguucccagagcccacuuuuuuuucuuuuuuugaaauaaaauagccugucuuucagaucucaaaggcucuuuucagagccaccaaaaaaaaaaaaaaaaaaaaaaaaaaaaaaaaaaaaaaaaaaaaaaaaaaaaaaaaaaaaaaaaaaaaaaaaaaaaaaaaaaaaaaaaaaaaaaaaaaaaa

SEQ ID NO: 25435 - RNA, 1767 nt, Artificial Sequence
  mRNA product Design a-2 (hSL-A100) comprising derived and/or modified sequence from LASV(G1180-SLE-2010;Clade IV)__AIT17168__GPCmut3 (opt5)
aggagaguccgcucagccagguugcagaagcggcuuagcguguguccuaaucuucucucugcguguagguaggccugugccgcaaacaagcuuaccaugggccagaucgugaccuucuuucaagaggucccccacguuauugaagaggugaugaacaucgugcugauugcccucagcauccuggcuguccuuaaggggcuguacaauuucgccacaugcggacucgugggccugcuuacguuucugcuccugugugggagauccugcaccgcgucucgguauaaaggaguuuacgaacugcagacacucgagcugaacauggaaacccuuaauaugacaaugccucugagcuguaccaagaacaauucccaucacuauauuauggugggcaacgagacagggcucgagcugacccuuacgaauaccucuaucaucaaccauaaauucugcaaucugagcgacgcucacaagaaaaaccucuacgaucaugcccugauguccauuaucucuacauuucaccugagcauuccgaauuucaaccaguaugaagccauguccugugacuuuaauggaggcaagaucagcguccaguacaaccucucucacuccuaugcuggcgaugccgcuaaucauugcgggaccguggccaacggaguucugcaaacauucaugcgcauggcguggggcgggagcuacauugcccuugacucuggacacggcuccugggauuguaucaugaccagcuaccaguaucugauuauccagaacacgacaugggaggaccauugccaguuuucuagacccuccccuaucggguaccucggacugcuuagccaacggacccgcgauauuuauaucuccagacggcgcagaggcacauucaccuggacccugucugacagcgaaggcaaggauacacccgggggauacugucucacgcgguggaugcugauugaggcugagcugaaaugcuuuggcaauaccgccguggcuaaguguaacgaaaaacacgacgaggaguucugcgauaugcuccgccuguuugacuucaauaagcaggccauccagagacuuaaagcgccugcccagauguccauucaacugaucaacaaggcugucaaugcccucaucaacgaucagcugauuaugaagaaucaccuucgggacaucauggggauucccuauugcaacuacagcaaauauuguuaccugaaucauacaaccacaggaaagaccucucucccuaaaugcugucugguguccaacggcagcuaccugaaugaaacgcacuucucugacgauaucgaacagcaagcugacaacaugauuacagagaugcuccagaaggaguauauggaacgccaggggaaaaccccgcugggacuuguggaucuguuugucuucagcaccuccuuuuaccucaucucuaucuuccugcaucugguuaagauucccacacacagacauaucgugggcaaaagcugcccuaagccccaccggcuuaaucacaugggcauuuguuccugcgggcucuauaagcagccuggagugcccgucaaauggaagcgcugaggacuagucccuguucccagagcccacuuuuuuuucuuuuuuugaaauaaaauagccugucuuucagaucucaaaggcucuuuucagagccaccaaaaaaaaaaaaaaaaaaaaaaaaaaaaaaaaaaaaaaaaaaaaaaaaaaaaaaaaaaaaaaaaaaaaaaaaaaaaaaaaaaaaaaaaaaaaaaaaaaaaa

SEQ ID NO: 25436 - RNA, 1767 nt, Artificial Sequence
  mRNA product Design a-2 (hSL-A100) comprising derived and/or modified sequence from LASV(G1442-SLE-2011;Clade IV)__AIT17180__GPCmut3 (opt5)
aggagaguccgcucagccagguugcagaagcggcuuagcguguguccuaaucuucucucugcguguagguaggccugugccgcaaacaagcuuaccaugggccagaucgugaccuucuuucaagaggucccccacguuauugaagaggugaugaacaucgugcugauugcccucagcauccuggcuguccuuaaggggcuguacaauguggccacaugcggacucauuggccugguuacguuccuucugcucugugggagauccugcaccacaacccuguauaaaggaguguacgaacugcagacacucgagcugaacauggaaacccuuaauaugacaaugccucugucuuguaccaagaacaauagccaucacuauauccgggucggcaacgagacggggcucgagcugacccuuacaaauaccuccaucauuaaccauaaauuuugcaaucugucugacgcgcacaagaaaaaccucuacgaucaugcucugaugagcaucauuuccacauuccaccugucuaucccgaauuuuaaccaguaugaagccaugagcugugacuucaauggaggcaagauuuccgugcaguacaaccucagccacucuuaugccggcgaugcugccaaucauugcgggaccguugcuaacggagugcugcaaacguuuaugcgcauggccuggggcggguccuacaucgcgcuugacagcggaagaggcaacugggauuguauuaugacaucuuaccaguaucugaucauccagaauaccacaugggacgaucacugccaguucucccggcccagcccuauuggguaccucggacugcuuucucaacgcaccagagacgucuauaucucccggcgcagacggggcaccuuuacauggacgcugagcgauuccgagggcaaggacacccccgggggauacugucucacacgcuggaugcugauugaagccgagcugaaaugcuucggcaacaccgcuguggccaaguguaaugagaaacaugaugaagaguuuugcgacaugcucagacuguucgauuuuaacaagcaggcuauccagcggcuuaaagccccugcgcagaugucuauucaacugaucaauaaggccgugaacgcucucaucaaugaccagcugauuaugaagaaccaccuucgcgacaucauggggauucccuauugcaauuacagcaaauauuguuaccugaacaauacagccaccggaaagacgucccucccuaaaugcugucugaucagcaacggcucuuaccugaaugaaacacacuucuccgaugacauugagcaggaagcugauaacaugaucaccgagaugcuccaaaaggaguauauggaaagacaggggaaaaccccgcugggacuugucgaccuguucguuuuuagcacaucuuucuaccucaucagcauuuuucugcaucuggugaagauccccacccaccggcauauugugggcaaauccugcccuaagccccaccgccuuaaucauaugggcaucuguucuugcgggcucuauaagcagccuggaguccccgugagauggaaacggugaggacuagucccuguucccagagcccacuuuuuuuucuuuuuuugaaauaaaauagccugucuuucagaucucaaaggcucuuuucagagccaccaaaaaaaaaaaaaaaaaaaaaaaaaaaaaaaaaaaaaaaaaaaaaaaaaaaaaaaaaaaaaaaaaaaaaaaaaaaaaaaaaaaaaaaaaaaaaaaaaaaaa

SEQ ID NO: 25437 - RNA, 1767 nt, Artificial Sequence
  mRNA product Design a-2 (hSL-A100) comprising derived and/or modified sequence from LASV(G3010-SLE-2013;Clade IV)__AIT17344__GPCmut3 (opt5)
aggagaguccgcucagccagguugcagaagcggcuuagcguguguccuaaucuucucucugcguguagguaggccugugccgcaaacaagcuuaccaugggccagaucgugaccuucuuucaagaggucccccacguuauugaagaggugaugaacaucgugcugauugcccucagcauccuggcuguccuuaaggggcuguacaauuucgccacaugcggacucgugggccugguuacguuucuucugcucugugggagauccugcaccacaucucuguauaaaggaguguacgaacugcagacccucgagcugaacauggaaacacuuaauaugaccaugccucugagcuguacaaagaacaauucccaucacuauauuauggucggcaacgagaccgggcucgagcugacgcuuaccaauacaucuaucaucaaccauaaauucugcaaucugagcgacgcgcacaagaaaaaccucuacaaucaugcucugauguccauuaucucuaccuuucaccugagcauuccgaacuucaaucaguaugaagccauguccugugauuuuaacggaggcaagaucagcgugcaguacaaucucucucacuccuaugccggcgacgcugccagccauugcgggacaguugcuaacggagugcugcaaaccuucaugcggauggccuggggcgggucuuacauugcgcuugauuccggauacggcaagugggacuguaucaugacgagcuaucaguaccugauuauccagaacacaaccugggaggaucacugccaguuuucucgccccuccccuaucggguaucucggacugcuuagccaaagaacacgggacauuuacaucucccgcagacggcgcggcaccuucaccuggacacugucugauagcgaaggcaaagacacgcccgggggauauugucucaccagauggaugcugauugaggccgagcugaagugcuuuggcaauacagcugucgccaaauguaacgaaaagcaugaugaggaguucugcgacaugcuccggcuguuugauuucaauaaacaggcuauccagcgccuuaagaccccugcccagauguccauucaacugaucaacaaggcggugaaugcccucaucaacgaccagcugauuaugaaaaaucaccuuagagauaucauggggauucccuacugcaacuauagcaaguacuguuaccugaaucacacaaccacgggaaaaacaucucucccuaagugcugucugguguccaacggcagcuaucugaaugaaacccauuucucugacgacaucgaacagcaagcugauaacaugauuaccgagaugcuccagaaagaguacauggaacggcaggggaagacaccgcugggacuugucgaccuguuuguuuucagcaccuccuuuuaucucaucucuaucuuccugcaccuggugaaaauucccacacaucgccacaucgugggcaagagcugcccuaagccccauagacuuaaucacaugggcauuuguuccugcgggcucuacaaacagccuggaguccccgugcgguggaagcgcugaggacuagucccuguucccagagcccacuuuuuuuucuuuuuuugaaauaaaauagccugucuuucagaucucaaaggcucuuuucagagccaccaaaaaaaaaaaaaaaaaaaaaaaaaaaaaaaaaaaaaaaaaaaaaaaaaaaaaaaaaaaaaaaaaaaaaaaaaaaaaaaaaaaaaaaaaaaaaaaaaaaaa

SEQ ID NO: 25438 - RNA, 1767 nt, Artificial Sequence
  mRNA product Design a-2 (hSL-A100) comprising derived and/or modified sequence from LASV(G502-SLE-2009;Clade IV)__AIT17126__GPCmut3 (opt5)
aggagaguccgcucagccagguugcagaagcggcuuagcguguguccuaaucuucucucugcguguagguaggccugugccgcaaacaagcuuaccaugggccagaucgugaccuucuuucaagaggucccccacguuauugaagaggugaugaacaucgugcugauugcccucagcauccuggcuguccuuaaggggcuguacaauuucgccacaugcggacucgugggccugcuuacguuucugcuccugugugggagauccugcaccacaggacuguauaaaggcguuuacgaacuccagacccuggagcuuaacauggaaacacugaauaugaccaugccucucucuuguacaaagaacaauagccaucacuauauuaugguggggaacgagaccggacuggagcuuacgcugaccaauacauccaucaucaaccauaaauucugcaaucucucugacgcgcacaagaaaaaccuguacgaucaugcucugaugagcauuaucuccaccuuucaccucucuauuccgaauuucaaccaguaugaagccaugagcugugacuuuaauggcggcaagaucuccguccaguacaaccugagccacucuuaugccggggaugcugccgaccauugcggaacaguggcuaauggcguucuucaaaccuucaugcggauggccuggggaggguccuacauugcgcuggauagcggccgcgggagaugggacuguaucaugacgucuuaccaguaucucauuauccagaacacaaccugggaggaucacugccaguuuucccggcccagcccuaucggauaccugggccuucugucucaacgcacaagagacauuuauaucucccggcgcagacggggcaccuucaccuggacacucagcgauuccgaagggaaggacacgcccggaggcuacugucugacccgcuggaugcugauugaggccgagcucaaaugcuuugggaacacagcuguggccaaguguaaugaaaaacaugaugaggaguucugcgacaugcugagacuuuuugauuucaacaagcaggcuauccagcggcugaaagccccugcgcagaugucuauucaacucaucaauaaggccgucaacgcucugaucaaugaccagcuugugaugaagaaccaucugcgcgacauuaugggaauccccuauugcaauuacagcagauauuguuaccucaaccacaccacaaccggccggacgucccugccuaaaugcugucuggugagcaaugggucuuaccucaacgaaacacacuucuccgaugacauugaacagcaagccgauaauaugaucaccgagaugcugcagaaggaguauauggaacgccagggaaaaaccccgcuuggccuggucgaccucuuuguuuucagcacaucuuuuuaccugauuagcaucuuccugcaccuugugaagauccccacccauagacacauugugggcaaauccugcccuaagccccaucggcucaaccacauggggaucuguucuugcggacuguauaaacagccuggcguccccgugaaguggaagagaugaggacuagucccuguucccagagcccacuuuuuuuucuuuuuuugaaauaaaauagccugucuuucagaucucaaaggcucuuuucagagccaccaaaaaaaaaaaaaaaaaaaaaaaaaaaaaaaaaaaaaaaaaaaaaaaaaaaaaaaaaaaaaaaaaaaaaaaaaaaaaaaaaaaaaaaaaaaaaaaaaaaaa

SEQ ID NO: 25439 - RNA, 1767 nt, Artificial Sequence
  mRNA product Design a-2 (hSL-A100) comprising derived and/or modified sequence from LASV(G733-SLE-2010;Clade IV)__AIT17154__GPCmut3 (opt5)
aggagaguccgcucagccagguugcagaagcggcuuagcguguguccuaaucuucucucugcguguagguaggccugugccgcaaacaagcuuaccaugggccagaucgugaccuucuuucaagaggucccccacguuauugaagaggugaugaacaucgugcugauugcccucagcauccuggcuguccuuaaggggcuguacaauuucgccacaugcggaauugugggccucguuuccuuucugcuucugugugggagaucuugcacgaccagccucuauaaaggaguguacgaacugcagacacuggagcucaacauggaaacccugaauaugacaaugccucuuuccuguaccaagaacaauucucaucacuauaucauggucggcaacgagacagggcuggagcucacccugacgaauaccagcaucauuaaccauaaauucugcaaucuuuccgacgcgcacaagaaaaaccuguacgaucaugcucucaugucuaucauuagcacauuucaccuguccaucccgaauuucaaccaguaugaagccaugagcugugacuuuaauggaggcaagauuucugugcaguacaaccugucccacagcuaugccggcgaugcugccaaucauugcgggaccaucgcuaacggaguucuccaaacauucaugcggauggccuggggcgggucuuacauugcgcuggacuccggacgcgauagaugggacuguaucaugaccagcuaccaguaucuuaucauucagaacacgacaugggaggaucacugccaguuuucucggcccuccccuaucggcuaccuggggcuccugagccaacgcaccagagacauuuauaucucccggcgcagacggggaacauucaccuggacccuuucugauagcgaaggcaaggacacacccggcggguacugucugacgcgcuggaugcucauugaggccgagcugaaaugcuuuggaaauaccgcuguggccaaguguaacgaaaaacaugaugaggaguucugcgacaugcugagacucuuugauuucaauaagcaggcuauccagcggcugaaagccccugcgcagauguccauccaacuuauuaacaaggccgucaaugcucugaucaacgaccagcucauuaugaagaaucaucugcgcgacaucaugggcauucccuauugcaacuacagcaaauauuguuaccuuaaucacacaaccacagggaagaccucucugccuaaaugcugucucguguccaacggaagcuaccugaaugaaacgcacuucucugaugacaucgaacagcaagccgauaacaugaucacagagaugcugcagaaggaguauauggaaagacagggcaaaaccccgcucgggcugguggaccuuuuugucuucagcaccuccuuuuaccugauuucuaucuuccuccaccugguuaagauucccacacaucggcacguggugggaaaaagcugcccuaagccccaucgccugaaucacaugggcaucuguuccugcggccuuuaugggcagccuggaguccccgugaaguggaaaagaugaggacuagucccuguucccagagcccacuuuuuuuucuuuuuuugaaauaaaauagccugucuuucagaucucaaaggcucuuuucagagccaccaaaaaaaaaaaaaaaaaaaaaaaaaaaaaaaaaaaaaaaaaaaaaaaaaaaaaaaaaaaaaaaaaaaaaaaaaaaaaaaaaaaaaaaaaaaaaaaaaaaaa

SEQ ID NO: 25440 - RNA, 1767 nt, Artificial Sequence
  mRNA product Design a-2 (hSL-A100) comprising derived and/or modified sequence from MOPV/LASV reassortant(IGS-1;Clade IV)__AFY05576__GPCmut3 (opt5)
aggagaguccgcucagccagguugcagaagcggcuuagcguguguccuaaucuucucucugcguguagguaggccugugccgcaaacaagcuuaccaugggccagaucgugaccuucuuucaagaggucccccacguuauugaagaggugaugaacaucgugcugauugcccucagcguccuggcugugcuuaaggggcuguacaauuucgccacaugcggacucguuggccuggugacguuucuucugcucugugggagauccugcaccacaucucuguauaaaggagucuacgaacugcagacccucgagcugaacauggaaacacuuaauaugaccaugccucugagcuguacaaagaacaauucccaucacuauaucauggugggcaacgagaccgggcucgagcugacgcuuaccaauacaucuauuaucaaccauaaauucugcaaucugagcgacgcgcacaagaaaaaccucuacgaucaugcucugauguccaucauuucuaccuuucaccugagcaucccgaauuucaaccaguaugaagccauguccugugacuuuaauggaggcaagauuagcguucaguacaaccucucucacuccuaugccggcgaugcugccaaucauugcgggacaguggcuaacggaguccugcaaaccuucaugcggauggccuggggcgggagcuacaucgcgcuugacucuggacgcggcaacugggauuguauuaugacguccuaccaguaucugaucauucagaauacaaccugggaggaccacugccaguuuagcagacccucuccuaucggguaccucggacugcuuucccaacggacacgcgauaucuauauuagcagacggcgcagaggcaccuucaccuggacacuguccgacucugaaggcgaggauacgcccgggggauacugucucacccgguggaugcugaucgaggccgaacugaagugcuuuggcaacacagcuguggccaaauguaaugagaagcaugacgaagaguucugcgauaugcuccgccuguuugacuucaacaaacaggcuauucagagacuuaaggccccugcgcagaugagcauccaacugauuaauaaagccgugaacgcucucaucaaugaucagcugaucaugaagaaccaccuucgggacauuauggggauccccuauugcaauuacuccaaguauuguuaccugaaccacaccacaaccggacgcacgagccucccuaaaugcugucuggucucuaauggcuccuaccugaacgaaacacauuucagcgacgauauugagcagcaagccgacaauaugaucaccgagaugcuccagaaggaauauauggagagacaggggaaaaccccgcugggacuuguugaucuguuuguguucucuaccagcuuuuaccucauuuccaucuuccugcaccuggugaagauccccacacaucggcacauugucggcaaaucuugcccuaagccccaucgccuuaaccacaugggcaucuguagcugcgggcucuauaaacagccuggagugcccguuaaguggaagagaugaggacuagucccuguucccagagcccacuuuuuuuucuuuuuuugaaauaaaauagccugucuuucagaucucaaaggcucuuuucagagccaccaaaaaaaaaaaaaaaaaaaaaaaaaaaaaaaaaaaaaaaaaaaaaaaaaaaaaaaaaaaaaaaaaaaaaaaaaaaaaaaaaaaaaaaaaaaaaaaaaaaaa

SEQ ID NO: 25441 - RNA, 1767 nt, Artificial Sequence
  mRNA product Design a-2 (hSL-A100) comprising derived and/or modified sequence from LASV(LM765-SLE-2012;Clade IV)__AIT17814__GPCmut3 (opt5)
aggagaguccgcucagccagguugcagaagcggcuuagcguguguccuaaucuucucucugcguguagguaggccugugccgcaaacaagcuuaccaugggccagaucgugaccuucuuucaagaggucccccacguuauugaagaggugaugaacaucgugcugauugcccucagcauccuggcuguccuuaaggggcuguacaauuucgccacaugcggacucgugggccugguuacguuucuucugcucugugggagauccugcaccacaucucuguauaaaggaguguacgaacugcagacccucgagcugaacauggaaacacuuaauaugaccaugccucugagcuguacaaagaacaauucccaucacuauauuauggucggcaacgagaccgggcucgagcugacgcuuaccaauacaucuaucaucgaccauaaauucugcaaccugagcgaugcgcaccggaagaaucucuacgaccaugcucugauguccauuaucucuaccuuucaccugagcauuccgaacuucaaucaguaugaagccauguccugugauuuuaacggaggcaaaaucagcgugcaguacaaucucucucacuccuaugccaaggacgcugccgaucauugcggcacaguugcuaacggggugcugcaaaccuucaugcgcauggccuggggaggcagcuacauugcgcuugacucugggagaggacggugggauuguaucaugacguccuaccaguaucugauuauccagaauacaaccugggaggaccacugccaguuuagccgccccucuccuaucggcuaccucgggcugcuuucccaaagaacacgggauauuuauaucagccgcagacggcgcggaaccuucaccuggacacuguccgacucugaaggcaaggauacgcccggcggguacugucucaccagauggaugcugauugaggccgagcugaaaugcuuuggaaacacagcugucgccaaguguaacgaaaaacaugacgaggaguucugcgauaugcuccggcuguuugacuucaauaagcaggcuauccagcgccuuaaagccccugcgcagaugagcauucaacugaucaacaaggccgugaaugcucucaucaacgaccagcugauuaugaagaaucaccuuagagauaucaugggcauucccuauugcaacuacuccaaauauuguuaccugaaucacaccacaaccgggaagacgagccucccuaaaugcugucuggugucuaacggauccuaccugaaugaaacacauuucagcgacgauaucgaacagcaagccgacaacaugauuaccgagaugcuccagaaggaguauauggaacggcagggcaaaaccccgcuggggcuugucgaucuguuuguuuucucuaccagcuuuuaccucaucuccaucuuccugcaccuggugaagauucccacacaucgccacaucgugggaaaaccuugccccaagccucauagacuuaaucacaugggcauuuguucuugcggccucuauaagcagcccggggucccggugaaauggaagcggugaggacuagucccuguucccagagcccacuuuuuuuucuuuuuuugaaauaaaauagccugucuuucagaucucaaaggcucuuuucagagccaccaaaaaaaaaaaaaaaaaaaaaaaaaaaaaaaaaaaaaaaaaaaaaaaaaaaaaaaaaaaaaaaaaaaaaaaaaaaaaaaaaaaaaaaaaaaaaaaaaaaaa

SEQ ID NO: 25442 - RNA, 1767 nt, Artificial Sequence
  mRNA product Design a-2 (hSL-A100) comprising derived and/or modified sequence from LASV(LM776-SLE-2012;Clade IV)__AIT17824__GPCmut3 (opt5)
aggagaguccgcucagccagguugcagaagcggcuuagcguguguccuaaucuucucucugcguguagguaggccugugccgcaaacaagcuuaccaugggccagaucgugaccuucuuucaagaggucccccacguuauugaagaggugaugaacaucgugcugauugcccucagcauccuggcuguccuuaaggggcuguacaauuucgccacaugcggacucgugggccugguuacguuucuucugcucugugggagauccugcaccacaucuguguauaaaggagucuacgaacugcagacccuggagcucaacauggaaacacugaauaugaccaugccucuuagcuguacaaagaacaauucccaucacuauauuauggugggcaacgagaccgggcuggagcucacgcugaccaauacaucuaucaucaaccauaaauucugcaaucuuagcgacgcgcacaagaaaaaccuguacgaucaugcucucauguccauuaucucuaccuuucaccugagcauuccgaauuucaaccaguaugaagccauguccugugacuuuaauggaggcaagaucagcguucaguacaaccugucucacuccuaugccggcgaugcugccaaucauugcgggacaguggcuaacggaguccuccaaaccuucaugcggauggccuggggcgggagcuacauugcgcuggacucuggacacggcaagugggauuguaucaugacguccuaccaguaucuuauuauccagaacacaaccugggaggaccauugccaguuuagccgccccucuccuaucggguaccugggacuccugucccaaagaacacgggauauuuauaucagccgcagacggcgcggcaccuucaccuggacacuuuccgacucugaaggcaaagauacgcccgggggauacugucugaccagauggaugcucauugaggccgagcugaagugcuuuggcaauacagcuguggccaaauguaacgaaaagcacgacgaggaguucugcgauaugcugcggcucuuugacuucaauaaacaggcuauccagcgccugaaggccccugcgcagaugagcauucaacuuaucaacaaggccgugaaugcucugaucaacgaucagcucauuaugaaaaaucaccugagagacaucauggggauucccuauugcaacuacuccaaguauuguuaccuuaaucauaccacaaccggaaaaacgagccugccuaagugcugucucgucucuaacggcuccuaccugaaugaaacacacuucagcgacgauaucgaacagcaagccgacaacaugauuaccgagaugcugcagaaagaguauauggaacggcaggggaagaccccgcucggacugguugaucuuuuuguguucucuaccagcuuuuaccugaucuccaucuuccuccaucuggugaaaauucccacacaccgccauaucgucggcaagucuugcccuaagccccacagacugaaucacaugggcauuuguagcugcgggcuuuauaaacagccuggagugcccguucgguggaagcgcugaggacuagucccuguucccagagcccacuuuuuuuucuuuuuuugaaauaaaauagccugucuuucagaucucaaaggcucuuuucagagccaccaaaaaaaaaaaaaaaaaaaaaaaaaaaaaaaaaaaaaaaaaaaaaaaaaaaaaaaaaaaaaaaaaaaaaaaaaaaaaaaaaaaaaaaaaaaaaaaaaaaaa

SEQ ID NO: 25443 - RNA, 1767 nt, Artificial Sequence
  mRNA product Design a-2 (hSL-A100) comprising derived and/or modified sequence from LASV(Mad39;Clade IV)__ANH09722__GPCmut3 (opt5)
aggagaguccgcucagccagguugcagaagcggcuuagcguguguccuaaucuucucucugcguguagguaggccugugccgcaaacaagcuuaccaugggccagaucgugaccuucuuucaagaggucccccacguuauugaagaggugaugaacaucgugcugauugcccucagcauccuggcuguccuuaaggggcuguacaauguggccacaugcggacucauuggccugguuacguuccuucugcucugugggagauccugcaccacaacccuguauaaaggaguguacgaacugcaggcgcucgagcugaacauggaaacacuuaauaugaccaugccucugucuuguacaaagaacaauagccaucacuauauccgggucggcaacgagaccgggcucgagcugacgcuuaccaauacaucccugaucaaccauaaauuuugcaaucucucugacgcucacaagaaaaaccuguacgaucaugcccugaugagcauuaucuccaccuuccaccucucuauuccgaauuuuaaccaguaugaagccaugagcugugacuucaaugauggaaagaucuccgugcaguacaaccugagccacacauaugcuggcgacaccgccaaucauugcggcacgguugcuaacggggugcuucaaacauuuaugcgcauggccuggggaggcucuuacauugcgcuggauuccgggagaggaggcugggacuguaucaugaccagcuaccaguaucucauuauccagaacacaaccugggaggaucacugccaguucucucggcccuccccuaucggguaccugggacuucugagccaacgcaccagagacauuuauaucucucggcgcagacggggcacauuuacguggacccucuccgauagcgaaggcaaggacacacccgggggauacugucugacccgcuggaugcugauugaggccgagcucaaaugcuucggcaauacagcugucgccaaguguaacgaaaaacaugaugaggaauuuugcgacaugcugagacuuuucgauuuuaauaagcaggcuauccagcggcugaaagccccugcgcagauguccauucaacucaucaacaaggccgugaaugcucugaucaacgaccagcuuauuaugaagaaucaucugcgcgacaucauggggauucccuauugcaacuacucuaaauauuguuaccucaaucacaccgugacgggaaagacaagccugccuaaaugcugucuggucuccaacggcagcuaccucaaugagacccacuucucugaugacaucgaacagcaagccgauaacaugauuaccgagaugcugcagaaggaguauauggaaagacaggggaaaacaccgcuuggacugguugaccucuucguguuuuccaccagcuucuaccugaucucuaucuuucugcaccuugugaagauucccacacaucggcacgucgugggcaaaccuugccccaagccucaucgccucaaucacaugggcaucuguagcugcggguucuauaagcagcccggaguuccggugagauggaaacggugaggacuagucccuguucccagagcccacuuuuuuuucuuuuuuugaaauaaaauagccugucuuucagaucucaaaggcucuuuucagagccaccaaaaaaaaaaaaaaaaaaaaaaaaaaaaaaaaaaaaaaaaaaaaaaaaaaaaaaaaaaaaaaaaaaaaaaaaaaaaaaaaaaaaaaaaaaaaaaaaaaaaa

SEQ ID NO: 25444 - RNA, 1767 nt, Artificial Sequence
  mRNA product Design a-2 (hSL-A100) comprising derived and/or modified sequence from LASV(Z0947-SLE-2011;Clade IV)__AIT17840__GPCmut3 (opt5)
aggagaguccgcucagccagguugcagaagcggcuuagcguguguccuaaucuucucucugcguguagguaggccugugccgcaaacaagcuuaccaugggccagaucgugaccuucuuucaagaggucccccacguuauugaagaggugaugaacaucgugcugauugcccucagcauccuggcuguccuuaaggggcuguacaauuucgccacaugcggacucgugggccugguuacguuucuucugcucugugggagauccugcaccauuucucuguauaaaggaguguacgaacugcagacacucgagcugaacauggaaacccuuaauaugacaaugccucugagcuguaccaagaacaauucccaucacuauaucauggucggcaacgagacagggcucgagcugacccuuacgaauaccucuaucauuaaccauaaauucugcaaucugagcgacgcgcacaagaaaaaccucuacgaucaugcucugauguccaucauuucuacauuucaccugagcaucccgaauuucaaccaguaugaagccauguccugugacuuuaauggaggcaagauuagcgugcaguacaaccucucucacuccuaugccggcgaugcugccaaucauugcgggaccguugcuaacggagugcugcaaacauucaugcggauggccuggggcgggagcuacaucgcgcuugacucuggacgcgauagaugggacuguauuaugaccuccuaccaguaucugaucauccagaacacgacaugggaggaucacugccaguuuagccggcccucuccuauuggcuaccucgggcugcuuucccaacgcaccagagacaucuauauuagccggcgcagacggggaacauucaccuggacccuguccgauucugaaggcaaggacacacccggcggguacugucucacgcgcuggaugcugaucgaggccgagcugaaaugcuuuggaaauaccgcugucgccaaguguaacgaaaaacaugaugaggaguucugcgacaugcucagacuguuugauuucaauaagcaggcuauucagcggcuuaaagccccugcgcagaugagcauccaacugaucaacaaggccgugaaugcucucauuaacgaccagcugaucaugaagaaucaccuucgcgacauuaugggcauccccuauugcaacuacuccaaauauuguuaccugaaucacacaaccacagggaagaccagccucccuaaaugcugucuggugucuaacggauccuaccugaaugaaacgcauuucagcgaugacauugaacagcaagccgauaacaugaucacagagaugcuccagaaggaguauauggaaagacagggcaaaaccccgcuggggcuugucgaccuguuuguuuucucuaccagcuuuuaccucaucuccauuuuccugcaccuggugaagauccccacacaucggcacauugugggaaaaccuugccccaagccucaucgccuuaaucacaugggcaucuguucuugcggccucuauaagcagcccggggucccggugaaauggaagagaugaggacuagucccuguucccagagcccacuuuuuuuucuuuuuuugaaauaaaauagccugucuuucagaucucaaaggcucuuuucagagccaccaaaaaaaaaaaaaaaaaaaaaaaaaaaaaaaaaaaaaaaaaaaaaaaaaaaaaaaaaaaaaaaaaaaaaaaaaaaaaaaaaaaaaaaaaaaaaaaaaaaaa

SEQ ID NO: 25445 - RNA, 1743 nt, Artificial Sequence
  mRNA product Design a-2 (A100) comprising derived and/or modified sequence from LASV(Josiah;Clade IV)__NP_694870__GPCmut3 (opt1)
aggagaguccgcucagccagguugcagaagcggcuuagcguguguccuaaucuucucucugcguguagguaggccugugccgcaaacaagcuuaccaugggccagaucgugaccuucuuccaggaggucccccacgugaucgaggaggugaugaacaucguccugaucgcccucagcgugcuggccgugcugaaggggcucuacaacuucgcgaccugcggccuggucgggcuggugacguuccuccugcugugcggccgcuccugcaccaccagccucuacaaggggguguacgagcugcagacccuggagcucaacauggagacgcugaacaugaccaugccgcuguccugcaccaagaacaacagccaccacuacaucauggucggcaacgagaccggccucgagcugacgcugaccaacaccuccaucaucaaccacaaguucugcaaccucagcgacgcccacaagaagaaccuguacgaccacgcccugauguccaucaucagcaccuuccaccucuccauccccaacuucaaccaguacgaggccaugagcugcgacuucaacgggggcaagaucuccgugcaguacaaccugagccacuccuacgccggggacgcggccaaccacugcggcacgguggccaacgggguccugcagaccuucaugcggauggccuggggcggcagcuacaucgcgcucgacuccgggcgcggcaacugggacugcaucaugaccagcuaccaguaccugaucauccagaacaccacgugggaggaccacugccaguucucccggcccagccccaucggguaccugggccuccugucccagcgcacccgggacaucuacaucagccgccggcgccggggcaccuucaccuggacgcugagcgacuccgaggggaaggacaccccgggcggguacugccugacccgcuggaugcucaucgaggccgagcugaagugcuucggcaacaccgccguggccaagugcaacgagaagcacgacgaggaguucugcgacaugcugcggcuguucgacuucaacaagcaggccauccagcgccugaaggcgcccgcccagaugagcauccagcugaucaacaaggccgugaacgcccucaucaacgaccagcugaucaugaagaaccaccuccgggacaucauggggauccccuacugcaacuacuccaaguacugcuaccucaaccacacgaccaccggccgcaccagccugcccaagugcugccuggucuccaacggcagcuaccucaacgagacgcacuucuccgacgacaucgagcagcaggccgacaacaugaucaccgagaugcugcagaaggaguacauggagcggcaggggaagacgccccugggccucguggaccuguucguguucagcaccuccuucuaccugaucagcaucuuccugcaccucgucaagaucccgacccaccgccacaucguggggaaguccugccccaagccccaccggcugaaccacaugggcaucugcagcugcgggcuguacaagcagcccggcgugccggucaaguggaagcgcugaggacuagucccuguucccagagcccacuuuuuuuucuuuuuuugaaauaaaauagccugucuuucagaucuaaaaaaaaaaaaaaaaaaaaaaaaaaaaaaaaaaaaaaaaaaaaaaaaaaaaaaaaaaaaaaaaaaaaaaaaaaaaaaaaaaaaaaaaaaaaaaaaaaaa

SEQ ID NO: 25446 - RNA, 1740 nt, Artificial Sequence
  mRNA product Design a-2 (A100) comprising derived and/or modified sequence from LASV(LP;Clade I)__AAF86701__GPCmut3 (opt1)
aggagaguccgcucagccagguugcagaagcggcuuagcguguguccuaaucuucucucugcguguagguaggccugugccgcaaacaagcuuaccaugggccagaucaucaccuucuuccaggaggugccccacgucaucgaggaggugaugaacaucgugcugaucgcccucagccugcuggccauccucaaggggcuguacaacaucgcgaccugcggcaucaucgggcuggucgccuuccucuuccugugcggcaaguccugcagccugacgcucaagggcggguacgagcugcagacccuggagcucaacauggagacccugaacaugaccaugccgcuguccugcacgaagaacagcucccaccacuacauccgcgugggcaacgagaccgggcucgagcugacccugaccaacacgagcaucaucaaccacaaguucugcaaccucuccgacgcccacaagaagaaccuguacgaccacgcccugaugagcaucaucuccaccuuccaccucagcauccccaacuucaaccaguacgaggccauguccugcgacuucaacggcgggaagaucagcgugcaguacaaccugucccacagcuacgcgggcgacgccgccgagcacugcgggaccgucgccaacggcgugcugcagaccuucaugcggauggcguggggcgggcgcuacaucgcccucgacuccggcaaggggaacugggacugcaucaugacgagcuaccaguaccugaucauccagaacaccaccugggaggaccacugccaguucucccggcccagccccaucggcuaccugggccuccugucccagcgcacccgggacaucuacaucagccgccggcgccgggggacguucaccuggacccugagcgacuccgagggcaacgagacccccgggggcuacugccugacgcgcuggaugcucaucgaggccgagcugaagugcuucgggaacaccgccguggccaagugcaacgagaagcacgacgaggaguucugcgacaugcugcggcuguucgacuucaacaagcaggcgauccgccggcugaaggcccccgcccagaugagcauccagcugaucaacaaggccgucaacgcccucaucaacgaccagcugaucaugaagaaccaccuccgcgacaucaugggcauccccuacugcaacuacuccaaguacugcuaccucaaccacaccagcuccggccggaccagccugcccaagugcugccugaucuccaacgggagcuaccucaacgagacgcaguucuccgacgacaucgagcagcaggcggacaacaugaucaccgagaugcugcagaaggaguacaucgagcgccagggcaagaccccgcuggggcucguggacaucuucaucuucagcaccuccuucuaccugaucagcaucuuccugcaccugaucaagaucccgacgcaccggcacaucgugggcaagcccugccccaagccccaccgccucaaccacaugggggucugcuccugcggccuguacaagcacccgggcgugcccaccaaguggaagcggugaggacuagucccuguucccagagcccacuuuuuuuucuuuuuuugaaauaaaauagccugucuuucagaucuaaaaaaaaaaaaaaaaaaaaaaaaaaaaaaaaaaaaaaaaaaaaaaaaaaaaaaaaaaaaaaaaaaaaaaaaaaaaaaaaaaaaaaaaaaaaaaaaaaaa

SEQ ID NO: 25447 - RNA, 1740 nt, Artificial Sequence
  mRNA product Design a-2 (A100) comprising derived and/or modified sequence from LASV(803213;Clade II)__AAF86703__GPCmut3 (opt1)
aggagaguccgcucagccagguugcagaagcggcuuagcguguguccuaaucuucucucugcguguagguaggccugugccgcaaacaagcuuaccaugggccagaucaucaccuucuuccaggaggugccccacgucaucgaggaggugaugaacaucgugcugaucgcccucagccugcuggccauccucaaggggaucuacaacgucgcgaccugcggccuguucgggcugaucuccuuccuccugcugugcggccgcagcugcuccgugacguacaaggggguguacgagcuccagacccuggagcugaacauggccaaccucaacaugaccaugccgcugagcugcaccaagaacaacucccaccacuacaucauggucggcaacgagacgggccuggagcucacccugaccaacaccagcaucaucaaccacaaguucugcaaccuguccgacgcccacaagaagaaccucuacgaccacgcccugaugagcaucaucuccacguuccaccugagcauccccaacuucaaccaguacgaggccauguccugcgacuucaacgggggcaagaucagcgugcaguacaaccucucccacagcuucgcgguggacgccgccaaccacugcgggaccaucgccaacggcguccugcagaccuucaugcggauggcguggggcggguccuacaucgcccuggacagcggcaaggggaacugggacugcaucaugaccuccuaccaguaccucaucauccagaacacgaccugggaggaccacugccaguucagccgccccucccccaucggcuaccuggggcugcucagccagcggacccgcgacaucuacaucagccggcgccgccggggcaccuucacguggacccucuccgacagcgagggcaacgaggcccccgggggcuacugccugacccgguggaugcugaucgaggccgagcucaagugcuucgggaacaccgccguggcgaagugcaacgagaagcacgacgaggaguucugcgacaugcugcgccuguucgacuucaacaagcaggccaucaagcggcucaagacgcccgcccagauguccauccagcugaucaacaaggccgugaacgcccugaucaacgaccagcucaucaugaagaaccaccuccgcgacaucaugggcauccccuacugcaacuacagccgguacugcuaccugaaccacaccgucaccgggaagaccucccugccccgcugcugccuggugagcaacggcuccuaccugaacgagacgcacuucagcgacgacaucgagcagcaggcggacaacaugaucaccgagaugcuccagaaggaguacauggaccggcagggcaagaccccgcuggggcugguggaccucuucgucuucuccaccagcuucuaccugaucuccaucuuccugcaccuggugaagaucccgacgcaccgccacaucgugggcaagcccugccccaagccccaccggcucaaccacauggggaucugcagcugcggccuguacaagcacccggggguccccgugaaguggaagcgcugaggacuagucccuguucccagagcccacuuuuuuuucuuuuuuugaaauaaaauagccugucuuucagaucuaaaaaaaaaaaaaaaaaaaaaaaaaaaaaaaaaaaaaaaaaaaaaaaaaaaaaaaaaaaaaaaaaaaaaaaaaaaaaaaaaaaaaaaaaaaaaaaaaaaa

SEQ ID NO: 25448 - RNA, 1740 nt, Artificial Sequence
  mRNA product Design a-2 (A100) comprising derived and/or modified sequence from LASV(GA391;Clade III)__CAA36645__GPCmut3 (opt1)
aggagaguccgcucagccagguugcagaagcggcuuagcguguguccuaaucuucucucugcguguagguaggccugugccgcaaacaagcuuaccaugggccagaucgugaccuucuuccaggaggucccccacgugaucgaggaggugaugaacaucguccugaucgcccucagcauccuggccauccugaaggggcucuacaacguggcgaccugcggccugaucgggcuggugacguuccuccugcuguccggccgcagcugcucccucaucuacaaggggaccuacgagcugcagacccuggagcucaacauggagacccugaacaugacgaugccgcugagcugcaccaagaacaacucccaccacuacauccgggucggcaacgagaccggccucgagcugacccugacgaacaccagcauccucaaccacaaguucugcaaccuguccgacgcccacaagcgcaaccuguacgaccacagccucauguccaucaucagcaccuuccaccuguccauccccaacuucaaccaguacgaggccaugagcugcgacuucaacgggggcaagaucaccgugcaguacaaccugucccacagcuucgccguggacgccgcggggcacugcggcacgcucgccaacgggguccugcagaccuucaugcggauggccuggggcggcuccuacaucgcccuggacagcgggcgcggcaacugggacugcaucaugaccuccuaccaguaccucaucauccagaacaccacgugggacgaccacugccaguucagccggcccucccccaucggguaccugggccugcucagccagcgcacccgggacaucuacaucagccgccggcgccggggcaccuucaccuggacgcucuccgacagcgaggggaacgagaccccgggcggguacugccugacccgcuggaugcugaucgaggcggagcucaagugcuucggcaacaccgccguggccaagugcaacgagaagcacgacgaggaguucugcgacaugcugcggcuguucgacuucaacaagcaggccauccgccggcucaagacgcccgcccagauguccauccagcugaucaacaaggcggugaacgcccugaucaacgaccagcucaucaugaagaaccaccuccgcgacaucauggggauccccuacugcaacuacagccgguacugcuaccugaaccacaccuccaccggcaagaccagccugccccgcugcugccugaucuccaacggcagcuaccugaacgagacgaaguucuccgacgacaucgagcagcaggccgacaacaugaucaccgagaugcuccagaaggaguacaucgaccggcaggggaagacgccccugggccuggucgaccuguucguguucagcaccuccuucuaccucaucagcaucuuccugcaccuggugaagaucccgacccaccgccacaucgucgggaagcccugccccaagccccaccggcucaaccacaugggcaucugcuccugcgggcuguacaagcagccgggcgugcccgugcgcuggaagcggugaggacuagucccuguucccagagcccacuuuuuuuucuuuuuuugaaauaaaauagccugucuuucagaucuaaaaaaaaaaaaaaaaaaaaaaaaaaaaaaaaaaaaaaaaaaaaaaaaaaaaaaaaaaaaaaaaaaaaaaaaaaaaaaaaaaaaaaaaaaaaaaaaaaaa

SEQ ID NO: 25449 - RNA, 1743 nt, Artificial Sequence
  mRNA product Design a-2 (A100) comprising derived and/or modified sequence from LASV(AV;Clade V)__CCA30314__GPCmut3 (opt1)
aggagaguccgcucagccagguugcagaagcggcuuagcguguguccuaaucuucucucugcguguagguaggccugugccgcaaacaagcuuaccaugggccagaucgugaccuucuuccaggaggucccccacgugaucgaggaggugaugaacaucguccugaucgcccucagcauccuggccgugcugaaggggcucuacaacaucgcgaccugcggccugaucgggcugaucacguuccuccugcugugcggccgcuccugcagcuccaaccucuacaaggggguguacgagcugcagagccuggaccucaacauggagacccugaacaugaccaugccgcuguccugcaccaagaacaacagccaccacuacauccgggucggcaacgacacgggccucgagcugacccugaccaacaccuccauccucaaccacaaguucugcaaccugagcgacgcccacaagaaggaccuguacgaccacgcccucauguccaucaucagcacguuccaccuguccauccccaacuucaaccaguacgaggccaugagcugcgacuucaacgggggcaagaucuccgugcaguacaaccugagccacuccuacgccaucgacgcggccaaccacugcgggaccguggccaacggcauccuccagaccuucaugcgcauggccuggggcgggagcuacaucgcgcuggacuccggccgggggaacugggacugcaucaugaccagcuaccaguaccugaucauccagaacacgaccugggagaaccacugccaguucucccgccccagccccaucggcuaccucgggcugcugagccagcggacccgcgacaucuacaucucccggcgccgccggggcaccuucacguggacccugagcgacuccgagggcaacgccacccccgggggcuacugccucacccgguggaugcugaucgaggccgagcugaagugcuucgggaacacggccgucgccaagugcaacgagaagcacgacgaggaguucugcgacaugcuccgccuguucgacuucaacaagcaggcgaucagccggcugaagucccccgcccagaugagcauccagcucaucaacaaggccgugaacgcccugaucaacgaccagcugaucaugaagaaccaccuccgcgacaucaugggcauccccuacugcaacuacuccaaguacugcuaccugaaccacaccaucaccgggaagaccagccugcccaagugcugccucguguccaacggcagcuaccugaacgagacgcacuucuccgacgacaucgagcagcaggccgacaacaugaucaccgagaugcugcagaaggaguacauggagcggcagggcaagaccccgcucgggcuggucgaccuguucguguucagcaccuccuucuaccugaucagcaucuuccuccgccuggugaagaucccgacgcaccggcacaucgucggcaagcccugccccaagccccaccgccugaaccacauggggaucugcuccugcggccucuacaagcagccgggggugcccgugcgguggaagcgcugaggacuagucccuguucccagagcccacuuuuuuuucuuuuuuugaaauaaaauagccugucuuucagaucuaaaaaaaaaaaaaaaaaaaaaaaaaaaaaaaaaaaaaaaaaaaaaaaaaaaaaaaaaaaaaaaaaaaaaaaaaaaaaaaaaaaaaaaaaaaaaaaaaaaa

SEQ ID NO: 25450 - RNA, 1740 nt, Artificial Sequence
  mRNA product Design a-2 (A100) comprising derived and/or modified sequence from LASV(Togo/2016/7082;Clade VI)__AMR44577__GPCmut3 (opt1)
aggagaguccgcucagccagguugcagaagcggcuuagcguguguccuaaucuucucucugcguguagguaggccugugccgcaaacaagcuuaccaugggccagaucaucaccuucuuccaggaggugccccacgucaucgaggaggugaugaacaucgugcugaucgcccucagccugcuggccauccucaagggggucuacaacguggcgaccugcggcaucaucgggcuggugacguuccuguuccucugcggccgcuccugcagccugaucuacaagggguccuacgagcugcagacccucgagcugaacauggagacccugaacaugaccaugccgcucagcugcacgaagaacuccagccaccacuacauccgggucggcaacgagaccggccuggagcugacccucaccaacacguccaucaucaaccacaaguucugcaaccugagcgacgcccacaagcgcaaccuguacgaccacgcccucauguccauccugagcaccuuccaccuguccauccccaacuucaaccaguacgaggccaugagcugcgacuucaacgggggcaagaucuccgugcaguacaaccucagccacgccuacgcgguggacgccgccgagcacugcgggaccgucgccaacggcgugcugcagaccuucaugcggauggcguggggcggguccuacaucgcccuggacagcggccgcgggaacugggacugcaucaugacguccuaccaguaccucaucauccagaacaccaccugggaggaccacugccaguucagccggcccucccccaucggcuaccuggggcugcucagccagcgcacccgggacaucuacaucagccgccggcgccggggcacguucaccuggacccucuccgacagcgagggcaacgagacccccgggggcuacugccugacgcgcuggaugcugaucgaggccgagcucaagugcuucgggaacaccgccguggccaagugcaacgagaagcacgacgaggaguucugcgacaugcugcggcuguucgacuucaacaagcaggcgauccagcgccucaagucccccgcccagaugagcauccagcugaucaacaaggccgucaacgcccugaucaacgaccagcucaucaugaagaaccaccuccgggacaugaugggcauccccuacugcaacuacuccaaguacugcuaccugaaccacaccagcuccgggcgcaccagccugcccaagugcugccugguguccaacggcagcuaccugaacgagacgcacuucuccgacgacaucgagcagcaggccgacaacaugaucaccgagaugcuccagaaggaguacaucgaccggcagggcaagaccccgcuggggcugguggaccucuucgucuucagcaccuccuucuaccugaucagcaucuuccugcaccugaucaagaucccgacgcaccgccacaucgugggcaagcccugccccaagccccaccggcucaaccacauggggaucugcuccugcggccuguacaagcagccgggggugcccacccgcuggaagcggugaggacuagucccuguucccagagcccacuuuuuuuucuuuuuuugaaauaaaauagccugucuuucagaucuaaaaaaaaaaaaaaaaaaaaaaaaaaaaaaaaaaaaaaaaaaaaaaaaaaaaaaaaaaaaaaaaaaaaaaaaaaaaaaaaaaaaaaaaaaaaaaaaaaaa

SEQ ID NO: 25451 - RNA, 1740 nt, Artificial Sequence
  mRNA product Design a-2 (A100) comprising derived and/or modified sequence from LASV(KAK-428;Clade n.d. (VII))__ANH09740__GPCmut3 (opt1)
aggagaguccgcucagccagguugcagaagcggcuuagcguguguccuaaucuucucucugcguguagguaggccugugccgcaaacaagcuuaccaugggccagaucgugaccuucuuccaggaggucccccacgugaucgaggaggugaugaacaucguccugaucgcccucagccugcuggccauccucaaggggcuguacaacuucgcgaccugcggcgugaucgggcugaucacguuccuccugcugugcggccgcuccugcagcgccaccuacaaggggcaguacgagcuccagacccuggagcugaacauggagucccucaacaugaccaugccgcugagcugcacgaagaacaacucccaccacuacauccgggccggcaacaacaccggccuggagcucacccugaccaacacgagcaucaucucccacaaguucugcaaccugagcgacgcccacaagaagaaccucuacgaccacacccugauguccaucaucaccaccuuccaccugagcauccccaacuucaaccaguacgaggccauguccugcgacuucaacgggggcaagaucagcauccaguacaaccucucccacagcuacgcgggggacgccgcccagcacugcggcacgguggccaacgggguccugcagaccuucaugcgcauggcguggggcggcuccuaccuggcccucgacagcgggcggcgcggcugggacugcaucaucuccagcuaccaguaccugaucauccagaacaccaccugggacgaccacugccaguucucccggcccagccccaucggguaccugggcuucgugagccagaagacgcgcgacaucuacaucucccggcgccgccggggcaccuucaccuggacccugagcgacuccgaggggcacgacaugccgggcggguacugccucacgcgguggaugcugaucgaggccgaccugaagugcuucggcaacaccgccguggccaagugcaacgagaagcacgacgaggaguucugcgacauguggcgccucuucgacuucaacaagcaggcgauccagcggcugaaggcccccgcccagaugaacauccagcugaucaacaaggccgucaacgcccucaucaacgaccagcugaugaugaagaaccaccuccgcgacaucauggggauccccuacugcaacuacagcaaguucugcuaccugaacaacaccaccacgggccggaccucccugccccgcugcugccugaucagcaacggcuccuaccucaacgagacccacuucagcgacgacaucgagcagcaggcggacaacaugaucaccgagaugcugcagaaggaguacauggaccggcaggggaagacgccccugggccucguggaccuguucguguucuccaccagcuucuaccugaucaccaucuuccuccaccuggucaagaucccgacccaccgccacaucguggggaagcccugccccaagccccaccggcugaaccacaugggcaucugcuccugcgggcuguacaagcagccgggcgugcccguccgcuggaagcggugaggacuagucccuguucccagagcccacuuuuuuuucuuuuuuugaaauaaaauagccugucuuucagaucuaaaaaaaaaaaaaaaaaaaaaaaaaaaaaaaaaaaaaaaaaaaaaaaaaaaaaaaaaaaaaaaaaaaaaaaaaaaaaaaaaaaaaaaaaaaaaaaaaaaa

SEQ ID NO: 25452 - RNA, 1740 nt, Artificial Sequence; identical to SEQ ID NO: 25446
  mRNA product Design a-2 (A100) comprising derived and/or modified sequence from LASV(Pinneo-NIG-1969;Clade I)__AIT17836__GPCmut3 (opt1)

SEQ ID NO: 25453 - RNA, 1740 nt, Artificial Sequence
  mRNA product Design a-2 (A100) comprising derived and/or modified sequence from LASV(ISTH0009-NIG-2011;Clade II)__AIT17404__GPCmut3 (opt1)
aggagaguccgcucagccagguugcagaagcggcuuagcguguguccuaaucuucucucugcguguagguaggccugugccgcaaacaagcuuaccaugggccagaucaucaccuucuuccaggaggugccccacgucaucgaggaggugaugaacaucgugcugaucgcccucagccugcuggccauccucaaggggaucuacaacgucgcgaccugcggccuguucgggcugguguccuuccuccugcugugcggccgcagcugcuccacgaccuacaaggggguguacgagcuccagacccuggagcuggacauggccagccucaacaugaccaugccgcuguccugcacgaagaacaacagccaccacuacaucauggucggcaacgagaccggccuggagcucacccugaccaacacguccaucaucaaccacaaguucugcaaccugagcgacgcccacaagaagaaccucuacgaccacgcccugauguccaucaucagcaccuuccaccuguccauccccaacuucaaccaguacgaggccaugagcugcgacuucaacgggggcaagaucuccgugcaguacaaccucagccacgcguacgccguggacgccgccaaccacugcgggaccaucgcgaacggcguccugcagaccuucaugcggauggccuggggcggguccuacaucgcccuggacagcggcaagggguccugggacugcaucaugacgagcuaccaguaccucaucauccagaacaccaccugggaggaccacugccaguucucccgccccagccccaucggcuaccuggggcugcucagccagcggacccgcgacaucuacaucucccggcgccgccggggcacguucaccuggacccucagcgacuccgagggcaacgagacccccgggggcuacugccugacgcgguggaugcugaucgaggccgagcucaagugcuucgggaacaccgccguggcgaagugcaacgagaagcacgacgaggaguucugcgacaugcugcgccuguucgacuucaacaagcaggccauccggcgccucaagacccccgcccagaugagcauccagcugaucaacaaggccgugaacgcccugaucaacgaccagcucaucaugaagaaccaccuccgggacaucaugggcaucccguacugcaacuacuccaaguacugcuaccugaaccacaccgucacggggaagaccagccugccccgcugcugccugguguccaacggcagcuaccugaacgagacccacuucuccgacgacaucgagcagcaggcggacaacaugaucaccgagcuccugcagaaggaguacauggaccggcagggcaagacgccccuggggcucguggaccuguucgucuucagcaccuccuucuaccugaucagcaucuuccugcaccucaucaagaucccgacccaccgccacaucaccggcaagcccugccccaagccccaccggcugaaccacauggggaucugcuccugcggccuguacaagcacccgggggugcccgugaaguggaagcgcugaggacuagucccuguucccagagcccacuuuuuuuucuuuuuuugaaauaaaauagccugucuuucagaucuaaaaaaaaaaaaaaaaaaaaaaaaaaaaaaaaaaaaaaaaaaaaaaaaaaaaaaaaaaaaaaaaaaaaaaaaaaaaaaaaaaaaaaaaaaaaaaaaaaaa

SEQ ID NO: 25454 - RNA, 1740 nt, Artificial Sequence
  mRNA product Design a-2 (A100) comprising derived and/or modified sequence from LASV(ISTH2010-NIG-2012;Clade II)__AIT17482__GPCmut3 (opt1)
aggagaguccgcucagccagguugcagaagcggcuuagcguguguccuaaucuucucucugcguguagguaggccugugccgcaaacaagcuuaccaugggccagaucaucaccuucuuccaggaggugccccacgucaucgaggaggugaugaacaucgugcugaucgcccucagccugcuggccauccucaaggggaucuacaacgucgcgaccugcggccuguucgggcugguguccuuccuccugcugugcggccgcagcugcuccacgaccuacaaggggguguacgagcuccagacccuggagcuggacauggccagccucaacaugaccaugccgcuguccugcacgaagaacaacagccaccacuacaucauggucggcaacgagaccggccuggagcucacccugaccaacacguccaucaucaaccacaaguucugcaaccugagcgacgcccacaagaagaaccucuacgaccacgcccugauguccaucaucagcaccuuccaccuguccauccccaacuucaaccaguacgaggccaugagcugcgacuucaacgggggcaagaucuccgugcaguacaaccucagccacgcguacgccguggacgccgccaaccacugcgggaccaucgcgaacggcguccugcagaccuucaugcggauggccuggggcggguccuacaucgcccuggacagcggcaagggguccugggacugcaucaugacgagcuaccaguaccucaucauccagaacaucaccugggaggaccacugccaguucucccgccccagccccaucggcuaccuggggcugcucagccagcggacccgcgacaucuacaucucccggcgccgccggggcaccuucacguggacccucagcgacuccgagggcaacgagacccccgggggcuacugccugacccgguggaugcugaucgaggccgagcucaagugcuucgggaacacggccguggcgaagugcaacgagaagcacgacgaggaguucugcgacaugcugcgccuguucgacuucaacaagcaggccauccggcgccucaagacccccgcccagaugagcauccagcugaucaacaaggccgugaacgcccugaucaacgaccagcucaucaugaagaaccaccuccgggacaucaugggcauccccuacugcaacuacuccaaguacugcuaccugaaccacaccgucaccgggaagacgagccugccccgcugcugccugguguccaacggcagcuaccugaacgagacccacuucuccgacgacaucgagcagcaggcggacaacaugaucaccgagcuccugcagaaggaguacaucgaccggcagggcaagaccccgcuggggcucguggaccuguucgucuucagcacguccuucuaccugaucagcaucuuccugcaccucgugaagaucccgacccaccgccacguggucggcaagcccugccccaagccccaccggcugaaccacauggggaucugcuccugcggccuguacaagcacccgggggugcccgugaaguggaagcgcugaggacuagucccuguucccagagcccacuuuuuuuucuuuuuuugaaauaaaauagccugucuuucagaucuaaaaaaaaaaaaaaaaaaaaaaaaaaaaaaaaaaaaaaaaaaaaaaaaaaaaaaaaaaaaaaaaaaaaaaaaaaaaaaaaaaaaaaaaaaaaaaaaaaaa

SEQ ID NO: 25455 - RNA, 1740 nt, Artificial Sequence
  mRNA product Design a-2 (A100) comprising derived and/or modified sequence from LASV(Lassa virus/H.sapiens-wt/NGA/2015/ISTH_0543;Clade II)__AVO03639__GPCmut3 (opt1)
aggagaguccgcucagccagguugcagaagcggcuuagcguguguccuaaucuucucucugcguguagguaggccugugccgcaaacaagcuuaccaugggccagaucaucaccuucuuccaggaggugccccacgucaucgaggaggugaugaacaucgugcugaucgcccucagccugcuggccauccucaaggggaucuacaacgucgcgaccugcggccuguucgggcugguguccuuccuccugcugugcggccgcagcugcuccacgaccuacaaggggguguacgagcuccagacccuggagcuggacauggccaaccucaacaugaccaugccgcugagcugcacgaagaacaacucccaccacuacaucauggucggcaacgagaccggccuggagcucacccugaccaacacgagcaucaucaaccacaaguucugcaaccuguccgacgcccacaagaagaaccucuacgaccacgcccugaugagcaucaucuccaccuuccaccugagcauccccaacuucaaccaguacgaggccauguccugcgacuucaacgggggcaagaucagcgugcaguacaaccucucccacaccuacgcgguggacgccgccaaccacugcgggaccaucgccaacggcguccugcagacguucaugcggauggcguggggcgggagcuacaucgcccuggacuccggcaaggggagcugggacugcaucaugaccuccuaccaguaccucgugauccagaacaccaccugggaggaccacugccaguucagccgccccucccccaucggcuaccuggggcugcucagccagcggacgcgcgacaucuacaucagccggcgccgccggggcaccuucaccuggacccucuccgacagcgagggcaacgagacgcccgggggcuacugccugacccgguggaugcugaucgaggccgagcucaagugcuucgggaacaccgccguggccaagugcaacgagaagcacgacgaggaguucugcgacaugcugcgccuguucgacuucaacaagcaggcgauccggcgccucaagacccccgcccagauguccauccagcugaucaacaaggccgucaacgcccugaucaacgaccagcucaucaugaagaaccaccuccgggacaucaugggcauccccuacugcaacuacagcaaguacugcuaccugaaccacacggugaccgggaagaccucccugccccgcugcugccuggugagcaacggcuccuaccugaacgagacccacuucagcgacgacaucgagcagcaggccgacaacaugaucacggagcuccugcagaaggaguacaucgaccggcagggcaagaccccgcuggggcucgucgaccuguucguguucuccaccagcuucuaccugaucuccaucuuccugcaccucgugaagaucccgacccaccgccacaucacgggcaagcccugccccaagccccaccggcugaaccacauggggaucugcagcugcggccuguacaagcacccggggguccccgugaaguggaagcgcugaggacuagucccuguucccagagcccacuuuuuuuucuuuuuuugaaauaaaauagccugucuuucagaucuaaaaaaaaaaaaaaaaaaaaaaaaaaaaaaaaaaaaaaaaaaaaaaaaaaaaaaaaaaaaaaaaaaaaaaaaaaaaaaaaaaaaaaaaaaaaaaaaaaaa

SEQ ID NO: 25456 - RNA, 1740 nt, Artificial Sequence
  mRNA product Design a-2 (A100) comprising derived and/or modified sequence from LASV(Lassa virus/H.sapiens-wt/NGA/2016/ISTH_0009;Clade II)__AVO03571__GPCmut3 (opt1)
aggagaguccgcucagccagguugcagaagcggcuuagcguguguccuaaucuucucucugcguguagguaggccugugccgcaaacaagcuuaccaugggccagaucaucaccuucuuccaggaggugccccacgucaucgaggaggugaugaacaucgugcugaucgcccucagccugcuggccauccucaaggggaucuacaacgucgcgaccugcggccugcuggggcucguguccuuccugcugcucugcggccgcagcugcuccacgaccuacaaggggguguacgagcugcagacccuggagcucgacauggccagccugaacaugaccaugccgcuguccugcacgaagaacaacagccaccacuacaucauggucggcaacgagaccggccucgagcugacccugaccaacacguccaucaucaaccacaaguucugcaaccucagcgacgcccacaagaagaaccuguacgaccacgcccugauguccaucaucagcaccuuccaccucuccauccccaacuucaaccaguacgaggccaugagcugcgacuucaacgggggccggaucuccgugcaguacaaccugagccacuccuacgcgguggacgccgccaaccacugcgggaccaucgccaacggcguccugcagaccuucaugcgcauggcguggggcgggagcuacaucgcccucgacuccggcaaggggagcugggacugcaucaugacguccuaccaguaccugaucauccagaacaccaccugggaggaccacugccaguucagccggcccagccccaucggcuaccuggggcuccugucccagcgcacccgggacaucuacaucagccgccggcgccggggcacguucaccuggacccuguccgacagcgagggcaacgagacccccgggggcuacugccugacgcgcuggaugcucaucgaggccgagcugaagugcuucgggaacaccgccguggccaagugcaacgagaagcacgacgaggaguucugcgacaugcugcggcuguucgacuucaacaagcaggcgauccgccggcugaagacccccgcccagauguccauccagcugaucaacaaggccgugaacgcccucaucaacgaccagcugaucaugaagaaccaccuccgcgacaucaugggcaucccguacugcaacuacagcaaguacugcuaccucaaccacaccgucacggggaagaccucccugccccggugcugccuggugagcaacggcuccuaccucaacgagacccacuucagcgacgacaucgagcagcaggccgacaacaugaucaccgagcugcugcagaaggaguacaucgaccgccagggcaagacgccccucgggcugguggaccuguucgucuucuccaccagcuucuaccugaucuccaucuuccuccaccuggugaagaucccgacccaccggcacaucaccggcaagcccugccccaagccccaccgccugaaccacauggggaucugcagcugcggccucuacaaccacccgggggugcccgucaaguggaagcggugaggacuagucccuguucccagagcccacuuuuuuuucuuuuuuugaaauaaaauagccugucuuucagaucuaaaaaaaaaaaaaaaaaaaaaaaaaaaaaaaaaaaaaaaaaaaaaaaaaaaaaaaaaaaaaaaaaaaaaaaaaaaaaaaaaaaaaaaaaaaaaaaaaaaa

SEQ ID NO: 25457 - RNA, 1740 nt, Artificial Sequence
  mRNA product Design a-2 (A100) comprising derived and/or modified sequence from LASV(Lassa virus/H.sapiens-wt/NGA/2016/ISTH_0017;Clade II)__AVO03567__GPCmut3 (opt1)
aggagaguccgcucagccagguugcagaagcggcuuagcguguguccuaaucuucucucugcguguagguaggccugugccgcaaacaagcuuaccaugggccagaucaucaccuucuuccaggaggugccccacgucaucgaggaggugaugaacaucgugcugaucgcccucagccugcuggccauccucaaggggaucuacaacgucgcgaccugcggccuguucgggcugguguccuuccuccugcugugcggccgcagcugcuccacgaccuacaaggggguguacgagcuccagacccuggagcuggacauggccagccucaacaugaccaugccgcuguccugcacgaagaacaacagccaccacuacaucauggucggcaacgagaccggccuggagcucacccugaccaacacguccaucaucaaccacaaguucugcaaccugagcgacgcccacaagaagaaccucuacgaccacgcccugauguccaucaucagcaccuuccaccuguccauccccaacuucaaccaguacgaggccaugagcugcgacuucaacgggggcaagaucuccgugcaguacaaccucagccacaccuacgcgaucgacgccgccaaccacugcgggaccaucgccaacggcgugcugcagacguucaugcggauggcguggggcggguccuacaucgcccuggacagcggcaagggguccugggacugcaucaugaccagcuaccaguaccucaucauccagaacaccaccugggaggaccacugccaguucucccgccccagccccaucggcuaccuggggcugcucagccagcggacgcgcgacaucuacaucucccggcgccgccggggcaccuucaccuggacccucagcgacuccgagggcaacgagacgcccgggggcuacugccugacccgguggaugcugaucgaggccgagcucaagugcuucgggaacaccgccgucgccaagugcaacgagaagcacgacgaggaguucugcgacaugcugcgccuguucgacuucaacaagcaggcgauccggcgccucaagacccccgcccagaugagcauccagcugaucaacaaggccgugaacgcccugaucaacgaccagcucaucaugaagaaccaccuccgggacaucaugggcauccccuacugcaacuacuccaaguacugcuaccugaaccacacggugaccgggaagaccagccugccccgcugcugccuggucuccaacggcagcuaccugaacgagacccacuucuccgacgacaucgagcagcaggccgacaacaugaucacggagcuccugcagaaggaguacauggaccggcagggcaagaccccgcuggggcucguggaccuguucguguucagcaccuccuucuaccugaucagcaucuuccugcaccucguccgcaucccgacccaccggcacgugaucggcaagcccugccccaagccccaccgccugaaccacauggggaucugcuccugcggccuguacaagcacccgggggugcccgucaaguggaagcggugaggacuagucccuguucccagagcccacuuuuuuuucuuuuuuugaaauaaaauagccugucuuucagaucuaaaaaaaaaaaaaaaaaaaaaaaaaaaaaaaaaaaaaaaaaaaaaaaaaaaaaaaaaaaaaaaaaaaaaaaaaaaaaaaaaaaaaaaaaaaaaaaaaaaa

SEQ ID NO: 25458 - RNA, 1740 nt, Artificial Sequence
  mRNA product Design a-2 (A100) comprising derived and/or modified sequence from LASV(Lassa virus/H.sapiens-wt/NGA/2018/ISTH_0959;Clade II)__AVV65099__GPCmut3 (opt1)
aggagaguccgcucagccagguugcagaagcggcuuagcguguguccuaaucuucucucugcguguagguaggccugugccgcaaacaagcuuaccaugggccagaucaucaccuucuuccaggaggugccccacgucaucgaggaggugaugaacaucgugcugaucgcccucagccugcuggccauccucaaggggaucuacaacgucgugaccugcggccuguucgggcugguguccuuccuccugcugugcggccgcagcugcuccacgaccuacaagggggucuacgagcuccagacccuggagcuggacauggcgagccucaacaugaccaugccgcuguccugcacgaagaacaacagccaccacuacaucauggugggcaacgagaccggccuggagcucacccugaccaacacguccaucaucaaccacaaguucugcaaccugagcgacgcccacaagaagaaccucuacgaccacgcccugauguccaucaucagcaccuuccaccuguccauccccaacuucaaccaguacgaggccaugagcugcgacuucaacgggggcaagaucuccgugcaguacaaccucagccacgccuacgcgaucgacgccgccaaccacugcgggaccaucgccaacggcguccugcagaccuucaugcggauggcguggggcggguccuacaucgcccuggacagcggcaagggguccugggacugcaucaugacgagcuaccaguaccucaucauccagaacaccaccugggaggaccacugccaguucucccgccccagccccaucggcuaccuggggcugcucagccagcggacccgcgacaucuacaucucccggcgccgccggggcacguucaccuggacccucagcgacuccgagggcaacgagacccccgggggcuacugccugacgcgguggaugcugaucgaggccgagcucaagugcuucgggaacaccgccguggccaagugcaacgagaagcacgacgaggaguucugcgacaugcugcgccuguucgacuucaacaagcaggcgauccggcgccucaagacccccgcccagaugagcauccagcugaucaacaaggccgugaacgcccugaucaacgaccagcucaucaugaagaaccaccuccgggacaucaugggcaucccguacugcaacuacuccaaguacugcuaccugaaccacaccgucacggggaagaccagccugccccgcugcugccugguguccaacggcagcuaccugaacgagacccacuucuccgacgacaucgagcagcaggccgacaacaugaucaccgagcuccugcagaaggaguacaucgaccggcagggcaagacgccccuggggcucguggaccuguucgucuucagcaccuccuucuaccugaucagcaucuuccugcaccucgugaagaucccgacccaccgccacgugaucggcaagcccugccccaagccccaccggcugaaccacauggggaucugcuccugcggccuguacaagcacccggggguccccgugaaguggaagcgcugaggacuagucccuguucccagagcccacuuuuuuuucuuuuuuugaaauaaaauagccugucuuucagaucuaaaaaaaaaaaaaaaaaaaaaaaaaaaaaaaaaaaaaaaaaaaaaaaaaaaaaaaaaaaaaaaaaaaaaaaaaaaaaaaaaaaaaaaaaaaaaaaaaaaa

SEQ ID NO: 25459 - RNA, 1740 nt, Artificial Sequence
  mRNA product Design a-2 (A100) comprising derived and/or modified sequence from LASV(LASV003-NIG-2008;Clade II)__AIT17580__GPCmut3 (opt1)
aggagaguccgcucagccagguugcagaagcggcuuagcguguguccuaaucuucucucugcguguagguaggccugugccgcaaacaagcuuaccaugggccagaucaucaccuucuuccaggaggugccccacgucaucgaggaggugaugaacaucgugcugaucgcccucagccugcuggccauccucaaggggaucuacaacgucgcgaccugcggccuguucgggcugguguccuuccuccugcugugcggccgcagcugcuccacgaccuacaaggggguguacgagcuccagacccuggagcuggacauggccagccucaacaugaccaugccgcuguccugcacgaagaacaacagccaccacuacaucauggucggcaacgagaccggccuggagcucacccugaccaacacguccaucaucaaccacaaguucugcaaccugagcgacgcccacaagaagaaccucuacgaccacgcccugauguccaucaucagcaccuuccaccuguccauccccaacuucaaccaguacgaggccaugagcugcgacuucaacgggggcaagaucuccgugcaguacaaccucagccacaccuacgcgguggacgccgccaaccacugcgggaccaucgccaacggcguccugcagacguucaugcggauggcguggggcggguccuacaucgcccuggacagcggcaagggguccugggacugcaucaugaccagcuaccaguaccucaucauccagaacaccaccugggaggaccacugccaguucucccgccccagccccaucggcuaccuggggcugcucagccagcggacgcgcgacaucuacaucucccggcgccgccggggcaccuucaccuggacccucagcgacuccgagagcaacgagacgccgggcggguacugccugacccgguggaugcugaucgaggccgagcucaagugcuucggcaacaccgccguggccaagugcaacgagaagcacgacgaggaguucugcgacaugcugcgccuguucgacuucaacaagcaggcgauccggcgccucaaggcccccgcccagauguccauccagcugaucaacaaggccgugaacgcccugaucaacgaccagcucaucaugaagaaccaccuccgggacaucauggggauccccuacugcaacuacagcaaguacugcuaccugaaccacaccgucacgggccgcaccucccugccccggugcugccuggugagcaacggguccuaccugaacgagacccacuucagcgacgacaucgagcagcaggcggacaacaugaucaccgagcuccugcagaaggaguacauggaccgccagggcaagacgccccugggccucguggaccuguucgucuucuccaccagcuucuaccugaucuccaucuuccugcaccucgugaagaucccgacccaccggcacgugaucgggaagcccugccccaagccccaccgccugaaccacaugggcaucugcagcugcgggcuguacaagcacccgggcguccccgugaaguggaagcggugaggacuagucccuguucccagagcccacuuuuuuuucuuuuuuugaaauaaaauagccugucuuucagaucuaaaaaaaaaaaaaaaaaaaaaaaaaaaaaaaaaaaaaaaaaaaaaaaaaaaaaaaaaaaaaaaaaaaaaaaaaaaaaaaaaaaaaaaaaaaaaaaaaaaa

SEQ ID NO: 25460 - RNA, 1740 nt, Artificial Sequence
  mRNA product Design a-2 (A100) comprising derived and/or modified sequence from LASV(LASV035-NIG-2009;Clade II)__AIT17588__GPCmut3 (opt1)
aggagaguccgcucagccagguugcagaagcggcuuagcguguguccuaaucuucucucugcguguagguaggccugugccgcaaacaagcuuaccaugggccagaucaucaccuucuuccaggaggugccccacgucaucgaggaggugaugaacaucgugcugaucgcccucagccugcuggccauccucaaggggaucuacaacgucgcgaccugcggccuguucgggcugguguccuuccuccugcugugcggccgcagcugcuccacgaccuacaaggggguguacgagcuccagacccuggagcuggacauggccagccucaacaugaccaugccgcuguccugcacgaagaacaacagccaccacuacaucauggucggcaacgagaccggccuggagcucacccugaccaacacguccaucaucaaccacaaguucugcaaccugagcgacgcccacaagaagaaccucuacgaccacgcccugauguccaucaucagcaccuuccaccuguccauccccaacuucaaccaguacgaggccaugagcugcgacuucaacgggggcaagaucuccgugcaguacaaccucagccacgcguacgccguggacgccgccaaccacugcgggaccaucgcgaacggcguccugcagaccuucaugcggauggccuggggcggguccuacaucgcccuggacagcggcaagggguccugggacugcaucaugacgagcuaccaguaccucaucauccagaacaccaccugggaggaccacugccaguucucccgccccagccccaucggcuaccuggggcugcucagccagcggacccgcgacaucuacaucucccggcgccgccggggcacguucaccuggacccucagcgacuccgagggcaacgagacccccgggggcuacugccugacgcgguggaugcugaucgaggccgagcucaagugcuucgggaacaccgccguggcgaagugcaacgagaagcacgacgaggaguucugcgacaugcugcgccuguucgacuucaacaagcaggccauccggcgccucaaggcccccgcccagaugagcauccagcugaucaacaaggccgugaacgcgcugaucaacgaccagcucaucaugaagaaccaccuccgggacaucaugggcauccccuacugcaacuacuccaaguacugcuaccugaaccacaccgucaccgggaagacgagccugccccgcugcugccugguguccaacggcagcuaccugaacgagacccacuucuccgacgacaucgagcagcaggccgacaacaugaucaccgagcuccugcagaaggaguacaucgaccggcagggcaagaccccgcuggggcucguggaccuguucgucuucagcacguccuucuaccugaucagcaucuuccugcaccucgugaagaucccgacccaccgccacgugaucggcaagcccugccccaagccccaccggcugaaccacauggggaucugcuccugcggccuguacaagcacccggggguccccgugaaguggaagcgcugaggacuagucccuguucccagagcccacuuuuuuuucuuuuuuugaaauaaaauagccugucuuucagaucuaaaaaaaaaaaaaaaaaaaaaaaaaaaaaaaaaaaaaaaaaaaaaaaaaaaaaaaaaaaaaaaaaaaaaaaaaaaaaaaaaaaaaaaaaaaaaaaaaaaa

SEQ ID NO: 25461 - RNA, 1740 nt, Artificial Sequence
  mRNA product Design a-2 (A100) comprising derived and/or modified sequence from LASV(LASV1000-NIG-2009;Clade II)__AIT17782__GPCmut3 (opt1)
aggagaguccgcucagccagguugcagaagcggcuuagcguguguccuaaucuucucucugcguguagguaggccugugccgcaaacaagcuuaccaugggccagaucaucaccuucuuccaggaggugccccacgucaucgaggaggugaugaacaucgugcugaucgcccucagccugcuggccauccucaaggggaucuacaacgucgcgaccugcggccuguucgggcugguguccuuccuccugcugugcggccgcagcugcuccacgaccuacaaggggguguacgagcuccagacccuggagcuggacauggccagccucaacaugaccaugccgcuguccugcacgaagaacaacagccaccacuacaucauggucggcaacgagaccggccuggagcucacccugaccaacacguccaucaucaaccacaaguucugcaaccugagcgacgcccacaagaagaaccucuacgaccacgcccugauguccaucaucagcaccuuccaccuguccauccccaacuucaaccaguacgaggccaugagcugcgacuucaacgggggcaagaucuccgugcaguacaaccucagccacaccuacgcgguggacgccgccaaccacugcgggaccaucgccaacggcguccugcagacguucaugcggauggcguggggcggguccuacaucgcccuggacagcggcaagggguccugggacugcaucaugaccagcuaccaguaccucaucauccagaacaccaccugggaggaccacugccaguucucccgccccagccccaucggcuaccuggggcugcucagccagcggacgcgcgacaucuacaucucccggcgccgccggggcaccuucaccuggacccucagcgacuccgagggcaacgagacgcccgggggcuacugccugacccgguggaugcugaucgaggccgagcucaagugcuucgggaacaccgccguggccaagugcaacgagaagcacgacgaggaguucugcgacaugcugcgccuguucgacuucaacaagcaggcgaucaagcggcucaagacccccgcccagaugagcauccagcugaucaacaaggccgugaacgcccugaucaacgaccagcucaucaugaagaaccaccuccgcgacaucaugggcauccccuacugcaacuacuccaaguacugcuaccugaaccacacggucaccgggaagaccagccugccccggugcugccugguguccaacggcagcuaccugaacgagacccacuucuccgacgacaucgagcagcaggccgacaacaugaucacggagcuccugcagaaggaguacaucgaccgccagggcaagaccccgcuggggcucguggaccuguucgucuucagcaccuccuucuaccugaucagcaucuuccugcaccucgugaagaucccgacccaccggcacguggucggcaagcccugccccaagccccaccgccugaaccacauggggaucugcuccugcggccuguacaagcacccgggggugcccgugaaguggaagcggugaggacuagucccuguucccagagcccacuuuuuuuucuuuuuuugaaauaaaauagccugucuuucagaucuaaaaaaaaaaaaaaaaaaaaaaaaaaaaaaaaaaaaaaaaaaaaaaaaaaaaaaaaaaaaaaaaaaaaaaaaaaaaaaaaaaaaaaaaaaaaaaaaaaaa

SEQ ID NO: 25462 - RNA, 1740 nt, Artificial Sequence
  mRNA product Design a-2 (A100) comprising derived and/or modified sequence from LASV(LASV221-NIG-2010;Clade II)__AIT17624__GPCmut3 (opt1)
aggagaguccgcucagccagguugcagaagcggcuuagcguguguccuaaucuucucucugcguguagguaggccugugccgcaaacaagcuuaccaugggccagaucaucaccuucuuccaggaggugccccacgucaucgaggaggugaugaacaucgugcugaucgcccucagccugcuggccauccucaaggggaucuacaacgucgcgaccugcggccuguucgggcugguguccuuccuccugcugugcggccgcagcugcuccacgaccuacaaggggguguacgagcuccagacccuggagcuggacauggccagccucaacaugaccaugccgcuguccugcacgaagaacaacagccaccacuacaucauggucggcaacgagaccggccuggagcucacccugaccaacacguccaucaucaaccacaaguucugcaaccugagcgacgcccacaagaagaaccucuacgaccacgcccugauguccaucaucagcaccuuccaccuguccauccccaacuucaaccaguacgaggccaugagcugcgacuucaacgggggcaagaucuccgugcaguacaaccucagccacaccuacgcgaucgacgccgccaaccacugcgggaccaucgccaacggcgugcugcagacguucaugcggauggcguggggcggguccuacaucgcccuggacagcggcaagggguccugggacugcaucaugaccagcuaccaguaccucaucauccagaacaccaccugggaggaccacugccaguucucccgccccagccccaucggcuaccuggggcugcucagccagcggacgcgcgacaucuacaucucccggcgccgccggggcaccuucaccuggacccucagcgacuccgagggcaacgagacgcccgggggcuacugccugacccgguggaugcugaucgaggccgagcucaagugcuucgggaacaccgccgucgccaagugcaacgagaagcacgacgaggaguucugcgacaugcugcgccuguucgacuucaacaagcaggcgauccggcgccucaagacccccgcccagaugagcauccagcugaucaacaaggccgugaacgcccugaucaacgaccagcucaucaugaagaaccaccuccgggacaucaugggcauccccuacugcaacuacuccaaguacugcuaccugaaccacacggugaccgggaagaccagccugccccgcugcugccuggucuccaacggcagcuaccugaacgagacccacuucuccgacgacaucgagcagcaggccgacaacaugaucacggagaugcuccagaaggaguacauggaccggcagggcaagaccccgcuggggcugguggaccucuucguguucagcaccuccuucuaccugaucagcaucuuccugcaccuggucaagaucccgacccaccgccacgugaucggcaagcccugccccaagccccaccggcucaaccacauggggaucugcuccugcggccuguacaagcacccgggggugcccgucaaguggaagcgcugaggacuagucccuguucccagagcccacuuuuuuuucuuuuuuugaaauaaaauagccugucuuucagaucuaaaaaaaaaaaaaaaaaaaaaaaaaaaaaaaaaaaaaaaaaaaaaaaaaaaaaaaaaaaaaaaaaaaaaaaaaaaaaaaaaaaaaaaaaaaaaaaaaaaa

SEQ ID NO: 25463 - RNA, 1740 nt, Artificial Sequence
  mRNA product Design a-2 (A100) comprising derived and/or modified sequence from LASV(LASV237-NIG-2010;Clade II)__AIT17638__GPCmut3 (opt1)
aggagaguccgcucagccagguugcagaagcggcuuagcguguguccuaaucuucucucugcguguagguaggccugugccgcaaacaagcuuaccaugggccagaucaucaccuucuuccaggaggugccccacgucaucgaggaggugaugaacaucgugcugaucgcccucagccugcuggccauccucaaggggaucuacaacgucgcgaccugcggccuguucgggcugguguccuuccuccugcugugcggccgcagcugcuccacgaccuacaaggggguguacgagcuccagacccuggagcuggacauggccagccucaacaugaccaugccgcuguccugcacgaagaacaacagccaccacuacaucauggucggcaacgagaccggccuggagcucacccugaccaacacguccaucaucaaccacaaguucugcaaccugagcgacgcccacaagaaggaccucuacgaccacgcccugauguccaucaucagcaccuuccaccuguccauccccaacuucaaccaguacgaggccaugagcugcgacuucaacgggggcaagaucuccgugcaguacaaccucagccacaccuacgcgguggacgccgccaaccacugcgggaccaucgccaacggcguccugcagacguucaugcggauggcguggggcggguccuacaucgcccuggacagcggcaagggguccugggacugcaucaugaccagcuaccaguaccucaucauccagaacaccaccugggaggaccacugccaguucucccgccccagccccaucggcuaccuggggcugcucagccagcggacgcgcgacaucuacaucucccggcgccgccggggcaccuucaccuggacccucagcgacuccgagggcaacgagacgcccgggggcuacugccugacccgguggaugcugaucgaggccgagcucaagugcuucgggaacaccgccguggccaagugcaacgagaagcacgacgaggaguucugcgacaugcugcgccuguucgacuucaacaagcaggcgauccggcgccucaagacccccgcccagaugagcauccagcugaucaacaaggccgugaacgcccugaucaacgaccagcucaucaugaagaaccaccuccgggacaucaugggcauccccuacugcaacuacuccaaguacugcuaccugaaccacacggucaccgggaagaccagccugccccgcugcugccugguguccaacggcagcuaccugaacgagacccacuucuccgacgacaucgagcagcaggccgacaacaugaucacggagcuccugcagaaggaguacauggaccggcagggcaagaccccgcuggggcucguggaccuguucgucuucagcaccuccuucuaccugaucagcaucuuccugcaccucaucaagaucccgacccaccgccacaucacgggcaagcccugccccaagccccaccggcugaaccacauggggaucugcuccugcggccuguacaagcacccgggggugcccgugaaguggaagcgcugaggacuagucccuguucccagagcccacuuuuuuuucuuuuuuugaaauaaaauagccugucuuucagaucuaaaaaaaaaaaaaaaaaaaaaaaaaaaaaaaaaaaaaaaaaaaaaaaaaaaaaaaaaaaaaaaaaaaaaaaaaaaaaaaaaaaaaaaaaaaaaaaaaaaa

SEQ ID NO: 25464 - RNA, 1740 nt, Artificial Sequence
  mRNA product Design a-2 (A100) comprising derived and/or modified sequence from LASV(LASV253-NIG-2011;Clade II)__AIT17670__GPCmut3 (opt1)
aggagaguccgcucagccagguugcagaagcggcuuagcguguguccuaaucuucucucugcguguagguaggccugugccgcaaacaagcuuaccaugggccagaucaucaccuucuuccaggaggugccccacgucaucgaggaggugaugaacaucgugcugaucgcccucagccugcuggccauccucaaggggaucuacaacgucgcgaccugcggccuguucgggcugguguccuuccuccugcugugcggccgcagcugcuccacgaccuacaaggggguguacgagcuccagacccuggagcuggacauggccagccucaacaugaccaugccgcuguccugcacgaagaacaacagccaccacuacaucauggucggcaacgagaccggccuggagcucacccugaccaacacguccaucaucaaccacaaguucugcaaccugagcgacgcccacaagaagaaccucuacgaccacgcccugauguccaucaucagcaccuuccaccuguccauccccaacuucaaccaguacgaggccaugagcugcgacuucaacgggggcaagaucuccgugcaguacaaccucagccacaccuacgcgguggacgccgccaaccacugcgggaccaucgccaacggcguccugcagacguucaugcggauggcguggggcggguccuacaucgcccuggacagcggcaagggguccugggacugcaucaugaccagcuaccaguaccucaucauccagaacaccaccugggaggaccacugccaguucucccgccccagccccaucggcuaccuggggcugcucagccagcggacgcgcgacaucuacaucucccggcgccgccggggcaccuucaccuggacccucagcgacuccgagggcaacgagacgcccgggggcuacugccugacccgguggaugcugaucgaggccgagcucaagugcuucgggaacaccgccguggccaagugcaacgagaagcacgacgaggaguucugcgacaugcugcgccuguucgacuucaacaagcaggcgauccggcgccucaaggcccccgcccagaugagcauccagcugaucaacaaggccgugaacgcccugaucaacgaccagcucaucaugaagaaccaccuccgggacaucaugggcaucccguacugcaacuacuccaaguacugcuaccugaaccacaccgucacggggcgcaccagccugccccggugcugccugguguccaacggcagcuaccugaacgagacccacuucuccgacgacaucgagcagcaggcggacaacaugaucaccgagcuccugcagaaggaguacaucgaccgccagggcaagacgccccuggggcucguggaccuguucgucuucagcaccuccuucuaccugaucagcaucuuccugcaccucgugaagaucccgacccaccggcacaucaucggcaagcccugccccaagccccaccgccugaaccacauggggaucugcuccugcggccuguacaagcacccgggggugcccgucaaguggaagcggugaggacuagucccuguucccagagcccacuuuuuuuucuuuuuuugaaauaaaauagccugucuuucagaucuaaaaaaaaaaaaaaaaaaaaaaaaaaaaaaaaaaaaaaaaaaaaaaaaaaaaaaaaaaaaaaaaaaaaaaaaaaaaaaaaaaaaaaaaaaaaaaaaaaaa

SEQ ID NO: 25465 - RNA, 1740 nt, Artificial Sequence
  mRNA product Design a-2 (A100) comprising derived and/or modified sequence from LASV(LASV254-NIG-2011;Clade II)__AIT17674__GPCmut3 (opt1)
aggagaguccgcucagccagguugcagaagcggcuuagcguguguccuaaucuucucucugcguguagguaggccugugccgcaaacaagcuuaccaugggccagaucaucaccuucuuccaggaggugccccacgucaucgaggaggugaugaacaucgugcugaucgcccucagccugcuggccauccucaaggggaucuacaacgucgcgaccugcggccuguucgggcugguguccuuccuccugcugugcggccgcagcugcuccacgaccuacaaggggguguacgagcuccagacccuggagcuggacaugaccaaccucaacaugacgaugccgcugagcugcaccaagaacaacucccaccacuacaucauggucggcaacgagaccggccuggagcucacccugacgaacaccagcaucaucaaccacaaguucugcaaccuguccgacgcccacaagaagaaccucuacaaccacgcccugaugagcaucaucuccaccuuccaccugagcauccccaacuucaaccaguacgaggccauguccugcgacuucaacgggggcaagaucagcgugcaguacaaccucucccacagcuacgccguggacgcggccaaccacugcgggaccaucgccaacggcguccugcagacguucaugcggauggccuggggcggguccuacaucgcgcuggacagcggcaaggggaacugggacugcaucaugaccuccuaccaguaccucaucauccagaacaccaccugggaggaccacugccaguucagccgccccucccccaucggcuaccuggggcugcucagccagcggacgcgcgacaucuacaucagccggcgccgccggggcaccuucaccuggacccucuccgacagcgagggcaacgagacgcccgggggcuacugccugacccgguggaugcugaucgaggccgagcucaagugcuucgggaacaccgccguggccaagugcaacgagaagcacgacgaggaguucugcgacaugcugcgccuguucgacuucaacaagcaggccauccggcgccucaagacccccgcgcaggccaacauccagcugaucaacaaggccgugaacgcccugaucaacgaccagcucaucaugaagaaccaccuccgggacaucaugggcauccccuacugcaacuacuccaaguacugcuaccugaaccacacggucaccgggaagaccagccugccccgcugcugccugguguccaacggcagcuaccugaacgagacccacuucuccgacgacaucgagcagcaggccgacaacaugaucacggagcuccugcagaaggaguacauggaccggcagggcaagaccccgcuggggcucguggaccuguucgucuucagcaccuccuucuaccugaucagcaucuuccugcaccucgugaagaucccgacccaccgccacgugaucggcaagcccugccccaagccccaccggcugaaccacauggggaucugcuccugcggccuguacaagcacccggggguccccgugaaguggaagcgcugaggacuagucccuguucccagagcccacuuuuuuuucuuuuuuugaaauaaaauagccugucuuucagaucuaaaaaaaaaaaaaaaaaaaaaaaaaaaaaaaaaaaaaaaaaaaaaaaaaaaaaaaaaaaaaaaaaaaaaaaaaaaaaaaaaaaaaaaaaaaaaaaaaaaa

SEQ ID NO: 25466 - RNA, 1740 nt, Artificial Sequence
  mRNA product Design a-2 (A100) comprising derived and/or modified sequence from LASV(Nig08-A19;Clade III)__ADU56618__GPCmut3 (opt1)
aggagaguccgcucagccagguugcagaagcggcuuagcguguguccuaaucuucucucugcguguagguaggccugugccgcaaacaagcuuaccaugggccagaucgugaccuucuuccaggaggucccccacgugaucgaggaggugaugaacaucguccugaucgcccucagcauccuggccauccugaaggggcucuacaacaucgcgaccugcggccugaucgggcuggugacguuccuccugcuguccggccgcagcugcuccaugaccuacaaggggguguacgagcuccagacccuggagcugaacaugaacacccucaacaugacgaugccgcugagcugcaccaagaacaacucccaccacuacaucauggucggcaacgagaccggccuggagcucacccugacgaacaccagccugcuccaccacaaguucugcaaccuguccgacgcccacaagaagaaccuguacgaccacacccucaugagcaucaucuccaccuuccaccugagcauccccaacuucaaccaguacgaggccauguccugcgacuucaacgggggcaagaucacggugcaguacaaccugagccacuccuacgccaucgacgccgcgaaccacugcgggaccguggccaacggcguccuccagaccuucaugcggauggccuggggcgggagcuacaucgcccuggacuccggccgcgggaagugggacugcaucaugaccagcuaccaguaccugaucauccagaacacgaccugggaggaccacugccaguucucccggcccagccccaucggcuaccucgggcugcugucccagcgcacccgggacaucuacaucagccgccggcgccggggcaccuucacguggacccugagcgacuccgagggcaacgagacccccgggggcuacugccucacccgcuggaugcugaucgaggcggagcugaagugcuucgggaacacggccguggccaagugcaacgagaagcacgacgaggaguucugcgacaugcuccggcuguucgacuucaacaagcaggccauccgccggcugaaggcccccgcgcagaugagcauccagcucaucaacaaggccgugaacgcccugaucaacgaccagcugaucaugaagaaccaccuccgcgacaucaugggcauccccuacugcaacuacuccaaguacugcuaccugaaccacaccagcaccgggcggaccucccugccccgcugcugccucgucagcaacggcuccuaccugaacgagacgcacuucagcgacgacaucgagcagcaggccgacaacaugaucaccgagaugcugcagaaggaguaccucgaccggcagggcaagaccccgcuggggcugguggaccuguucguguucuccaccagcuucuaccucaucuccaucuuccugcaccuggucaagaucccgacgcaccgccacaucgugggcaagcccugccccaagccccaccggcucaaccacauggggaucugcagcugcggccuguacaagcagccgggggugcccguccgcuggaagcggugaggacuagucccuguucccagagcccacuuuuuuuucuuuuuuugaaauaaaauagccugucuuucagaucuaaaaaaaaaaaaaaaaaaaaaaaaaaaaaaaaaaaaaaaaaaaaaaaaaaaaaaaaaaaaaaaaaaaaaaaaaaaaaaaaaaaaaaaaaaaaaaaaaaaa

SEQ ID NO: 25467 - RNA, 1743 nt, Artificial Sequence
  mRNA product Design a-2 (A100) comprising derived and/or modified sequence from LASV(G1180-SLE-2010;Clade IV)__AIT17168__GPCmut3 (opt1)
aggagaguccgcucagccagguugcagaagcggcuuagcguguguccuaaucuucucucugcguguagguaggccugugccgcaaacaagcuuaccaugggccagaucgugaccuucuuccaggaggucccccacgugaucgaggaggugaugaacaucguccugaucgcccucagcauccuggccgugcugaaggggcucuacaacuucgcgaccugcggccugguggggcugcucaccuuccugcugcucugcggccgcuccugcaccgccagccgguacaagggggucuacgagcugcagacccuggagcucaacauggagacccugaacaugacgaugccgcuguccugcaccaagaacaacagccaccacuacaucauggugggcaacgagaccggccucgagcugacccugacgaacaccuccaucaucaaccacaaguucugcaaccucagcgacgcccacaagaagaaccuguacgaccacgcccugauguccaucaucagcaccuuccaccucuccauccccaacuucaaccaguacgaggccaugagcugcgacuucaacgggggcaagaucuccgugcaguacaaccugagccacuccuacgcgggggacgccgccaaccacugcggcaccgucgccaacggggugcugcagacguucaugcgcauggcguggggcggcagcuacaucgcccucgacuccgggcacggcagcugggacugcaucaugaccuccuaccaguaccugaucauccagaacaccaccugggaggaccacugccaguucagccggcccucccccaucggguaccugggccuccugagccagcgcacgcgggacaucuacaucagccgccggcgccggggcaccuucaccuggacccuguccgacagcgaggggaaggacacgccgggcggguacugccugacccgcuggaugcucaucgaggccgagcugaagugcuucggcaacaccgccguggccaagugcaacgagaagcacgacgaggaguucugcgacaugcugcggcuguucgacuucaacaagcaggcgauccagcgccugaaggcccccgcccagauguccauccagcugaucaacaaggccgucaacgcccucaucaacgaccagcugaucaugaagaaccaccuccgggacaucauggggauccccuacugcaacuacagcaaguacugcuaccucaaccacaccacgaccggcaagaccucccugcccaagugcugccuggugagcaacggcuccuaccucaacgagacccacuucagcgacgacaucgagcagcaggcggacaacaugaucacggagaugcugcagaaggaguacauggagcgccaggggaagacgccccugggccucguggaccuguucgucuucuccaccagcuucuaccugaucuccaucuuccugcaccucgugaagaucccgacccaccggcacaucgugggcaagagcugccccaagccccaccgccugaaccacauggggaucugcuccugcgggcuguacaagcagcccggcgucccggugaaguggaagcggugaggacuagucccuguucccagagcccacuuuuuuuucuuuuuuugaaauaaaauagccugucuuucagaucuaaaaaaaaaaaaaaaaaaaaaaaaaaaaaaaaaaaaaaaaaaaaaaaaaaaaaaaaaaaaaaaaaaaaaaaaaaaaaaaaaaaaaaaaaaaaaaaaaaaa

SEQ ID NO: 25468 - RNA, 1743 nt, Artificial Sequence
  mRNA product Design a-2 (A100) comprising derived and/or modified sequence from LASV(G1442-SLE-2011;Clade IV)__AIT17180__GPCmut3 (opt1)
aggagaguccgcucagccagguugcagaagcggcuuagcguguguccuaaucuucucucugcguguagguaggccugugccgcaaacaagcuuaccaugggccagaucgugaccuucuuccaggaggucccccacgugaucgaggaggugaugaacaucguccugaucgcccucagcauccuggccgugcugaaggggcucuacaacguggcgaccugcggccugaucgggcuggucacguuccuccugcugugcggccgcuccugcaccaccacccucuacaaggggguguacgagcugcagacgcuggagcucaacauggagacccugaacaugaccaugccgcugagcugcaccaagaacaacucccaccacuacauccgggugggcaacgagacgggccucgagcugacccugaccaacaccagcaucaucaaccacaaguucugcaaccucuccgacgcccacaagaagaaccuguacgaccacgcccugaugagcaucaucuccacguuccaccucagcauccccaacuucaaccaguacgaggccauguccugcgacuucaacgggggcaagaucagcguccaguacaaccugucccacagcuacgccggggacgcggccaaccacugcggcaccguggccaacggggugcugcagaccuucaugcgcauggccuggggcggcuccuacaucgcgcucgacagcgggcggggcaacugggacugcaucaugaccuccuaccaguaccugaucauccagaacacgaccugggacgaccacugccaguucagccgccccucccccaucggguaccugggccuccugagccagcggacccgcgacgucuacaucucccggcgccgccggggcaccuucacguggacccugagcgacagcgaggggaaggacaccccgggcggguacugccugacccgguggaugcucaucgaggccgagcugaagugcuucggcaacacggccguggccaagugcaacgagaagcacgacgaggaguucugcgacaugcugcgccucuucgacuucaacaagcaggccauccagcggcugaaggcgcccgcccagauguccauccagcugaucaacaaggccgugaacgcccucaucaacgaccagcugaucaugaagaaccaccuccgcgacaucauggggauccccuacugcaacuacagcaaguacugcuaccugaacaacaccgccaccggcaagaccucccugcccaagugcugccugaucagcaacggcuccuaccucaacgagacgcacuucagcgacgacaucgagcaggaggcggacaacaugaucaccgagaugcugcagaaggaguacauggagcggcaggggaagacgccccugggccucgucgaccuguucguguucuccaccagcuucuaccugaucuccaucuuccugcaccucgugaagaucccgacccaccgccacaucgucggcaagagcugccccaagccccaccggcugaaccacauggggaucugcuccugcgggcuguacaagcagcccggcgugccggugcgcuggaagcggugaggacuagucccuguucccagagcccacuuuuuuuucuuuuuuugaaauaaaauagccugucuuucagaucuaaaaaaaaaaaaaaaaaaaaaaaaaaaaaaaaaaaaaaaaaaaaaaaaaaaaaaaaaaaaaaaaaaaaaaaaaaaaaaaaaaaaaaaaaaaaaaaaaaaa

SEQ ID NO: 25469 - RNA, 1743 nt, Artificial Sequence
  mRNA product Design a-2 (A100) comprising derived and/or modified sequence from LASV(G3010-SLE-2013;Clade IV)__AIT17344__GPCmut3 (opt1)
aggagaguccgcucagccagguugcagaagcggcuuagcguguguccuaaucuucucucugcguguagguaggccugugccgcaaacaagcuuaccaugggccagaucgugaccuucuuccaggaggucccccacgugaucgaggaggugaugaacaucguccugaucgcccucagcauccuggccgugcugaaggggcucuacaacuucgcgaccugcggccugguggggcuggucacguuccuccugcugugcggccgcuccugcaccaccagccucuacaaggggguguacgagcugcagacccuggagcucaacauggagacgcugaacaugaccaugccgcuguccugcaccaagaacaacagccaccacuacaucauggugggcaacgagaccggccucgagcugacgcugaccaacaccuccaucaucaaccacaaguucugcaaccucagcgacgcccacaagaagaaccuguacaaccacgcccugauguccaucaucagcaccuuccaccucuccauccccaacuucaaccaguacgaggccaugagcugcgacuucaacgggggcaagaucuccguccaguacaaccugagccacuccuacgccggggacgcggccagccacugcggcacgguggccaacggggugcugcagaccuucaugcggauggccuggggcggcuccuacaucgcgcucgacagcggguacggcaagugggacugcaucaugaccuccuaccaguaccugaucauccagaacaccacgugggaggaccacugccaguucagccgccccucccccaucggguaccugggccuccugagccagcggacccgcgacaucuacaucagccggcgccgccggggcaccuucaccuggacgcuguccgacagcgaggggaaggacaccccgggcggguacugccugacccgguggaugcucaucgaggccgagcugaagugcuucggcaacaccgccgucgccaagugcaacgagaagcacgacgaggaguucugcgacaugcugcgccucuucgacuucaacaagcaggccauccagcggcugaagacgcccgcgcagauguccauccagcugaucaacaaggccgugaacgcccucaucaacgaccagcugaucaugaagaaccaccuccgcgacaucauggggauccccuacugcaacuacagcaaguacugcuaccugaaccacaccaccaccggcaagacgucccugcccaagugcugccuggugagcaacggcuccuaccucaacgagacccacuucagcgacgacaucgagcagcaggccgacaacaugaucaccgagaugcugcagaaggaguacauggagcggcaggggaagacgccccugggccucgucgaccuguucguguucuccaccagcuucuaccugaucuccaucuuccugcaccucgugaagaucccgacccaccgccacaucgucggcaagagcugccccaagccccaccggcugaaccacauggggaucugcuccugcgggcuguacaagcagcccggcgugccggugcgcuggaagcggugaggacuagucccuguucccagagcccacuuuuuuuucuuuuuuugaaauaaaauagccugucuuucagaucuaaaaaaaaaaaaaaaaaaaaaaaaaaaaaaaaaaaaaaaaaaaaaaaaaaaaaaaaaaaaaaaaaaaaaaaaaaaaaaaaaaaaaaaaaaaaaaaaaaaa

SEQ ID NO: 25470 - RNA, 1743 nt, Artificial Sequence
  mRNA product Design a-2 (A100) comprising derived and/or modified sequence from LASV(G502-SLE-2009;Clade IV)__AIT17126__GPCmut3 (opt1)
aggagaguccgcucagccagguugcagaagcggcuuagcguguguccuaaucuucucucugcguguagguaggccugugccgcaaacaagcuuaccaugggccagaucgugaccuucuuccaggaggucccccacgugaucgaggaggugaugaacaucguccugaucgcccucagcauccuggccgugcugaaggggcucuacaacuucgcgaccugcggccugguggggcugcucacguuccugcugcucugcggccgcuccugcaccaccgggcuguacaagggcgucuacgagcugcagacccucgagcugaacauggagacgcugaacaugaccaugccgcucagcugcaccaagaacaacucccaccacuacaucauggugggcaacgagaccgggcuggagcugacgcucaccaacaccagcaucaucaaccacaaguucugcaaccuguccgacgcccacaagaagaaccuguacgaccacgcccucaugagcaucaucuccaccuuccaccugagcauccccaacuucaaccaguacgaggccauguccugcgacuucaacggcgggaagaucagcgugcaguacaaccugucccacagcuacgccggcgacgcggccgaccacugcgggacggucgccaacggcgugcuccagaccuucaugcggauggccuggggcggguccuacaucgcgcuggacagcggccgcgggcggugggacugcaucaugaccuccuaccaguaccugaucauccagaacaccacgugggaggaccacugccaguucagccgccccucccccaucggcuaccucggccugcugagccagcggacccgcgacaucuacaucucccggcgccgccgggggaccuucaccuggacgcugagcgacagcgagggcaaggacacccccgggggcuacugccucacccgguggaugcugaucgaggccgagcugaagugcuucgggaacaccgccguggccaagugcaacgagaagcacgacgaggaguucugcgacaugcuccgccuguucgacuucaacaagcaggccauccagcggcugaaggcgcccgcccagauguccauccagcucaucaacaaggccgucaacgcccugaucaacgaccagcuggugaugaagaaccaccuccgcgacaucaugggcauccccuacugcaacuacagccgguacugcuaccugaaccacacgaccaccggccgcaccucccugcccaagugcugccucgugagcaacggguccuaccugaacgagacgcacuucagcgacgacaucgagcagcaggccgacaacaugaucaccgagaugcugcagaaggaguacauggagcggcagggcaagaccccgcucgggcuggucgaccuguucguguucuccaccagcuucuaccugaucuccaucuuccuccaccuggugaagaucccgacgcaccgccacaucgucggcaagagcugccccaagccccaccggcugaaccacauggggaucugcuccugcggccucuacaagcagcccggcgugccggugaaguggaagcgcugaggacuagucccuguucccagagcccacuuuuuuuucuuuuuuugaaauaaaauagccugucuuucagaucuaaaaaaaaaaaaaaaaaaaaaaaaaaaaaaaaaaaaaaaaaaaaaaaaaaaaaaaaaaaaaaaaaaaaaaaaaaaaaaaaaaaaaaaaaaaaaaaaaaaa

SEQ ID NO: 25471 - RNA, 1743 nt, Artificial Sequence
  mRNA product Design a-2 (A100) comprising derived and/or modified sequence from LASV(G733-SLE-2010;Clade IV)__AIT17154__GPCmut3 (opt1)
aggagaguccgcucagccagguugcagaagcggcuuagcguguguccuaaucuucucucugcguguagguaggccugugccgcaaacaagcuuaccaugggccagaucgugaccuucuuccaggaggucccccacgugaucgaggaggugaugaacaucguccugaucgcccucagcauccuggccgugcugaaggggcucuacaacuucgcgaccugcggcaucguggggcuggucuccuuccugcuccugugcggccgcagcugcacgaccucccuguacaaggggguguacgagcuccagacccuggagcugaacauggagacccucaacaugacgaugccgcugagcugcaccaagaacaacucccaccacuacaucauggugggcaacgagaccggccuggagcucacccugacgaacaccagcaucaucaaccacaaguucugcaaccuguccgacgcccacaagaagaaccucuacgaccacgcccugaugagcaucaucuccaccuuccaccugagcauccccaacuucaaccaguacgaggccauguccugcgacuucaacgggggcaagaucagcguccaguacaaccucucccacagcuacgccggggacgcggccaaccacugcggcaccaucgccaacggggugcugcagacguucaugcggauggccuggggcggcuccuacaucgcgcuggacagcgggcgcgaccggugggacugcaucaugaccuccuaccaguaccucaucauccagaacaccaccugggaggaccacugccaguucagccgccccucccccaucggcuaccuggggcugcucagccagcggacgcgcgacaucuacaucagccggcgccgccggggcaccuucaccuggacccucuccgacagcgagggcaaggacacgcccgggggcuacugccugacccgguggaugcugaucgaggccgagcucaagugcuucgggaacaccgccguggccaagugcaacgagaagcacgacgaggaguucugcgacaugcugcgccuguucgacuucaacaagcaggccauccagcggcucaaggcgcccgcccagauguccauccagcugaucaacaaggccgucaacgcccugaucaacgaccagcucaucaugaagaaccaccuccgcgacaucaugggcauccccuacugcaacuacagcaaguacugcuaccugaaccacaccacgaccgggaagaccucccugcccaagugcugccuggugagcaacggcuccuaccugaacgagacccacuucagcgacgacaucgagcagcaggccgacaacaugaucacggagaugcuccagaaggaguacauggagcggcagggcaagaccccgcuggggcugguggaccucuucgucuucuccaccagcuucuaccugaucuccaucuuccugcaccuggugaagaucccgacccaccgccacguggucggcaagagcugccccaagccccaccggcucaaccacauggggaucugcuccugcggccuguacgggcagcccggcgugccggugaaguggaagcgcugaggacuagucccuguucccagagcccacuuuuuuuucuuuuuuugaaauaaaauagccugucuuucagaucuaaaaaaaaaaaaaaaaaaaaaaaaaaaaaaaaaaaaaaaaaaaaaaaaaaaaaaaaaaaaaaaaaaaaaaaaaaaaaaaaaaaaaaaaaaaaaaaaaaaa

SEQ ID NO: 25472 - RNA, 1743 nt, Artificial Sequence
  mRNA product Design a-2 (A100) comprising derived and/or modified sequence from MOPV/LASV reassortant(IGS-1;Clade IV)__AFY05576__GPCmut3 (opt1)
aggagaguccgcucagccagguugcagaagcggcuuagcguguguccuaaucuucucucugcguguagguaggccugugccgcaaacaagcuuaccaugggccagaucgugaccuucuuccaggaggucccccacgugaucgaggaggugaugaacaucguccugaucgcccucagcgugcuggccgugcugaaggggcucuacaacuucgcgaccugcggccuggucgggcuggugacguuccuccugcugugcggccgcuccugcaccaccagccucuacaaggggguguacgagcugcagacccuggagcucaacauggagacgcugaacaugaccaugccgcuguccugcaccaagaacaacagccaccacuacaucauggucggcaacgagaccggccucgagcugacgcugaccaacaccuccaucaucaaccacaaguucugcaaccucagcgacgcccacaagaagaaccuguacgaccacgcccugauguccaucaucagcaccuuccaccucuccauccccaacuucaaccaguacgaggccaugagcugcgacuucaacgggggcaagaucuccgugcaguacaaccugagccacuccuacgccggggacgcggccaaccacugcggcacgguggccaacgggguccugcagaccuucaugcggauggccuggggcggcagcuacaucgcgcucgacuccgggcgcggcaacugggacugcaucaugaccagcuaccaguaccugaucauccagaacaccacgugggaggaccacugccaguucucccggcccagccccaucggguaccugggccuccugucccagcgcacccgggacaucuacaucagccgccggcgccggggcaccuucaccuggacgcugagcgacuccgagggggaggacaccccgggcggguacugccugacccgcuggaugcucaucgaggccgagcugaagugcuucggcaacaccgccguggccaagugcaacgagaagcacgacgaggaguucugcgacaugcugcggcuguucgacuucaacaagcaggccauccagcgccugaaggcgcccgcccagaugagcauccagcugaucaacaaggccgugaacgcccucaucaacgaccagcugaucaugaagaaccaccuccgggacaucauggggauccccuacugcaacuacuccaaguacugcuaccucaaccacacgaccaccggccgcaccagccugcccaagugcugccuggucuccaacggcagcuaccucaacgagacgcacuucuccgacgacaucgagcagcaggccgacaacaugaucaccgagaugcugcagaaggaguacauggagcggcaggggaagacgccccugggccucguggaccuguucguguucagcaccuccuucuaccugaucagcaucuuccugcaccucgucaagaucccgacccaccgccacaucguggggaaguccugccccaagccccaccggcugaaccacaugggcaucugcagcugcgggcuguacaagcagcccggcgugccggucaaguggaagcgcugaggacuagucccuguucccagagcccacuuuuuuuucuuuuuuugaaauaaaauagccugucuuucagaucuaaaaaaaaaaaaaaaaaaaaaaaaaaaaaaaaaaaaaaaaaaaaaaaaaaaaaaaaaaaaaaaaaaaaaaaaaaaaaaaaaaaaaaaaaaaaaaaaaaaa

SEQ ID NO: 25473 - RNA, 1743 nt, Artificial Sequence
  mRNA product Design a-2 (A100) comprising derived and/or modified sequence from LASV(LM765-SLE-2012;Clade IV)__AIT17814__GPCmut3 (opt1)
aggagaguccgcucagccagguugcagaagcggcuuagcguguguccuaaucuucucucugcguguagguaggccugugccgcaaacaagcuuaccaugggccagaucgugaccuucuuccaggaggucccccacgugaucgaggaggugaugaacaucguccugaucgcccucagcauccuggccgugcugaaggggcucuacaacuucgcgaccugcggccugguggggcuggucacguuccuccugcugugcggccgcuccugcaccaccagccucuacaaggggguguacgagcugcagacccuggagcucaacauggagacgcugaacaugaccaugccgcuguccugcaccaagaacaacagccaccacuacaucauggugggcaacgagaccggccucgagcugacgcugaccaacaccuccaucaucgaccacaaguucugcaaccucagcgacgcccaccggaagaaccuguacgaccacgcccugauguccaucaucagcaccuuccaccucuccauccccaacuucaaccaguacgaggccaugagcugcgacuucaacgggggcaagaucuccguccaguacaaccugagccacuccuacgccaaggacgcggccgaccacugcgggacgguggccaacggcgugcugcagaccuucaugcgcauggccuggggcgggagcuacaucgcgcucgacuccggccgggggcgcugggacugcaucaugaccagcuaccaguaccugaucauccagaacaccacgugggaggaccacugccaguucucccggcccagccccaucggcuaccuggggcuccugucccagcgcacccgggacaucuacaucagccgccggcgccggggcaccuucaccuggacgcugagcgacuccgagggcaaggacacccccgggggcuacugccugacccgcuggaugcucaucgaggccgagcugaagugcuucgggaacaccgccgucgccaagugcaacgagaagcacgacgaggaguucugcgacaugcugcggcuguucgacuucaacaagcaggccauccagcgccugaaggcgcccgcccagaugagcauccagcugaucaacaaggccgugaacgcccucaucaacgaccagcugaucaugaagaaccaccuccgggacaucaugggcauccccuacugcaacuacuccaaguacugcuaccucaaccacacgaccaccgggaagaccagccugcccaagugcugccugguguccaacggcagcuaccucaacgagacgcacuucuccgacgacaucgagcagcaggccgacaacaugaucaccgagaugcugcagaaggaguacauggagcgccagggcaagaccccgcuggggcucgucgaccuguucguguucagcaccuccuucuaccugaucagcaucuuccugcaccucgugaagaucccgacgcaccggcacaucgucggcaagcccugccccaagccccaccgccugaaccacauggggaucugcuccugcggccuguacaagcagccgggggugcccgugaaguggaagcggugaggacuagucccuguucccagagcccacuuuuuuuucuuuuuuugaaauaaaauagccugucuuucagaucuaaaaaaaaaaaaaaaaaaaaaaaaaaaaaaaaaaaaaaaaaaaaaaaaaaaaaaaaaaaaaaaaaaaaaaaaaaaaaaaaaaaaaaaaaaaaaaaaaaaa

SEQ ID NO: 25474 - RNA, 1743 nt, Artificial Sequence
  mRNA product Design a-2 (A100) comprising derived and/or modified sequence from LASV(LM776-SLE-2012;Clade IV)__AIT17824__GPCmut3 (opt1)
aggagaguccgcucagccagguugcagaagcggcuuagcguguguccuaaucuucucucugcguguagguaggccugugccgcaaacaagcuuaccaugggccagaucgugaccuucuuccaggaggucccccacgugaucgaggaggugaugaacaucguccugaucgcccucagcauccuggccgugcugaaggggcucuacaacuucgcgaccugcggccugguggggcuggucacguuccuccugcugugcggccgcuccugcaccaccagcguguacaaggggguguacgagcuccagacccuggagcugaacauggagacgcucaacaugaccaugccgcuguccugcaccaagaacaacagccaccacuacaucauggucggcaacgagaccggccuggagcucacgcugaccaacaccuccaucaucaaccacaaguucugcaaccugagcgacgcccacaagaagaaccucuacgaccacgcccugauguccaucaucagcaccuuccaccuguccauccccaacuucaaccaguacgaggccaugagcugcgacuucaacgggggcaagaucuccgugcaguacaaccucagccacuccuacgccggggacgcggccaaccacugcggcacgguggccaacgggguccugcagaccuucaugcggauggccuggggcggcagcuacaucgcgcuggacuccgggcacggcaagugggacugcaucaugaccagcuaccaguaccucaucauccagaacaccacgugggaggaccacugccaguucucccgccccagccccaucggguaccugggccugcucucccagcggacccgcgacaucuacaucagccggcgccgccggggcaccuucaccuggacgcucagcgacuccgaggggaaggacaccccgggcggguacugccugacccgguggaugcugaucgaggccgagcucaagugcuucggcaacaccgccguggccaagugcaacgagaagcacgacgaggaguucugcgacaugcugcgccuguucgacuucaacaagcaggccauccagcggcucaaggcgcccgcccagaugagcauccagcugaucaacaaggccgugaacgcccugaucaacgaccagcucaucaugaagaaccaccuccgcgacaucauggggauccccuacugcaacuacuccaaguacugcuaccugaaccacacgaccaccggcaagaccagccugcccaagugcugccuggucuccaacggcagcuaccugaacgagacgcacuucuccgacgacaucgagcagcaggccgacaacaugaucaccgagaugcuccagaaggaguacauggagcggcaggggaagacgccccugggccugguggaccucuucguguucagcaccuccuucuaccugaucagcaucuuccugcaccuggucaagaucccgacccaccgccacaucguggggaaguccugccccaagccccaccggcucaaccacaugggcaucugcagcugcgggcuguacaagcagcccggcgugccgguccgcuggaagcggugaggacuagucccuguucccagagcccacuuuuuuuucuuuuuuugaaauaaaauagccugucuuucagaucuaaaaaaaaaaaaaaaaaaaaaaaaaaaaaaaaaaaaaaaaaaaaaaaaaaaaaaaaaaaaaaaaaaaaaaaaaaaaaaaaaaaaaaaaaaaaaaaaaaaa

SEQ ID NO: 25475 - RNA, 1743 nt, Artificial Sequence
  mRNA product Design a-2 (A100) comprising derived and/or modified sequence from LASV(Mad39;Clade IV)__ANH09722__GPCmut3 (opt1)
aggagaguccgcucagccagguugcagaagcggcuuagcguguguccuaaucuucucucugcguguagguaggccugugccgcaaacaagcuuaccaugggccagaucgugaccuucuuccaggaggucccccacgugaucgaggaggugaugaacaucguccugaucgcccucagcauccuggccgugcugaaggggcucuacaacguggcgaccugcggccugaucgggcuggucacguuccuccugcugugcggccgcuccugcaccaccacccucuacaaggggguguacgagcugcaggcccuggagcucaacauggagacgcugaacaugaccaugccgcugagcugcaccaagaacaacucccaccacuacauccgggugggcaacgagaccggccucgagcugacgcugaccaacaccagccucaucaaccacaaguucugcaaccuguccgacgcccacaagaagaaccuguacgaccacgcccucaugagcaucaucuccaccuuccaccugagcauccccaacuucaaccaguacgaggccauguccugcgacuucaacgacgggaagaucagcguccaguacaaccugucccacacguacgcgggcgacaccgccaaccacugcgggaccguggccaacggcgugcuccagaccuucaugcgcauggccuggggcgggagcuacaucgcgcuggacuccggccgcgggggcugggacugcaucaugacgagcuaccaguaccugaucauccagaacaccaccugggaggaccacugccaguucucccggcccagccccaucggguaccucggccugcugucccagcggacccgcgacaucuacaucagccggcgccgccggggcacguucaccuggacccuguccgacagcgaggggaaggacaccccgggcggguacugccucacgcgguggaugcugaucgaggccgagcugaagugcuucggcaacaccgccgucgccaagugcaacgagaagcacgacgaggaguucugcgacaugcuccgccuguucgacuucaacaagcaggccauccagcggcugaaggcgcccgcccagaugagcauccagcucaucaacaaggccgugaacgcccugaucaacgaccagcugaucaugaagaaccaccuccgcgacaucauggggauccccuacugcaacuacuccaaguacugcuaccugaaccacaccgugaccggcaagacgagccugcccaagugcugccucgucuccaacggcagcuaccugaacgagacccacuucuccgacgacaucgagcagcaggccgacaacaugaucaccgagaugcugcagaaggaguacauggagcggcaggggaagacgccccucggccugguggaccuguucguguucagcaccuccuucuaccugaucagcaucuuccuccaccuggucaagaucccgacccaccgccacgugguggggaagcccugccccaagccccaccggcugaaccacaugggcaucugcuccugcggguucuacaagcagccgggcguccccgugcgcuggaagcggugaggacuagucccuguucccagagcccacuuuuuuuucuuuuuuugaaauaaaauagccugucuuucagaucuaaaaaaaaaaaaaaaaaaaaaaaaaaaaaaaaaaaaaaaaaaaaaaaaaaaaaaaaaaaaaaaaaaaaaaaaaaaaaaaaaaaaaaaaaaaaaaaaaaaa

SEQ ID NO: 25476 - RNA, 1743 nt, Artificial Sequence
  mRNA product Design a-2 (A100) comprising derived and/or modified sequence from LASV(Z0947-SLE-2011;Clade IV)__AIT17840__GPCmut3 (opt1)
aggagaguccgcucagccagguugcagaagcggcuuagcguguguccuaaucuucucucugcguguagguaggccugugccgcaaacaagcuuaccaugggccagaucgugaccuucuuccaggaggucccccacgugaucgaggaggugaugaacaucguccugaucgcccucagcauccuggccgugcugaaggggcucuacaacuucgcgaccugcggccugguggggcuggucacguuccuccugcugugcggccgcuccugcaccaucagccucuacaaggggguguacgagcugcagacccuggagcucaacauggagacccugaacaugacgaugccgcuguccugcaccaagaacaacagccaccacuacaucauggugggcaacgagaccggccucgagcugacccugacgaacaccuccaucaucaaccacaaguucugcaaccucagcgacgcccacaagaagaaccuguacgaccacgcccugauguccaucaucagcaccuuccaccucuccauccccaacuucaaccaguacgaggccaugagcugcgacuucaacgggggcaagaucuccguccaguacaaccugagccacuccuacgccggggacgcggccaaccacugcggcaccguggccaacggggugcugcagacguucaugcggauggccuggggcggcagcuacaucgcgcucgacuccgggcgcgaccggugggacugcaucaugaccagcuaccaguaccugaucauccagaacaccaccugggaggaccacugccaguucucccgccccagccccaucggcuaccuggggcuccugucccagcggacgcgcgacaucuacaucagccggcgccgccggggcaccuucaccuggacccugagcgacuccgagggcaaggacacgcccgggggcuacugccugacccgguggaugcucaucgaggccgagcugaagugcuucgggaacaccgccgucgccaagugcaacgagaagcacgacgaggaguucugcgacaugcugcgccucuucgacuucaacaagcaggccauccagcggcugaaggcgcccgcccagaugagcauccagcugaucaacaaggccgugaacgcccucaucaacgaccagcugaucaugaagaaccaccuccgcgacaucaugggcauccccuacugcaacuacuccaaguacugcuaccugaaccacaccacgaccgggaagaccagccugcccaagugcugccugguguccaacggcagcuaccucaacgagacccacuucuccgacgacaucgagcagcaggccgacaacaugaucacggagaugcugcagaaggaguacauggagcggcagggcaagaccccgcuggggcucgucgaccuguucguguucagcaccuccuucuaccugaucagcaucuuccugcaccucgugaagaucccgacccaccgccacaucgucggcaagcccugccccaagccccaccggcugaaccacauggggaucugcuccugcggccuguacaagcagccgggggugcccgugaaguggaagcgcugaggacuagucccuguucccagagcccacuuuuuuuucuuuuuuugaaauaaaauagccugucuuucagaucuaaaaaaaaaaaaaaaaaaaaaaaaaaaaaaaaaaaaaaaaaaaaaaaaaaaaaaaaaaaaaaaaaaaaaaaaaaaaaaaaaaaaaaaaaaaaaaaaaaaa

SEQ ID NO: 25477 - RNA, 1743 nt, Artificial Sequence
  mRNA product Design a-2 (A100) comprising derived and/or modified sequence from LASV(Josiah;Clade IV)__NP_694870__GPCmut3 (opt1)
aggagaguccgcucagccagguugcagaagcggcuuagcguguguccuaaucuucucucugcguguagguaggccugugccgcaaacaagcuuaccaugggccagaucgugaccuucuuccaggaggucccccacgugaucgaggaggugaugaacaucguccugaucgcccucagcgugcuggccgugcugaaggggcucuacaacuucgcgaccugcggccuggucgggcuggugacguuccuccugcugugcggccgcuccugcaccaccagccucuacaaggggguguacgagcugcagacccuggagcucaacauggagacgcugaacaugaccaugccgcuguccugcaccaagaacaacagccaccacuacaucauggucggcaacgagaccggccucgagcugacgcugaccaacaccuccaucaucaaccacaaguucugcaaccucagcgacgcccacaagaagaaccuguacgaccacgcccugauguccaucaucagcaccuuccaccucuccauccccaacuucaaccaguacgaggccaugagcugcgacuucaacgggggcaagaucuccgugcaguacaaccugagccacuccuacgccggggacgcggccaaccacugcggcacgguggccaacgggguccugcagaccuucaugcggauggccuggggcggcagcuacaucgcgcucgacuccgggcgcggcaacugggacugcaucaugaccagcuaccaguaccugaucauccagaacaccacgugggaggaccacugccaguucucccggcccagccccaucggguaccugggccuccugucccagcgcacccgggacaucuacaucagccgccggcgccggggcaccuucaccuggacgcugagcgacuccgaggggaaggacaccccgggcggguacugccucacccgcuggaugcugaucgaggccgagcugaagugcuucggcaacaccgccguggccaagugcaacgagaagcacgacgaggaguucugcgacaugcuccggcuguucgacuucaacaagcaggccauccagcgccugaaggcgcccgcccagaugagcauccagcucaucaacaaggccgugaacgcccugaucaacgaccagcugaucaugaagaaccaccuccgggacaucauggggauccccuacugcaacuacuccaaguacugcuaccugaaccacacgaccaccggccgcaccagccugcccaagugcugccucgucuccaacggcagcuaccugaacgagacgcacuucuccgacgacaucgagcagcaggccgacaacaugaucaccgagaugcugcagaaggaguacauggagcggcaggggaagaccccgcucggccugguggaccuguucguguucagcaccuccuucuaccugaucagcaucuuccuccaccuggucaagauccccacgcaccgccacaucguggggaaguccugccccaagccccaccggcugaaccacaugggcaucugcagcugcgggcucuacaagcagccgggcgugcccgucaaguggaagcgcugaggacuagucccuguucccagagcccacuuuuuuuucuuuuuuugaaauaaaauagccugucuuucagaucuaaaaaaaaaaaaaaaaaaaaaaaaaaaaaaaaaaaaaaaaaaaaaaaaaaaaaaaaaaaaaaaaaaaaaaaaaaaaaaaaaaaaaaaaaaaaaaaaaaaa

SEQ ID NO: 25478 - RNA, 1740 nt, Artificial Sequence
  mRNA product Design a-2 (A100) comprising derived and/or modified sequence from LASV(LP;Clade I)__AAF86701__GPCmut3 (opt1)
aggagaguccgcucagccagguugcagaagcggcuuagcguguguccuaaucuucucucugcguguagguaggccugugccgcaaacaagcuuaccaugggccagaucaucaccuucuuccaggaggugccccacgucaucgaggaggugaugaacaucgugcugaucgcccucagccugcuggccauccucaaggggcuguacaacaucgcgaccugcggcaucaucgggcuggucgccuuccucuuccugugcggcaaguccugcagccugacgcucaagggcggguacgagcugcagacccuggagcucaacauggagacccugaacaugaccaugccgcuguccugcacgaagaacagcucccaccacuacauccgcgugggcaacgagaccgggcucgagcugacccugaccaacacgagcaucaucaaccacaaguucugcaaccucuccgacgcccacaagaagaaccuguacgaccacgcccugaugagcaucaucuccaccuuccaccucagcauccccaacuucaaccaguacgaggccauguccugcgacuucaacggcgggaagaucagcgugcaguacaaccugucccacagcuacgcgggcgacgccgccgagcacugcgggaccgucgccaacggcgugcugcagaccuucaugcggauggcguggggcgggcgcuacaucgcccucgacuccggcaaggggaacugggacugcaucaugacgagcuaccaguaccugaucauccagaacaccaccugggaggaccacugccaguucucccggcccagccccaucggcuaccugggccuccugucccagcgcacccgggacaucuacaucagccgccggcgccgggggacguucaccuggacccugagcgacuccgagggcaacgagacccccgggggcuacugccucacgcgcuggaugcugaucgaggccgagcugaagugcuucgggaacaccgccguggccaagugcaacgagaagcacgacgaggaguucugcgacaugcuccggcuguucgacuucaacaagcaggcgauccgccggcugaaggccccggcccagaugagcauccagcucaucaacaaggccgucaacgcccugaucaacgaccagcugaucaugaagaaccaccuccgcgacaucaugggcauccccuacugcaacuacuccaaguacugcuaccugaaccacaccagcuccggccggaccagccugcccaagugcugccucaucuccaacgggagcuaccugaacgagacgcaguucuccgacgacaucgagcagcaggcggacaacaugaucaccgagaugcugcagaaggaguacaucgagcgccagggcaagaccccgcucgggcugguggacaucuucaucuucagcaccuccuucuaccugaucagcaucuuccugcaccucaucaagauccccacgcaccggcacaucgugggcaagcccugccccaagccgcaccgccugaaccacaugggggucugcuccugcggccuguacaagcaccccggcgugcccaccaaguggaagcggugaggacuagucccuguucccagagcccacuuuuuuuucuuuuuuugaaauaaaauagccugucuuucagaucuaaaaaaaaaaaaaaaaaaaaaaaaaaaaaaaaaaaaaaaaaaaaaaaaaaaaaaaaaaaaaaaaaaaaaaaaaaaaaaaaaaaaaaaaaaaaaaaaaaaa

SEQ ID NO: 25479 - RNA, 1740 nt, Artificial Sequence
  mRNA product Design a-2 (A100) comprising derived and/or modified sequence from LASV(803213;Clade II)__AAF86703__GPCmut3 (opt1)
aggagaguccgcucagccagguugcagaagcggcuuagcguguguccuaaucuucucucugcguguagguaggccugugccgcaaacaagcuuaccaugggccagaucaucaccuucuuccaggaggugccccacgucaucgaggaggugaugaacaucgugcugaucgcccucagccugcuggccauccucaaggggaucuacaacgucgcgaccugcggccuguucgggcugaucuccuuccuccugcugugcggccgcagcugcuccgugacguacaaggggguguacgagcuccagacccuggagcugaacauggccaaccucaacaugaccaugccgcugagcugcaccaagaacaacucccaccacuacaucauggucggcaacgagacgggccuggagcucacccugaccaacaccagcaucaucaaccacaaguucugcaaccuguccgacgcccacaagaagaaccucuacgaccacgcccugaugagcaucaucuccacguuccaccugagcauccccaacuucaaccaguacgaggccauguccugcgacuucaacgggggcaagaucagcgugcaguacaaccucucccacagcuucgcgguggacgccgccaaccacugcgggaccaucgccaacggcguccugcagaccuucaugcggauggcguggggcggguccuacaucgcccuggacagcggcaaggggaacugggacugcaucaugaccuccuaccaguaccucaucauccagaacacgaccugggaggaccacugccaguucagccgccccucccccaucggcuaccuggggcugcucagccagcggacccgcgacaucuacaucagccggcgccggcgcggcaccuucacguggacccuguccgacagcgagggcaacgaggcccccgggggcuacugccugacccgguggaugcucaucgaggccgagcugaagugcuucgggaacaccgccguggcgaagugcaacgagaagcacgacgaggaguucugcgacaugcugcgccucuucgacuucaacaagcaggccaucaagcggcugaagacgccggcccagauguccauccagcugaucaacaaggccgugaacgcccucaucaacgaccagcugaucaugaagaaccaccuccgcgacaucaugggcauccccuacugcaacuacagccgguacugcuaccugaaccacaccgucaccgggaagaccucccugccccgcugcugccuggugagcaacggcuccuaccucaacgagacgcacuucagcgacgacaucgagcagcaggcggacaacaugaucaccgagaugcugcagaaggaguacauggaccggcagggcaagaccccgcuggggcucguggaccuguucgucuucuccaccagcuucuaccugaucuccaucuuccugcaccucgugaagauccccacgcaccgccacaucgugggcaagcccugccccaagccgcaccggcugaaccacauggggaucugcagcugcggccuguacaagcaccccgggguccccgugaaguggaagcgcugaggacuagucccuguucccagagcccacuuuuuuuucuuuuuuugaaauaaaauagccugucuuucagaucuaaaaaaaaaaaaaaaaaaaaaaaaaaaaaaaaaaaaaaaaaaaaaaaaaaaaaaaaaaaaaaaaaaaaaaaaaaaaaaaaaaaaaaaaaaaaaaaaaaaa

SEQ ID NO: 25480 - RNA, 1740 nt, Artificial Sequence
  mRNA product Design a-2 (A100) comprising derived and/or modified sequence from LASV(GA391;Clade III)__CAA36645__GPCmut3 (opt1)
aggagaguccgcucagccagguugcagaagcggcuuagcguguguccuaaucuucucucugcguguagguaggccugugccgcaaacaagcuuaccaugggccagaucgugaccuucuuccaggaggucccccacgugaucgaggaggugaugaacaucguccugaucgcccucagcauccuggccauccugaaggggcucuacaacguggcgaccugcggccugaucgggcuggugacguuccuccugcuguccggccgcagcugcucccucaucuacaaggggaccuacgagcugcagacccuggagcucaacauggagacccugaacaugacgaugccgcugagcugcaccaagaacaacucccaccacuacauccgggucggcaacgagaccggccucgagcugacccugacgaacaccagcauccucaaccacaaguucugcaaccuguccgacgcccacaagcgcaaccuguacgaccacagccucauguccaucaucagcaccuuccaccuguccauccccaacuucaaccaguacgaggccaugagcugcgacuucaacgggggcaagaucaccgugcaguacaaccugucccacagcuucgccguggacgccgcggggcacugcggcacgcucgccaacgggguccugcagaccuucaugcggauggccuggggcggcuccuacaucgcccuggacagcgggcgcggcaacugggacugcaucaugaccuccuaccaguaccucaucauccagaacaccacgugggacgaccacugccaguucagccggcccucccccaucggguaccugggccugcucagccagcgcacccgggacaucuacaucagccgccggcgccggggcaccuucaccuggacgcuguccgacagcgaggggaacgagaccccgggcggguacugccugacccgcuggaugcucaucgaggcggagcugaagugcuucggcaacaccgccguggccaagugcaacgagaagcacgacgaggaguucugcgacaugcugcggcuguucgacuucaacaagcaggccauccgccggcugaagacgcccgcccagauguccauccagcugaucaacaaggcggugaacgcccucaucaacgaccagcugaucaugaagaaccaccuccgcgacaucauggggauccccuacugcaacuacagccgguacugcuaccucaaccacaccuccaccggcaagaccagccugccccgcugcugccugaucuccaacggcagcuaccucaacgagacgaaguucuccgacgacaucgagcagcaggccgacaacaugaucaccgagaugcugcagaaggaguacaucgaccggcaggggaagaccccgcugggccuggucgaccucuucguguucagcaccuccuucuaccugaucagcaucuuccugcaccucgugaagauccccacgcaccgccacaucgucgggaagcccugccccaagccgcaccggcugaaccacaugggcaucugcuccugcgggcuguacaagcagcccggcgugcccgugcgcuggaagcgcugaggacuagucccuguucccagagcccacuuuuuuuucuuuuuuugaaauaaaauagccugucuuucagaucuaaaaaaaaaaaaaaaaaaaaaaaaaaaaaaaaaaaaaaaaaaaaaaaaaaaaaaaaaaaaaaaaaaaaaaaaaaaaaaaaaaaaaaaaaaaaaaaaaaaa

SEQ ID NO: 25481 - RNA, 1743 nt, Artificial Sequence
  mRNA product Design a-2 (A100) comprising derived and/or modified sequence from LASV(AV;Clade V)__CCA30314__GPCmut3 (opt1)
aggagaguccgcucagccagguugcagaagcggcuuagcguguguccuaaucuucucucugcguguagguaggccugugccgcaaacaagcuuaccaugggccagaucgugaccuucuuccaggaggucccccacgugaucgaggaggugaugaacaucguccugaucgcccucagcauccuggccgugcugaaggggcucuacaacaucgcgaccugcggccugaucgggcugaucacguuccuccugcugugcggccgcuccugcagcuccaaccucuacaaggggguguacgagcugcagagccuggaccucaacauggagacccugaacaugaccaugccgcuguccugcaccaagaacaacagccaccacuacauccgggucggcaacgacacgggccucgagcugacccugaccaacaccuccauccucaaccacaaguucugcaaccugagcgacgcccacaagaaggaccuguacgaccacgcccucauguccaucaucagcacguuccaccuguccauccccaacuucaaccaguacgaggccaugagcugcgacuucaacgggggcaagaucuccgugcaguacaaccugagccacuccuacgccaucgacgcggccaaccacugcgggaccguggccaacggcauccuccagaccuucaugcgcauggccuggggcgggagcuacaucgcgcuggacuccggccgggggaacugggacugcaucaugaccagcuaccaguaccugaucauccagaacacgaccugggagaaccacugccaguucucccgccccagccccaucggcuaccucgggcugcugagccagcggacccgcgacaucuacaucucccggcgccggcgcggcaccuucacguggacccucagcgacuccgagggcaacgccacccccgggggcuacugccugacccgguggaugcugaucgaggccgagcucaagugcuucgggaacacggccgucgccaagugcaacgagaagcacgacgaggaguucugcgacaugcugcgccuguucgacuucaacaagcaggcgaucagccggcucaaguccccggcccagaugagcauccagcugaucaacaaggccgugaacgcccugaucaacgaccagcucaucaugaagaaccaccuccgcgacaucaugggcauccccuacugcaacuacuccaaguacugcuaccugaaccacaccaucaccgggaagaccagccugcccaagugcugccugguguccaacggcagcuaccugaacgagacgcacuucuccgacgacaucgagcagcaggccgacaacaugaucaccgagaugcuccagaaggaguacauggagcggcagggcaagaccccgcuggggcuggucgaccuguucguguucagcaccuccuucuaccucaucagcaucuuccugcgccuggugaagauccccacgcaccggcacaucgucggcaagcccugccccaagccgcaccgccucaaccacauggggaucugcuccugcggccuguacaagcagcccggggugcccgugcgguggaagcgcugaggacuagucccuguucccagagcccacuuuuuuuucuuuuuuugaaauaaaauagccugucuuucagaucuaaaaaaaaaaaaaaaaaaaaaaaaaaaaaaaaaaaaaaaaaaaaaaaaaaaaaaaaaaaaaaaaaaaaaaaaaaaaaaaaaaaaaaaaaaaaaaaaaaaa

SEQ ID NO: 25482 - RNA, 1740 nt, Artificial Sequence
  mRNA product Design a-2 (A100) comprising derived and/or modified sequence from LASV(Togo/2016/7082;Clade VI)__AMR44577__GPCmut3 (opt1)
aggagaguccgcucagccagguugcagaagcggcuuagcguguguccuaaucuucucucugcguguagguaggccugugccgcaaacaagcuuaccaugggccagaucaucaccuucuuccaggaggugccccacgucaucgaggaggugaugaacaucgugcugaucgcccucagccugcuggccauccucaagggggucuacaacguggcgaccugcggcaucaucgggcuggugacguuccuguuccucugcggccgcuccugcagccugaucuacaagggguccuacgagcugcagacccucgagcugaacauggagacccugaacaugaccaugccgcucagcugcacgaagaacuccagccaccacuacauccgggucggcaacgagaccggccuggagcugacccucaccaacacguccaucaucaaccacaaguucugcaaccugagcgacgcccacaagcgcaaccuguacgaccacgcccucauguccauccugagcaccuuccaccuguccauccccaacuucaaccaguacgaggccaugagcugcgacuucaacgggggcaagaucuccgugcaguacaaccucagccacgccuacgcgguggacgccgccgagcacugcgggaccgucgccaacggcgugcugcagaccuucaugcggauggcguggggcggguccuacaucgcccuggacagcggccgcgggaacugggacugcaucaugacguccuaccaguaccucaucauccagaacaccaccugggaggaccacugccaguucagccggcccucccccaucggcuaccuggggcugcucagccagcgcacccgggacaucuacaucagccgccggcgccggggcacguucaccuggacccuguccgacagcgagggcaacgagacccccgggggcuacugccugacgcgcuggaugcucaucgaggccgagcugaagugcuucgggaacaccgccguggccaagugcaacgagaagcacgacgaggaguucugcgacaugcugcggcuguucgacuucaacaagcaggcgauccagcgccugaaguccccggcccagaugagcauccagcugaucaacaaggccgucaacgcccucaucaacgaccagcugaucaugaagaaccaccuccgggacaugaugggcauccccuacugcaacuacuccaaguacugcuaccucaaccacaccagcuccgggcgcaccagccugcccaagugcugccugguguccaacggcagcuaccucaacgagacgcacuucuccgacgacaucgagcagcaggccgacaacaugaucaccgagaugcugcagaaggaguacaucgaccggcagggcaagaccccgcuggggcucguggaccuguucgucuucagcaccuccuucuaccugaucagcaucuuccugcaccucaucaagauccccacgcaccgccacaucgugggcaagcccugccccaagccgcaccggcugaaccacauggggaucugcuccugcggccuguacaagcagcccggggugcccacccgcuggaagcggugaggacuagucccuguucccagagcccacuuuuuuuucuuuuuuugaaauaaaauagccugucuuucagaucuaaaaaaaaaaaaaaaaaaaaaaaaaaaaaaaaaaaaaaaaaaaaaaaaaaaaaaaaaaaaaaaaaaaaaaaaaaaaaaaaaaaaaaaaaaaaaaaaaaaa

SEQ ID NO: 25483 - RNA, 1740 nt, Artificial Sequence
  mRNA product Design a-2 (A100) comprising derived and/or modified sequence from LASV(KAK-428;Clade n.d. (VII))__ANH09740__GPCmut3 (opt1)
aggagaguccgcucagccagguugcagaagcggcuuagcguguguccuaaucuucucucugcguguagguaggccugugccgcaaacaagcuuaccaugggccagaucgugaccuucuuccaggaggucccccacgugaucgaggaggugaugaacaucguccugaucgcccucagccugcuggccauccucaaggggcuguacaacuucgcgaccugcggcgugaucgggcugaucacguuccuccugcugugcggccgcuccugcagcgccaccuacaaggggcaguacgagcuccagacccuggagcugaacauggagucccucaacaugaccaugccgcugagcugcacgaagaacaacucccaccacuacauccgggccggcaacaacaccggccuggagcucacccugaccaacacgagcaucaucucccacaaguucugcaaccugagcgacgcccacaagaagaaccucuacgaccacacccugauguccaucaucaccaccuuccaccugagcauccccaacuucaaccaguacgaggccauguccugcgacuucaacgggggcaagaucagcauccaguacaaccucucccacagcuacgcgggggacgccgcccagcacugcggcacgguggccaacgggguccugcagaccuucaugcgcauggcguggggcggcuccuaccuggcccucgacagcgggcggcgcggcugggacugcaucaucuccagcuaccaguaccugaucauccagaacaccaccugggacgaccacugccaguucucccggcccagccccaucggguaccugggcuucgugagccagaagacgcgcgacaucuacaucucccggcgccggcgcggcaccuucaccuggacccucagcgacuccgaggggcacgacaugccgggcggguacugccugacgcgguggaugcugaucgaggccgaccucaagugcuucggcaacaccgccguggccaagugcaacgagaagcacgacgaggaguucugcgacauguggcgccuguucgacuucaacaagcaggcgauccagcggcugaaggcccccgcccagaugaacauccagcucaucaacaaggccgucaacgcccugaucaacgaccagcugaugaugaagaaccaccuccgcgacaucauggggauccccuacugcaacuacagcaaguucugcuaccugaacaacaccaccacgggccggaccucccugccccgcugcugccucaucagcaacggcuccuaccugaacgagacccacuucagcgacgacaucgagcagcaggcggacaacaugaucaccgagaugcugcagaaggaguacauggaccggcaggggaagacgccgcucggccugguggaccuguucguguucuccaccagcuucuaccucaucaccaucuuccugcaccuggucaagauccccacccaccgccacaucguggggaagcccugccccaagccgcaccggcugaaccacaugggcaucugcuccugcgggcucuacaagcagcccggcgugcccguccgcuggaagcggugaggacuagucccuguucccagagcccacuuuuuuuucuuuuuuugaaauaaaauagccugucuuucagaucuaaaaaaaaaaaaaaaaaaaaaaaaaaaaaaaaaaaaaaaaaaaaaaaaaaaaaaaaaaaaaaaaaaaaaaaaaaaaaaaaaaaaaaaaaaaaaaaaaaaa

SEQ ID NO: 25484 - RNA, 1740 nt, Artificial Sequence; identical to SEQ ID NO: 25478
  mRNA product Design a-2 (A100) comprising derived and/or modified sequence from LASV(Pinneo-NIG-1969;Clade I)__AIT17836__GPCmut3 (opt1)

SEQ ID NO: 25485 - RNA, 1740 nt, Artificial Sequence
  mRNA product Design a-2 (A100) comprising derived and/or modified sequence from LASV(ISTH0009-NIG-2011;Clade II)__AIT17404__GPCmut3 (opt1)
aggagaguccgcucagccagguugcagaagcggcuuagcguguguccuaaucuucucucugcguguagguaggccugugccgcaaacaagcuuaccaugggccagaucaucaccuucuuccaggaggugccccacgucaucgaggaggugaugaacaucgugcugaucgcccucagccugcuggccauccucaaggggaucuacaacgucgcgaccugcggccuguucgggcugguguccuuccuccugcugugcggccgcagcugcuccacgaccuacaaggggguguacgagcuccagacccuggagcuggacauggccagccucaacaugaccaugccgcuguccugcacgaagaacaacagccaccacuacaucauggucggcaacgagaccggccuggagcucacccugaccaacacguccaucaucaaccacaaguucugcaaccugagcgacgcccacaagaagaaccucuacgaccacgcccugauguccaucaucagcaccuuccaccuguccauccccaacuucaaccaguacgaggccaugagcugcgacuucaacgggggcaagaucuccgugcaguacaaccucagccacgcguacgccguggacgccgccaaccacugcgggaccaucgcgaacggcguccugcagaccuucaugcggauggccuggggcggguccuacaucgcccuggacagcggcaagggguccugggacugcaucaugacgagcuaccaguaccucaucauccagaacaccaccugggaggaccacugccaguucucccgccccagccccaucggcuaccuggggcugcucagccagcggacccgcgacaucuacaucucccggcgccggcgcggcacguucaccuggacccugagcgacuccgagggcaacgagacccccgggggcuacugccugacgcgguggaugcucaucgaggccgagcugaagugcuucgggaacaccgccguggcgaagugcaacgagaagcacgacgaggaguucugcgacaugcugcgccucuucgacuucaacaagcaggccauccggcgccugaagaccccggcccagaugagcauccagcugaucaacaaggccgugaacgcccucaucaacgaccagcugaucaugaagaaccaccuccgggacaucaugggcauccccuacugcaacuacuccaaguacugcuaccugaaccacaccgucacggggaagaccagccugccccgcugcugccugguguccaacggcagcuaccucaacgagacccacuucuccgacgacaucgagcagcaggcggacaacaugaucaccgagcugcugcagaaggaguacauggaccggcagggcaagacgccgcucgggcugguggaccuguucgucuucagcaccuccuucuaccugaucagcaucuuccuccaccugaucaagauccccacccaccgccacaucaccggcaagcccugccccaagccgcaccggcugaaccacauggggaucugcuccugcggccucuacaagcaccccggggugcccgugaaguggaagcgcugaggacuagucccuguucccagagcccacuuuuuuuucuuuuuuugaaauaaaauagccugucuuucagaucuaaaaaaaaaaaaaaaaaaaaaaaaaaaaaaaaaaaaaaaaaaaaaaaaaaaaaaaaaaaaaaaaaaaaaaaaaaaaaaaaaaaaaaaaaaaaaaaaaaaa

SEQ ID NO: 25486 - RNA, 1740 nt, Artificial Sequence
  mRNA product Design a-2 (A100) comprising derived and/or modified sequence from LASV(ISTH2010-NIG-2012;Clade II)__AIT17482__GPCmut3 (opt1)
aggagaguccgcucagccagguugcagaagcggcuuagcguguguccuaaucuucucucugcguguagguaggccugugccgcaaacaagcuuaccaugggccagaucaucaccuucuuccaggaggugccccacgucaucgaggaggugaugaacaucgugcugaucgcccucagccugcuggccauccucaaggggaucuacaacgucgcgaccugcggccuguucgggcugguguccuuccuccugcugugcggccgcagcugcuccacgaccuacaaggggguguacgagcuccagacccuggagcuggacauggccagccucaacaugaccaugccgcuguccugcacgaagaacaacagccaccacuacaucauggucggcaacgagaccggccuggagcucacccugaccaacacguccaucaucaaccacaaguucugcaaccugagcgacgcccacaagaagaaccucuacgaccacgcccugauguccaucaucagcaccuuccaccuguccauccccaacuucaaccaguacgaggccaugagcugcgacuucaacgggggcaagaucuccgugcaguacaaccucagccacgcguacgccguggacgccgccaaccacugcgggaccaucgcgaacggcguccugcagaccuucaugcggauggccuggggcggguccuacaucgcccuggacagcggcaagggguccugggacugcaucaugacgagcuaccaguaccucaucauccagaacaucaccugggaggaccacugccaguucucccgccccagccccaucggcuaccuggggcugcucagccagcggacccgcgacaucuacaucucccggcgccggcgcggcaccuucacguggacccugagcgacuccgagggcaacgagacccccgggggcuacugccugacccgguggaugcucaucgaggccgagcugaagugcuucgggaacacggccguggcgaagugcaacgagaagcacgacgaggaguucugcgacaugcugcgccucuucgacuucaacaagcaggccauccggcgccugaagaccccggcccagaugagcauccagcugaucaacaaggccgugaacgcccucaucaacgaccagcugaucaugaagaaccaccuccgggacaucaugggcauccccuacugcaacuacuccaaguacugcuaccugaaccacaccgucaccgggaagacgagccugccccgcugcugccugguguccaacggcagcuaccucaacgagacccacuucuccgacgacaucgagcagcaggcggacaacaugaucaccgagcugcugcagaaggaguacaucgaccggcagggcaagaccccgcucgggcugguggaccuguucgucuucagcacguccuucuaccugaucagcaucuuccuccaccuggugaagauccccacccaccgccacguggucggcaagcccugccccaagccgcaccggcugaaccacauggggaucugcuccugcggccucuacaagcaccccggggugcccgugaaguggaagcgcugaggacuagucccuguucccagagcccacuuuuuuuucuuuuuuugaaauaaaauagccugucuuucagaucuaaaaaaaaaaaaaaaaaaaaaaaaaaaaaaaaaaaaaaaaaaaaaaaaaaaaaaaaaaaaaaaaaaaaaaaaaaaaaaaaaaaaaaaaaaaaaaaaaaaa

SEQ ID NO: 25487 - RNA, 1740 nt, Artificial Sequence
  mRNA product Design a-2 (A100) comprising derived and/or modified sequence from LASV(Lassa virus/H.sapiens-wt/NGA/2015/ISTH_0543;Clade II)__AVO03639__GPCmut3 (opt1)
aggagaguccgcucagccagguugcagaagcggcuuagcguguguccuaaucuucucucugcguguagguaggccugugccgcaaacaagcuuaccaugggccagaucaucaccuucuuccaggaggugccccacgucaucgaggaggugaugaacaucgugcugaucgcccucagccugcuggccauccucaaggggaucuacaacgucgcgaccugcggccuguucgggcugguguccuuccuccugcugugcggccgcagcugcuccacgaccuacaaggggguguacgagcuccagacccuggagcuggacauggccaaccucaacaugaccaugccgcugagcugcacgaagaacaacucccaccacuacaucauggucggcaacgagaccggccuggagcucacccugaccaacacgagcaucaucaaccacaaguucugcaaccuguccgacgcccacaagaagaaccucuacgaccacgcccugaugagcaucaucuccaccuuccaccugagcauccccaacuucaaccaguacgaggccauguccugcgacuucaacgggggcaagaucagcgugcaguacaaccucucccacaccuacgcgguggacgccgccaaccacugcgggaccaucgccaacggcguccugcagacguucaugcggauggcguggggcgggagcuacaucgcccuggacuccggcaaggggagcugggacugcaucaugaccuccuaccaguaccucgugauccagaacaccaccugggaggaccacugccaguucagccgccccucccccaucggcuaccuggggcugcucagccagcggacgcgcgacaucuacaucagccggcgccggcgcggcaccuucaccuggacccuguccgacagcgagggcaacgagacgcccgggggcuacugccugacccgguggaugcucaucgaggccgagcugaagugcuucgggaacaccgccguggccaagugcaacgagaagcacgacgaggaguucugcgacaugcugcgccucuucgacuucaacaagcaggcgauccggcgccugaagaccccggcccagauguccauccagcugaucaacaaggccgucaacgcccucaucaacgaccagcugaucaugaagaaccaccuccgggacaucaugggcauccccuacugcaacuacagcaaguacugcuaccugaaccacacggugaccgggaagaccucccugccccgcugcugccuggugagcaacggcuccuaccucaacgagacccacuucagcgacgacaucgagcagcaggccgacaacaugaucacggagcugcugcagaaggaguacaucgaccggcagggcaagaccccgcucgggcuggucgaccuguucguguucuccaccagcuucuaccugaucuccaucuuccuccaccuggugaagauccccacccaccgccacaucacgggcaagcccugccccaagccgcaccggcugaaccacauggggaucugcagcugcggccucuacaagcaccccgggguccccgugaaguggaagcgcugaggacuagucccuguucccagagcccacuuuuuuuucuuuuuuugaaauaaaauagccugucuuucagaucuaaaaaaaaaaaaaaaaaaaaaaaaaaaaaaaaaaaaaaaaaaaaaaaaaaaaaaaaaaaaaaaaaaaaaaaaaaaaaaaaaaaaaaaaaaaaaaaaaaaa

SEQ ID NO: 25488 - RNA, 1740 nt, Artificial Sequence
  mRNA product Design a-2 (A100) comprising derived and/or modified sequence from LASV(Lassa virus/H.sapiens-wt/NGA/2016/ISTH_0009;Clade II)__AVO03571__GPCmut3 (opt1)
aggagaguccgcucagccagguugcagaagcggcuuagcguguguccuaaucuucucucugcguguagguaggccugugccgcaaacaagcuuaccaugggccagaucaucaccuucuuccaggaggugccccacgucaucgaggaggugaugaacaucgugcugaucgcccucagccugcuggccauccucaaggggaucuacaacgucgcgaccugcggccugcuggggcucguguccuuccugcugcucugcggccgcagcugcuccacgaccuacaaggggguguacgagcugcagacccuggagcucgacauggccagccugaacaugaccaugccgcuguccugcacgaagaacaacagccaccacuacaucauggucggcaacgagaccggccucgagcugacccugaccaacacguccaucaucaaccacaaguucugcaaccucagcgacgcccacaagaagaaccuguacgaccacgcccugauguccaucaucagcaccuuccaccucuccauccccaacuucaaccaguacgaggccaugagcugcgacuucaacgggggccggaucuccgugcaguacaaccugagccacuccuacgcgguggacgccgccaaccacugcgggaccaucgccaacggcguccugcagaccuucaugcgcauggcguggggcgggagcuacaucgcccucgacuccggcaaggggagcugggacugcaucaugacguccuaccaguaccugaucauccagaacaccaccugggaggaccacugccaguucagccggcccagccccaucggcuaccuggggcuccugucccagcgcacccgggacaucuacaucagccgccggcgccggggcacguucaccuggacccuguccgacagcgagggcaacgagacccccgggggcuacugccucacgcgcuggaugcugaucgaggccgagcugaagugcuucgggaacaccgccguggccaagugcaacgagaagcacgacgaggaguucugcgacaugcuccggcuguucgacuucaacaagcaggcgauccgccggcugaagaccccggcccagauguccauccagcucaucaacaaggccgugaacgcccugaucaacgaccagcugaucaugaagaaccaccuccgcgacaucaugggcauccccuacugcaacuacagcaaguacugcuaccugaaccacaccgucacggggaagaccucccugccccggugcugccucgugagcaacggcuccuaccugaacgagacccacuucagcgacgacaucgagcagcaggccgacaacaugaucaccgagcugcuccagaaggaguacaucgaccgccagggcaagacgccgcuggggcugguggaccuguucgucuucuccaccagcuucuaccucaucuccaucuuccugcaccuggugaagauccccacccaccggcacaucaccggcaagcccugccccaagccgcaccgccucaaccacauggggaucugcagcugcggccuguacaaccaccccggggugcccgucaaguggaagcggugaggacuagucccuguucccagagcccacuuuuuuuucuuuuuuugaaauaaaauagccugucuuucagaucuaaaaaaaaaaaaaaaaaaaaaaaaaaaaaaaaaaaaaaaaaaaaaaaaaaaaaaaaaaaaaaaaaaaaaaaaaaaaaaaaaaaaaaaaaaaaaaaaaaaa

SEQ ID NO: 25489 - RNA, 1740 nt, Artificial Sequence
  mRNA product Design a-2 (A100) comprising derived and/or modified sequence from LASV(Lassa virus/H.sapiens-wt/NGA/2016/ISTH_0017;Clade II)__AVO03567__GPCmut3 (opt1)
aggagaguccgcucagccagguugcagaagcggcuuagcguguguccuaaucuucucucugcguguagguaggccugugccgcaaacaagcuuaccaugggccagaucaucaccuucuuccaggaggugccccacgucaucgaggaggugaugaacaucgugcugaucgcccucagccugcuggccauccucaaggggaucuacaacgucgcgaccugcggccuguucgggcugguguccuuccuccugcugugcggccgcagcugcuccacgaccuacaaggggguguacgagcuccagacccuggagcuggacauggccagccucaacaugaccaugccgcuguccugcacgaagaacaacagccaccacuacaucauggucggcaacgagaccggccuggagcucacccugaccaacacguccaucaucaaccacaaguucugcaaccugagcgacgcccacaagaagaaccucuacgaccacgcccugauguccaucaucagcaccuuccaccuguccauccccaacuucaaccaguacgaggccaugagcugcgacuucaacgggggcaagaucuccgugcaguacaaccucagccacaccuacgcgaucgacgccgccaaccacugcgggaccaucgccaacggcgugcugcagacguucaugcggauggcguggggcggguccuacaucgcccuggacagcggcaagggguccugggacugcaucaugaccagcuaccaguaccucaucauccagaacaccaccugggaggaccacugccaguucucccgccccagccccaucggcuaccuggggcugcucagccagcggacgcgcgacaucuacaucucccggcgccggcgcggcaccuucaccuggacccugagcgacuccgagggcaacgagacgcccgggggcuacugccugacccgguggaugcucaucgaggccgagcugaagugcuucgggaacaccgccgucgccaagugcaacgagaagcacgacgaggaguucugcgacaugcugcgccucuucgacuucaacaagcaggcgauccggcgccugaagaccccggcccagaugagcauccagcugaucaacaaggccgugaacgcccucaucaacgaccagcugaucaugaagaaccaccuccgggacaucaugggcauccccuacugcaacuacuccaaguacugcuaccugaaccacacggugaccgggaagaccagccugccccgcugcugccuggucuccaacggcagcuaccucaacgagacccacuucuccgacgacaucgagcagcaggccgacaacaugaucacggagcugcugcagaaggaguacauggaccggcagggcaagaccccgcucgggcugguggaccuguucguguucagcaccuccuucuaccugaucagcaucuuccuccaccugguccgcauccccacccaccggcacgugaucggcaagcccugccccaagccgcaccgccugaaccacauggggaucugcuccugcggccucuacaagcaccccggggugcccgucaaguggaagcggugaggacuagucccuguucccagagcccacuuuuuuuucuuuuuuugaaauaaaauagccugucuuucagaucuaaaaaaaaaaaaaaaaaaaaaaaaaaaaaaaaaaaaaaaaaaaaaaaaaaaaaaaaaaaaaaaaaaaaaaaaaaaaaaaaaaaaaaaaaaaaaaaaaaaa

SEQ ID NO: 25490 - RNA, 1740 nt, Artificial Sequence
  mRNA product Design a-2 (A100) comprising derived and/or modified sequence from LASV(Lassa virus/H.sapiens-wt/NGA/2018/ISTH_0959;Clade II)__AVV65099__GPCmut3 (opt1)
aggagaguccgcucagccagguugcagaagcggcuuagcguguguccuaaucuucucucugcguguagguaggccugugccgcaaacaagcuuaccaugggccagaucaucaccuucuuccaggaggugccccacgucaucgaggaggugaugaacaucgugcugaucgcccucagccugcuggccauccucaaggggaucuacaacgucgugaccugcggccuguucgggcugguguccuuccuccugcugugcggccgcagcugcuccacgaccuacaagggggucuacgagcuccagacccuggagcuggacauggcgagccucaacaugaccaugccgcuguccugcacgaagaacaacagccaccacuacaucauggugggcaacgagaccggccuggagcucacccugaccaacacguccaucaucaaccacaaguucugcaaccugagcgacgcccacaagaagaaccucuacgaccacgcccugauguccaucaucagcaccuuccaccuguccauccccaacuucaaccaguacgaggccaugagcugcgacuucaacgggggcaagaucuccgugcaguacaaccucagccacgccuacgcgaucgacgccgccaaccacugcgggaccaucgccaacggcguccugcagaccuucaugcggauggcguggggcggguccuacaucgcccuggacagcggcaagggguccugggacugcaucaugacgagcuaccaguaccucaucauccagaacaccaccugggaggaccacugccaguucucccgccccagccccaucggcuaccuggggcugcucagccagcggacccgcgacaucuacaucucccggcgccggcgcggcacguucaccuggacccugagcgacuccgagggcaacgagacccccgggggcuacugccugacgcgguggaugcucaucgaggccgagcugaagugcuucgggaacaccgccguggccaagugcaacgagaagcacgacgaggaguucugcgacaugcugcgccucuucgacuucaacaagcaggcgauccggcgccugaagaccccggcccagaugagcauccagcugaucaacaaggccgugaacgcccucaucaacgaccagcugaucaugaagaaccaccuccgggacaucaugggcauccccuacugcaacuacuccaaguacugcuaccugaaccacaccgucacggggaagaccagccugccccgcugcugccugguguccaacggcagcuaccucaacgagacccacuucuccgacgacaucgagcagcaggccgacaacaugaucaccgagcugcugcagaaggaguacaucgaccggcagggcaagacgccgcucgggcugguggaccuguucgucuucagcaccuccuucuaccugaucagcaucuuccuccaccuggugaagauccccacccaccgccacgugaucggcaagcccugccccaagccgcaccggcugaaccacauggggaucugcuccugcggccucuacaagcaccccgggguccccgugaaguggaagcgcugaggacuagucccuguucccagagcccacuuuuuuuucuuuuuuugaaauaaaauagccugucuuucagaucuaaaaaaaaaaaaaaaaaaaaaaaaaaaaaaaaaaaaaaaaaaaaaaaaaaaaaaaaaaaaaaaaaaaaaaaaaaaaaaaaaaaaaaaaaaaaaaaaaaaa

SEQ ID NO: 25491 - RNA, 1740 nt, Artificial Sequence
  mRNA product Design a-2 (A100) comprising derived and/or modified sequence from LASV(LASV003-NIG-2008;Clade II)__AIT17580__GPCmut3 (opt1)
aggagaguccgcucagccagguugcagaagcggcuuagcguguguccuaaucuucucucugcguguagguaggccugugccgcaaacaagcuuaccaugggccagaucaucaccuucuuccaggaggugccccacgucaucgaggaggugaugaacaucgugcugaucgcccucagccugcuggccauccucaaggggaucuacaacgucgcgaccugcggccuguucgggcugguguccuuccuccugcugugcggccgcagcugcuccacgaccuacaaggggguguacgagcuccagacccuggagcuggacauggccagccucaacaugaccaugccgcuguccugcacgaagaacaacagccaccacuacaucauggucggcaacgagaccggccuggagcucacccugaccaacacguccaucaucaaccacaaguucugcaaccugagcgacgcccacaagaagaaccucuacgaccacgcccugauguccaucaucagcaccuuccaccuguccauccccaacuucaaccaguacgaggccaugagcugcgacuucaacgggggcaagaucuccgugcaguacaaccucagccacaccuacgcgguggacgccgccaaccacugcgggaccaucgccaacggcguccugcagacguucaugcggauggcguggggcggguccuacaucgcccuggacagcggcaagggguccugggacugcaucaugaccagcuaccaguaccucaucauccagaacaccaccugggaggaccacugccaguucucccgccccagccccaucggcuaccuggggcugcucagccagcggacgcgcgacaucuacaucucccggcgccggcgcggcaccuucaccuggacccugagcgacuccgagagcaacgagacgccgggcggguacugccugacccgguggaugcucaucgaggccgagcugaagugcuucggcaacaccgccguggccaagugcaacgagaagcacgacgaggaguucugcgacaugcugcgccucuucgacuucaacaagcaggcgauccggcgccugaaggcccccgcccagauguccauccagcugaucaacaaggccgugaacgcccucaucaacgaccagcugaucaugaagaaccaccuccgggacaucauggggauccccuacugcaacuacagcaaguacugcuaccugaaccacaccgucacgggccgcaccucccugccccggugcugccuggugagcaacggguccuaccucaacgagacccacuucagcgacgacaucgagcagcaggcggacaacaugaucaccgagcugcugcagaaggaguacauggaccgccagggcaagacgccgcucggccugguggaccuguucgucuucuccaccagcuucuaccugaucuccaucuuccuccaccuggugaagauccccacccaccggcacgugaucgggaagcccugccccaagccgcaccgccugaaccacaugggcaucugcagcugcgggcucuacaagcaccccggcguccccgugaaguggaagcggugaggacuagucccuguucccagagcccacuuuuuuuucuuuuuuugaaauaaaauagccugucuuucagaucuaaaaaaaaaaaaaaaaaaaaaaaaaaaaaaaaaaaaaaaaaaaaaaaaaaaaaaaaaaaaaaaaaaaaaaaaaaaaaaaaaaaaaaaaaaaaaaaaaaaa

SEQ ID NO: 25492 - RNA, 1740 nt, Artificial Sequence
  mRNA product Design a-2 (A100) comprising derived and/or modified sequence from LASV(LASV035-NIG-2009;Clade II)__AIT17588__GPCmut3 (opt1)
aggagaguccgcucagccagguugcagaagcggcuuagcguguguccuaaucuucucucugcguguagguaggccugugccgcaaacaagcuuaccaugggccagaucaucaccuucuuccaggaggugccccacgucaucgaggaggugaugaacaucgugcugaucgcccucagccugcuggccauccucaaggggaucuacaacgucgcgaccugcggccuguucgggcugguguccuuccuccugcugugcggccgcagcugcuccacgaccuacaaggggguguacgagcuccagacccuggagcuggacauggccagccucaacaugaccaugccgcuguccugcacgaagaacaacagccaccacuacaucauggucggcaacgagaccggccuggagcucacccugaccaacacguccaucaucaaccacaaguucugcaaccugagcgacgcccacaagaagaaccucuacgaccacgcccugauguccaucaucagcaccuuccaccuguccauccccaacuucaaccaguacgaggccaugagcugcgacuucaacgggggcaagaucuccgugcaguacaaccucagccacgcguacgccguggacgccgccaaccacugcgggaccaucgcgaacggcguccugcagaccuucaugcggauggccuggggcggguccuacaucgcccuggacagcggcaagggguccugggacugcaucaugacgagcuaccaguaccucaucauccagaacaccaccugggaggaccacugccaguucucccgccccagccccaucggcuaccuggggcugcucagccagcggacccgcgacaucuacaucucccggcgccggcgcggcacguucaccuggacccugagcgacuccgagggcaacgagacccccgggggcuacugccugacgcgguggaugcucaucgaggccgagcugaagugcuucgggaacaccgccguggcgaagugcaacgagaagcacgacgaggaguucugcgacaugcugcgccucuucgacuucaacaagcaggccauccggcgccugaaggccccggcccagaugagcauccagcugaucaacaaggccgugaacgcgcucaucaacgaccagcugaucaugaagaaccaccuccgggacaucaugggcauccccuacugcaacuacuccaaguacugcuaccugaaccacaccgucaccgggaagacgagccugccccgcugcugccugguguccaacggcagcuaccucaacgagacccacuucuccgacgacaucgagcagcaggccgacaacaugaucaccgagcugcugcagaaggaguacaucgaccggcagggcaagaccccgcucgggcugguggaccuguucgucuucagcacguccuucuaccugaucagcaucuuccuccaccuggugaagauccccacccaccgccacgugaucggcaagcccugccccaagccgcaccggcugaaccacauggggaucugcuccugcggccucuacaagcaccccgggguccccgugaaguggaagcgcugaggacuagucccuguucccagagcccacuuuuuuuucuuuuuuugaaauaaaauagccugucuuucagaucuaaaaaaaaaaaaaaaaaaaaaaaaaaaaaaaaaaaaaaaaaaaaaaaaaaaaaaaaaaaaaaaaaaaaaaaaaaaaaaaaaaaaaaaaaaaaaaaaaaaa

SEQ ID NO: 25493 - RNA, 1740 nt, Artificial Sequence
  mRNA product Design a-2 (A100) comprising derived and/or modified sequence from LASV(LASV1000-NIG-2009;Clade II)__AIT17782__GPCmut3 (opt1)
aggagaguccgcucagccagguugcagaagcggcuuagcguguguccuaaucuucucucugcguguagguaggccugugccgcaaacaagcuuaccaugggccagaucaucaccuucuuccaggaggugccccacgucaucgaggaggugaugaacaucgugcugaucgcccucagccugcuggccauccucaaggggaucuacaacgucgcgaccugcggccuguucgggcugguguccuuccuccugcugugcggccgcagcugcuccacgaccuacaaggggguguacgagcuccagacccuggagcuggacauggccagccucaacaugaccaugccgcuguccugcacgaagaacaacagccaccacuacaucauggucggcaacgagaccggccuggagcucacccugaccaacacguccaucaucaaccacaaguucugcaaccugagcgacgcccacaagaagaaccucuacgaccacgcccugauguccaucaucagcaccuuccaccuguccauccccaacuucaaccaguacgaggccaugagcugcgacuucaacgggggcaagaucuccgugcaguacaaccucagccacaccuacgcgguggacgccgccaaccacugcgggaccaucgccaacggcguccugcagacguucaugcggauggcguggggcggguccuacaucgcccuggacagcggcaagggguccugggacugcaucaugaccagcuaccaguaccucaucauccagaacaccaccugggaggaccacugccaguucucccgccccagccccaucggcuaccuggggcugcucagccagcggacgcgcgacaucuacaucucccggcgccggcgcggcaccuucaccuggacccugagcgacuccgagggcaacgagacgcccgggggcuacugccugacccgguggaugcucaucgaggccgagcugaagugcuucgggaacaccgccguggccaagugcaacgagaagcacgacgaggaguucugcgacaugcugcgccucuucgacuucaacaagcaggcgaucaagcggcugaagaccccggcccagaugagcauccagcugaucaacaaggccgugaacgcccucaucaacgaccagcugaucaugaagaaccaccuccgcgacaucaugggcauccccuacugcaacuacuccaaguacugcuaccugaaccacacggucaccgggaagaccagccugccccggugcugccugguguccaacggcagcuaccucaacgagacccacuucuccgacgacaucgagcagcaggccgacaacaugaucacggagcugcugcagaaggaguacaucgaccgccagggcaagaccccgcucgggcugguggaccuguucgucuucagcaccuccuucuaccugaucagcaucuuccuccaccuggugaagauccccacccaccggcacguggucggcaagcccugccccaagccgcaccgccugaaccacauggggaucugcuccugcggccucuacaagcaccccggggugcccgugaaguggaagcggugaggacuagucccuguucccagagcccacuuuuuuuucuuuuuuugaaauaaaauagccugucuuucagaucuaaaaaaaaaaaaaaaaaaaaaaaaaaaaaaaaaaaaaaaaaaaaaaaaaaaaaaaaaaaaaaaaaaaaaaaaaaaaaaaaaaaaaaaaaaaaaaaaaaaa

SEQ ID NO: 25494 - RNA, 1740 nt, Artificial Sequence
  mRNA product Design a-2 (A100) comprising derived and/or modified sequence from LASV(LASV221-NIG-2010;Clade II)__AIT17624__GPCmut3 (opt1)
aggagaguccgcucagccagguugcagaagcggcuuagcguguguccuaaucuucucucugcguguagguaggccugugccgcaaacaagcuuaccaugggccagaucaucaccuucuuccaggaggugccccacgucaucgaggaggugaugaacaucgugcugaucgcccucagccugcuggccauccucaaggggaucuacaacgucgcgaccugcggccuguucgggcugguguccuuccuccugcugugcggccgcagcugcuccacgaccuacaaggggguguacgagcuccagacccuggagcuggacauggccagccucaacaugaccaugccgcuguccugcacgaagaacaacagccaccacuacaucauggucggcaacgagaccggccuggagcucacccugaccaacacguccaucaucaaccacaaguucugcaaccugagcgacgcccacaagaagaaccucuacgaccacgcccugauguccaucaucagcaccuuccaccuguccauccccaacuucaaccaguacgaggccaugagcugcgacuucaacgggggcaagaucuccgugcaguacaaccucagccacaccuacgcgaucgacgccgccaaccacugcgggaccaucgccaacggcgugcugcagacguucaugcggauggcguggggcggguccuacaucgcccuggacagcggcaagggguccugggacugcaucaugaccagcuaccaguaccucaucauccagaacaccaccugggaggaccacugccaguucucccgccccagccccaucggcuaccuggggcugcucagccagcggacgcgcgacaucuacaucucccggcgccggcgcggcaccuucaccuggacccugagcgacuccgagggcaacgagacgcccgggggcuacugccugacccgguggaugcucaucgaggccgagcugaagugcuucgggaacaccgccgucgccaagugcaacgagaagcacgacgaggaguucugcgacaugcugcgccucuucgacuucaacaagcaggcgauccggcgccugaagaccccggcccagaugagcauccagcugaucaacaaggccgugaacgcccucaucaacgaccagcugaucaugaagaaccaccuccgggacaucaugggcauccccuacugcaacuacuccaaguacugcuaccugaaccacacggugaccgggaagaccagccugccccgcugcugccuggucuccaacggcagcuaccucaacgagacccacuucuccgacgacaucgagcagcaggccgacaacaugaucacggagaugcugcagaaggaguacauggaccggcagggcaagaccccgcuggggcucguggaccuguucguguucagcaccuccuucuaccugaucagcaucuuccugcaccucgucaagauccccacccaccgccacgugaucggcaagcccugccccaagccgcaccggcugaaccacauggggaucugcuccugcggccuguacaagcaccccggggugcccgucaaguggaagcgcugaggacuagucccuguucccagagcccacuuuuuuuucuuuuuuugaaauaaaauagccugucuuucagaucuaaaaaaaaaaaaaaaaaaaaaaaaaaaaaaaaaaaaaaaaaaaaaaaaaaaaaaaaaaaaaaaaaaaaaaaaaaaaaaaaaaaaaaaaaaaaaaaaaaaa

SEQ ID NO: 25495 - RNA, 1740 nt, Artificial Sequence
  mRNA product Design a-2 (A100) comprising derived and/or modified sequence from LASV(LASV237-NIG-2010;Clade II)__AIT17638__GPCmut3 (opt1)
aggagaguccgcucagccagguugcagaagcggcuuagcguguguccuaaucuucucucugcguguagguaggccugugccgcaaacaagcuuaccaugggccagaucaucaccuucuuccaggaggugccccacgucaucgaggaggugaugaacaucgugcugaucgcccucagccugcuggccauccucaaggggaucuacaacgucgcgaccugcggccuguucgggcugguguccuuccuccugcugugcggccgcagcugcuccacgaccuacaaggggguguacgagcuccagacccuggagcuggacauggccagccucaacaugaccaugccgcuguccugcacgaagaacaacagccaccacuacaucauggucggcaacgagaccggccuggagcucacccugaccaacacguccaucaucaaccacaaguucugcaaccugagcgacgcccacaagaaggaccucuacgaccacgcccugauguccaucaucagcaccuuccaccuguccauccccaacuucaaccaguacgaggccaugagcugcgacuucaacgggggcaagaucuccgugcaguacaaccucagccacaccuacgcgguggacgccgccaaccacugcgggaccaucgccaacggcguccugcagacguucaugcggauggcguggggcggguccuacaucgcccuggacagcggcaagggguccugggacugcaucaugaccagcuaccaguaccucaucauccagaacaccaccugggaggaccacugccaguucucccgccccagccccaucggcuaccuggggcugcucagccagcggacgcgcgacaucuacaucucccggcgccggcgcggcaccuucaccuggacccugagcgacuccgagggcaacgagacgcccgggggcuacugccugacccgguggaugcucaucgaggccgagcugaagugcuucgggaacaccgccguggccaagugcaacgagaagcacgacgaggaguucugcgacaugcugcgccucuucgacuucaacaagcaggcgauccggcgccugaagaccccggcccagaugagcauccagcugaucaacaaggccgugaacgcccucaucaacgaccagcugaucaugaagaaccaccuccgggacaucaugggcauccccuacugcaacuacuccaaguacugcuaccugaaccacacggucaccgggaagaccagccugccccgcugcugccugguguccaacggcagcuaccucaacgagacccacuucuccgacgacaucgagcagcaggccgacaacaugaucacggagcugcugcagaaggaguacauggaccggcagggcaagaccccgcucgggcugguggaccuguucgucuucagcaccuccuucuaccugaucagcaucuuccuccaccugaucaagauccccacccaccgccacaucacgggcaagcccugccccaagccgcaccggcugaaccacauggggaucugcuccugcggccucuacaagcaccccggggugcccgugaaguggaagcgcugaggacuagucccuguucccagagcccacuuuuuuuucuuuuuuugaaauaaaauagccugucuuucagaucuaaaaaaaaaaaaaaaaaaaaaaaaaaaaaaaaaaaaaaaaaaaaaaaaaaaaaaaaaaaaaaaaaaaaaaaaaaaaaaaaaaaaaaaaaaaaaaaaaaaa

SEQ ID NO: 25496 - RNA, 1740 nt, Artificial Sequence
  mRNA product Design a-2 (A100) comprising derived and/or modified sequence from LASV(LASV253-NIG-2011;Clade II)__AIT17670__GPCmut3 (opt1)
aggagaguccgcucagccagguugcagaagcggcuuagcguguguccuaaucuucucucugcguguagguaggccugugccgcaaacaagcuuaccaugggccagaucaucaccuucuuccaggaggugccccacgucaucgaggaggugaugaacaucgugcugaucgcccucagccugcuggccauccucaaggggaucuacaacgucgcgaccugcggccuguucgggcugguguccuuccuccugcugugcggccgcagcugcuccacgaccuacaaggggguguacgagcuccagacccuggagcuggacauggccagccucaacaugaccaugccgcuguccugcacgaagaacaacagccaccacuacaucauggucggcaacgagaccggccuggagcucacccugaccaacacguccaucaucaaccacaaguucugcaaccugagcgacgcccacaagaagaaccucuacgaccacgcccugauguccaucaucagcaccuuccaccuguccauccccaacuucaaccaguacgaggccaugagcugcgacuucaacgggggcaagaucuccgugcaguacaaccucagccacaccuacgcgguggacgccgccaaccacugcgggaccaucgccaacggcguccugcagacguucaugcggauggcguggggcggguccuacaucgcccuggacagcggcaagggguccugggacugcaucaugaccagcuaccaguaccucaucauccagaacaccaccugggaggaccacugccaguucucccgccccagccccaucggcuaccuggggcugcucagccagcggacgcgcgacaucuacaucucccggcgccggcgcggcaccuucaccuggacccugagcgacuccgagggcaacgagacgcccgggggcuacugccugacccgguggaugcucaucgaggccgagcugaagugcuucgggaacaccgccguggccaagugcaacgagaagcacgacgaggaguucugcgacaugcugcgccucuucgacuucaacaagcaggcgauccggcgccugaaggccccggcccagaugagcauccagcugaucaacaaggccgugaacgcccucaucaacgaccagcugaucaugaagaaccaccuccgggacaucaugggcauccccuacugcaacuacuccaaguacugcuaccugaaccacaccgucacggggcgcaccagccugccccggugcugccugguguccaacggcagcuaccucaacgagacccacuucuccgacgacaucgagcagcaggcggacaacaugaucaccgagcugcugcagaaggaguacaucgaccgccagggcaagacgccgcucgggcugguggaccuguucgucuucagcaccuccuucuaccugaucagcaucuuccuccaccuggugaagauccccacccaccggcacaucaucggcaagcccugccccaagccgcaccgccugaaccacauggggaucugcuccugcggccucuacaagcaccccggggugcccgucaaguggaagcggugaggacuagucccuguucccagagcccacuuuuuuuucuuuuuuugaaauaaaauagccugucuuucagaucuaaaaaaaaaaaaaaaaaaaaaaaaaaaaaaaaaaaaaaaaaaaaaaaaaaaaaaaaaaaaaaaaaaaaaaaaaaaaaaaaaaaaaaaaaaaaaaaaaaaa

SEQ ID NO: 25497 - RNA, 1740 nt, Artificial Sequence
  mRNA product Design a-2 (A100) comprising derived and/or modified sequence from LASV(LASV254-NIG-2011;Clade II)__AIT17674__GPCmut3 (opt1)
aggagaguccgcucagccagguugcagaagcggcuuagcguguguccuaaucuucucucugcguguagguaggccugugccgcaaacaagcuuaccaugggccagaucaucaccuucuuccaggaggugccccacgucaucgaggaggugaugaacaucgugcugaucgcccucagccugcuggccauccucaaggggaucuacaacgucgcgaccugcggccuguucgggcugguguccuuccuccugcugugcggccgcagcugcuccacgaccuacaaggggguguacgagcuccagacccuggagcuggacaugaccaaccucaacaugacgaugccgcugagcugcaccaagaacaacucccaccacuacaucauggucggcaacgagaccggccuggagcucacccugacgaacaccagcaucaucaaccacaaguucugcaaccuguccgacgcccacaagaagaaccucuacaaccacgcccugaugagcaucaucuccaccuuccaccugagcauccccaacuucaaccaguacgaggccauguccugcgacuucaacgggggcaagaucagcgugcaguacaaccucucccacagcuacgccguggacgcggccaaccacugcgggaccaucgccaacggcguccugcagacguucaugcggauggccuggggcggguccuacaucgcgcuggacagcggcaaggggaacugggacugcaucaugaccuccuaccaguaccucaucauccagaacaccaccugggaggaccacugccaguucagccgccccucccccaucggcuaccuggggcugcucagccagcggacgcgcgacaucuacaucagccggcgccggcgcggcaccuucaccuggacccuguccgacagcgagggcaacgagacgcccgggggcuacugccugacccgguggaugcucaucgaggccgagcugaagugcuucgggaacaccgccguggccaagugcaacgagaagcacgacgaggaguucugcgacaugcugcgccucuucgacuucaacaagcaggccauccggcgccugaagaccccggcgcaggccaacauccagcugaucaacaaggccgugaacgcccucaucaacgaccagcugaucaugaagaaccaccuccgggacaucaugggcauccccuacugcaacuacuccaaguacugcuaccugaaccacacggucaccgggaagaccagccugccccgcugcugccugguguccaacggcagcuaccucaacgagacccacuucuccgacgacaucgagcagcaggccgacaacaugaucacggagcugcugcagaaggaguacauggaccggcagggcaagaccccgcucgggcugguggaccuguucgucuucagcaccuccuucuaccugaucagcaucuuccuccaccuggugaagauccccacccaccgccacgugaucggcaagcccugccccaagccgcaccggcugaaccacauggggaucugcuccugcggccucuacaagcaccccgggguccccgugaaguggaagcgcugaggacuagucccuguucccagagcccacuuuuuuuucuuuuuuugaaauaaaauagccugucuuucagaucuaaaaaaaaaaaaaaaaaaaaaaaaaaaaaaaaaaaaaaaaaaaaaaaaaaaaaaaaaaaaaaaaaaaaaaaaaaaaaaaaaaaaaaaaaaaaaaaaaaaa

SEQ ID NO: 25498 - RNA, 1740 nt, Artificial Sequence
  mRNA product Design a-2 (A100) comprising derived and/or modified sequence from LASV(Nig08-A19;Clade III)__ADU56618__GPCmut3 (opt1)
aggagaguccgcucagccagguugcagaagcggcuuagcguguguccuaaucuucucucugcguguagguaggccugugccgcaaacaagcuuaccaugggccagaucgugaccuucuuccaggaggucccccacgugaucgaggaggugaugaacaucguccugaucgcccucagcauccuggccauccugaaggggcucuacaacaucgcgaccugcggccugaucgggcuggugacguuccuccugcuguccggccgcagcugcuccaugaccuacaaggggguguacgagcuccagacccuggagcugaacaugaacacccucaacaugacgaugccgcugagcugcaccaagaacaacucccaccacuacaucauggucggcaacgagaccggccuggagcucacccugacgaacaccagccugcuccaccacaaguucugcaaccuguccgacgcccacaagaagaaccuguacgaccacacccucaugagcaucaucuccaccuuccaccugagcauccccaacuucaaccaguacgaggccauguccugcgacuucaacgggggcaagaucacggugcaguacaaccugagccacuccuacgccaucgacgccgcgaaccacugcgggaccguggccaacggcguccuccagaccuucaugcggauggccuggggcgggagcuacaucgcccuggacuccggccgcgggaagugggacugcaucaugaccagcuaccaguaccugaucauccagaacacgaccugggaggaccacugccaguucucccggcccagccccaucggcuaccucgggcugcugucccagcgcacccgggacaucuacaucagccgccggcgccggggcaccuucacguggacccucagcgacuccgagggcaacgagacccccgggggcuacugccugacccgcuggaugcugaucgaggcggagcucaagugcuucgggaacacggccguggccaagugcaacgagaagcacgacgaggaguucugcgacaugcugcggcuguucgacuucaacaagcaggccauccgccggcucaaggccccggcgcagaugagcauccagcugaucaacaaggccgugaacgcccugaucaacgaccagcucaucaugaagaaccaccuccgcgacaucaugggcauccccuacugcaacuacuccaaguacugcuaccugaaccacaccagcaccgggcggaccucccugccccgcugcugccuggucagcaacggcuccuaccugaacgagacgcacuucagcgacgacaucgagcagcaggccgacaacaugaucaccgagaugcuccagaaggaguaccuggaccggcagggcaagaccccgcuggggcugguggaccucuucguguucuccaccagcuucuaccugaucuccaucuuccugcaccucgucaagauccccacgcaccgccacaucgugggcaagcccugccccaagccgcaccggcugaaccacauggggaucugcagcugcggccuguacaagcagcccggggugcccguccgcuggaagcggugaggacuagucccuguucccagagcccacuuuuuuuucuuuuuuugaaauaaaauagccugucuuucagaucuaaaaaaaaaaaaaaaaaaaaaaaaaaaaaaaaaaaaaaaaaaaaaaaaaaaaaaaaaaaaaaaaaaaaaaaaaaaaaaaaaaaaaaaaaaaaaaaaaaaa

SEQ ID NO: 25499 - RNA, 1743 nt, Artificial Sequence
  mRNA product Design a-2 (A100) comprising derived and/or modified sequence from LASV(G1180-SLE-2010;Clade IV)__AIT17168__GPCmut3 (opt1)
aggagaguccgcucagccagguugcagaagcggcuuagcguguguccuaaucuucucucugcguguagguaggccugugccgcaaacaagcuuaccaugggccagaucgugaccuucuuccaggaggucccccacgugaucgaggaggugaugaacaucguccugaucgcccucagcauccuggccgugcugaaggggcucuacaacuucgcgaccugcggccugguggggcugcucacguuccugcugcucugcggccgcuccugcaccgccagccgguacaagggggucuacgagcugcagacccuggagcucaacauggagacccugaacaugacgaugccgcuguccugcaccaagaacaacagccaccacuacaucauggugggcaacgagaccggccucgagcugacccugacgaacaccuccaucaucaaccacaaguucugcaaccucagcgacgcccacaagaagaaccuguacgaccacgcccugauguccaucaucagcaccuuccaccucuccauccccaacuucaaccaguacgaggccaugagcugcgacuucaacgggggcaagaucuccgugcaguacaaccugagccacuccuacgcgggggacgccgccaaccacugcggcaccgucgccaacggggugcugcagacguucaugcgcauggcguggggcggcagcuacaucgcccucgacuccgggcacggcagcugggacugcaucaugaccuccuaccaguaccugaucauccagaacaccaccugggaggaccacugccaguucagccggcccucccccaucggguaccugggccuccugagccagcgcacgcgggacaucuacaucagccgccggcgccggggcaccuucaccuggacccuguccgacagcgaggggaaggacacgccgggcggguacugccucacccgcuggaugcugaucgaggccgagcugaagugcuucggcaacaccgccguggccaagugcaacgagaagcacgacgaggaguucugcgacaugcuccggcuguucgacuucaacaagcaggcgauccagcgccugaaggcccccgcccagauguccauccagcucaucaacaaggccgucaacgcccugaucaacgaccagcugaucaugaagaaccaccuccgggacaucauggggauccccuacugcaacuacagcaaguacugcuaccugaaccacaccacgaccggcaagaccucccugcccaagugcugccucgugagcaacggcuccuaccugaacgagacccacuucagcgacgacaucgagcagcaggcggacaacaugaucacggagaugcugcagaaggaguacauggagcgccaggggaagaccccgcucggccugguggaccuguucgucuucuccaccagcuucuaccugaucuccaucuuccuccaccuggugaagauccccacccaccggcacaucgugggcaagagcugccccaagccccaccgccugaaccacauggggaucugcuccugcgggcucuacaagcagccgggcguccccgugaaguggaagcggugaggacuagucccuguucccagagcccacuuuuuuuucuuuuuuugaaauaaaauagccugucuuucagaucuaaaaaaaaaaaaaaaaaaaaaaaaaaaaaaaaaaaaaaaaaaaaaaaaaaaaaaaaaaaaaaaaaaaaaaaaaaaaaaaaaaaaaaaaaaaaaaaaaaaa

SEQ ID NO: 25500 - RNA, 1743 nt, Artificial Sequence
  mRNA product Design a-2 (A100) comprising derived and/or modified sequence from LASV(G1442-SLE-2011;Clade IV)__AIT17180__GPCmut3 (opt1)
aggagaguccgcucagccagguugcagaagcggcuuagcguguguccuaaucuucucucugcguguagguaggccugugccgcaaacaagcuuaccaugggccagaucgugaccuucuuccaggaggucccccacgugaucgaggaggugaugaacaucguccugaucgcccucagcauccuggccgugcugaaggggcucuacaacguggcgaccugcggccugaucgggcuggucacguuccuccugcugugcggccgcuccugcaccaccacccucuacaaggggguguacgagcugcagacgcuggagcucaacauggagacccugaacaugaccaugccgcugagcugcaccaagaacaacucccaccacuacauccgggugggcaacgagacgggccucgagcugacccugaccaacaccagcaucaucaaccacaaguucugcaaccucuccgacgcccacaagaagaaccuguacgaccacgcccugaugagcaucaucuccacguuccaccucagcauccccaacuucaaccaguacgaggccauguccugcgacuucaacgggggcaagaucagcguccaguacaaccugucccacagcuacgccggggacgcggccaaccacugcggcaccguggccaacggggugcugcagaccuucaugcgcauggccuggggcggcuccuacaucgcgcucgacagcgggcggggcaacugggacugcaucaugaccuccuaccaguaccugaucauccagaacacgaccugggacgaccacugccaguucagccgccccucccccaucggguaccugggccuccugagccagcggacccgcgacgucuacaucucccggcgccggcgcggcaccuucacguggacccugagcgacagcgaggggaaggacaccccgggcggguacugccucacccgguggaugcugaucgaggccgagcugaagugcuucggcaacacggccguggccaagugcaacgagaagcacgacgaggaguucugcgacaugcuccgccuguucgacuucaacaagcaggccauccagcggcugaaggcgcccgcccagauguccauccagcucaucaacaaggccgugaacgcccugaucaacgaccagcugaucaugaagaaccaccuccgcgacaucauggggauccccuacugcaacuacagcaaguacugcuaccugaacaacaccgccaccggcaagaccucccugcccaagugcugccucaucagcaacggcuccuaccugaacgagacgcacuucagcgacgacaucgagcaggaggcggacaacaugaucaccgagaugcugcagaaggaguacauggagcggcaggggaagaccccgcucggccuggucgaccuguucguguucuccaccagcuucuaccugaucuccaucuuccuccaccuggugaagauccccacgcaccgccacaucgucggcaagagcugccccaagccccaccggcugaaccacauggggaucugcuccugcgggcucuacaagcagccgggcgugcccgugcgcuggaagcggugaggacuagucccuguucccagagcccacuuuuuuuucuuuuuuugaaauaaaauagccugucuuucagaucuaaaaaaaaaaaaaaaaaaaaaaaaaaaaaaaaaaaaaaaaaaaaaaaaaaaaaaaaaaaaaaaaaaaaaaaaaaaaaaaaaaaaaaaaaaaaaaaaaaaa

SEQ ID NO: 25501 - RNA, 1743 nt, Artificial Sequence
  mRNA product Design a-2 (A100) comprising derived and/or modified sequence from LASV(G3010-SLE-2013;Clade IV)__AIT17344__GPCmut3 (opt1)
aggagaguccgcucagccagguugcagaagcggcuuagcguguguccuaaucuucucucugcguguagguaggccugugccgcaaacaagcuuaccaugggccagaucgugaccuucuuccaggaggucccccacgugaucgaggaggugaugaacaucguccugaucgcccucagcauccuggccgugcugaaggggcucuacaacuucgcgaccugcggccugguggggcuggucacguuccuccugcugugcggccgcuccugcaccaccagccucuacaaggggguguacgagcugcagacccuggagcucaacauggagacgcugaacaugaccaugccgcuguccugcaccaagaacaacagccaccacuacaucauggugggcaacgagaccggccucgagcugacgcugaccaacaccuccaucaucaaccacaaguucugcaaccucagcgacgcccacaagaagaaccuguacaaccacgcccugauguccaucaucagcaccuuccaccucuccauccccaacuucaaccaguacgaggccaugagcugcgacuucaacgggggcaagaucuccguccaguacaaccugagccacuccuacgccggggacgcggccagccacugcggcacgguggccaacggggugcugcagaccuucaugcggauggccuggggcggcuccuacaucgcgcucgacagcggguacggcaagugggacugcaucaugaccuccuaccaguaccugaucauccagaacaccacgugggaggaccacugccaguucagccgccccucccccaucggguaccugggccuccugagccagcggacccgcgacaucuacaucagccggcgccggcgcggcaccuucaccuggacgcuguccgacagcgaggggaaggacaccccgggcggguacugccucacccgguggaugcugaucgaggccgagcugaagugcuucggcaacaccgccgucgccaagugcaacgagaagcacgacgaggaguucugcgacaugcuccgccuguucgacuucaacaagcaggccauccagcggcugaagacgcccgcgcagauguccauccagcucaucaacaaggccgugaacgcccugaucaacgaccagcugaucaugaagaaccaccuccgcgacaucauggggauccccuacugcaacuacagcaaguacugcuaccugaaccacaccaccaccggcaagacgucccugcccaagugcugccucgugagcaacggcuccuaccugaacgagacccacuucagcgacgacaucgagcagcaggccgacaacaugaucaccgagaugcugcagaaggaguacauggagcggcaggggaagaccccgcucggccuggucgaccuguucguguucuccacgagcuucuaccugaucuccaucuuccuccaccuggugaagauccccacccaccgccacaucgucggcaagagcugccccaagccccaccggcugaaccacauggggaucugcuccugcgggcucuacaagcagccgggcgugcccgugcgcuggaagcggugaggacuagucccuguucccagagcccacuuuuuuuucuuuuuuugaaauaaaauagccugucuuucagaucuaaaaaaaaaaaaaaaaaaaaaaaaaaaaaaaaaaaaaaaaaaaaaaaaaaaaaaaaaaaaaaaaaaaaaaaaaaaaaaaaaaaaaaaaaaaaaaaaaaaa

SEQ ID NO: 25502 - RNA, 1743 nt, Artificial Sequence
  mRNA product Design a-2 (A100) comprising derived and/or modified sequence from LASV(G502-SLE-2009;Clade IV)__AIT17126__GPCmut3 (opt1)
aggagaguccgcucagccagguugcagaagcggcuuagcguguguccuaaucuucucucugcguguagguaggccugugccgcaaacaagcuuaccaugggccagaucgugaccuucuuccaggaggucccccacgugaucgaggaggugaugaacaucguccugaucgcccucagcauccuggccgugcugaaggggcucuacaacuucgcgaccugcggccugguggggcugcucacguuccugcugcucugcggccgcuccugcaccaccgggcuguacaagggcgucuacgagcugcagacccucgagcugaacauggagacgcugaacaugaccaugccgcucagcugcaccaagaacaacucccaccacuacaucauggugggcaacgagaccgggcuggagcugacgcucaccaacaccagcaucaucaaccacaaguucugcaaccuguccgacgcccacaagaagaaccuguacgaccacgcccucaugagcaucaucuccaccuuccaccugagcauccccaacuucaaccaguacgaggccauguccugcgacuucaacggcgggaagaucagcgugcaguacaaccugucccacagcuacgccggcgacgcggccgaccacugcgggacggucgccaacggcgugcuccagaccuucaugcggauggccuggggcggguccuacaucgcgcuggacagcggccgcgggcggugggacugcaucaugaccuccuaccaguaccugaucauccagaacaccacgugggaggaccacugccaguucagccgccccucccccaucggcuaccucggccugcugagccagcggacccgcgacaucuacaucucccggcgccggcgcgggaccuucaccuggacgcucagcgacagcgagggcaaggacacccccgggggcuacugccugacccgguggaugcugaucgaggccgagcucaagugcuucgggaacaccgccguggccaagugcaacgagaagcacgacgaggaguucugcgacaugcugcgccuguucgacuucaacaagcaggccauccagcggcucaaggcgccggcccagauguccauccagcugaucaacaaggccgucaacgcccugaucaacgaccagcucgugaugaagaaccaccuccgcgacaucaugggcauccccuacugcaacuacagccgguacugcuaccugaaccacacgaccaccggccgcaccucccugcccaagugcugccuggugagcaacggguccuaccugaacgagacgcacuucagcgacgacaucgagcagcaggccgacaacaugaucaccgagaugcuccagaaggaguacauggagcggcagggcaagaccccgcuggggcuggucgaccuguucguguucuccaccagcuucuaccucaucuccaucuuccugcaccuggugaagauccccacgcaccgccacaucgucggcaagagcugccccaagccccaccggcucaaccacauggggaucugcuccugcggccuguacaagcagccgggcgugcccgugaaguggaagcgcugaggacuagucccuguucccagagcccacuuuuuuuucuuuuuuugaaauaaaauagccugucuuucagaucuaaaaaaaaaaaaaaaaaaaaaaaaaaaaaaaaaaaaaaaaaaaaaaaaaaaaaaaaaaaaaaaaaaaaaaaaaaaaaaaaaaaaaaaaaaaaaaaaaaaa

SEQ ID NO: 25503 - RNA, 1743 nt, Artificial Sequence
  mRNA product Design a-2 (A100) comprising derived and/or modified sequence from LASV(G733-SLE-2010;Clade IV)__AIT17154__GPCmut3 (opt1)
aggagaguccgcucagccagguugcagaagcggcuuagcguguguccuaaucuucucucugcguguagguaggccugugccgcaaacaagcuuaccaugggccagaucgugaccuucuuccaggaggucccccacgugaucgaggaggugaugaacaucguccugaucgcccucagcauccuggccgugcugaaggggcucuacaacuucgcgaccugcggcaucguggggcuggucuccuuccugcuccugugcggccgcagcugcacgaccucccuguacaaggggguguacgagcuccagacccuggagcugaacauggagacccucaacaugacgaugccgcugagcugcaccaagaacaacucccaccacuacaucauggugggcaacgagaccggccuggagcucacccugacgaacaccagcaucaucaaccacaaguucugcaaccuguccgacgcccacaagaagaaccucuacgaccacgcccugaugagcaucaucuccaccuuccaccugagcauccccaacuucaaccaguacgaggccauguccugcgacuucaacgggggcaagaucagcguccaguacaaccucucccacagcuacgccggggacgcggccaaccacugcggcaccaucgccaacggggugcugcagacguucaugcggauggccuggggcggcuccuacaucgcgcuggacagcgggcgcgaccggugggacugcaucaugaccuccuaccaguaccucaucauccagaacaccaccugggaggaccacugccaguucagccgccccucccccaucggcuaccuggggcugcucagccagcggacgcgcgacaucuacaucagccggcgccggcgcggcaccuucaccuggacccuguccgacagcgagggcaaggacacgcccgggggcuacugccugacccgguggaugcucaucgaggccgagcugaagugcuucgggaacaccgccguggccaagugcaacgagaagcacgacgaggaguucugcgacaugcugcgccucuucgacuucaacaagcaggccauccagcggcugaaggcgccggcccagauguccauccagcugaucaacaaggccgucaacgcccucaucaacgaccagcugaucaugaagaaccaccuccgcgacaucaugggcauccccuacugcaacuacagcaaguacugcuaccugaaccacaccacgaccgggaagaccucccugcccaagugcugccuggugagcaacggcuccuaccucaacgagacccacuucagcgacgacaucgagcagcaggccgacaacaugaucacggagaugcugcagaaggaguacauggagcggcagggcaagaccccgcuggggcucguggaccuguucgucuucuccaccagcuucuaccugaucuccaucuuccugcaccucgugaagauccccacccaccgccacguggucggcaagagcugccccaagccccaccggcugaaccacauggggaucugcuccugcggccuguacgggcagccgggcgugcccgugaaguggaagcgcugaggacuagucccuguucccagagcccacuuuuuuuucuuuuuuugaaauaaaauagccugucuuucagaucuaaaaaaaaaaaaaaaaaaaaaaaaaaaaaaaaaaaaaaaaaaaaaaaaaaaaaaaaaaaaaaaaaaaaaaaaaaaaaaaaaaaaaaaaaaaaaaaaaaaa

SEQ ID NO: 25504 - RNA, 1743 nt, Artificial Sequence
  mRNA product Design a-2 (A100) comprising derived and/or modified sequence from MOPV/LASV reassortant(IGS-1;Clade IV)__AFY05576__GPCmut3 (opt1)
aggagaguccgcucagccagguugcagaagcggcuuagcguguguccuaaucuucucucugcguguagguaggccugugccgcaaacaagcuuaccaugggccagaucgugaccuucuuccaggaggucccccacgugaucgaggaggugaugaacaucguccugaucgcccucagcgugcuggccgugcugaaggggcucuacaacuucgcgaccugcggccuggucgggcuggugacguuccuccugcugugcggccgcuccugcaccaccagccucuacaaggggguguacgagcugcagacccuggagcucaacauggagacgcugaacaugaccaugccgcuguccugcaccaagaacaacagccaccacuacaucauggucggcaacgagaccggccucgagcugacgcugaccaacaccuccaucaucaaccacaaguucugcaaccucagcgacgcccacaagaagaaccuguacgaccacgcccugauguccaucaucagcaccuuccaccucuccauccccaacuucaaccaguacgaggccaugagcugcgacuucaacgggggcaagaucuccgugcaguacaaccugagccacuccuacgccggggacgcggccaaccacugcggcacgguggccaacgggguccugcagaccuucaugcggauggccuggggcggcagcuacaucgcgcucgacuccgggcgcggcaacugggacugcaucaugaccagcuaccaguaccugaucauccagaacaccacgugggaggaccacugccaguucucccggcccagccccaucggguaccugggccuccugucccagcgcacccgggacaucuacaucagccgccggcgccggggcaccuucaccuggacgcugagcgacuccgagggggaggacaccccgggcggguacugccucacccgcuggaugcugaucgaggccgagcugaagugcuucggcaacaccgccguggccaagugcaacgagaagcacgacgaggaguucugcgacaugcuccggcuguucgacuucaacaagcaggccauccagcgccugaaggcgcccgcccagaugagcauccagcucaucaacaaggccgugaacgcccugaucaacgaccagcugaucaugaagaaccaccuccgggacaucauggggauccccuacugcaacuacuccaaguacugcuaccugaaccacacgaccaccggccgcaccagccugcccaagugcugccucgucuccaacggcagcuaccugaacgagacgcacuucuccgacgacaucgagcagcaggccgacaacaugaucaccgagaugcugcagaaggaguacauggagcggcaggggaagaccccgcucggccugguggaccuguucguguucagcaccuccuucuaccugaucagcaucuuccuccaccuggucaagauccccacgcaccgccacaucguggggaaguccugccccaagccccaccggcugaaccacaugggcaucugcagcugcgggcucuacaagcagccgggcgugcccgucaaguggaagcgcugaggacuagucccuguucccagagcccacuuuuuuuucuuuuuuugaaauaaaauagccugucuuucagaucuaaaaaaaaaaaaaaaaaaaaaaaaaaaaaaaaaaaaaaaaaaaaaaaaaaaaaaaaaaaaaaaaaaaaaaaaaaaaaaaaaaaaaaaaaaaaaaaaaaaa

SEQ ID NO: 25505 - RNA, 1743 nt, Artificial Sequence
  mRNA product Design a-2 (A100) comprising derived and/or modified sequence from LASV(LM765-SLE-2012;Clade IV)__AIT17814__GPCmut3 (opt1)
aggagaguccgcucagccagguugcagaagcggcuuagcguguguccuaaucuucucucugcguguagguaggccugugccgcaaacaagcuuaccaugggccagaucgugaccuucuuccaggaggucccccacgugaucgaggaggugaugaacaucguccugaucgcccucagcauccuggccgugcugaaggggcucuacaacuucgcgaccugcggccugguggggcuggucacguuccuccugcugugcggccgcuccugcaccaccagccucuacaaggggguguacgagcugcagacccuggagcucaacauggagacgcugaacaugaccaugccgcuguccugcaccaagaacaacagccaccacuacaucauggugggcaacgagaccggccucgagcugacgcugaccaacaccuccaucaucgaccacaaguucugcaaccucagcgacgcccaccggaagaaccuguacgaccacgcccugauguccaucaucagcaccuuccaccucuccauccccaacuucaaccaguacgaggccaugagcugcgacuucaacgggggcaagaucuccguccaguacaaccugagccacuccuacgccaaggacgcggccgaccacugcgggacgguggccaacggcgugcugcagaccuucaugcgcauggccuggggcgggagcuacaucgcgcucgacuccggccgggggcgcugggacugcaucaugaccagcuaccaguaccugaucauccagaacaccacgugggaggaccacugccaguucucccggcccagccccaucggcuaccuggggcuccugucccagcgcacccgggacaucuacaucagccgccggcgccggggcaccuucaccuggacgcugagcgacuccgagggcaaggacacccccgggggcuacugccucacccgcuggaugcugaucgaggccgagcugaagugcuucgggaacaccgccgucgccaagugcaacgagaagcacgacgaggaguucugcgacaugcuccggcuguucgacuucaacaagcaggccauccagcgccugaaggcgccggcccagaugagcauccagcucaucaacaaggccgugaacgcccugaucaacgaccagcugaucaugaagaaccaccuccgggacaucaugggcauccccuacugcaacuacuccaaguacugcuaccugaaccacacgaccaccgggaagaccagccugcccaagugcugccucguguccaacggcagcuaccugaacgagacgcacuucuccgacgacaucgagcagcaggccgacaacaugaucaccgagaugcugcagaaggaguacauggagcgccagggcaagaccccgcucgggcuggucgaccuguucguguucagcaccuccuucuaccugaucagcaucuuccuccaccuggugaagauccccacgcaccggcacaucgucggcaagcccugccccaagccgcaccgccugaaccacauggggaucugcuccugcggccucuacaagcagcccggggugcccgugaaguggaagcggugaggacuagucccuguucccagagcccacuuuuuuuucuuuuuuugaaauaaaauagccugucuuucagaucuaaaaaaaaaaaaaaaaaaaaaaaaaaaaaaaaaaaaaaaaaaaaaaaaaaaaaaaaaaaaaaaaaaaaaaaaaaaaaaaaaaaaaaaaaaaaaaaaaaaa

SEQ ID NO: 25506 - RNA, 1743 nt, Artificial Sequence
  mRNA product Design a-2 (A100) comprising derived and/or modified sequence from LASV(LM776-SLE-2012;Clade IV)__AIT17824__GPCmut3 (opt1)
aggagaguccgcucagccagguugcagaagcggcuuagcguguguccuaaucuucucucugcguguagguaggccugugccgcaaacaagcuuaccaugggccagaucgugaccuucuuccaggaggucccccacgugaucgaggaggugaugaacaucguccugaucgcccucagcauccuggccgugcugaaggggcucuacaacuucgcgaccugcggccugguggggcuggucacguuccuccugcugugcggccgcuccugcaccaccagcguguacaaggggguguacgagcuccagacccuggagcugaacauggagacgcucaacaugaccaugccgcuguccugcaccaagaacaacagccaccacuacaucauggucggcaacgagaccggccuggagcucacgcugaccaacaccuccaucaucaaccacaaguucugcaaccugagcgacgcccacaagaagaaccucuacgaccacgcccugauguccaucaucagcaccuuccaccuguccauccccaacuucaaccaguacgaggccaugagcugcgacuucaacgggggcaagaucuccgugcaguacaaccucagccacuccuacgccggggacgcggccaaccacugcggcacgguggccaacgggguccugcagaccuucaugcggauggccuggggcggcagcuacaucgcgcuggacuccgggcacggcaagugggacugcaucaugaccagcuaccaguaccucaucauccagaacaccacgugggaggaccacugccaguucucccgccccagccccaucggguaccugggccugcucucccagcggacccgcgacaucuacaucagccggcgccggcgcggcaccuucaccuggacgcugagcgacuccgaggggaaggacaccccgggcggguacugccugacccgguggaugcucaucgaggccgagcugaagugcuucggcaacaccgccguggccaagugcaacgagaagcacgacgaggaguucugcgacaugcugcgccucuucgacuucaacaagcaggccauccagcggcugaaggcgcccgcccagaugagcauccagcugaucaacaaggccgugaacgcccucaucaacgaccagcugaucaugaagaaccaccuccgcgacaucauggggauccccuacugcaacuacuccaaguacugcuaccugaaccacacgaccaccggcaagaccagccugcccaagugcugccuggucuccaacggcagcuaccucaacgagacgcacuucuccgacgacaucgagcagcaggccgacaacaugaucaccgagaugcugcagaaggaguacauggagcggcaggggaagaccccgcugggccucguggaccuguucguguucagcaccuccuucuaccugaucagcaucuuccugcaccucgucaagauccccacgcaccgccacaucguggggaaguccugccccaagccccaccggcugaaccacaugggcaucugcagcugcgggcuguacaagcagccgggcgugcccguccgcuggaagcggugaggacuagucccuguucccagagcccacuuuuuuuucuuuuuuugaaauaaaauagccugucuuucagaucuaaaaaaaaaaaaaaaaaaaaaaaaaaaaaaaaaaaaaaaaaaaaaaaaaaaaaaaaaaaaaaaaaaaaaaaaaaaaaaaaaaaaaaaaaaaaaaaaaaaa

SEQ ID NO: 25507 - RNA, 1743 nt, Artificial Sequence
  mRNA product Design a-2 (A100) comprising derived and/or modified sequence from LASV(Mad39;Clade IV)__ANH09722__GPCmut3 (opt1)
aggagaguccgcucagccagguugcagaagcggcuuagcguguguccuaaucuucucucugcguguagguaggccugugccgcaaacaagcuuaccaugggccagaucgugaccuucuuccaggaggucccccacgugaucgaggaggugaugaacaucguccugaucgcccucagcauccuggccgugcugaaggggcucuacaacguggcgaccugcggccugaucgggcuggucacguuccuccugcugugcggccgcuccugcaccaccacccucuacaaggggguguacgagcugcaggcccuggagcucaacauggagacgcugaacaugaccaugccgcugagcugcaccaagaacaacucccaccacuacauccgggugggcaacgagaccggccucgagcugacgcugaccaacaccagccucaucaaccacaaguucugcaaccuguccgacgcccacaagaagaaccuguacgaccacgcccucaugagcaucaucuccaccuuccaccugagcauccccaacuucaaccaguacgaggccauguccugcgacuucaacgacgggaagaucagcguccaguacaaccugucccacacguacgcgggcgacaccgccaaccacugcgggaccguggccaacggcgugcuccagaccuucaugcgcauggccuggggcgggagcuacaucgcgcuggacuccggccgcgggggcugggacugcaucaugacgagcuaccaguaccugaucauccagaacaccaccugggaggaccacugccaguucucccggcccagccccaucggguaccucggccugcugucccagcggacccgcgacaucuacaucagccggcgccggcgcggcacguucaccuggacccucuccgacagcgaggggaaggacaccccgggcggguacugccugacgcgguggaugcugaucgaggccgagcucaagugcuucggcaacaccgccgucgccaagugcaacgagaagcacgacgaggaguucugcgacaugcugcgccuguucgacuucaacaagcaggccauccagcggcucaaggcgcccgcccagaugagcauccagcugaucaacaaggccgugaacgcccugaucaacgaccagcucaucaugaagaaccaccuccgcgacaucauggggauccccuacugcaacuacuccaaguacugcuaccugaaccacaccgugaccggcaagacgagccugcccaagugcugccuggucuccaacggcagcuaccugaacgagacccacuucuccgacgacaucgagcagcaggccgacaacaugaucaccgagaugcuccagaaggaguacauggagcggcaggggaagaccccgcugggccugguggaccuguucguguucagcacguccuucuaccucaucagcaucuuccugcaccuggucaagauccccacccaccgccacgugguggggaagcccugccccaagccgcaccggcucaaccacaugggcaucugcuccugcggguucuacaagcagcccggcguccccgugcgcuggaagcggugaggacuagucccuguucccagagcccacuuuuuuuucuuuuuuugaaauaaaauagccugucuuucagaucuaaaaaaaaaaaaaaaaaaaaaaaaaaaaaaaaaaaaaaaaaaaaaaaaaaaaaaaaaaaaaaaaaaaaaaaaaaaaaaaaaaaaaaaaaaaaaaaaaaaa

SEQ ID NO: 25508 - RNA, 1743 nt, Artificial Sequence
  mRNA product Design a-2 (A100) comprising derived and/or modified sequence from LASV(Z0947-SLE-2011;Clade IV)__AIT17840__GPCmut3 (opt1)
aggagaguccgcucagccagguugcagaagcggcuuagcguguguccuaaucuucucucugcguguagguaggccugugccgcaaacaagcuuaccaugggccagaucgugaccuucuuccaggaggucccccacgugaucgaggaggugaugaacaucguccugaucgcccucagcauccuggccgugcugaaggggcucuacaacuucgcgaccugcggccugguggggcuggucacguuccuccugcugugcggccgcuccugcaccaucagccucuacaaggggguguacgagcugcagacccuggagcucaacauggagacccugaacaugacgaugccgcuguccugcaccaagaacaacagccaccacuacaucauggugggcaacgagaccggccucgagcugacccugacgaacaccuccaucaucaaccacaaguucugcaaccucagcgacgcccacaagaagaaccuguacgaccacgcccugauguccaucaucagcaccuuccaccucuccauccccaacuucaaccaguacgaggccaugagcugcgacuucaacgggggcaagaucuccguccaguacaaccugagccacuccuacgccggggacgcggccaaccacugcggcaccguggccaacggggugcugcagacguucaugcggauggccuggggcggcagcuacaucgcgcucgacuccgggcgcgaccggugggacugcaucaugaccagcuaccaguaccugaucauccagaacaccaccugggaggaccacugccaguucucccgccccagccccaucggcuaccuggggcuccugucccagcggacgcgcgacaucuacaucagccggcgccggcgcggcaccuucaccuggacccugagcgacuccgagggcaaggacacgcccgggggcuacugccucacccgguggaugcugaucgaggccgagcugaagugcuucgggaacaccgccgucgccaagugcaacgagaagcacgacgaggaguucugcgacaugcuccgccuguucgacuucaacaagcaggccauccagcggcugaaggcgccggcccagaugagcauccagcucaucaacaaggccgugaacgcccugaucaacgaccagcugaucaugaagaaccaccuccgcgacaucaugggcauccccuacugcaacuacuccaaguacugcuaccugaaccacaccacgaccgggaagaccagccugcccaagugcugccucguguccaacggcagcuaccugaacgagacccacuucuccgacgacaucgagcagcaggccgacaacaugaucacggagaugcugcagaaggaguacauggagcggcagggcaagaccccgcucgggcuggucgaccuguucguguucagcaccuccuucuaccugaucagcaucuuccuccaccuggugaagauccccacccaccgccacaucgucggcaagcccugccccaagccgcaccggcugaaccacauggggaucugcuccugcggccucuacaagcagcccggggugcccgugaaguggaagcgcugaggacuagucccuguucccagagcccacuuuuuuuucuuuuuuugaaauaaaauagccugucuuucagaucuaaaaaaaaaaaaaaaaaaaaaaaaaaaaaaaaaaaaaaaaaaaaaaaaaaaaaaaaaaaaaaaaaaaaaaaaaaaaaaaaaaaaaaaaaaaaaaaaaaaa

SEQ ID NO: 25509 - RNA, 1743 nt, Artificial Sequence
  mRNA product Design a-2 (A100) comprising derived and/or modified sequence from LASV(Josiah;Clade IV)__NP_694870__GPCmut3 (opt4)
aggagaguccgcucagccagguugcagaagcggcuuagcguguguccuaaucuucucucugcguguagguaggccugugccgcaaacaagcuuaccaugggccagaucgugaccuucuuccaggaggugccccacgugaucgaggaggugaugaacaucgugcugaucgcccugagcgugcuggccgugcugaagggccuguacaacuucgccaccugcggccuggugggccuggugaccuuccugcugcugugcggcagaagcugcaccaccagccuguacaagggcguguacgagcugcagacccuggagcugaacauggagacccugaacaugaccaugccccugagcugcaccaagaacaacagccaccacuacaucauggugggcaacgagaccggccuggagcugacccugaccaacaccagcaucaucaaccacaaguucugcaaccugagcgacgcccacaagaagaaccuguacgaccacgcccugaugagcaucaucagcaccuuccaccugagcauccccaacuucaaccaguacgaggccaugagcugcgacuucaacggcggcaagaucagcgugcaguacaaccugagccacagcuacgccggcgacgccgccaaccacugcggcaccguggccaacggcgugcugcagaccuucaugagaauggccuggggcggcagcuacaucgcccuggacagcggcagaggcaacugggacugcaucaugaccagcuaccaguaccugaucauccagaacaccaccugggaggaccacugccaguucagcagacccagccccaucggcuaccugggccugcugagccagagaaccagagacaucuacaucagcagaagaagaagaggcaccuucaccuggacccugagcgacagcgagggcaaggacacccccggcggcuacugccugaccagauggaugcugaucgaggccgagcugaagugcuucggcaacaccgccguggccaagugcaacgagaagcacgacgaggaguucugcgacaugcugagacuguucgacuucaacaagcaggccauccagagacugaaggcccccgcccagaugagcauccagcugaucaacaaggccgugaacgcccugaucaacgaccagcugaucaugaagaaccaccugagagacaucaugggcauccccuacugcaacuacagcaaguacugcuaccugaaccacaccaccaccggcagaaccagccugcccaagugcugccuggugagcaacggcagcuaccugaacgagacccacuucagcgacgacaucgagcagcaggccgacaacaugaucaccgagaugcugcagaaggaguacauggagagacagggcaagaccccccugggccugguggaccuguucguguucagcaccagcuucuaccugaucagcaucuuccugcaccuggugaagauccccacccacagacacaucgugggcaagagcugccccaagccccacagacugaaccacaugggcaucugcagcugcggccuguacaagcagcccggcgugcccgugaaguggaagagaugaggacuagucccuguucccagagcccacuuuuuuuucuuuuuuugaaauaaaauagccugucuuucagaucuaaaaaaaaaaaaaaaaaaaaaaaaaaaaaaaaaaaaaaaaaaaaaaaaaaaaaaaaaaaaaaaaaaaaaaaaaaaaaaaaaaaaaaaaaaaaaaaaaaaa

SEQ ID NO: 25510 - RNA, 1740 nt, Artificial Sequence
  mRNA product Design a-2 (A100) comprising derived and/or modified sequence from LASV(LP;Clade I)__AAF86701__GPCmut3 (opt4)
aggagaguccgcucagccagguugcagaagcggcuuagcguguguccuaaucuucucucugcguguagguaggccugugccgcaaacaagcuuaccaugggccagaucaucaccuucuuccaggaggugccccacgugaucgaggaggugaugaacaucgugcugaucgcccugagccugcuggccauccugaagggccuguacaacaucgccaccugcggcaucaucggccugguggccuuccuguuccugugcggcaagagcugcagccugacccugaagggcggcuacgagcugcagacccuggagcugaacauggagacccugaacaugaccaugccccugagcugcaccaagaacagcagccaccacuacaucagagugggcaacgagaccggccuggagcugacccugaccaacaccagcaucaucaaccacaaguucugcaaccugagcgacgcccacaagaagaaccuguacgaccacgcccugaugagcaucaucagcaccuuccaccugagcauccccaacuucaaccaguacgaggccaugagcugcgacuucaacggcggcaagaucagcgugcaguacaaccugagccacagcuacgccggcgacgccgccgagcacugcggcaccguggccaacggcgugcugcagaccuucaugagaauggccuggggcggcagauacaucgcccuggacagcggcaagggcaacugggacugcaucaugaccagcuaccaguaccugaucauccagaacaccaccugggaggaccacugccaguucagcagacccagccccaucggcuaccugggccugcugagccagagaaccagagacaucuacaucagcagaagaagaagaggcaccuucaccuggacccugagcgacagcgagggcaacgagacccccggcggcuacugccugaccagauggaugcugaucgaggccgagcugaagugcuucggcaacaccgccguggccaagugcaacgagaagcacgacgaggaguucugcgacaugcugagacuguucgacuucaacaagcaggccaucagaagacugaaggcccccgcccagaugagcauccagcugaucaacaaggccgugaacgcccugaucaacgaccagcugaucaugaagaaccaccugagagacaucaugggcauccccuacugcaacuacagcaaguacugcuaccugaaccacaccagcagcggcagaaccagccugcccaagugcugccugaucagcaacggcagcuaccugaacgagacccaguucagcgacgacaucgagcagcaggccgacaacaugaucaccgagaugcugcagaaggaguacaucgagagacagggcaagaccccccugggccugguggacaucuucaucuucagcaccagcuucuaccugaucagcaucuuccugcaccugaucaagauccccacccacagacacaucgugggcaagcccugccccaagccccacagacugaaccacaugggcgugugcagcugcggccuguacaagcaccccggcgugcccaccaaguggaagagaugaggacuagucccuguucccagagcccacuuuuuuuucuuuuuuugaaauaaaauagccugucuuucagaucuaaaaaaaaaaaaaaaaaaaaaaaaaaaaaaaaaaaaaaaaaaaaaaaaaaaaaaaaaaaaaaaaaaaaaaaaaaaaaaaaaaaaaaaaaaaaaaaaaaaa

SEQ ID NO: 25511 - RNA, 1740 nt, Artificial Sequence
  mRNA product Design a-2 (A100) comprising derived and/or modified sequence from LASV(803213;Clade II)__AAF86703__GPCmut3 (opt4)
aggagaguccgcucagccagguugcagaagcggcuuagcguguguccuaaucuucucucugcguguagguaggccugugccgcaaacaagcuuaccaugggccagaucaucaccuucuuccaggaggugccccacgugaucgaggaggugaugaacaucgugcugaucgcccugagccugcuggccauccugaagggcaucuacaacguggccaccugcggccuguucggccugaucagcuuccugcugcugugcggcagaagcugcagcgugaccuacaagggcguguacgagcugcagacccuggagcugaacauggccaaccugaacaugaccaugccccugagcugcaccaagaacaacagccaccacuacaucauggugggcaacgagaccggccuggagcugacccugaccaacaccagcaucaucaaccacaaguucugcaaccugagcgacgcccacaagaagaaccuguacgaccacgcccugaugagcaucaucagcaccuuccaccugagcauccccaacuucaaccaguacgaggccaugagcugcgacuucaacggcggcaagaucagcgugcaguacaaccugagccacagcuucgccguggacgccgccaaccacugcggcaccaucgccaacggcgugcugcagaccuucaugagaauggccuggggcggcagcuacaucgcccuggacagcggcaagggcaacugggacugcaucaugaccagcuaccaguaccugaucauccagaacaccaccugggaggaccacugccaguucagcagacccagccccaucggcuaccugggccugcugagccagagaaccagagacaucuacaucagcagaagaagaagaggcaccuucaccuggacccugagcgacagcgagggcaacgaggcccccggcggcuacugccugaccagauggaugcugaucgaggccgagcugaagugcuucggcaacaccgccguggccaagugcaacgagaagcacgacgaggaguucugcgacaugcugagacuguucgacuucaacaagcaggccaucaagagacugaagacccccgcccagaugagcauccagcugaucaacaaggccgugaacgcccugaucaacgaccagcugaucaugaagaaccaccugagagacaucaugggcauccccuacugcaacuacagcagauacugcuaccugaaccacaccgugaccggcaagaccagccugcccagaugcugccuggugagcaacggcagcuaccugaacgagacccacuucagcgacgacaucgagcagcaggccgacaacaugaucaccgagaugcugcagaaggaguacauggacagacagggcaagaccccccugggccugguggaccuguucguguucagcaccagcuucuaccugaucagcaucuuccugcaccuggugaagauccccacccacagacacaucgugggcaagcccugccccaagccccacagacugaaccacaugggcaucugcagcugcggccuguacaagcaccccggcgugcccgugaaguggaagagaugaggacuagucccuguucccagagcccacuuuuuuuucuuuuuuugaaauaaaauagccugucuuucagaucuaaaaaaaaaaaaaaaaaaaaaaaaaaaaaaaaaaaaaaaaaaaaaaaaaaaaaaaaaaaaaaaaaaaaaaaaaaaaaaaaaaaaaaaaaaaaaaaaaaaa

SEQ ID NO: 25512 - RNA, 1740 nt, Artificial Sequence
  mRNA product Design a-2 (A100) comprising derived and/or modified sequence from LASV(GA391;Clade III)__CAA36645__GPCmut3 (opt4)
aggagaguccgcucagccagguugcagaagcggcuuagcguguguccuaaucuucucucugcguguagguaggccugugccgcaaacaagcuuaccaugggccagaucgugaccuucuuccaggaggugccccacgugaucgaggaggugaugaacaucgugcugaucgcccugagcauccuggccauccugaagggccuguacaacguggccaccugcggccugaucggccuggugaccuuccugcugcugagcggcagaagcugcagccugaucuacaagggcaccuacgagcugcagacccuggagcugaacauggagacccugaacaugaccaugccccugagcugcaccaagaacaacagccaccacuacaucagagugggcaacgagaccggccuggagcugacccugaccaacaccagcauccugaaccacaaguucugcaaccugagcgacgcccacaagagaaaccuguacgaccacagccugaugagcaucaucagcaccuuccaccugagcauccccaacuucaaccaguacgaggccaugagcugcgacuucaacggcggcaagaucaccgugcaguacaaccugagccacagcuucgccguggacgccgccggccacugcggcacccuggccaacggcgugcugcagaccuucaugagaauggccuggggcggcagcuacaucgcccuggacagcggcagaggcaacugggacugcaucaugaccagcuaccaguaccugaucauccagaacaccaccugggacgaccacugccaguucagcagacccagccccaucggcuaccugggccugcugagccagagaaccagagacaucuacaucagcagaagaagaagaggcaccuucaccuggacccugagcgacagcgagggcaacgagacccccggcggcuacugccugaccagauggaugcugaucgaggccgagcugaagugcuucggcaacaccgccguggccaagugcaacgagaagcacgacgaggaguucugcgacaugcugagacuguucgacuucaacaagcaggccaucagaagacugaagacccccgcccagaugagcauccagcugaucaacaaggccgugaacgcccugaucaacgaccagcugaucaugaagaaccaccugagagacaucaugggcauccccuacugcaacuacagcagauacugcuaccugaaccacaccagcaccggcaagaccagccugcccagaugcugccugaucagcaacggcagcuaccugaacgagaccaaguucagcgacgacaucgagcagcaggccgacaacaugaucaccgagaugcugcagaaggaguacaucgacagacagggcaagaccccccugggccugguggaccuguucguguucagcaccagcuucuaccugaucagcaucuuccugcaccuggugaagauccccacccacagacacaucgugggcaagcccugccccaagccccacagacugaaccacaugggcaucugcagcugcggccuguacaagcagcccggcgugcccgugagauggaagagaugaggacuagucccuguucccagagcccacuuuuuuuucuuuuuuugaaauaaaauagccugucuuucagaucuaaaaaaaaaaaaaaaaaaaaaaaaaaaaaaaaaaaaaaaaaaaaaaaaaaaaaaaaaaaaaaaaaaaaaaaaaaaaaaaaaaaaaaaaaaaaaaaaaaaa

SEQ ID NO: 25513 - RNA, 1743 nt, Artificial Sequence
  mRNA product Design a-2 (A100) comprising derived and/or modified sequence from LASV(AV;Clade V)__CCA30314__GPCmut3 (opt4)
aggagaguccgcucagccagguugcagaagcggcuuagcguguguccuaaucuucucucugcguguagguaggccugugccgcaaacaagcuuaccaugggccagaucgugaccuucuuccaggaggugccccacgugaucgaggaggugaugaacaucgugcugaucgcccugagcauccuggccgugcugaagggccuguacaacaucgccaccugcggccugaucggccugaucaccuuccugcugcugugcggcagaagcugcagcagcaaccuguacaagggcguguacgagcugcagagccuggaccugaacauggagacccugaacaugaccaugccccugagcugcaccaagaacaacagccaccacuacaucagagugggcaacgacaccggccuggagcugacccugaccaacaccagcauccugaaccacaaguucugcaaccugagcgacgcccacaagaaggaccuguacgaccacgcccugaugagcaucaucagcaccuuccaccugagcauccccaacuucaaccaguacgaggccaugagcugcgacuucaacggcggcaagaucagcgugcaguacaaccugagccacagcuacgccaucgacgccgccaaccacugcggcaccguggccaacggcauccugcagaccuucaugagaauggccuggggcggcagcuacaucgcccuggacagcggcagaggcaacugggacugcaucaugaccagcuaccaguaccugaucauccagaacaccaccugggagaaccacugccaguucagcagacccagccccaucggcuaccugggccugcugagccagagaaccagagacaucuacaucagcagaagaagaagaggcaccuucaccuggacccugagcgacagcgagggcaacgccacccccggcggcuacugccugaccagauggaugcugaucgaggccgagcugaagugcuucggcaacaccgccguggccaagugcaacgagaagcacgacgaggaguucugcgacaugcugagacuguucgacuucaacaagcaggccaucagcagacugaagagccccgcccagaugagcauccagcugaucaacaaggccgugaacgcccugaucaacgaccagcugaucaugaagaaccaccugagagacaucaugggcauccccuacugcaacuacagcaaguacugcuaccugaaccacaccaucaccggcaagaccagccugcccaagugcugccuggugagcaacggcagcuaccugaacgagacccacuucagcgacgacaucgagcagcaggccgacaacaugaucaccgagaugcugcagaaggaguacauggagagacagggcaagaccccccugggccugguggaccuguucguguucagcaccagcuucuaccugaucagcaucuuccugagacuggugaagauccccacccacagacacaucgugggcaagcccugccccaagccccacagacugaaccacaugggcaucugcagcugcggccuguacaagcagcccggcgugcccgugagauggaagagaugaggacuagucccuguucccagagcccacuuuuuuuucuuuuuuugaaauaaaauagccugucuuucagaucuaaaaaaaaaaaaaaaaaaaaaaaaaaaaaaaaaaaaaaaaaaaaaaaaaaaaaaaaaaaaaaaaaaaaaaaaaaaaaaaaaaaaaaaaaaaaaaaaaaaa

SEQ ID NO: 25514 - RNA, 1740 nt, Artificial Sequence
  mRNA product Design a-2 (A100) comprising derived and/or modified sequence from LASV(Togo/2016/7082;Clade VI)__AMR44577__GPCmut3 (opt4)
aggagaguccgcucagccagguugcagaagcggcuuagcguguguccuaaucuucucucugcguguagguaggccugugccgcaaacaagcuuaccaugggccagaucaucaccuucuuccaggaggugccccacgugaucgaggaggugaugaacaucgugcugaucgcccugagccugcuggccauccugaagggcguguacaacguggccaccugcggcaucaucggccuggugaccuuccuguuccugugcggcagaagcugcagccugaucuacaagggcagcuacgagcugcagacccuggagcugaacauggagacccugaacaugaccaugccccugagcugcaccaagaacagcagccaccacuacaucagagugggcaacgagaccggccuggagcugacccugaccaacaccagcaucaucaaccacaaguucugcaaccugagcgacgcccacaagagaaaccuguacgaccacgcccugaugagcauccugagcaccuuccaccugagcauccccaacuucaaccaguacgaggccaugagcugcgacuucaacggcggcaagaucagcgugcaguacaaccugagccacgccuacgccguggacgccgccgagcacugcggcaccguggccaacggcgugcugcagaccuucaugagaauggccuggggcggcagcuacaucgcccuggacagcggcagaggcaacugggacugcaucaugaccagcuaccaguaccugaucauccagaacaccaccugggaggaccacugccaguucagcagacccagccccaucggcuaccugggccugcugagccagagaaccagagacaucuacaucagcagaagaagaagaggcaccuucaccuggacccugagcgacagcgagggcaacgagacccccggcggcuacugccugaccagauggaugcugaucgaggccgagcugaagugcuucggcaacaccgccguggccaagugcaacgagaagcacgacgaggaguucugcgacaugcugagacuguucgacuucaacaagcaggccauccagagacugaagagccccgcccagaugagcauccagcugaucaacaaggccgugaacgcccugaucaacgaccagcugaucaugaagaaccaccugagagacaugaugggcauccccuacugcaacuacagcaaguacugcuaccugaaccacaccagcagcggcagaaccagccugcccaagugcugccuggugagcaacggcagcuaccugaacgagacccacuucagcgacgacaucgagcagcaggccgacaacaugaucaccgagaugcugcagaaggaguacaucgacagacagggcaagaccccccugggccugguggaccuguucguguucagcaccagcuucuaccugaucagcaucuuccugcaccugaucaagauccccacccacagacacaucgugggcaagcccugccccaagccccacagacugaaccacaugggcaucugcagcugcggccuguacaagcagcccggcgugcccaccagauggaagagaugaggacuagucccuguucccagagcccacuuuuuuuucuuuuuuugaaauaaaauagccugucuuucagaucuaaaaaaaaaaaaaaaaaaaaaaaaaaaaaaaaaaaaaaaaaaaaaaaaaaaaaaaaaaaaaaaaaaaaaaaaaaaaaaaaaaaaaaaaaaaaaaaaaaaa

SEQ ID NO: 25515 - RNA, 1740 nt, Artificial Sequence
  mRNA product Design a-2 (A100) comprising derived and/or modified sequence from LASV(KAK-428;Clade n.d. (VII))__ANH09740__GPCmut3 (opt4)
aggagaguccgcucagccagguugcagaagcggcuuagcguguguccuaaucuucucucugcguguagguaggccugugccgcaaacaagcuuaccaugggccagaucgugaccuucuuccaggaggugccccacgugaucgaggaggugaugaacaucgugcugaucgcccugagccugcuggccauccugaagggccuguacaacuucgccaccugcggcgugaucggccugaucaccuuccugcugcugugcggcagaagcugcagcgccaccuacaagggccaguacgagcugcagacccuggagcugaacauggagagccugaacaugaccaugccccugagcugcaccaagaacaacagccaccacuacaucagagccggcaacaacaccggccuggagcugacccugaccaacaccagcaucaucagccacaaguucugcaaccugagcgacgcccacaagaagaaccuguacgaccacacccugaugagcaucaucaccaccuuccaccugagcauccccaacuucaaccaguacgaggccaugagcugcgacuucaacggcggcaagaucagcauccaguacaaccugagccacagcuacgccggcgacgccgcccagcacugcggcaccguggccaacggcgugcugcagaccuucaugagaauggccuggggcggcagcuaccuggcccuggacagcggcagaagaggcugggacugcaucaucagcagcuaccaguaccugaucauccagaacaccaccugggacgaccacugccaguucagcagacccagccccaucggcuaccugggcuucgugagccagaagaccagagacaucuacaucagcagaagaagaagaggcaccuucaccuggacccugagcgacagcgagggccacgacaugcccggcggcuacugccugaccagauggaugcugaucgaggccgaccugaagugcuucggcaacaccgccguggccaagugcaacgagaagcacgacgaggaguucugcgacauguggagacuguucgacuucaacaagcaggccauccagagacugaaggcccccgcccagaugaacauccagcugaucaacaaggccgugaacgcccugaucaacgaccagcugaugaugaagaaccaccugagagacaucaugggcauccccuacugcaacuacagcaaguucugcuaccugaacaacaccaccaccggcagaaccagccugcccagaugcugccugaucagcaacggcagcuaccugaacgagacccacuucagcgacgacaucgagcagcaggccgacaacaugaucaccgagaugcugcagaaggaguacauggacagacagggcaagaccccccugggccugguggaccuguucguguucagcaccagcuucuaccugaucaccaucuuccugcaccuggugaagauccccacccacagacacaucgugggcaagcccugccccaagccccacagacugaaccacaugggcaucugcagcugcggccuguacaagcagcccggcgugcccgugagauggaagagaugaggacuagucccuguucccagagcccacuuuuuuuucuuuuuuugaaauaaaauagccugucuuucagaucuaaaaaaaaaaaaaaaaaaaaaaaaaaaaaaaaaaaaaaaaaaaaaaaaaaaaaaaaaaaaaaaaaaaaaaaaaaaaaaaaaaaaaaaaaaaaaaaaaaaa

SEQ ID NO: 25516 - RNA, 1740 nt, Artificial Sequence; identical to SEQ ID NO: 25510
  mRNA product Design a-2 (A100) comprising derived and/or modified sequence from LASV(Pinneo-NIG-1969;Clade I)__AIT17836__GPCmut3 (opt4)

SEQ ID NO: 25517 - RNA, 1740 nt, Artificial Sequence
  mRNA product Design a-2 (A100) comprising derived and/or modified sequence from LASV(ISTH0009-NIG-2011;Clade II)__AIT17404__GPCmut3 (opt4)
aggagaguccgcucagccagguugcagaagcggcuuagcguguguccuaaucuucucucugcguguagguaggccugugccgcaaacaagcuuaccaugggccagaucaucaccuucuuccaggaggugccccacgugaucgaggaggugaugaacaucgugcugaucgcccugagccugcuggccauccugaagggcaucuacaacguggccaccugcggccuguucggccuggugagcuuccugcugcugugcggcagaagcugcagcaccaccuacaagggcguguacgagcugcagacccuggagcuggacauggccagccugaacaugaccaugccccugagcugcaccaagaacaacagccaccacuacaucauggugggcaacgagaccggccuggagcugacccugaccaacaccagcaucaucaaccacaaguucugcaaccugagcgacgcccacaagaagaaccuguacgaccacgcccugaugagcaucaucagcaccuuccaccugagcauccccaacuucaaccaguacgaggccaugagcugcgacuucaacggcggcaagaucagcgugcaguacaaccugagccacgccuacgccguggacgccgccaaccacugcggcaccaucgccaacggcgugcugcagaccuucaugagaauggccuggggcggcagcuacaucgcccuggacagcggcaagggcagcugggacugcaucaugaccagcuaccaguaccugaucauccagaacaccaccugggaggaccacugccaguucagcagacccagccccaucggcuaccugggccugcugagccagagaaccagagacaucuacaucagcagaagaagaagaggcaccuucaccuggacccugagcgacagcgagggcaacgagacccccggcggcuacugccugaccagauggaugcugaucgaggccgagcugaagugcuucggcaacaccgccguggccaagugcaacgagaagcacgacgaggaguucugcgacaugcugagacuguucgacuucaacaagcaggccaucagaagacugaagacccccgcccagaugagcauccagcugaucaacaaggccgugaacgcccugaucaacgaccagcugaucaugaagaaccaccugagagacaucaugggcauccccuacugcaacuacagcaaguacugcuaccugaaccacaccgugaccggcaagaccagccugcccagaugcugccuggugagcaacggcagcuaccugaacgagacccacuucagcgacgacaucgagcagcaggccgacaacaugaucaccgagcugcugcagaaggaguacauggacagacagggcaagaccccccugggccugguggaccuguucguguucagcaccagcuucuaccugaucagcaucuuccugcaccugaucaagauccccacccacagacacaucaccggcaagcccugccccaagccccacagacugaaccacaugggcaucugcagcugcggccuguacaagcaccccggcgugcccgugaaguggaagagaugaggacuagucccuguucccagagcccacuuuuuuuucuuuuuuugaaauaaaauagccugucuuucagaucuaaaaaaaaaaaaaaaaaaaaaaaaaaaaaaaaaaaaaaaaaaaaaaaaaaaaaaaaaaaaaaaaaaaaaaaaaaaaaaaaaaaaaaaaaaaaaaaaaaaa

SEQ ID NO: 25518 - RNA, 1740 nt, Artificial Sequence
  mRNA product Design a-2 (A100) comprising derived and/or modified sequence from LASV(ISTH2010-NIG-2012;Clade II)__AIT17482__GPCmut3 (opt4)
aggagaguccgcucagccagguugcagaagcggcuuagcguguguccuaaucuucucucugcguguagguaggccugugccgcaaacaagcuuaccaugggccagaucaucaccuucuuccaggaggugccccacgugaucgaggaggugaugaacaucgugcugaucgcccugagccugcuggccauccugaagggcaucuacaacguggccaccugcggccuguucggccuggugagcuuccugcugcugugcggcagaagcugcagcaccaccuacaagggcguguacgagcugcagacccuggagcuggacauggccagccugaacaugaccaugccccugagcugcaccaagaacaacagccaccacuacaucauggugggcaacgagaccggccuggagcugacccugaccaacaccagcaucaucaaccacaaguucugcaaccugagcgacgcccacaagaagaaccuguacgaccacgcccugaugagcaucaucagcaccuuccaccugagcauccccaacuucaaccaguacgaggccaugagcugcgacuucaacggcggcaagaucagcgugcaguacaaccugagccacgccuacgccguggacgccgccaaccacugcggcaccaucgccaacggcgugcugcagaccuucaugagaauggccuggggcggcagcuacaucgcccuggacagcggcaagggcagcugggacugcaucaugaccagcuaccaguaccugaucauccagaacaucaccugggaggaccacugccaguucagcagacccagccccaucggcuaccugggccugcugagccagagaaccagagacaucuacaucagcagaagaagaagaggcaccuucaccuggacccugagcgacagcgagggcaacgagacccccggcggcuacugccugaccagauggaugcugaucgaggccgagcugaagugcuucggcaacaccgccguggccaagugcaacgagaagcacgacgaggaguucugcgacaugcugagacuguucgacuucaacaagcaggccaucagaagacugaagacccccgcccagaugagcauccagcugaucaacaaggccgugaacgcccugaucaacgaccagcugaucaugaagaaccaccugagagacaucaugggcauccccuacugcaacuacagcaaguacugcuaccugaaccacaccgugaccggcaagaccagccugcccagaugcugccuggugagcaacggcagcuaccugaacgagacccacuucagcgacgacaucgagcagcaggccgacaacaugaucaccgagcugcugcagaaggaguacaucgacagacagggcaagaccccccugggccugguggaccuguucguguucagcaccagcuucuaccugaucagcaucuuccugcaccuggugaagauccccacccacagacacguggugggcaagcccugccccaagccccacagacugaaccacaugggcaucugcagcugcggccuguacaagcaccccggcgugcccgugaaguggaagagaugaggacuagucccuguucccagagcccacuuuuuuuucuuuuuuugaaauaaaauagccugucuuucagaucuaaaaaaaaaaaaaaaaaaaaaaaaaaaaaaaaaaaaaaaaaaaaaaaaaaaaaaaaaaaaaaaaaaaaaaaaaaaaaaaaaaaaaaaaaaaaaaaaaaaa

SEQ ID NO: 25519 - RNA, 1740 nt, Artificial Sequence
  mRNA product Design a-2 (A100) comprising derived and/or modified sequence from LASV(Lassa virus/H.sapiens-wt/NGA/2015/ISTH_0543;Clade II)__AVO03639__GPCmut3 (opt4)
aggagaguccgcucagccagguugcagaagcggcuuagcguguguccuaaucuucucucugcguguagguaggccugugccgcaaacaagcuuaccaugggccagaucaucaccuucuuccaggaggugccccacgugaucgaggaggugaugaacaucgugcugaucgcccugagccugcuggccauccugaagggcaucuacaacguggccaccugcggccuguucggccuggugagcuuccugcugcugugcggcagaagcugcagcaccaccuacaagggcguguacgagcugcagacccuggagcuggacauggccaaccugaacaugaccaugccccugagcugcaccaagaacaacagccaccacuacaucauggugggcaacgagaccggccuggagcugacccugaccaacaccagcaucaucaaccacaaguucugcaaccugagcgacgcccacaagaagaaccuguacgaccacgcccugaugagcaucaucagcaccuuccaccugagcauccccaacuucaaccaguacgaggccaugagcugcgacuucaacggcggcaagaucagcgugcaguacaaccugagccacaccuacgccguggacgccgccaaccacugcggcaccaucgccaacggcgugcugcagaccuucaugagaauggccuggggcggcagcuacaucgcccuggacagcggcaagggcagcugggacugcaucaugaccagcuaccaguaccuggugauccagaacaccaccugggaggaccacugccaguucagcagacccagccccaucggcuaccugggccugcugagccagagaaccagagacaucuacaucagcagaagaagaagaggcaccuucaccuggacccugagcgacagcgagggcaacgagacccccggcggcuacugccugaccagauggaugcugaucgaggccgagcugaagugcuucggcaacaccgccguggccaagugcaacgagaagcacgacgaggaguucugcgacaugcugagacuguucgacuucaacaagcaggccaucagaagacugaagacccccgcccagaugagcauccagcugaucaacaaggccgugaacgcccugaucaacgaccagcugaucaugaagaaccaccugagagacaucaugggcauccccuacugcaacuacagcaaguacugcuaccugaaccacaccgugaccggcaagaccagccugcccagaugcugccuggugagcaacggcagcuaccugaacgagacccacuucagcgacgacaucgagcagcaggccgacaacaugaucaccgagcugcugcagaaggaguacaucgacagacagggcaagaccccccugggccugguggaccuguucguguucagcaccagcuucuaccugaucagcaucuuccugcaccuggugaagauccccacccacagacacaucaccggcaagcccugccccaagccccacagacugaaccacaugggcaucugcagcugcggccuguacaagcaccccggcgugcccgugaaguggaagagaugaggacuagucccuguucccagagcccacuuuuuuuucuuuuuuugaaauaaaauagccugucuuucagaucuaaaaaaaaaaaaaaaaaaaaaaaaaaaaaaaaaaaaaaaaaaaaaaaaaaaaaaaaaaaaaaaaaaaaaaaaaaaaaaaaaaaaaaaaaaaaaaaaaaaa

SEQ ID NO: 25520 - RNA, 1740 nt, Artificial Sequence
  mRNA product Design a-2 (A100) comprising derived and/or modified sequence from LASV(Lassa virus/H.sapiens-wt/NGA/2016/ISTH_0009;Clade II)__AVO03571__GPCmut3 (opt4)
aggagaguccgcucagccagguugcagaagcggcuuagcguguguccuaaucuucucucugcguguagguaggccugugccgcaaacaagcuuaccaugggccagaucaucaccuucuuccaggaggugccccacgugaucgaggaggugaugaacaucgugcugaucgcccugagccugcuggccauccugaagggcaucuacaacguggccaccugcggccugcugggccuggugagcuuccugcugcugugcggcagaagcugcagcaccaccuacaagggcguguacgagcugcagacccuggagcuggacauggccagccugaacaugaccaugccccugagcugcaccaagaacaacagccaccacuacaucauggugggcaacgagaccggccuggagcugacccugaccaacaccagcaucaucaaccacaaguucugcaaccugagcgacgcccacaagaagaaccuguacgaccacgcccugaugagcaucaucagcaccuuccaccugagcauccccaacuucaaccaguacgaggccaugagcugcgacuucaacggcggcagaaucagcgugcaguacaaccugagccacagcuacgccguggacgccgccaaccacugcggcaccaucgccaacggcgugcugcagaccuucaugagaauggccuggggcggcagcuacaucgcccuggacagcggcaagggcagcugggacugcaucaugaccagcuaccaguaccugaucauccagaacaccaccugggaggaccacugccaguucagcagacccagccccaucggcuaccugggccugcugagccagagaaccagagacaucuacaucagcagaagaagaagaggcaccuucaccuggacccugagcgacagcgagggcaacgagacccccggcggcuacugccugaccagauggaugcugaucgaggccgagcugaagugcuucggcaacaccgccguggccaagugcaacgagaagcacgacgaggaguucugcgacaugcugagacuguucgacuucaacaagcaggccaucagaagacugaagacccccgcccagaugagcauccagcugaucaacaaggccgugaacgcccugaucaacgaccagcugaucaugaagaaccaccugagagacaucaugggcauccccuacugcaacuacagcaaguacugcuaccugaaccacaccgugaccggcaagaccagccugcccagaugcugccuggugagcaacggcagcuaccugaacgagacccacuucagcgacgacaucgagcagcaggccgacaacaugaucaccgagcugcugcagaaggaguacaucgacagacagggcaagaccccccugggccugguggaccuguucguguucagcaccagcuucuaccugaucagcaucuuccugcaccuggugaagauccccacccacagacacaucaccggcaagcccugccccaagccccacagacugaaccacaugggcaucugcagcugcggccuguacaaccaccccggcgugcccgugaaguggaagagaugaggacuagucccuguucccagagcccacuuuuuuuucuuuuuuugaaauaaaauagccugucuuucagaucuaaaaaaaaaaaaaaaaaaaaaaaaaaaaaaaaaaaaaaaaaaaaaaaaaaaaaaaaaaaaaaaaaaaaaaaaaaaaaaaaaaaaaaaaaaaaaaaaaaaa

SEQ ID NO: 25521 - RNA, 1740 nt, Artificial Sequence
  mRNA product Design a-2 (A100) comprising derived and/or modified sequence from LASV(Lassa virus/H.sapiens-wt/NGA/2016/ISTH_0017;Clade II)__AVO03567__GPCmut3 (opt4)
aggagaguccgcucagccagguugcagaagcggcuuagcguguguccuaaucuucucucugcguguagguaggccugugccgcaaacaagcuuaccaugggccagaucaucaccuucuuccaggaggugccccacgugaucgaggaggugaugaacaucgugcugaucgcccugagccugcuggccauccugaagggcaucuacaacguggccaccugcggccuguucggccuggugagcuuccugcugcugugcggcagaagcugcagcaccaccuacaagggcguguacgagcugcagacccuggagcuggacauggccagccugaacaugaccaugccccugagcugcaccaagaacaacagccaccacuacaucauggugggcaacgagaccggccuggagcugacccugaccaacaccagcaucaucaaccacaaguucugcaaccugagcgacgcccacaagaagaaccuguacgaccacgcccugaugagcaucaucagcaccuuccaccugagcauccccaacuucaaccaguacgaggccaugagcugcgacuucaacggcggcaagaucagcgugcaguacaaccugagccacaccuacgccaucgacgccgccaaccacugcggcaccaucgccaacggcgugcugcagaccuucaugagaauggccuggggcggcagcuacaucgcccuggacagcggcaagggcagcugggacugcaucaugaccagcuaccaguaccugaucauccagaacaccaccugggaggaccacugccaguucagcagacccagccccaucggcuaccugggccugcugagccagagaaccagagacaucuacaucagcagaagaagaagaggcaccuucaccuggacccugagcgacagcgagggcaacgagacccccggcggcuacugccugaccagauggaugcugaucgaggccgagcugaagugcuucggcaacaccgccguggccaagugcaacgagaagcacgacgaggaguucugcgacaugcugagacuguucgacuucaacaagcaggccaucagaagacugaagacccccgcccagaugagcauccagcugaucaacaaggccgugaacgcccugaucaacgaccagcugaucaugaagaaccaccugagagacaucaugggcauccccuacugcaacuacagcaaguacugcuaccugaaccacaccgugaccggcaagaccagccugcccagaugcugccuggugagcaacggcagcuaccugaacgagacccacuucagcgacgacaucgagcagcaggccgacaacaugaucaccgagcugcugcagaaggaguacauggacagacagggcaagaccccccugggccugguggaccuguucguguucagcaccagcuucuaccugaucagcaucuuccugcaccuggugagaauccccacccacagacacgugaucggcaagcccugccccaagccccacagacugaaccacaugggcaucugcagcugcggccuguacaagcaccccggcgugcccgugaaguggaagagaugaggacuagucccuguucccagagcccacuuuuuuuucuuuuuuugaaauaaaauagccugucuuucagaucuaaaaaaaaaaaaaaaaaaaaaaaaaaaaaaaaaaaaaaaaaaaaaaaaaaaaaaaaaaaaaaaaaaaaaaaaaaaaaaaaaaaaaaaaaaaaaaaaaaaa

SEQ ID NO: 25522 - RNA, 1740 nt, Artificial Sequence
  mRNA product Design a-2 (A100) comprising derived and/or modified sequence from LASV(Lassa virus/H.sapiens-wt/NGA/2018/ISTH_0959;Clade II)__AVV65099__GPCmut3 (opt4)
aggagaguccgcucagccagguugcagaagcggcuuagcguguguccuaaucuucucucugcguguagguaggccugugccgcaaacaagcuuaccaugggccagaucaucaccuucuuccaggaggugccccacgugaucgaggaggugaugaacaucgugcugaucgcccugagccugcuggccauccugaagggcaucuacaacguggugaccugcggccuguucggccuggugagcuuccugcugcugugcggcagaagcugcagcaccaccuacaagggcguguacgagcugcagacccuggagcuggacauggccagccugaacaugaccaugccccugagcugcaccaagaacaacagccaccacuacaucauggugggcaacgagaccggccuggagcugacccugaccaacaccagcaucaucaaccacaaguucugcaaccugagcgacgcccacaagaagaaccuguacgaccacgcccugaugagcaucaucagcaccuuccaccugagcauccccaacuucaaccaguacgaggccaugagcugcgacuucaacggcggcaagaucagcgugcaguacaaccugagccacgccuacgccaucgacgccgccaaccacugcggcaccaucgccaacggcgugcugcagaccuucaugagaauggccuggggcggcagcuacaucgcccuggacagcggcaagggcagcugggacugcaucaugaccagcuaccaguaccugaucauccagaacaccaccugggaggaccacugccaguucagcagacccagccccaucggcuaccugggccugcugagccagagaaccagagacaucuacaucagcagaagaagaagaggcaccuucaccuggacccugagcgacagcgagggcaacgagacccccggcggcuacugccugaccagauggaugcugaucgaggccgagcugaagugcuucggcaacaccgccguggccaagugcaacgagaagcacgacgaggaguucugcgacaugcugagacuguucgacuucaacaagcaggccaucagaagacugaagacccccgcccagaugagcauccagcugaucaacaaggccgugaacgcccugaucaacgaccagcugaucaugaagaaccaccugagagacaucaugggcauccccuacugcaacuacagcaaguacugcuaccugaaccacaccgugaccggcaagaccagccugcccagaugcugccuggugagcaacggcagcuaccugaacgagacccacuucagcgacgacaucgagcagcaggccgacaacaugaucaccgagcugcugcagaaggaguacaucgacagacagggcaagaccccccugggccugguggaccuguucguguucagcaccagcuucuaccugaucagcaucuuccugcaccuggugaagauccccacccacagacacgugaucggcaagcccugccccaagccccacagacugaaccacaugggcaucugcagcugcggccuguacaagcaccccggcgugcccgugaaguggaagagaugaggacuagucccuguucccagagcccacuuuuuuuucuuuuuuugaaauaaaauagccugucuuucagaucuaaaaaaaaaaaaaaaaaaaaaaaaaaaaaaaaaaaaaaaaaaaaaaaaaaaaaaaaaaaaaaaaaaaaaaaaaaaaaaaaaaaaaaaaaaaaaaaaaaaa

SEQ ID NO: 25523 - RNA, 1740 nt, Artificial Sequence
  mRNA product Design a-2 (A100) comprising derived and/or modified sequence from LASV(LASV003-NIG-2008;Clade II)__AIT17580__GPCmut3 (opt4)
aggagaguccgcucagccagguugcagaagcggcuuagcguguguccuaaucuucucucugcguguagguaggccugugccgcaaacaagcuuaccaugggccagaucaucaccuucuuccaggaggugccccacgugaucgaggaggugaugaacaucgugcugaucgcccugagccugcuggccauccugaagggcaucuacaacguggccaccugcggccuguucggccuggugagcuuccugcugcugugcggcagaagcugcagcaccaccuacaagggcguguacgagcugcagacccuggagcuggacauggccagccugaacaugaccaugccccugagcugcaccaagaacaacagccaccacuacaucauggugggcaacgagaccggccuggagcugacccugaccaacaccagcaucaucaaccacaaguucugcaaccugagcgacgcccacaagaagaaccuguacgaccacgcccugaugagcaucaucagcaccuuccaccugagcauccccaacuucaaccaguacgaggccaugagcugcgacuucaacggcggcaagaucagcgugcaguacaaccugagccacaccuacgccguggacgccgccaaccacugcggcaccaucgccaacggcgugcugcagaccuucaugagaauggccuggggcggcagcuacaucgcccuggacagcggcaagggcagcugggacugcaucaugaccagcuaccaguaccugaucauccagaacaccaccugggaggaccacugccaguucagcagacccagccccaucggcuaccugggccugcugagccagagaaccagagacaucuacaucagcagaagaagaagaggcaccuucaccuggacccugagcgacagcgagagcaacgagacccccggcggcuacugccugaccagauggaugcugaucgaggccgagcugaagugcuucggcaacaccgccguggccaagugcaacgagaagcacgacgaggaguucugcgacaugcugagacuguucgacuucaacaagcaggccaucagaagacugaaggcccccgcccagaugagcauccagcugaucaacaaggccgugaacgcccugaucaacgaccagcugaucaugaagaaccaccugagagacaucaugggcauccccuacugcaacuacagcaaguacugcuaccugaaccacaccgugaccggcagaaccagccugcccagaugcugccuggugagcaacggcagcuaccugaacgagacccacuucagcgacgacaucgagcagcaggccgacaacaugaucaccgagcugcugcagaaggaguacauggacagacagggcaagaccccccugggccugguggaccuguucguguucagcaccagcuucuaccugaucagcaucuuccugcaccuggugaagauccccacccacagacacgugaucggcaagcccugccccaagccccacagacugaaccacaugggcaucugcagcugcggccuguacaagcaccccggcgugcccgugaaguggaagagaugaggacuagucccuguucccagagcccacuuuuuuuucuuuuuuugaaauaaaauagccugucuuucagaucuaaaaaaaaaaaaaaaaaaaaaaaaaaaaaaaaaaaaaaaaaaaaaaaaaaaaaaaaaaaaaaaaaaaaaaaaaaaaaaaaaaaaaaaaaaaaaaaaaaaa

SEQ ID NO: 25524 - RNA, 1740 nt, Artificial Sequence
  mRNA product Design a-2 (A100) comprising derived and/or modified sequence from LASV(LASV035-NIG-2009;Clade II)__AIT17588__GPCmut3 (opt4)
aggagaguccgcucagccagguugcagaagcggcuuagcguguguccuaaucuucucucugcguguagguaggccugugccgcaaacaagcuuaccaugggccagaucaucaccuucuuccaggaggugccccacgugaucgaggaggugaugaacaucgugcugaucgcccugagccugcuggccauccugaagggcaucuacaacguggccaccugcggccuguucggccuggugagcuuccugcugcugugcggcagaagcugcagcaccaccuacaagggcguguacgagcugcagacccuggagcuggacauggccagccugaacaugaccaugccccugagcugcaccaagaacaacagccaccacuacaucauggugggcaacgagaccggccuggagcugacccugaccaacaccagcaucaucaaccacaaguucugcaaccugagcgacgcccacaagaagaaccuguacgaccacgcccugaugagcaucaucagcaccuuccaccugagcauccccaacuucaaccaguacgaggccaugagcugcgacuucaacggcggcaagaucagcgugcaguacaaccugagccacgccuacgccguggacgccgccaaccacugcggcaccaucgccaacggcgugcugcagaccuucaugagaauggccuggggcggcagcuacaucgcccuggacagcggcaagggcagcugggacugcaucaugaccagcuaccaguaccugaucauccagaacaccaccugggaggaccacugccaguucagcagacccagccccaucggcuaccugggccugcugagccagagaaccagagacaucuacaucagcagaagaagaagaggcaccuucaccuggacccugagcgacagcgagggcaacgagacccccggcggcuacugccugaccagauggaugcugaucgaggccgagcugaagugcuucggcaacaccgccguggccaagugcaacgagaagcacgacgaggaguucugcgacaugcugagacuguucgacuucaacaagcaggccaucagaagacugaaggcccccgcccagaugagcauccagcugaucaacaaggccgugaacgcccugaucaacgaccagcugaucaugaagaaccaccugagagacaucaugggcauccccuacugcaacuacagcaaguacugcuaccugaaccacaccgugaccggcaagaccagccugcccagaugcugccuggugagcaacggcagcuaccugaacgagacccacuucagcgacgacaucgagcagcaggccgacaacaugaucaccgagcugcugcagaaggaguacaucgacagacagggcaagaccccccugggccugguggaccuguucguguucagcaccagcuucuaccugaucagcaucuuccugcaccuggugaagauccccacccacagacacgugaucggcaagcccugccccaagccccacagacugaaccacaugggcaucugcagcugcggccuguacaagcaccccggcgugcccgugaaguggaagagaugaggacuagucccuguucccagagcccacuuuuuuuucuuuuuuugaaauaaaauagccugucuuucagaucuaaaaaaaaaaaaaaaaaaaaaaaaaaaaaaaaaaaaaaaaaaaaaaaaaaaaaaaaaaaaaaaaaaaaaaaaaaaaaaaaaaaaaaaaaaaaaaaaaaaa

SEQ ID NO: 25525 - RNA, 1740 nt, Artificial Sequence
  mRNA product Design a-2 (A100) comprising derived and/or modified sequence from LASV(LASV1000-NIG-2009;Clade II)__AIT17782__GPCmut3 (opt4)
aggagaguccgcucagccagguugcagaagcggcuuagcguguguccuaaucuucucucugcguguagguaggccugugccgcaaacaagcuuaccaugggccagaucaucaccuucuuccaggaggugccccacgugaucgaggaggugaugaacaucgugcugaucgcccugagccugcuggccauccugaagggcaucuacaacguggccaccugcggccuguucggccuggugagcuuccugcugcugugcggcagaagcugcagcaccaccuacaagggcguguacgagcugcagacccuggagcuggacauggccagccugaacaugaccaugccccugagcugcaccaagaacaacagccaccacuacaucauggugggcaacgagaccggccuggagcugacccugaccaacaccagcaucaucaaccacaaguucugcaaccugagcgacgcccacaagaagaaccuguacgaccacgcccugaugagcaucaucagcaccuuccaccugagcauccccaacuucaaccaguacgaggccaugagcugcgacuucaacggcggcaagaucagcgugcaguacaaccugagccacaccuacgccguggacgccgccaaccacugcggcaccaucgccaacggcgugcugcagaccuucaugagaauggccuggggcggcagcuacaucgcccuggacagcggcaagggcagcugggacugcaucaugaccagcuaccaguaccugaucauccagaacaccaccugggaggaccacugccaguucagcagacccagccccaucggcuaccugggccugcugagccagagaaccagagacaucuacaucagcagaagaagaagaggcaccuucaccuggacccugagcgacagcgagggcaacgagacccccggcggcuacugccugaccagauggaugcugaucgaggccgagcugaagugcuucggcaacaccgccguggccaagugcaacgagaagcacgacgaggaguucugcgacaugcugagacuguucgacuucaacaagcaggccaucaagagacugaagacccccgcccagaugagcauccagcugaucaacaaggccgugaacgcccugaucaacgaccagcugaucaugaagaaccaccugagagacaucaugggcauccccuacugcaacuacagcaaguacugcuaccugaaccacaccgugaccggcaagaccagccugcccagaugcugccuggugagcaacggcagcuaccugaacgagacccacuucagcgacgacaucgagcagcaggccgacaacaugaucaccgagcugcugcagaaggaguacaucgacagacagggcaagaccccccugggccugguggaccuguucguguucagcaccagcuucuaccugaucagcaucuuccugcaccuggugaagauccccacccacagacacguggugggcaagcccugccccaagccccacagacugaaccacaugggcaucugcagcugcggccuguacaagcaccccggcgugcccgugaaguggaagagaugaggacuagucccuguucccagagcccacuuuuuuuucuuuuuuugaaauaaaauagccugucuuucagaucuaaaaaaaaaaaaaaaaaaaaaaaaaaaaaaaaaaaaaaaaaaaaaaaaaaaaaaaaaaaaaaaaaaaaaaaaaaaaaaaaaaaaaaaaaaaaaaaaaaaa

SEQ ID NO: 25526 - RNA, 1740 nt, Artificial Sequence
  mRNA product Design a-2 (A100) comprising derived and/or modified sequence from LASV(LASV221-NIG-2010;Clade II)__AIT17624__GPCmut3 (opt4)
aggagaguccgcucagccagguugcagaagcggcuuagcguguguccuaaucuucucucugcguguagguaggccugugccgcaaacaagcuuaccaugggccagaucaucaccuucuuccaggaggugccccacgugaucgaggaggugaugaacaucgugcugaucgcccugagccugcuggccauccugaagggcaucuacaacguggccaccugcggccuguucggccuggugagcuuccugcugcugugcggcagaagcugcagcaccaccuacaagggcguguacgagcugcagacccuggagcuggacauggccagccugaacaugaccaugccccugagcugcaccaagaacaacagccaccacuacaucauggugggcaacgagaccggccuggagcugacccugaccaacaccagcaucaucaaccacaaguucugcaaccugagcgacgcccacaagaagaaccuguacgaccacgcccugaugagcaucaucagcaccuuccaccugagcauccccaacuucaaccaguacgaggccaugagcugcgacuucaacggcggcaagaucagcgugcaguacaaccugagccacaccuacgccaucgacgccgccaaccacugcggcaccaucgccaacggcgugcugcagaccuucaugagaauggccuggggcggcagcuacaucgcccuggacagcggcaagggcagcugggacugcaucaugaccagcuaccaguaccugaucauccagaacaccaccugggaggaccacugccaguucagcagacccagccccaucggcuaccugggccugcugagccagagaaccagagacaucuacaucagcagaagaagaagaggcaccuucaccuggacccugagcgacagcgagggcaacgagacccccggcggcuacugccugaccagauggaugcugaucgaggccgagcugaagugcuucggcaacaccgccguggccaagugcaacgagaagcacgacgaggaguucugcgacaugcugagacuguucgacuucaacaagcaggccaucagaagacugaagacccccgcccagaugagcauccagcugaucaacaaggccgugaacgcccugaucaacgaccagcugaucaugaagaaccaccugagagacaucaugggcauccccuacugcaacuacagcaaguacugcuaccugaaccacaccgugaccggcaagaccagccugcccagaugcugccuggugagcaacggcagcuaccugaacgagacccacuucagcgacgacaucgagcagcaggccgacaacaugaucaccgagaugcugcagaaggaguacauggacagacagggcaagaccccccugggccugguggaccuguucguguucagcaccagcuucuaccugaucagcaucuuccugcaccuggugaagauccccacccacagacacgugaucggcaagcccugccccaagccccacagacugaaccacaugggcaucugcagcugcggccuguacaagcaccccggcgugcccgugaaguggaagagaugaggacuagucccuguucccagagcccacuuuuuuuucuuuuuuugaaauaaaauagccugucuuucagaucuaaaaaaaaaaaaaaaaaaaaaaaaaaaaaaaaaaaaaaaaaaaaaaaaaaaaaaaaaaaaaaaaaaaaaaaaaaaaaaaaaaaaaaaaaaaaaaaaaaaa

SEQ ID NO: 25527 - RNA, 1740 nt, Artificial Sequence
  mRNA product Design a-2 (A100) comprising derived and/or modified sequence from LASV(LASV237-NIG-2010;Clade II)__AIT17638__GPCmut3 (opt4)
aggagaguccgcucagccagguugcagaagcggcuuagcguguguccuaaucuucucucugcguguagguaggccugugccgcaaacaagcuuaccaugggccagaucaucaccuucuuccaggaggugccccacgugaucgaggaggugaugaacaucgugcugaucgcccugagccugcuggccauccugaagggcaucuacaacguggccaccugcggccuguucggccuggugagcuuccugcugcugugcggcagaagcugcagcaccaccuacaagggcguguacgagcugcagacccuggagcuggacauggccagccugaacaugaccaugccccugagcugcaccaagaacaacagccaccacuacaucauggugggcaacgagaccggccuggagcugacccugaccaacaccagcaucaucaaccacaaguucugcaaccugagcgacgcccacaagaaggaccuguacgaccacgcccugaugagcaucaucagcaccuuccaccugagcauccccaacuucaaccaguacgaggccaugagcugcgacuucaacggcggcaagaucagcgugcaguacaaccugagccacaccuacgccguggacgccgccaaccacugcggcaccaucgccaacggcgugcugcagaccuucaugagaauggccuggggcggcagcuacaucgcccuggacagcggcaagggcagcugggacugcaucaugaccagcuaccaguaccugaucauccagaacaccaccugggaggaccacugccaguucagcagacccagccccaucggcuaccugggccugcugagccagagaaccagagacaucuacaucagcagaagaagaagaggcaccuucaccuggacccugagcgacagcgagggcaacgagacccccggcggcuacugccugaccagauggaugcugaucgaggccgagcugaagugcuucggcaacaccgccguggccaagugcaacgagaagcacgacgaggaguucugcgacaugcugagacuguucgacuucaacaagcaggccaucagaagacugaagacccccgcccagaugagcauccagcugaucaacaaggccgugaacgcccugaucaacgaccagcugaucaugaagaaccaccugagagacaucaugggcauccccuacugcaacuacagcaaguacugcuaccugaaccacaccgugaccggcaagaccagccugcccagaugcugccuggugagcaacggcagcuaccugaacgagacccacuucagcgacgacaucgagcagcaggccgacaacaugaucaccgagcugcugcagaaggaguacauggacagacagggcaagaccccccugggccugguggaccuguucguguucagcaccagcuucuaccugaucagcaucuuccugcaccugaucaagauccccacccacagacacaucaccggcaagcccugccccaagccccacagacugaaccacaugggcaucugcagcugcggccuguacaagcaccccggcgugcccgugaaguggaagagaugaggacuagucccuguucccagagcccacuuuuuuuucuuuuuuugaaauaaaauagccugucuuucagaucuaaaaaaaaaaaaaaaaaaaaaaaaaaaaaaaaaaaaaaaaaaaaaaaaaaaaaaaaaaaaaaaaaaaaaaaaaaaaaaaaaaaaaaaaaaaaaaaaaaaa

SEQ ID NO: 25528 - RNA, 1740 nt, Artificial Sequence
  mRNA product Design a-2 (A100) comprising derived and/or modified sequence from LASV(LASV253-NIG-2011;Clade II)__AIT17670__GPCmut3 (opt4)
aggagaguccgcucagccagguugcagaagcggcuuagcguguguccuaaucuucucucugcguguagguaggccugugccgcaaacaagcuuaccaugggccagaucaucaccuucuuccaggaggugccccacgugaucgaggaggugaugaacaucgugcugaucgcccugagccugcuggccauccugaagggcaucuacaacguggccaccugcggccuguucggccuggugagcuuccugcugcugugcggcagaagcugcagcaccaccuacaagggcguguacgagcugcagacccuggagcuggacauggccagccugaacaugaccaugccccugagcugcaccaagaacaacagccaccacuacaucauggugggcaacgagaccggccuggagcugacccugaccaacaccagcaucaucaaccacaaguucugcaaccugagcgacgcccacaagaagaaccuguacgaccacgcccugaugagcaucaucagcaccuuccaccugagcauccccaacuucaaccaguacgaggccaugagcugcgacuucaacggcggcaagaucagcgugcaguacaaccugagccacaccuacgccguggacgccgccaaccacugcggcaccaucgccaacggcgugcugcagaccuucaugagaauggccuggggcggcagcuacaucgcccuggacagcggcaagggcagcugggacugcaucaugaccagcuaccaguaccugaucauccagaacaccaccugggaggaccacugccaguucagcagacccagccccaucggcuaccugggccugcugagccagagaaccagagacaucuacaucagcagaagaagaagaggcaccuucaccuggacccugagcgacagcgagggcaacgagacccccggcggcuacugccugaccagauggaugcugaucgaggccgagcugaagugcuucggcaacaccgccguggccaagugcaacgagaagcacgacgaggaguucugcgacaugcugagacuguucgacuucaacaagcaggccaucagaagacugaaggcccccgcccagaugagcauccagcugaucaacaaggccgugaacgcccugaucaacgaccagcugaucaugaagaaccaccugagagacaucaugggcauccccuacugcaacuacagcaaguacugcuaccugaaccacaccgugaccggcagaaccagccugcccagaugcugccuggugagcaacggcagcuaccugaacgagacccacuucagcgacgacaucgagcagcaggccgacaacaugaucaccgagcugcugcagaaggaguacaucgacagacagggcaagaccccccugggccugguggaccuguucguguucagcaccagcuucuaccugaucagcaucuuccugcaccuggugaagauccccacccacagacacaucaucggcaagcccugccccaagccccacagacugaaccacaugggcaucugcagcugcggccuguacaagcaccccggcgugcccgugaaguggaagagaugaggacuagucccuguucccagagcccacuuuuuuuucuuuuuuugaaauaaaauagccugucuuucagaucuaaaaaaaaaaaaaaaaaaaaaaaaaaaaaaaaaaaaaaaaaaaaaaaaaaaaaaaaaaaaaaaaaaaaaaaaaaaaaaaaaaaaaaaaaaaaaaaaaaaa

SEQ ID NO: 25529 - RNA, 1740 nt, Artificial Sequence
  mRNA product Design a-2 (A100) comprising derived and/or modified sequence from LASV(LASV254-NIG-2011;Clade II)__AIT17674__GPCmut3 (opt4)
aggagaguccgcucagccagguugcagaagcggcuuagcguguguccuaaucuucucucugcguguagguaggccugugccgcaaacaagcuuaccaugggccagaucaucaccuucuuccaggaggugccccacgugaucgaggaggugaugaacaucgugcugaucgcccugagccugcuggccauccugaagggcaucuacaacguggccaccugcggccuguucggccuggugagcuuccugcugcugugcggcagaagcugcagcaccaccuacaagggcguguacgagcugcagacccuggagcuggacaugaccaaccugaacaugaccaugccccugagcugcaccaagaacaacagccaccacuacaucauggugggcaacgagaccggccuggagcugacccugaccaacaccagcaucaucaaccacaaguucugcaaccugagcgacgcccacaagaagaaccuguacaaccacgcccugaugagcaucaucagcaccuuccaccugagcauccccaacuucaaccaguacgaggccaugagcugcgacuucaacggcggcaagaucagcgugcaguacaaccugagccacagcuacgccguggacgccgccaaccacugcggcaccaucgccaacggcgugcugcagaccuucaugagaauggccuggggcggcagcuacaucgcccuggacagcggcaagggcaacugggacugcaucaugaccagcuaccaguaccugaucauccagaacaccaccugggaggaccacugccaguucagcagacccagccccaucggcuaccugggccugcugagccagagaaccagagacaucuacaucagcagaagaagaagaggcaccuucaccuggacccugagcgacagcgagggcaacgagacccccggcggcuacugccugaccagauggaugcugaucgaggccgagcugaagugcuucggcaacaccgccguggccaagugcaacgagaagcacgacgaggaguucugcgacaugcugagacuguucgacuucaacaagcaggccaucagaagacugaagacccccgcccaggccaacauccagcugaucaacaaggccgugaacgcccugaucaacgaccagcugaucaugaagaaccaccugagagacaucaugggcauccccuacugcaacuacagcaaguacugcuaccugaaccacaccgugaccggcaagaccagccugcccagaugcugccuggugagcaacggcagcuaccugaacgagacccacuucagcgacgacaucgagcagcaggccgacaacaugaucaccgagcugcugcagaaggaguacauggacagacagggcaagaccccccugggccugguggaccuguucguguucagcaccagcuucuaccugaucagcaucuuccugcaccuggugaagauccccacccacagacacgugaucggcaagcccugccccaagccccacagacugaaccacaugggcaucugcagcugcggccuguacaagcaccccggcgugcccgugaaguggaagagaugaggacuagucccuguucccagagcccacuuuuuuuucuuuuuuugaaauaaaauagccugucuuucagaucuaaaaaaaaaaaaaaaaaaaaaaaaaaaaaaaaaaaaaaaaaaaaaaaaaaaaaaaaaaaaaaaaaaaaaaaaaaaaaaaaaaaaaaaaaaaaaaaaaaaa

SEQ ID NO: 25530 - RNA, 1740 nt, Artificial Sequence
  mRNA product Design a-2 (A100) comprising derived and/or modified sequence from LASV(Nig08-A19;Clade III)__ADU56618__GPCmut3 (opt4)
aggagaguccgcucagccagguugcagaagcggcuuagcguguguccuaaucuucucucugcguguagguaggccugugccgcaaacaagcuuaccaugggccagaucgugaccuucuuccaggaggugccccacgugaucgaggaggugaugaacaucgugcugaucgcccugagcauccuggccauccugaagggccuguacaacaucgccaccugcggccugaucggccuggugaccuuccugcugcugagcggcagaagcugcagcaugaccuacaagggcguguacgagcugcagacccuggagcugaacaugaacacccugaacaugaccaugccccugagcugcaccaagaacaacagccaccacuacaucauggugggcaacgagaccggccuggagcugacccugaccaacaccagccugcugcaccacaaguucugcaaccugagcgacgcccacaagaagaaccuguacgaccacacccugaugagcaucaucagcaccuuccaccugagcauccccaacuucaaccaguacgaggccaugagcugcgacuucaacggcggcaagaucaccgugcaguacaaccugagccacagcuacgccaucgacgccgccaaccacugcggcaccguggccaacggcgugcugcagaccuucaugagaauggccuggggcggcagcuacaucgcccuggacagcggcagaggcaagugggacugcaucaugaccagcuaccaguaccugaucauccagaacaccaccugggaggaccacugccaguucagcagacccagccccaucggcuaccugggccugcugagccagagaaccagagacaucuacaucagcagaagaagaagaggcaccuucaccuggacccugagcgacagcgagggcaacgagacccccggcggcuacugccugaccagauggaugcugaucgaggccgagcugaagugcuucggcaacaccgccguggccaagugcaacgagaagcacgacgaggaguucugcgacaugcugagacuguucgacuucaacaagcaggccaucagaagacugaaggcccccgcccagaugagcauccagcugaucaacaaggccgugaacgcccugaucaacgaccagcugaucaugaagaaccaccugagagacaucaugggcauccccuacugcaacuacagcaaguacugcuaccugaaccacaccagcaccggcagaaccagccugcccagaugcugccuggugagcaacggcagcuaccugaacgagacccacuucagcgacgacaucgagcagcaggccgacaacaugaucaccgagaugcugcagaaggaguaccuggacagacagggcaagaccccccugggccugguggaccuguucguguucagcaccagcuucuaccugaucagcaucuuccugcaccuggugaagauccccacccacagacacaucgugggcaagcccugccccaagccccacagacugaaccacaugggcaucugcagcugcggccuguacaagcagcccggcgugcccgugagauggaagagaugaggacuagucccuguucccagagcccacuuuuuuuucuuuuuuugaaauaaaauagccugucuuucagaucuaaaaaaaaaaaaaaaaaaaaaaaaaaaaaaaaaaaaaaaaaaaaaaaaaaaaaaaaaaaaaaaaaaaaaaaaaaaaaaaaaaaaaaaaaaaaaaaaaaaa

SEQ ID NO: 25531 - RNA, 1743 nt, Artificial Sequence
  mRNA product Design a-2 (A100) comprising derived and/or modified sequence from LASV(G1180-SLE-2010;Clade IV)__AIT17168__GPCmut3 (opt4)
aggagaguccgcucagccagguugcagaagcggcuuagcguguguccuaaucuucucucugcguguagguaggccugugccgcaaacaagcuuaccaugggccagaucgugaccuucuuccaggaggugccccacgugaucgaggaggugaugaacaucgugcugaucgcccugagcauccuggccgugcugaagggccuguacaacuucgccaccugcggccuggugggccugcugaccuuccugcugcugugcggcagaagcugcaccgccagcagauacaagggcguguacgagcugcagacccuggagcugaacauggagacccugaacaugaccaugccccugagcugcaccaagaacaacagccaccacuacaucauggugggcaacgagaccggccuggagcugacccugaccaacaccagcaucaucaaccacaaguucugcaaccugagcgacgcccacaagaagaaccuguacgaccacgcccugaugagcaucaucagcaccuuccaccugagcauccccaacuucaaccaguacgaggccaugagcugcgacuucaacggcggcaagaucagcgugcaguacaaccugagccacagcuacgccggcgacgccgccaaccacugcggcaccguggccaacggcgugcugcagaccuucaugagaauggccuggggcggcagcuacaucgcccuggacagcggccacggcagcugggacugcaucaugaccagcuaccaguaccugaucauccagaacaccaccugggaggaccacugccaguucagcagacccagccccaucggcuaccugggccugcugagccagagaaccagagacaucuacaucagcagaagaagaagaggcaccuucaccuggacccugagcgacagcgagggcaaggacacccccggcggcuacugccugaccagauggaugcugaucgaggccgagcugaagugcuucggcaacaccgccguggccaagugcaacgagaagcacgacgaggaguucugcgacaugcugagacuguucgacuucaacaagcaggccauccagagacugaaggcccccgcccagaugagcauccagcugaucaacaaggccgugaacgcccugaucaacgaccagcugaucaugaagaaccaccugagagacaucaugggcauccccuacugcaacuacagcaaguacugcuaccugaaccacaccaccaccggcaagaccagccugcccaagugcugccuggugagcaacggcagcuaccugaacgagacccacuucagcgacgacaucgagcagcaggccgacaacaugaucaccgagaugcugcagaaggaguacauggagagacagggcaagaccccccugggccugguggaccuguucguguucagcaccagcuucuaccugaucagcaucuuccugcaccuggugaagauccccacccacagacacaucgugggcaagagcugccccaagccccacagacugaaccacaugggcaucugcagcugcggccuguacaagcagcccggcgugcccgugaaguggaagagaugaggacuagucccuguucccagagcccacuuuuuuuucuuuuuuugaaauaaaauagccugucuuucagaucuaaaaaaaaaaaaaaaaaaaaaaaaaaaaaaaaaaaaaaaaaaaaaaaaaaaaaaaaaaaaaaaaaaaaaaaaaaaaaaaaaaaaaaaaaaaaaaaaaaaa

SEQ ID NO: 25532 - RNA, 1743 nt, Artificial Sequence
  mRNA product Design a-2 (A100) comprising derived and/or modified sequence from LASV(G1442-SLE-2011;Clade IV)__AIT17180__GPCmut3 (opt4)
aggagaguccgcucagccagguugcagaagcggcuuagcguguguccuaaucuucucucugcguguagguaggccugugccgcaaacaagcuuaccaugggccagaucgugaccuucuuccaggaggugccccacgugaucgaggaggugaugaacaucgugcugaucgcccugagcauccuggccgugcugaagggccuguacaacguggccaccugcggccugaucggccuggugaccuuccugcugcugugcggcagaagcugcaccaccacccuguacaagggcguguacgagcugcagacccuggagcugaacauggagacccugaacaugaccaugccccugagcugcaccaagaacaacagccaccacuacaucagagugggcaacgagaccggccuggagcugacccugaccaacaccagcaucaucaaccacaaguucugcaaccugagcgacgcccacaagaagaaccuguacgaccacgcccugaugagcaucaucagcaccuuccaccugagcauccccaacuucaaccaguacgaggccaugagcugcgacuucaacggcggcaagaucagcgugcaguacaaccugagccacagcuacgccggcgacgccgccaaccacugcggcaccguggccaacggcgugcugcagaccuucaugagaauggccuggggcggcagcuacaucgcccuggacagcggcagaggcaacugggacugcaucaugaccagcuaccaguaccugaucauccagaacaccaccugggacgaccacugccaguucagcagacccagccccaucggcuaccugggccugcugagccagagaaccagagacguguacaucagcagaagaagaagaggcaccuucaccuggacccugagcgacagcgagggcaaggacacccccggcggcuacugccugaccagauggaugcugaucgaggccgagcugaagugcuucggcaacaccgccguggccaagugcaacgagaagcacgacgaggaguucugcgacaugcugagacuguucgacuucaacaagcaggccauccagagacugaaggcccccgcccagaugagcauccagcugaucaacaaggccgugaacgcccugaucaacgaccagcugaucaugaagaaccaccugagagacaucaugggcauccccuacugcaacuacagcaaguacugcuaccugaacaacaccgccaccggcaagaccagccugcccaagugcugccugaucagcaacggcagcuaccugaacgagacccacuucagcgacgacaucgagcaggaggccgacaacaugaucaccgagaugcugcagaaggaguacauggagagacagggcaagaccccccugggccugguggaccuguucguguucagcaccagcuucuaccugaucagcaucuuccugcaccuggugaagauccccacccacagacacaucgugggcaagagcugccccaagccccacagacugaaccacaugggcaucugcagcugcggccuguacaagcagcccggcgugcccgugagauggaagagaugaggacuagucccuguucccagagcccacuuuuuuuucuuuuuuugaaauaaaauagccugucuuucagaucuaaaaaaaaaaaaaaaaaaaaaaaaaaaaaaaaaaaaaaaaaaaaaaaaaaaaaaaaaaaaaaaaaaaaaaaaaaaaaaaaaaaaaaaaaaaaaaaaaaaa

SEQ ID NO: 25533 - RNA, 1743 nt, Artificial Sequence
  mRNA product Design a-2 (A100) comprising derived and/or modified sequence from LASV(G3010-SLE-2013;Clade IV)__AIT17344__GPCmut3 (opt4)
aggagaguccgcucagccagguugcagaagcggcuuagcguguguccuaaucuucucucugcguguagguaggccugugccgcaaacaagcuuaccaugggccagaucgugaccuucuuccaggaggugccccacgugaucgaggaggugaugaacaucgugcugaucgcccugagcauccuggccgugcugaagggccuguacaacuucgccaccugcggccuggugggccuggugaccuuccugcugcugugcggcagaagcugcaccaccagccuguacaagggcguguacgagcugcagacccuggagcugaacauggagacccugaacaugaccaugccccugagcugcaccaagaacaacagccaccacuacaucauggugggcaacgagaccggccuggagcugacccugaccaacaccagcaucaucaaccacaaguucugcaaccugagcgacgcccacaagaagaaccuguacaaccacgcccugaugagcaucaucagcaccuuccaccugagcauccccaacuucaaccaguacgaggccaugagcugcgacuucaacggcggcaagaucagcgugcaguacaaccugagccacagcuacgccggcgacgccgccagccacugcggcaccguggccaacggcgugcugcagaccuucaugagaauggccuggggcggcagcuacaucgcccuggacagcggcuacggcaagugggacugcaucaugaccagcuaccaguaccugaucauccagaacaccaccugggaggaccacugccaguucagcagacccagccccaucggcuaccugggccugcugagccagagaaccagagacaucuacaucagcagaagaagaagaggcaccuucaccuggacccugagcgacagcgagggcaaggacacccccggcggcuacugccugaccagauggaugcugaucgaggccgagcugaagugcuucggcaacaccgccguggccaagugcaacgagaagcacgacgaggaguucugcgacaugcugagacuguucgacuucaacaagcaggccauccagagacugaagacccccgcccagaugagcauccagcugaucaacaaggccgugaacgcccugaucaacgaccagcugaucaugaagaaccaccugagagacaucaugggcauccccuacugcaacuacagcaaguacugcuaccugaaccacaccaccaccggcaagaccagccugcccaagugcugccuggugagcaacggcagcuaccugaacgagacccacuucagcgacgacaucgagcagcaggccgacaacaugaucaccgagaugcugcagaaggaguacauggagagacagggcaagaccccccugggccugguggaccuguucguguucagcaccagcuucuaccugaucagcaucuuccugcaccuggugaagauccccacccacagacacaucgugggcaagagcugccccaagccccacagacugaaccacaugggcaucugcagcugcggccuguacaagcagcccggcgugcccgugagauggaagagaugaggacuagucccuguucccagagcccacuuuuuuuucuuuuuuugaaauaaaauagccugucuuucagaucuaaaaaaaaaaaaaaaaaaaaaaaaaaaaaaaaaaaaaaaaaaaaaaaaaaaaaaaaaaaaaaaaaaaaaaaaaaaaaaaaaaaaaaaaaaaaaaaaaaaa

SEQ ID NO: 25534 - RNA, 1743 nt, Artificial Sequence
  mRNA product Design a-2 (A100) comprising derived and/or modified sequence from LASV(G502-SLE-2009;Clade IV)__AIT17126__GPCmut3 (opt4)
aggagaguccgcucagccagguugcagaagcggcuuagcguguguccuaaucuucucucugcguguagguaggccugugccgcaaacaagcuuaccaugggccagaucgugaccuucuuccaggaggugccccacgugaucgaggaggugaugaacaucgugcugaucgcccugagcauccuggccgugcugaagggccuguacaacuucgccaccugcggccuggugggccugcugaccuuccugcugcugugcggcagaagcugcaccaccggccuguacaagggcguguacgagcugcagacccuggagcugaacauggagacccugaacaugaccaugccccugagcugcaccaagaacaacagccaccacuacaucauggugggcaacgagaccggccuggagcugacccugaccaacaccagcaucaucaaccacaaguucugcaaccugagcgacgcccacaagaagaaccuguacgaccacgcccugaugagcaucaucagcaccuuccaccugagcauccccaacuucaaccaguacgaggccaugagcugcgacuucaacggcggcaagaucagcgugcaguacaaccugagccacagcuacgccggcgacgccgccgaccacugcggcaccguggccaacggcgugcugcagaccuucaugagaauggccuggggcggcagcuacaucgcccuggacagcggcagaggcagaugggacugcaucaugaccagcuaccaguaccugaucauccagaacaccaccugggaggaccacugccaguucagcagacccagccccaucggcuaccugggccugcugagccagagaaccagagacaucuacaucagcagaagaagaagaggcaccuucaccuggacccugagcgacagcgagggcaaggacacccccggcggcuacugccugaccagauggaugcugaucgaggccgagcugaagugcuucggcaacaccgccguggccaagugcaacgagaagcacgacgaggaguucugcgacaugcugagacuguucgacuucaacaagcaggccauccagagacugaaggcccccgcccagaugagcauccagcugaucaacaaggccgugaacgcccugaucaacgaccagcuggugaugaagaaccaccugagagacaucaugggcauccccuacugcaacuacagcagauacugcuaccugaaccacaccaccaccggcagaaccagccugcccaagugcugccuggugagcaacggcagcuaccugaacgagacccacuucagcgacgacaucgagcagcaggccgacaacaugaucaccgagaugcugcagaaggaguacauggagagacagggcaagaccccccugggccugguggaccuguucguguucagcaccagcuucuaccugaucagcaucuuccugcaccuggugaagauccccacccacagacacaucgugggcaagagcugccccaagccccacagacugaaccacaugggcaucugcagcugcggccuguacaagcagcccggcgugcccgugaaguggaagagaugaggacuagucccuguucccagagcccacuuuuuuuucuuuuuuugaaauaaaauagccugucuuucagaucuaaaaaaaaaaaaaaaaaaaaaaaaaaaaaaaaaaaaaaaaaaaaaaaaaaaaaaaaaaaaaaaaaaaaaaaaaaaaaaaaaaaaaaaaaaaaaaaaaaaa

SEQ ID NO: 25535 - RNA, 1743 nt, Artificial Sequence
  mRNA product Design a-2 (A100) comprising derived and/or modified sequence from LASV(G733-SLE-2010;Clade IV)__AIT17154__GPCmut3 (opt4)
aggagaguccgcucagccagguugcagaagcggcuuagcguguguccuaaucuucucucugcguguagguaggccugugccgcaaacaagcuuaccaugggccagaucgugaccuucuuccaggaggugccccacgugaucgaggaggugaugaacaucgugcugaucgcccugagcauccuggccgugcugaagggccuguacaacuucgccaccugcggcaucgugggccuggugagcuuccugcugcugugcggcagaagcugcaccaccagccuguacaagggcguguacgagcugcagacccuggagcugaacauggagacccugaacaugaccaugccccugagcugcaccaagaacaacagccaccacuacaucauggugggcaacgagaccggccuggagcugacccugaccaacaccagcaucaucaaccacaaguucugcaaccugagcgacgcccacaagaagaaccuguacgaccacgcccugaugagcaucaucagcaccuuccaccugagcauccccaacuucaaccaguacgaggccaugagcugcgacuucaacggcggcaagaucagcgugcaguacaaccugagccacagcuacgccggcgacgccgccaaccacugcggcaccaucgccaacggcgugcugcagaccuucaugagaauggccuggggcggcagcuacaucgcccuggacagcggcagagacagaugggacugcaucaugaccagcuaccaguaccugaucauccagaacaccaccugggaggaccacugccaguucagcagacccagccccaucggcuaccugggccugcugagccagagaaccagagacaucuacaucagcagaagaagaagaggcaccuucaccuggacccugagcgacagcgagggcaaggacacccccggcggcuacugccugaccagauggaugcugaucgaggccgagcugaagugcuucggcaacaccgccguggccaagugcaacgagaagcacgacgaggaguucugcgacaugcugagacuguucgacuucaacaagcaggccauccagagacugaaggcccccgcccagaugagcauccagcugaucaacaaggccgugaacgcccugaucaacgaccagcugaucaugaagaaccaccugagagacaucaugggcauccccuacugcaacuacagcaaguacugcuaccugaaccacaccaccaccggcaagaccagccugcccaagugcugccuggugagcaacggcagcuaccugaacgagacccacuucagcgacgacaucgagcagcaggccgacaacaugaucaccgagaugcugcagaaggaguacauggagagacagggcaagaccccccugggccugguggaccuguucguguucagcaccagcuucuaccugaucagcaucuuccugcaccuggugaagauccccacccacagacacguggugggcaagagcugccccaagccccacagacugaaccacaugggcaucugcagcugcggccuguacggccagcccggcgugcccgugaaguggaagagaugaggacuagucccuguucccagagcccacuuuuuuuucuuuuuuugaaauaaaauagccugucuuucagaucuaaaaaaaaaaaaaaaaaaaaaaaaaaaaaaaaaaaaaaaaaaaaaaaaaaaaaaaaaaaaaaaaaaaaaaaaaaaaaaaaaaaaaaaaaaaaaaaaaaaa

SEQ ID NO: 25536 - RNA, 1743 nt, Artificial Sequence
  mRNA product Design a-2 (A100) comprising derived and/or modified sequence from MOPV/LASV reassortant(IGS-1;Clade IV)__AFY05576__GPCmut3 (opt4)
aggagaguccgcucagccagguugcagaagcggcuuagcguguguccuaaucuucucucugcguguagguaggccugugccgcaaacaagcuuaccaugggccagaucgugaccuucuuccaggaggugccccacgugaucgaggaggugaugaacaucgugcugaucgcccugagcgugcuggccgugcugaagggccuguacaacuucgccaccugcggccuggugggccuggugaccuuccugcugcugugcggcagaagcugcaccaccagccuguacaagggcguguacgagcugcagacccuggagcugaacauggagacccugaacaugaccaugccccugagcugcaccaagaacaacagccaccacuacaucauggugggcaacgagaccggccuggagcugacccugaccaacaccagcaucaucaaccacaaguucugcaaccugagcgacgcccacaagaagaaccuguacgaccacgcccugaugagcaucaucagcaccuuccaccugagcauccccaacuucaaccaguacgaggccaugagcugcgacuucaacggcggcaagaucagcgugcaguacaaccugagccacagcuacgccggcgacgccgccaaccacugcggcaccguggccaacggcgugcugcagaccuucaugagaauggccuggggcggcagcuacaucgcccuggacagcggcagaggcaacugggacugcaucaugaccagcuaccaguaccugaucauccagaacaccaccugggaggaccacugccaguucagcagacccagccccaucggcuaccugggccugcugagccagagaaccagagacaucuacaucagcagaagaagaagaggcaccuucaccuggacccugagcgacagcgagggcgaggacacccccggcggcuacugccugaccagauggaugcugaucgaggccgagcugaagugcuucggcaacaccgccguggccaagugcaacgagaagcacgacgaggaguucugcgacaugcugagacuguucgacuucaacaagcaggccauccagagacugaaggcccccgcccagaugagcauccagcugaucaacaaggccgugaacgcccugaucaacgaccagcugaucaugaagaaccaccugagagacaucaugggcauccccuacugcaacuacagcaaguacugcuaccugaaccacaccaccaccggcagaaccagccugcccaagugcugccuggugagcaacggcagcuaccugaacgagacccacuucagcgacgacaucgagcagcaggccgacaacaugaucaccgagaugcugcagaaggaguacauggagagacagggcaagaccccccugggccugguggaccuguucguguucagcaccagcuucuaccugaucagcaucuuccugcaccuggugaagauccccacccacagacacaucgugggcaagagcugccccaagccccacagacugaaccacaugggcaucugcagcugcggccuguacaagcagcccggcgugcccgugaaguggaagagaugaggacuagucccuguucccagagcccacuuuuuuuucuuuuuuugaaauaaaauagccugucuuucagaucuaaaaaaaaaaaaaaaaaaaaaaaaaaaaaaaaaaaaaaaaaaaaaaaaaaaaaaaaaaaaaaaaaaaaaaaaaaaaaaaaaaaaaaaaaaaaaaaaaaaa

SEQ ID NO: 25537 - RNA, 1743 nt, Artificial Sequence
  mRNA product Design a-2 (A100) comprising derived and/or modified sequence from LASV(LM765-SLE-2012;Clade IV)__AIT17814__GPCmut3 (opt4)
aggagaguccgcucagccagguugcagaagcggcuuagcguguguccuaaucuucucucugcguguagguaggccugugccgcaaacaagcuuaccaugggccagaucgugaccuucuuccaggaggugccccacgugaucgaggaggugaugaacaucgugcugaucgcccugagcauccuggccgugcugaagggccuguacaacuucgccaccugcggccuggugggccuggugaccuuccugcugcugugcggcagaagcugcaccaccagccuguacaagggcguguacgagcugcagacccuggagcugaacauggagacccugaacaugaccaugccccugagcugcaccaagaacaacagccaccacuacaucauggugggcaacgagaccggccuggagcugacccugaccaacaccagcaucaucgaccacaaguucugcaaccugagcgacgcccacagaaagaaccuguacgaccacgcccugaugagcaucaucagcaccuuccaccugagcauccccaacuucaaccaguacgaggccaugagcugcgacuucaacggcggcaagaucagcgugcaguacaaccugagccacagcuacgccaaggacgccgccgaccacugcggcaccguggccaacggcgugcugcagaccuucaugagaauggccuggggcggcagcuacaucgcccuggacagcggcagaggcagaugggacugcaucaugaccagcuaccaguaccugaucauccagaacaccaccugggaggaccacugccaguucagcagacccagccccaucggcuaccugggccugcugagccagagaaccagagacaucuacaucagcagaagaagaagaggcaccuucaccuggacccugagcgacagcgagggcaaggacacccccggcggcuacugccugaccagauggaugcugaucgaggccgagcugaagugcuucggcaacaccgccguggccaagugcaacgagaagcacgacgaggaguucugcgacaugcugagacuguucgacuucaacaagcaggccauccagagacugaaggcccccgcccagaugagcauccagcugaucaacaaggccgugaacgcccugaucaacgaccagcugaucaugaagaaccaccugagagacaucaugggcauccccuacugcaacuacagcaaguacugcuaccugaaccacaccaccaccggcaagaccagccugcccaagugcugccuggugagcaacggcagcuaccugaacgagacccacuucagcgacgacaucgagcagcaggccgacaacaugaucaccgagaugcugcagaaggaguacauggagagacagggcaagaccccccugggccugguggaccuguucguguucagcaccagcuucuaccugaucagcaucuuccugcaccuggugaagauccccacccacagacacaucgugggcaagcccugccccaagccccacagacugaaccacaugggcaucugcagcugcggccuguacaagcagcccggcgugcccgugaaguggaagagaugaggacuagucccuguucccagagcccacuuuuuuuucuuuuuuugaaauaaaauagccugucuuucagaucuaaaaaaaaaaaaaaaaaaaaaaaaaaaaaaaaaaaaaaaaaaaaaaaaaaaaaaaaaaaaaaaaaaaaaaaaaaaaaaaaaaaaaaaaaaaaaaaaaaaa

SEQ ID NO: 25538 - RNA, 1743 nt, Artificial Sequence
  mRNA product Design a-2 (A100) comprising derived and/or modified sequence from LASV(LM776-SLE-2012;Clade IV)__AIT17824__GPCmut3 (opt4)
aggagaguccgcucagccagguugcagaagcggcuuagcguguguccuaaucuucucucugcguguagguaggccugugccgcaaacaagcuuaccaugggccagaucgugaccuucuuccaggaggugccccacgugaucgaggaggugaugaacaucgugcugaucgcccugagcauccuggccgugcugaagggccuguacaacuucgccaccugcggccuggugggccuggugaccuuccugcugcugugcggcagaagcugcaccaccagcguguacaagggcguguacgagcugcagacccuggagcugaacauggagacccugaacaugaccaugccccugagcugcaccaagaacaacagccaccacuacaucauggugggcaacgagaccggccuggagcugacccugaccaacaccagcaucaucaaccacaaguucugcaaccugagcgacgcccacaagaagaaccuguacgaccacgcccugaugagcaucaucagcaccuuccaccugagcauccccaacuucaaccaguacgaggccaugagcugcgacuucaacggcggcaagaucagcgugcaguacaaccugagccacagcuacgccggcgacgccgccaaccacugcggcaccguggccaacggcgugcugcagaccuucaugagaauggccuggggcggcagcuacaucgcccuggacagcggccacggcaagugggacugcaucaugaccagcuaccaguaccugaucauccagaacaccaccugggaggaccacugccaguucagcagacccagccccaucggcuaccugggccugcugagccagagaaccagagacaucuacaucagcagaagaagaagaggcaccuucaccuggacccugagcgacagcgagggcaaggacacccccggcggcuacugccugaccagauggaugcugaucgaggccgagcugaagugcuucggcaacaccgccguggccaagugcaacgagaagcacgacgaggaguucugcgacaugcugagacuguucgacuucaacaagcaggccauccagagacugaaggcccccgcccagaugagcauccagcugaucaacaaggccgugaacgcccugaucaacgaccagcugaucaugaagaaccaccugagagacaucaugggcauccccuacugcaacuacagcaaguacugcuaccugaaccacaccaccaccggcaagaccagccugcccaagugcugccuggugagcaacggcagcuaccugaacgagacccacuucagcgacgacaucgagcagcaggccgacaacaugaucaccgagaugcugcagaaggaguacauggagagacagggcaagaccccccugggccugguggaccuguucguguucagcaccagcuucuaccugaucagcaucuuccugcaccuggugaagauccccacccacagacacaucgugggcaagagcugccccaagccccacagacugaaccacaugggcaucugcagcugcggccuguacaagcagcccggcgugcccgugagauggaagagaugaggacuagucccuguucccagagcccacuuuuuuuucuuuuuuugaaauaaaauagccugucuuucagaucuaaaaaaaaaaaaaaaaaaaaaaaaaaaaaaaaaaaaaaaaaaaaaaaaaaaaaaaaaaaaaaaaaaaaaaaaaaaaaaaaaaaaaaaaaaaaaaaaaaaa

SEQ ID NO: 25539 - RNA, 1743 nt, Artificial Sequence
  mRNA product Design a-2 (A100) comprising derived and/or modified sequence from LASV(Mad39;Clade IV)__ANH09722__GPCmut3 (opt4)
aggagaguccgcucagccagguugcagaagcggcuuagcguguguccuaaucuucucucugcguguagguaggccugugccgcaaacaagcuuaccaugggccagaucgugaccuucuuccaggaggugccccacgugaucgaggaggugaugaacaucgugcugaucgcccugagcauccuggccgugcugaagggccuguacaacguggccaccugcggccugaucggccuggugaccuuccugcugcugugcggcagaagcugcaccaccacccuguacaagggcguguacgagcugcaggcccuggagcugaacauggagacccugaacaugaccaugccccugagcugcaccaagaacaacagccaccacuacaucagagugggcaacgagaccggccuggagcugacccugaccaacaccagccugaucaaccacaaguucugcaaccugagcgacgcccacaagaagaaccuguacgaccacgcccugaugagcaucaucagcaccuuccaccugagcauccccaacuucaaccaguacgaggccaugagcugcgacuucaacgacggcaagaucagcgugcaguacaaccugagccacaccuacgccggcgacaccgccaaccacugcggcaccguggccaacggcgugcugcagaccuucaugagaauggccuggggcggcagcuacaucgcccuggacagcggcagaggcggcugggacugcaucaugaccagcuaccaguaccugaucauccagaacaccaccugggaggaccacugccaguucagcagacccagccccaucggcuaccugggccugcugagccagagaaccagagacaucuacaucagcagaagaagaagaggcaccuucaccuggacccugagcgacagcgagggcaaggacacccccggcggcuacugccugaccagauggaugcugaucgaggccgagcugaagugcuucggcaacaccgccguggccaagugcaacgagaagcacgacgaggaguucugcgacaugcugagacuguucgacuucaacaagcaggccauccagagacugaaggcccccgcccagaugagcauccagcugaucaacaaggccgugaacgcccugaucaacgaccagcugaucaugaagaaccaccugagagacaucaugggcauccccuacugcaacuacagcaaguacugcuaccugaaccacaccgugaccggcaagaccagccugcccaagugcugccuggugagcaacggcagcuaccugaacgagacccacuucagcgacgacaucgagcagcaggccgacaacaugaucaccgagaugcugcagaaggaguacauggagagacagggcaagaccccccugggccugguggaccuguucguguucagcaccagcuucuaccugaucagcaucuuccugcaccuggugaagauccccacccacagacacguggugggcaagcccugccccaagccccacagacugaaccacaugggcaucugcagcugcggcuucuacaagcagcccggcgugcccgugagauggaagagaugaggacuagucccuguucccagagcccacuuuuuuuucuuuuuuugaaauaaaauagccugucuuucagaucuaaaaaaaaaaaaaaaaaaaaaaaaaaaaaaaaaaaaaaaaaaaaaaaaaaaaaaaaaaaaaaaaaaaaaaaaaaaaaaaaaaaaaaaaaaaaaaaaaaaa

SEQ ID NO: 25540 - RNA, 1743 nt, Artificial Sequence
  mRNA product Design a-2 (A100) comprising derived and/or modified sequence from LASV(Z0947-SLE-2011;Clade IV)__AIT17840__GPCmut3 (opt4)
aggagaguccgcucagccagguugcagaagcggcuuagcguguguccuaaucuucucucugcguguagguaggccugugccgcaaacaagcuuaccaugggccagaucgugaccuucuuccaggaggugccccacgugaucgaggaggugaugaacaucgugcugaucgcccugagcauccuggccgugcugaagggccuguacaacuucgccaccugcggccuggugggccuggugaccuuccugcugcugugcggcagaagcugcaccaucagccuguacaagggcguguacgagcugcagacccuggagcugaacauggagacccugaacaugaccaugccccugagcugcaccaagaacaacagccaccacuacaucauggugggcaacgagaccggccuggagcugacccugaccaacaccagcaucaucaaccacaaguucugcaaccugagcgacgcccacaagaagaaccuguacgaccacgcccugaugagcaucaucagcaccuuccaccugagcauccccaacuucaaccaguacgaggccaugagcugcgacuucaacggcggcaagaucagcgugcaguacaaccugagccacagcuacgccggcgacgccgccaaccacugcggcaccguggccaacggcgugcugcagaccuucaugagaauggccuggggcggcagcuacaucgcccuggacagcggcagagacagaugggacugcaucaugaccagcuaccaguaccugaucauccagaacaccaccugggaggaccacugccaguucagcagacccagccccaucggcuaccugggccugcugagccagagaaccagagacaucuacaucagcagaagaagaagaggcaccuucaccuggacccugagcgacagcgagggcaaggacacccccggcggcuacugccugaccagauggaugcugaucgaggccgagcugaagugcuucggcaacaccgccguggccaagugcaacgagaagcacgacgaggaguucugcgacaugcugagacuguucgacuucaacaagcaggccauccagagacugaaggcccccgcccagaugagcauccagcugaucaacaaggccgugaacgcccugaucaacgaccagcugaucaugaagaaccaccugagagacaucaugggcauccccuacugcaacuacagcaaguacugcuaccugaaccacaccaccaccggcaagaccagccugcccaagugcugccuggugagcaacggcagcuaccugaacgagacccacuucagcgacgacaucgagcagcaggccgacaacaugaucaccgagaugcugcagaaggaguacauggagagacagggcaagaccccccugggccugguggaccuguucguguucagcaccagcuucuaccugaucagcaucuuccugcaccuggugaagauccccacccacagacacaucgugggcaagcccugccccaagccccacagacugaaccacaugggcaucugcagcugcggccuguacaagcagcccggcgugcccgugaaguggaagagaugaggacuagucccuguucccagagcccacuuuuuuuucuuuuuuugaaauaaaauagccugucuuucagaucuaaaaaaaaaaaaaaaaaaaaaaaaaaaaaaaaaaaaaaaaaaaaaaaaaaaaaaaaaaaaaaaaaaaaaaaaaaaaaaaaaaaaaaaaaaaaaaaaaaaa

SEQ ID NO: 25541 - RNA, 1743 nt, Artificial Sequence
  mRNA product Design a-2 (A100) comprising derived and/or modified sequence from LASV(Josiah;Clade IV)__NP_694870__GPCmut3 (opt5)
aggagaguccgcucagccagguugcagaagcggcuuagcguguguccuaaucuucucucugcguguagguaggccugugccgcaaacaagcuuaccaugggccagaucgugaccuucuuucaagaggucccccacguuauugaagaggugaugaacaucgugcugauugcccucagcguccuggcugugcuuaaggggcuguacaauuucgccacaugcggacucguuggccuggugacguuucuucugcucugugggagauccugcaccacaucucuguauaaaggagucuacgaacugcagacccucgagcugaacauggaaacacuuaauaugaccaugccucugagcuguacaaagaacaauucccaucacuauaucauggugggcaacgagaccgggcucgagcugacgcuuaccaauacaucuauuaucaaccauaaauucugcaaucugagcgacgcgcacaagaaaaaccucuacgaucaugcucugauguccaucauuucuaccuuucaccugagcaucccgaauuucaaccaguaugaagccauguccugugacuuuaauggaggcaagauuagcguucaguacaaccucucucacuccuaugccggcgaugcugccaaucauugcgggacaguggcuaacggaguccugcaaaccuucaugcggauggccuggggcgggagcuacaucgcgcuugacucuggacgcggcaacugggauuguauuaugacguccuaccaguaucugaucauucagaauacaaccugggaggaccacugccaguuuagcagacccucuccuaucggguaccucggacugcuuucccaacggacacgcgauaucuauauuagcagacggcgcagaggcaccuucaccuggacacuguccgacucugaaggcaaggauacgcccgggggauacugucucacccgguggaugcugaucgaggccgagcugaaaugcuuuggcaacacagcuguggccaaguguaaugaaaaacaugacgaggaguucugcgauaugcuccgccuguuugacuucaacaagcaggcuauucagagacuuaaagccccugcgcagaugagcauccaacugauuaauaaggccgugaacgcucucaucaaugaucagcugaucaugaagaaccaccuucgggacauuauggggauccccuauugcaauuacuccaaauauuguuaccugaaccacaccacaaccggacgcacgagccucccuaagugcugucuggucucuaauggcuccuaccugaacgaaacacauuucagcgacgauauugaacagcaagccgacaauaugaucaccgagaugcuccagaaagaguauauggaaagacaggggaagaccccgcugggacuuguugaucuguuuguguucucuaccagcuuuuaccucauuuccaucuuccugcaccuggugaaaauccccacacaucggcacauugucggcaagucuugcccuaaaccccaucgccuuaaccacaugggcaucuguagcugcgggcucuauaagcagccuggagugcccguuaaguggaaaagaugaggacuagucccuguucccagagcccacuuuuuuuucuuuuuuugaaauaaaauagccugucuuucagaucuaaaaaaaaaaaaaaaaaaaaaaaaaaaaaaaaaaaaaaaaaaaaaaaaaaaaaaaaaaaaaaaaaaaaaaaaaaaaaaaaaaaaaaaaaaaaaaaaaaaa

SEQ ID NO: 25542 - RNA, 1740 nt, Artificial Sequence
  mRNA product Design a-2 (A100) comprising derived and/or modified sequence from LASV(LP;Clade I)__AAF86701__GPCmut3 (opt5)
aggagaguccgcucagccagguugcagaagcggcuuagcguguguccuaaucuucucucugcguguagguaggccugugccgcaaacaagcuuaccaugggccagaucauuaccuucuuucaagaggugccccacgucaucgaagagguuaugaacauugugcugaucgcccucagccugcuugcuauucugaaggggcucuacaauaucgccacaugcggaaucauuggccugguggcguuccuuuuucugugugggaaauccugcucucucacgcugaagggaggcuaugaacugcagacccucgagcugaacauggaaacacuuaauaugaccaugccucugagcuguaccaaaaacuccucucaucacuacaucagagucgggaaugagacaggacucgagcugacacuuaccaacacgagcauuaucaaucauaaguucugcaaccuguccgacgcucacaaaaagaaucucuaugaucaugcccugaugucuauuaucagcaccuuucaccuguccauuccgaacuucaaucaguacgaagccaugagcugugacuuuaacggcggcaagaucucugugcaguauaaucucucccacagcuacgcuggggaugccgcugagcauugcggaacaguugccaacggcgugcugcaaaccuucaugcggauggcguggggagggcgcuauaucgcccuugacucuggcaaagggaauugggauuguauuaugacauccuaccaguaccugaucauucagaacaccacgugggaagaccacugccaguuuagcagacccucuccuaucggauaucucggccugcuuucccaacggacacgcgauauuuacaucagcagacggcgcagaggcaccuucacauggacccuguccgacucugaggggaacgagacccccggaggcuauugucucacacgguggaugcugaucgaagcugagcugaagugcuuugggaauacggccgucgcuaaauguaacgaaaagcaugaugaggaguucugcgacaugcuccgccuguuugauuucaauaaacaggccauuagacggcuuaaggcgccugcccagaugagcauccagcugauuaacaaggcugugaaugcccucaucaacgaccaacugauuaugaaaaaucaccuucgcgauaucaugggaauccccuacugcaacuauuccaaguacuguuaucugaaucacaccagcucuggcagaacaucccucccuaaaugcugucugauuagcaacgggucuuaccugaaugaaacccaguucagcgacgacaucgagcagcaagcugauaacaugauuacagaaaugcuccagaaggaguacaucgaacggcagggaaaaaccccgcugggccuuguugacauuuuuaucuucuccacgucuuuuuaucugauuagcaucuuccuccaucugaucaagauucccacacaccgccauaucgugggcaaaccuugccccaagccucacagacugaaucauaugggggucuguuccugcggacuuuacaagcaccccggcgugccgaccaaauggaagcggugaggacuagucccuguucccagagcccacuuuuuuuucuuuuuuugaaauaaaauagccugucuuucagaucuaaaaaaaaaaaaaaaaaaaaaaaaaaaaaaaaaaaaaaaaaaaaaaaaaaaaaaaaaaaaaaaaaaaaaaaaaaaaaaaaaaaaaaaaaaaaaaaaaaaa

SEQ ID NO: 25543 - RNA, 1740 nt, Artificial Sequence
  mRNA product Design a-2 (A100) comprising derived and/or modified sequence from LASV(803213;Clade II)__AAF86703__GPCmut3 (opt5)
aggagaguccgcucagccagguugcagaagcggcuuagcguguguccuaaucuucucucugcguguagguaggccugugccgcaaacaagcuuaccaugggccagaucauuaccuucuuucaagaggugccccacgucaucgaagagguuaugaacauugugcugaucgcccucagccugcuugcuauucugaaggggaucuacaauguggccacaugcggacucuucggccugaucuccuuucuucugcucugugggagaucuugcagcgucacguauaaaggaguguacgaacugcagacccuggagcucaacauggcgaaucugaacaugacaaugccucuuuccuguaccaagaauaacucucaucacuauauuaugguuggcaaugaaacagggcuggagcucacccugacaaacaccagcaucauuaaucauaaauucugcaaccuuuccgacgcucacaagaaaaaucuguacgaucaugcccucaugucuaucauuagcacguuucaccuguccaucccgaacuucaaucaguaugaggccaugagcugugacuuuaacggaggcaagauuucugugcaguacaaucugucccacagcuucgcugucgaugccgcuaaccauugcggcaccaucgccaacggggugcuccaaacauuuaugcggauggcguggggaggcucuuauaucgcccuggacuccgggaagggaaauugggauuguauuaugaccagcuaccaguaccuuaucauucagaacacaaccugggaagaccacugccaguucucucgccccuccccuaucggcuaucuggggcuccugagccaaagaacgcgggauauuuacaucucccgcagacggcgcggaacauuuaccuggacacuuucugacagcgagggcaaugaagcucccggcggguauugucugaccagauggaugcucaucgaggccgagcugaaaugcuucggaaacaccgcuguugccaaguguaaugaaaaacaugaugaggaauuuugcgacaugcugcgccucuucgauuucaacaagcaggcgauuaaacggcugaagacgccugcccagauguccauccagcuuauuaauaaggcugugaacgcccugaucaaugaccaacucauuaugaaaaaccaccugagagauaucaugggcauccccuacugcaauuauagccgguacuguuaucuuaaccacacagucaccgggaagacaucucugccucgcugcugucucguguccaauggaagcuaccugaacgagacccauuuuucugacgacauugaacagcaggcugauaauaugaucacagagaugcugcaaaaagaguacauggacagacagggcaagaccccgcucgggcugguggaucuuuucgucuuuagcacguccuucuaucugauuucuaucuuucuccaccugguuaaaauucccacacaucggcacaucgugggaaagccuugccccaaaccucaucgccugaaccacaugggcauuuguagcugcggccuuuacaagcaccccggggugccggucaaguggaaaagaugaggacuagucccuguucccagagcccacuuuuuuuucuuuuuuugaaauaaaauagccugucuuucagaucuaaaaaaaaaaaaaaaaaaaaaaaaaaaaaaaaaaaaaaaaaaaaaaaaaaaaaaaaaaaaaaaaaaaaaaaaaaaaaaaaaaaaaaaaaaaaaaaaaaaa

SEQ ID NO: 25544 - RNA, 1740 nt, Artificial Sequence
  mRNA product Design a-2 (A100) comprising derived and/or modified sequence from LASV(GA391;Clade III)__CAA36645__GPCmut3 (opt5)
aggagaguccgcucagccagguugcagaagcggcuuagcguguguccuaaucuucucucugcguguagguaggccugugccgcaaacaagcuuaccaugggccagaucgugaccuucuuucaagaggucccccacguuauugaagaggugaugaacaucgugcugauugcccucagcauccuggcuauucuuaaggggcuguacaaugucgccacaugcggacucaucggccuggugacguuccuucugcucuccgggagaucuuguagccugaucuauaaaggaaccuacgaacugcagacacucgagcugaacauggaaacccuuaauaugacaaugccucuguccugcaccaagaacaauucucaucacuauauucggguuggcaacgagacagggcucgagcugacccuuacgaauaccagcauccugaaccauaaauuuuguaaucucuccgacgcgcacaagcgcaaccuguacgaucauucucugaugagcauuaucuccacauuccaccucagcauuccgaauuuuaaccaguaugaagcuaugucuugcgacuucaauggaggcaaaaucaccgugcaguacaaccugucccacagcuuugccgucgaugccgcuggccauugugggacacuugccaauggagugcugcaaaccuucaugagaauggcuuggggcgggucuuauauugcccucgacuccggacggggcaacugggauugcaucaugacgagcuaccaguaccugaucauucagaacacaaccugggacgaucacugucaguuuucucgccccuccccuaucggguaucuuggacugcucagccaaagaacacgggacauuuacaucucccgcagacggcgcggcaccuucaccuggacacugucugauagcgagggcaaugaaacgcccgggggauauugccugaccagauggaugcucauugaggcggagcugaaguguuuuggcaacacagccguugcuaagugcaaugaaaaacaugacgaggaguucugugauaugcuucggcuguuugacuucaacaagcaggccauccgcagacucaaaaccccugcucagauguccauccagcugauuaauaaggccgugaacgcgcuuaucaaugaucaacugauuaugaaaaaccaccuccgggacaucauggggauucccuacugcaauuauagccgcuacugcuaucugaaccacacaucuaccggaaagacgucccugccuagauguugccucaucagcaauggcucuuaccugaacgaaacaaaguucagcgacgauaucgaacagcaggccgacaauaugauuaccgagaugcuucaaaaagaguacaucgaucggcaggggaagaccccgcugggacucgucgaccuguuuguguucuccacaucuuuuuaucugauuagcaucuuccuucaucucgugaaaauucccacccacagacauaucgucggcaagccuugucccaaaccucaccgccugaaccauaugggcauuugcuccugugggcuguacaagcagcccggaguuccggugcgguggaaaagaugaggacuagucccuguucccagagcccacuuuuuuuucuuuuuuugaaauaaaauagccugucuuucagaucuaaaaaaaaaaaaaaaaaaaaaaaaaaaaaaaaaaaaaaaaaaaaaaaaaaaaaaaaaaaaaaaaaaaaaaaaaaaaaaaaaaaaaaaaaaaaaaaaaaaa

SEQ ID NO: 25545 - RNA, 1743 nt, Artificial Sequence
  mRNA product Design a-2 (A100) comprising derived and/or modified sequence from LASV(AV;Clade V)__CCA30314__GPCmut3 (opt5)
aggagaguccgcucagccagguugcagaagcggcuuagcguguguccuaaucuucucucugcguguagguaggccugugccgcaaacaagcuuaccaugggccagaucgugaccuucuuucaagaggucccccacguuauugaagaggugaugaacaucgugcugauugcccucagcauccuggcuguccuuaaggggcuguacaauauugccacaugcggacucaucggccugaucacguuccuucugcucugugggagauccugcucuagcaaccuguauaaaggaguguacgaacugcagucccucgaccugaauauggagacccuuaacaugacaaugccucugucuuguaccaagaauaacagccaucacuauauucggguuggcaaugauacagggcucgaacugacccuuacaaacaccuccauccugaaucauaaauuuugcaaccucucugacgcgcacaagaaagaucuguacgaccaugcucugaugagcauuaucuccacguuccaccucagcauuccgaauuuuaaccaguaugaggccaugucuugugauuucaauggaggcaagaucuccgugcaguacaaccugagccacucuuaugccauugacgcugccaaucauugcggcaccgucgcuaacgggauccuucaaacauuuaugcgcauggccuggggaggcuccuacaucgcgcuggauagcgggagaggaaacugggacuguauuaugaccucuuaccaguaucucaucauucagaauacaaccugggagaaccacugccaguucucccggcccagcccuaucggcuaccuggggcuucugucccaacgcacgagagauauuuauaucucucggcgcagacggggaacauuuaccuggacacucagcgacuccgaaggcaaugccacccccggcggguacugucugacccgcuggaugcugaucgaggcugaacucaagugcuucggaaacacagccguggcuaaauguaaugagaagcaugaugaggaauuuugcgacaugcugagacuuuucgauuuuaacaaacaggccauuagccggcugaagucuccugcgcagauguccauccagcucauuaauaaagccguuaacgcucugaucaaugaccaacuuauuaugaagaaccaucugcgcgacaucaugggcauccccuauugcaauuacagcaaguauuguuaccucaaccacacgauuaccgggaaaacaucucugccuaagugcugucuggugagcaauggauccuaccucaacgagacccacuucucugaugacaucgaacagcaggccgauaauaugauuacagagaugcugcaaaaagaauauauggagagacagggcaagaccccgcuugggcuggucgaccucuucguguuuagcacguccuucuaccugaucagcauuuuucugcggcuugugaaaauccccacacaccgccauauugucggaaagccuugccccaaaccucacagacucaaccauaugggcaucuguucuugcggccuguauaagcagcccgggguuccggugcgguggaagagaugaggacuagucccuguucccagagcccacuuuuuuuucuuuuuuugaaauaaaauagccugucuuucagaucuaaaaaaaaaaaaaaaaaaaaaaaaaaaaaaaaaaaaaaaaaaaaaaaaaaaaaaaaaaaaaaaaaaaaaaaaaaaaaaaaaaaaaaaaaaaaaaaaaaaa

SEQ ID NO: 25546 - RNA, 1740 nt, Artificial Sequence
  mRNA product Design a-2 (A100) comprising derived and/or modified sequence from LASV(Togo/2016/7082;Clade VI)__AMR44577__GPCmut3 (opt5)
aggagaguccgcucagccagguugcagaagcggcuuagcguguguccuaaucuucucucugcguguagguaggccugugccgcaaacaagcuuaccaugggccagaucauuaccuucuuucaagaggugccccacgucaucgaagagguuaugaacauugugcugaucgcccucagccugcuugcuauucugaaggggguguacaaugucgccacaugcggaaucaucggccucgugacguuccuguuucuuugugggagauccugcucucugauuuauaaaggaagcuacgaacuccagacccuggagcugaacauggaaacacucaauaugaccaugccucuguccuguacaaagaacucuagccaucacuauauccggguuggcaaugagaccgggcuugagcugacacucaccaacacguccauuaucaaucauaaauucugcaaccugucugacgcgcacaagcgcaaucuuuacgaucaugcucugaugagcauucucuccaccuuucaccugagcaucccgaacuucaaucaguaugaagccaugucuugugacuuuaacggaggcaaaauuuccgugcaguacaaucugagccacgccuaugcugucgaugccgcugagcauugcggcacaguggccaacgggguucuccaaaccuucaugagaauggcguggggaggcucuuacaucgcccuggacuccgggcggggaaauugggauuguaucaugacaagcuaccaguaucuuauuauccagaacaccacgugggaagaccacugccaguuuucucgccccuccccuauuggcuaccuggggcuccugagccaaagaacacgggauaucuauauuucccgcagacggcgcggaaccuucacauggacccuuucugacagcgagggcaacgagacccccggcggguacugucugacaagauggaugcucaucgaagcugagcugaagugcuuuggaaauacggccguggcuaaguguaacgaaaaacaugaugaggaguucugcgacaugcugcggcucuuugauuucaauaagcaggccauccagcgccugaaauccccugcgcagaugagcauucaacuuaucaacaaggccgucaaugcucugauuaacgaccagcucaucaugaaaaaucaccugagagauaugaugggcauucccuauugcaacuacucuaaguauuguuaccuuaaucacaccuccagcgggcggacaucucugccuaagugcugucucgugagcaacggauccuaccugaaugaaacccauuucucugacgacaucgagcagcaagccgauaacaugaucacagaaaugcugcagaaagaguauauugaccgccagggcaagaccccgcucgggcugguggaucuuuuugucuucagcacguccuuuuaccugaucagcauuuuccuccaccugaucaaaauucccacacauagacacaucguuggaaagccuugccccaaaccucaucggcugaaucacaugggcauuuguucuugcggccuuuauaagcagcccggggugccgaccagauggaaacgcugaggacuagucccuguucccagagcccacuuuuuuuucuuuuuuugaaauaaaauagccugucuuucagaucuaaaaaaaaaaaaaaaaaaaaaaaaaaaaaaaaaaaaaaaaaaaaaaaaaaaaaaaaaaaaaaaaaaaaaaaaaaaaaaaaaaaaaaaaaaaaaaaaaaaa

SEQ ID NO: 25547 - RNA, 1740 nt, Artificial Sequence
  mRNA product Design a-2 (A100) comprising derived and/or modified sequence from LASV(KAK-428;Clade n.d. (VII))__ANH09740__GPCmut3 (opt5)
aggagaguccgcucagccagguugcagaagcggcuuagcguguguccuaaucuucucucugcguguagguaggccugugccgcaaacaagcuuaccaugggccagaucgugaccuucuuucaagaggucccccacguuauugaagaggugaugaacaucgugcugauugcccucagccugcuugcuauccugaaggggcucuacaauuucgccacaugcggagucauuggccugaucacguuucuucugcucugugggagauccugcucugcgaccuauaaaggacaguacgaacugcagacacuggagcucaacauggaaagccugaauaugaccaugccucuuuccuguacaaagaacaauucucaucacuauauccgggcuggcaacaauaccgggcuggagcucacacugaccaacacgagcauuaucucccauaaauucugcaaucuuucugacgcccacaagaaaaaccuguacgaucauacccucaugagcauuaucacaaccuuucaccuguccauuccgaauuucaaccaguaugaggccaugagcugugacuuuaauggaggcaagaucucuauucaauacaaccugucccacagcuaugcuggcgaugccgcucagcauugcgggacaguggccaauggaguucuccagaccuucaugcgcauggcguggggcgggucuuaccuggcccuugacuccggaagacggggcugggauuguaucaucagcucuuaccaguaucugauuauccaaaacacgacaugggacgaucacugccaguuuucccgccccagcccuauuggguaccucggauucgugucccagaagaccagagacaucuauauuucucggcgcagacggggcacauuuaccuggacccugagcgauuccgaaggccaugacaugcccgggggauacugucuuacacgcuggaugcugaucgaggcugaucucaaaugcuucggcaacacggccgucgcuaaguguaaugaaaaacacgacgaggaguuuugcgauauguggagacuguucgacuucaacaagcaggccauccaacggcugaaagcgccugcccagaugaauauucagcucaucaacaaggcugugaaugcccugauuaacgaccaacuuaugaugaagaaucaucugcgcgauaucauggggauucccuauugcaacuacagcaaauuuuguuaucucaauaacaccacaaccggaagaacaucucugccucggugcugucuuaucuccaauggcagcuaccugaacgaaacccacuucucugacgauaucgagcagcaggcugacaauaugauuacggaaaugcuccagaaggaguacauggaucgccaagggaaaacaccgcugggacugguugaccucuuuguguucagcaccuccuuuuaucugaucaccauuuuccuucaccuggucaagauccccacacauagacacauugugggcaaaccuugccccaagccucaucggcucaaccacaugggcaucuguucuugcgggcuguacaaacagcccggagugccggucagauggaagcgcugaggacuagucccuguucccagagcccacuuuuuuuucuuuuuuugaaauaaaauagccugucuuucagaucuaaaaaaaaaaaaaaaaaaaaaaaaaaaaaaaaaaaaaaaaaaaaaaaaaaaaaaaaaaaaaaaaaaaaaaaaaaaaaaaaaaaaaaaaaaaaaaaaaaaa

SEQ ID NO: 25548 - RNA, 1740 nt, Artificial Sequence; identical to SEQ ID NO: 25542
  mRNA product Design a-2 (A100) comprising derived and/or modified sequence from LASV(Pinneo-NIG-1969;Clade I)__AIT17836__GPCmut3 (opt5)

SEQ ID NO: 25549 - RNA, 1740 nt, Artificial Sequence
  mRNA product Design a-2 (A100) comprising derived and/or modified sequence from LASV(ISTH0009-NIG-2011;Clade II)__AIT17404__GPCmut3 (opt5)
aggagaguccgcucagccagguugcagaagcggcuuagcguguguccuaaucuucucucugcguguagguaggccugugccgcaaacaagcuuaccaugggccagaucauuaccuucuuucaagaggugccccacgucaucgaagagguuaugaacauugugcugaucgcccucagccugcuugcuauucugaaggggaucuacaauguggccacaugcggacucuucggccuggucuccuuucuucugcucugugggagaucuugcagcacgaccuauaaaggaguguacgaacugcagacacuggagcucgacauggcgucccugaacaugaccaugccucuuucuuguacaaagaauaacagccaucacuauaucaugguuggcaaugaaaccgggcuggagcucacacugaccaacacguccauuaucaaucauaaauucugcaaccuuucugaugcucacaagaaaaaucuguacgaccaugcccucaugagcauuaucuccaccuuucaccugagcauuccgaacuucaaucaguaugaggccaugucuugugauuuuaacggaggcaagaucuccgugcaguacaaucugagccacgcuuaugccgucgacgcugccaaccauugcggcacaauugcgaauggggugcuccaaaccuucaugcggauggccuggggaggcucuuacaucgcucuggauuccgggaagggaagcugggacuguaucaugacaucuuaccaguaucuuauuauccagaacaccacgugggaagaucacugccaguuuucccgccccagcccuauuggcuaccuggggcuccugucccaaagaacacgggacaucuauauuucucgcagacggcgcggaaccuucacauggacccuuagcgauuccgagggcaacgaaacccccggcggguacugucugacaagauggaugcucaucgaggccgagcugaaaugcuuuggaaauacggcuguugccaaguguaacgaaaaacaugacgaggaguucugcgauaugcugcggcucuuugacuucaauaagcaggcgauccgcagacugaaaaccccugcccagaugagcauucagcuuaucaacaaggcugugaaugcccugauuaacgaucaacucaucaugaagaaucaucugcgggacauuaugggcauccccuauugcaacuacucuaaauauuguuaccuuaaucacacagucaccgggaagacaucccugccucgcugcugucucgugagcaacggaucuuaccugaaugaaacccacuucagcgacgauaucgaacagcaggcugacaacaugauuacggagcugcuccaaaaagaguauauggauagacagggcaagacaccgcuggggcuuguggaccuguuugucuucuccaccucuuuuuaccucaucagcauuuuccugcaccugaucaaaauucccacccaucggcacaucacaggaaagccuugccccaaaccucaucgccuuaaucacaugggcauuuguuccugcggccucuauaagcaccccgggguuccggugaaguggaaaagaugaggacuagucccuguucccagagcccacuuuuuuuucuuuuuuugaaauaaaauagccugucuuucagaucuaaaaaaaaaaaaaaaaaaaaaaaaaaaaaaaaaaaaaaaaaaaaaaaaaaaaaaaaaaaaaaaaaaaaaaaaaaaaaaaaaaaaaaaaaaaaaaaaaaaa

SEQ ID NO: 25550 - RNA, 1740 nt, Artificial Sequence
  mRNA product Design a-2 (A100) comprising derived and/or modified sequence from LASV(ISTH2010-NIG-2012;Clade II)__AIT17482__GPCmut3 (opt5)
aggagaguccgcucagccagguugcagaagcggcuuagcguguguccuaaucuucucucugcguguagguaggccugugccgcaaacaagcuuaccaugggccagaucauuaccuucuuucaagaggugccccacgucaucgaagagguuaugaacauugugcugaucgcccucagccugcuugcuauucugaaggggaucuacaauguggccacaugcggacucuucggccuggucuccuuucuucugcucugugggagaucuugcagcacgaccuauaaaggaguguacgaacugcagacacuggagcucgacauggcgucccugaacaugaccaugccucuuucuuguacaaagaauaacagccaucacuauaucaugguuggcaaugaaaccgggcuggagcucacacugaccaacacguccauuaucaaucauaaauucugcaaccuuucugaugcucacaagaaaaaucuguacgaccaugcccucaugagcauuaucuccaccuuucaccugagcauuccgaacuucaaucaguaugaggccaugucuugugauuuuaacggaggcaagaucuccgugcaguacaaucugagccacgcuuaugccgucgacgcugccaaccauugcggcacaauugcgaauggggugcuccaaaccuucaugcggauggccuggggaggcucuuacaucgcucuggauuccgggaagggaagcugggacuguaucaugacaucuuaccaguaucuuauuauccagaacauuaccugggaagaucacugccaguuuucccgccccagcccuaucggcuaccuggggcuccugucccaaagaacgcgggacauuuauaucucucgcagacggcgcggaacauucaccuggacacuuagcgauuccgagggcaacgaaacccccggcggguacugucugaccagauggaugcucaucgaggccgagcugaaaugcuuuggaaauacagcuguugccaaguguaacgaaaaacaugacgaggaguucugcgauaugcugcggcucuuugacuucaauaagcaggcgauucgcagacugaaaacgccugcccagaugagcauccagcuuauuaacaaggcugugaaugcccugaucaacgaucaacucauuaugaagaaucaucugcgggacaucaugggcauccccuauugcaacuacucuaaauauuguuaccuuaaucacaccgucacagggaagaccucccugccucgcugcugucucgugagcaacggaucuuaccugaaugaaacacacuucagcgacgauauugaacagcaggcugacaacaugaucaccgagcugcuccaaaaagaguauauugauagacagggcaagacgccgcuggggcuuguggaccuguuugucuucuccacaucuuuuuaccucaucagcauuuuccugcaccugguuaaaauccccacccaucggcacguggugggaaagccuugccccaaaccucaucgccuuaaucacaugggcauuuguuccugcggccucuauaagcaccccggggucccggugaaguggaaaagaugaggacuagucccuguucccagagcccacuuuuuuuucuuuuuuugaaauaaaauagccugucuuucagaucuaaaaaaaaaaaaaaaaaaaaaaaaaaaaaaaaaaaaaaaaaaaaaaaaaaaaaaaaaaaaaaaaaaaaaaaaaaaaaaaaaaaaaaaaaaaaaaaaaaaa

SEQ ID NO: 25551 - RNA, 1740 nt, Artificial Sequence
  mRNA product Design a-2 (A100) comprising derived and/or modified sequence from LASV(Lassa virus/H.sapiens-wt/NGA/2015/ISTH_0543;Clade II)__AVO03639__GPCmut3 (opt5)
aggagaguccgcucagccagguugcagaagcggcuuagcguguguccuaaucuucucucugcguguagguaggccugugccgcaaacaagcuuaccaugggccagaucauuaccuucuuucaagaggugccccacgucaucgaagagguuaugaacauugugcugaucgcccucagccugcuugcuauucugaaggggaucuacaauguggccacaugcggacucuucggccuggucuccuuucuucugcucugugggagaucuugcagcacgaccuauaaaggaguguacgaacugcagacacuggagcucgacauggcgaaccugaauaugaccaugccucuuuccuguacaaagaacaauucucaucacuauaucaugguuggcaacgaaaccgggcuggagcucacacugaccaauacgagcauuaucaaccauaaauucugcaaucuuuccgaugcucacaagaaaaaccuguacgaccaugcccucaugucuauuaucagcaccuuucaccuguccauuccgaauuucaaccaguaugaggccaugagcugugauuuuaauggaggcaagaucucugugcaguacaaccugucccacacauaugcugucgacgccgcuaaucauugcggcaccauugccaacggggugcuccaaacauucaugcggauggcguggggaggcagcuacaucgcccuggauucugggaagggauccugggacuguaucaugaccagcuaccaguaucuuguuauucagaacacgacaugggaagaucacugccaguuuucucgccccuccccuaucggcuaccuggggcuccugagccaaagaacccgggacauuuauaucucccgcagacggcgcggaacauucaccuggacccuuucugauagcgagggcaaugaaacacccggcggguacugucugacgagauggaugcucauugaggcugagcugaaaugcuuuggaaacaccgccguggcuaaguguaaugaaaaacaugacgaggaguucugcgauaugcugcggcucuuugacuucaacaagcaggccauccgcagacugaaaaccccugcgcagauguccauccagcuuauuaauaaggccgucaacgcucugaucaaugaucaacucauuaugaagaaccaucugcgggacaucaugggcauucccuauugcaauuacagcaaauauuguuaccuuaaccacacagugacagggaagaccucucugccucgcugcugucucguguccaauggaagcuaccugaacgaaacgcacuucucugacgauaucgaacagcaggccgacaauaugaucacagagcugcuccaaaaagaguauauugauagacagggcaagaccccgcuggggcuugucgaccuguuuguuuucagcaccuccuuuuaccucaucucuauuuuccugcaccuggugaaaauccccacacaucggcacauuaccggaaagccuugccccaaaccucaucgccuuaaccacaugggcaucuguagcugcggccucuauaagcaccccggggugccggucaaguggaaaagaugaggacuagucccuguucccagagcccacuuuuuuuucuuuuuuugaaauaaaauagccugucuuucagaucuaaaaaaaaaaaaaaaaaaaaaaaaaaaaaaaaaaaaaaaaaaaaaaaaaaaaaaaaaaaaaaaaaaaaaaaaaaaaaaaaaaaaaaaaaaaaaaaaaaaa

SEQ ID NO: 25552 - RNA, 1740 nt, Artificial Sequence
  mRNA product Design a-2 (A100) comprising derived and/or modified sequence from LASV(Lassa virus/H.sapiens-wt/NGA/2016/ISTH_0009;Clade II)__AVO03571__GPCmut3 (opt5)
aggagaguccgcucagccagguugcagaagcggcuuagcguguguccuaaucuucucucugcguguagguaggccugugccgcaaacaagcuuaccaugggccagaucauuaccuucuuucaagaggugccccacgucaucgaagagguuaugaacauugugcugaucgcccucagccugcuugcuauucugaaggggaucuacaauguggccacaugcggacuccugggccuugucuccuuccugcuccugugugggagaucuugcagcacgaccuauaaaggaguguacgaacugcagacacucgagcuggacauggcgucccuuaacaugaccaugccucugucuuguacaaagaauaacagccaucacuauaucaugguuggcaaugaaaccgggcucgagcugacacuuaccaacacguccauuaucaaucauaaauuuugcaaccugucugaugcucacaagaaaaaucucuacgaccaugcccugaugagcauuaucuccaccuuccaccugagcauuccgaacuuuaaucaguaugaggccaugucuugugauuucaacggaggccggaucuccgugcaguacaaucucagccacucuuaugcugucgacgccgcuaaccauugcggcacaauugccaauggggugcugcaaaccuuuaugcgcauggcguggggaggcuccuacaucgcccuugauagcgggaagggaucuugggacuguaucaugacauccuaccaguaucugauuauccagaacaccacgugggaagaucacugccaguucagcagacccuccccuauuggcuaccucgggcugcuuucucaacggacacgcgacaucuauauuagcagacggcgcagaggaaccuuuacauggacccuguccgauagcgagggcaacgaaacccccggcggguacugucucacacgguggaugcugaucgaggcugagcugaagugcuucggaaauacggccguugcuaaauguaacgaaaagcaugacgaggaauuuugcgauaugcuccgccuguucgacuuuaauaaacaggccaucagacggcuuaagaccccugcgcagaugucuauucagcugaucaacaaagccgugaaugcucucauuaacgaucaacugaucaugaagaaucaccuucgcgacauuaugggcauccccuauugcaacuacuccaaguauuguuaccugaaucacacagucaccgggaaaacaagccucccuagaugcugucuggugucuaacggaagcuaccugaaugagacccauuucuccgacgauaucgaacagcaggccgacaacaugauuacggagcuccugcaaaaggaguauaucgaucggcagggcaaaacaccgcuugggcugguggaccucuucgucuuuucuaccagcuucuaccugauuuccaucuuucugcaccuuguuaagauucccacccaucgccacaucacaggaaaaccuugccccaagccucauagacucaaucacaugggcauuuguagcugcggccuguauaaccaccccggggugccggugaaauggaagcggugaggacuagucccuguucccagagcccacuuuuuuuucuuuuuuugaaauaaaauagccugucuuucagaucuaaaaaaaaaaaaaaaaaaaaaaaaaaaaaaaaaaaaaaaaaaaaaaaaaaaaaaaaaaaaaaaaaaaaaaaaaaaaaaaaaaaaaaaaaaaaaaaaaaaa

SEQ ID NO: 25553 - RNA, 1740 nt, Artificial Sequence
  mRNA product Design a-2 (A100) comprising derived and/or modified sequence from LASV(Lassa virus/H.sapiens-wt/NGA/2016/ISTH_0017;Clade II)__AVO03567__GPCmut3 (opt5)
aggagaguccgcucagccagguugcagaagcggcuuagcguguguccuaaucuucucucugcguguagguaggccugugccgcaaacaagcuuaccaugggccagaucauuaccuucuuucaagaggugccccacgucaucgaagagguuaugaacauugugcugaucgcccucagccugcuugcuauucugaaggggaucuacaauguggccacaugcggacucuucggccuggucuccuuucuucugcucugugggagaucuugcagcacgaccuauaaaggaguguacgaacugcagacacuggagcucgacauggcgucccugaacaugaccaugccucuuucuuguacaaagaauaacagccaucacuauaucaugguuggcaaugaaaccgggcuggagcucacacugaccaacacguccauuaucaaucauaaauucugcaaccuuucugaugcucacaagaaaaaucuguacgaccaugcccucaugagcauuaucuccaccuuucaccugagcauuccgaacuucaaucaguaugaggccaugucuugugauuuuaacggaggcaagaucuccgugcaguacaaucugagccacacauaugcuauugacgccgcuaaccauugcggcaccaucgccaaugggguccuccaaacauucaugcggauggcguggggaggcucuuacaucgcccuggauuccgggaagggaagcugggacuguauuaugaccucuuaccaguaucuuaucauucagaacacgacaugggaagaucacugccaguuuucccgccccagcccuaucggcuaccuggggcuccugucccaaagaacccgggacauuuauaucucucgcagacggcgcggaacauucaccuggacccuuagcgauuccgagggcaacgaaacacccggcggguacugucugacgagauggaugcucaucgaggcugagcugaaaugcuuuggaaauaccgccguggcuaaguguaacgaaaaacaugacgaggaguucugcgauaugcugcggcucuuugacuucaauaagcaggccauucgcagacugaaaaccccugcgcagaugagcauccagcuuauuaacaaggccguuaaugcucugaucaacgaucaacucauuaugaagaaucaucugcgggacaucaugggcauccccuauugcaacuacucuaaauauuguuaccuuaaucacacagugacagggaagaccucccugccucgcugcugucucgucagcaacggaucuuaccugaaugaaacgcacuucagcgacgauauugaacagcaggccgacaacaugaucacagagcugcuccaaaaagaguauauggauagacagggcaagaccccgcuggggcuuguggaccuguuuguguucuccaccucuuuuuaccucauuagcaucuuccugcaccugguccggauucccacacaucgccacguuaucggaaaaccuugccccaagccucauagacuuaaucacaugggcauuuguuccugcggccucuauaaacaccccggggugccggugaaguggaagcggugaggacuagucccuguucccagagcccacuuuuuuuucuuuuuuugaaauaaaauagccugucuuucagaucuaaaaaaaaaaaaaaaaaaaaaaaaaaaaaaaaaaaaaaaaaaaaaaaaaaaaaaaaaaaaaaaaaaaaaaaaaaaaaaaaaaaaaaaaaaaaaaaaaaaa

SEQ ID NO: 25554 - RNA, 1740 nt, Artificial Sequence
  mRNA product Design a-2 (A100) comprising derived and/or modified sequence from LASV(Lassa virus/H.sapiens-wt/NGA/2018/ISTH_0959;Clade II)__AVV65099__GPCmut3 (opt5)
aggagaguccgcucagccagguugcagaagcggcuuagcguguguccuaaucuucucucugcguguagguaggccugugccgcaaacaagcuuaccaugggccagaucauuaccuucuuucaagaggugccccacgucaucgaagagguuaugaacauugugcugaucgcccucagccugcuugcuauucugaaggggaucuacaauguggucacaugcggacucuucggccugguguccuuucuucugcucugugggagaucuugcagcacgaccuauaaaggaguuuacgaacugcagacacuggagcucgacauggccucccugaacaugaccaugccucuuucuuguacaaagaauaacagccaucacuauaucauggugggcaaugaaaccgggcuggagcucacacugaccaacacguccauuaucaaucauaaauucugcaaccuuucugaugcgcacaagaaaaaucuguacgaccaugcucucaugagcauuaucuccaccuuucaccugagcauuccgaacuucaaucaguaugaggccaugucuugugauuuuaacggaggcaagaucuccguccaguacaaucugagccacgccuaugcuauugacgccgcuaaccauugcggcacaaucgccaauggggugcuccaaaccuucaugcggauggcguggggaggcucuuacaucgcccuggauuccgggaagggaagcugggacuguauuaugacaucuuaccaguaucuuaucauucagaacaccacgugggaagaucacugccaguuuucccgccccagcccuaucggcuaccuggggcuccugucccaaagaacacgggacauuuauaucucucgcagacggcgcggaaccuucacauggacccuuagcgauuccgagggcaacgaaacccccggcggguacugucugacaagauggaugcucaucgaggcugagcugaaaugcuuuggaaauacggccguugcuaaguguaacgaaaaacaugacgaggaguucugcgauaugcugcggcucuuugacuucaauaagcaggccauucgcagacugaaaaccccugcgcagaugagcauccagcuuauuaacaaggccgugaaugcucugaucaacgaucaacucauuaugaagaaucaucugcgggacaucaugggcauccccuauugcaacuacucuaaauauuguuaccuuaaucacacagucaccgggaagacaucccugccucgcugcugucucgugagcaacggaucuuaccugaaugaaacccacuucagcgacgauauugaacagcaggccgacaacaugaucacggagcugcuccaaaaagaguauauugauagacagggcaagacaccgcuggggcuuguggaccuguuugucuucuccaccucuuuuuaccucaucagcauuuuccugcaccugguuaaaauccccacccaucggcacgugauuggaaagccuugccccaaaccucaucgccuuaaucacaugggcaucuguuccugcggccucuauaagcaccccggggugccggucaaguggaaaagaugaggacuagucccuguucccagagcccacuuuuuuuucuuuuuuugaaauaaaauagccugucuuucagaucuaaaaaaaaaaaaaaaaaaaaaaaaaaaaaaaaaaaaaaaaaaaaaaaaaaaaaaaaaaaaaaaaaaaaaaaaaaaaaaaaaaaaaaaaaaaaaaaaaaaa

SEQ ID NO: 25555 - RNA, 1740 nt, Artificial Sequence
  mRNA product Design a-2 (A100) comprising derived and/or modified sequence from LASV(LASV003-NIG-2008;Clade II)__AIT17580__GPCmut3 (opt5)
aggagaguccgcucagccagguugcagaagcggcuuagcguguguccuaaucuucucucugcguguagguaggccugugccgcaaacaagcuuaccaugggccagaucauuaccuucuuucaagaggugccccacgucaucgaagagguuaugaacauugugcugaucgcccucagccugcuugcuauucugaaggggaucuacaauguggccacaugcggacucuucggccuggucuccuuucuucugcucugugggagaucuugcagcacgaccuauaaaggaguguacgaacugcagacacuggagcucgacauggcgucccugaacaugaccaugccucuuucuuguacaaagaauaacagccaucacuauaucaugguuggcaaugaaaccgggcuggagcucacacugaccaacacguccauuaucaaucauaaauucugcaaccuuucugaugcucacaagaaaaaucuguacgaccaugcccucaugagcauuaucuccaccuuucaccugagcauuccgaacuucaaucaguaugaggccaugucuugugauuuuaacggaggcaagaucuccgugcaguacaaucugagccacacauaugcugucgacgccgcuaaccauugcggcaccauugccaauggggugcuccaaacauucaugcggauggcguggggaggcucuuacaucgcccuggauuccgggaagggaagcugggacuguaucaugaccucuuaccaguaucuuauuauccagaacacgacaugggaagaucacugccaguuuucccgccccagcccuauuggcuaccuggggcuccugucccaaagaacccgggacaucuauauuucucgcagacggcgcggaacauucaccuggacccuuagcgauuccgagagcaacgaaacacccggcggcuacugucugacgagauggaugcucaucgaggcugagcugaaaugcuuugggaauaccgccguugcuaaguguaacgaaaaacaugacgaggaguucugcgauaugcugcggcucuuugacuucaauaagcaggccauccgcagacugaaagcgccugcccagaugucuauucagcuuaucaacaaggcugugaaugcccugauuaacgaucaacucaucaugaagaaucaucugcgggacauuaugggaauccccuauugcaacuacuccaaauauuguuaccuuaaucacacagucaccggccgcacaagccugccuagaugcugucucgugucuaacgggagcuaccugaaugaaacccacuucuccgacgauaucgaacagcaggcugacaacaugauuacggagcugcuccaaaaggaguauauggaucggcagggaaaaacaccgcugggccuuguggaccuguuugucuucucuaccagcuuuuaccucaucuccauuuuccugcaccugguuaagauccccacccaucgccacgugauugggaaaccuugccccaagccucauagacuuaaucacaugggaaucuguagcugcggccucuauaaacaccccggcgugccggucaaguggaagcggugaggacuagucccuguucccagagcccacuuuuuuuucuuuuuuugaaauaaaauagccugucuuucagaucuaaaaaaaaaaaaaaaaaaaaaaaaaaaaaaaaaaaaaaaaaaaaaaaaaaaaaaaaaaaaaaaaaaaaaaaaaaaaaaaaaaaaaaaaaaaaaaaaaaaa

SEQ ID NO: 25556 - RNA, 1740 nt, Artificial Sequence
  mRNA product Design a-2 (A100) comprising derived and/or modified sequence from LASV(LASV035-NIG-2009;Clade II)__AIT17588__GPCmut3 (opt5)
aggagaguccgcucagccagguugcagaagcggcuuagcguguguccuaaucuucucucugcguguagguaggccugugccgcaaacaagcuuaccaugggccagaucauuaccuucuuucaagaggugccccacgucaucgaagagguuaugaacauugugcugaucgcccucagccugcuugcuauucugaaggggaucuacaauguggccacaugcggacucuucggccuggucuccuuucuucugcucugugggagaucuugcagcacgaccuauaaaggaguguacgaacugcagacacuggagcucgacauggcgucccugaacaugaccaugccucuuucuuguacaaagaauaacagccaucacuauaucaugguuggcaaugaaaccgggcuggagcucacacugaccaacacguccauuaucaaucauaaauucugcaaccuuucugaugcucacaagaaaaaucuguacgaccaugcccucaugagcauuaucuccaccuuucaccugagcauuccgaacuucaaucaguaugaggccaugucuugugauuuuaacggaggcaagaucuccgugcaguacaaucugagccacgcuuaugccgucgacgcugccaaccauugcggcacaauugcgaauggggugcuccaaaccuucaugcggauggccuggggaggcucuuacaucgcucuggauuccgggaagggaagcugggacuguaucaugacaucuuaccaguaucuuauuauccagaacaccacgugggaagaucacugccaguuuucccgccccagcccuauuggcuaccuggggcuccugucccaaagaacacgggacaucuauauuucucgcagacggcgcggaaccuucacauggacccuuagcgauuccgagggcaacgaaacccccggcggguacugucugacaagauggaugcucaucgaggccgagcugaaaugcuuuggaaauacggcuguugccaaguguaacgaaaaacaugacgaggaguucugcgauaugcugcggcucuuugacuucaauaagcaggcgauccgcagacugaaagccccugcucagaugagcauucagcuuaucaacaaggccgugaaugcucugauuaacgaucaacucaucaugaagaaucaucugcgggacauuaugggcauccccuauugcaacuacucuaaauauuguuaccuuaaucacaccgucacagggaagaccucccugccucgcugcugucucgugagcaacggaucuuaccugaaugaaacacacuucagcgacgauaucgaacagcaggccgacaacaugauuaccgagcugcuccaaaaagaguauaucgauagacagggcaagacgccgcuggggcuuguggaccuguuugucuucuccacaucuuuuuaccucauuagcaucuuccugcaccugguuaaaauucccacccaucggcacgugaucggaaagccuugccccaaaccucaucgccuuaaucacaugggcauuuguuccugcggccucuauaagcaccccggggugccggucaaguggaaaagaugaggacuagucccuguucccagagcccacuuuuuuuucuuuuuuugaaauaaaauagccugucuuucagaucuaaaaaaaaaaaaaaaaaaaaaaaaaaaaaaaaaaaaaaaaaaaaaaaaaaaaaaaaaaaaaaaaaaaaaaaaaaaaaaaaaaaaaaaaaaaaaaaaaaaa

SEQ ID NO: 25557 - RNA, 1740 nt, Artificial Sequence
  mRNA product Design a-2 (A100) comprising derived and/or modified sequence from LASV(LASV1000-NIG-2009;Clade II)__AIT17782__GPCmut3 (opt5)
aggagaguccgcucagccagguugcagaagcggcuuagcguguguccuaaucuucucucugcguguagguaggccugugccgcaaacaagcuuaccaugggccagaucauuaccuucuuucaagaggugccccacgucaucgaagagguuaugaacauugugcugaucgcccucagccugcuugcuauucugaaggggaucuacaauguggccacaugcggacucuucggccuggucuccuuucuucugcucugugggagaucuugcagcacgaccuauaaaggaguguacgaacugcagacacuggagcucgacauggcgucccugaacaugaccaugccucuuucuuguacaaagaauaacagccaucacuauaucaugguuggcaaugaaaccgggcuggagcucacacugaccaacacguccauuaucaaucauaaauucugcaaccuuucugaugcucacaagaaaaaucuguacgaccaugcccucaugagcauuaucuccaccuuucaccugagcauuccgaacuucaaucaguaugaggccaugucuugugauuuuaacggaggcaagaucuccgugcaguacaaucugagccacacauaugcugucgacgccgcuaaccauugcggcaccauugccaauggggugcuccaaacauucaugcggauggcguggggaggcucuuacaucgcccuggauuccgggaagggaagcugggacuguaucaugaccucuuaccaguaucuuauuauccagaacacgacaugggaagaucacugccaguuuucccgccccagcccuauuggcuaccuggggcuccugucccaaagaacccgggacaucuauauuucucgcagacggcgcggaacauucaccuggacccuuagcgauuccgagggcaacgaaacacccggcggguacugucugacgagauggaugcucaucgaggcugagcugaaaugcuuuggaaauaccgccguugcuaaguguaacgaaaaacaugacgaggaguucugcgauaugcugcggcucuuugacuucaauaagcaggccaucaaacgccugaagaccccugcgcagaugagcauucagcuuaucaacaaggccgugaaugcucugauuaacgaucaacucaucaugaaaaaucaccugagagacauuaugggcauccccuauugcaacuacucuaaguauuguuaccuuaaucacacagucacagggaaaaccucccugccucggugcugucucgugagcaacggaucuuaccugaaugaaacgcauuucagcgacgauaucgaacagcaggccgacaacaugauuacagagcugcuccaaaaggaguauaucgaucgccagggcaaaaccccgcuggggcuuguggaccuguuugucuucuccaccucuuuuuaccucauuagcaucuuccugcaccugguuaagauucccacacauagacacguggugggaaaaccuugccccaagccucaucggcuuaaucacaugggcaucuguuccugcggccucuauaagcaccccggggucccggugaaauggaagcgcugaggacuagucccuguucccagagcccacuuuuuuuucuuuuuuugaaauaaaauagccugucuuucagaucuaaaaaaaaaaaaaaaaaaaaaaaaaaaaaaaaaaaaaaaaaaaaaaaaaaaaaaaaaaaaaaaaaaaaaaaaaaaaaaaaaaaaaaaaaaaaaaaaaaaa

SEQ ID NO: 25558 - RNA, 1740 nt, Artificial Sequence
  mRNA product Design a-2 (A100) comprising derived and/or modified sequence from LASV(LASV221-NIG-2010;Clade II)__AIT17624__GPCmut3 (opt5)
aggagaguccgcucagccagguugcagaagcggcuuagcguguguccuaaucuucucucugcguguagguaggccugugccgcaaacaagcuuaccaugggccagaucauuaccuucuuucaagaggugccccacgucaucgaagagguuaugaacauugugcugaucgcccucagccugcuugcuauucugaaggggaucuacaauguggccacaugcggacucuucggccuggucuccuuucuucugcucugugggagaucuugcagcacgaccuauaaaggaguguacgaacugcagacacuggagcucgacauggcgucccugaacaugaccaugccucuuucuuguacaaagaauaacagccaucacuauaucaugguuggcaaugaaaccgggcuggagcucacacugaccaacacguccauuaucaaucauaaauucugcaaccuuucugaugcucacaagaaaaaucuguacgaccaugcccucaugagcauuaucuccaccuuucaccugagcauuccgaacuucaaucaguaugaggccaugucuugugauuuuaacggaggcaagaucuccgugcaguacaaucugagccacacauaugcuauugacgccgcuaaccauugcggcaccaucgccaaugggguccuccaaacauucaugcggauggcguggggaggcucuuacaucgcccuggauuccgggaagggaagcugggacuguauuaugaccucuuaccaguaucuuaucauucagaacacgacaugggaagaucacugccaguuuucccgccccagcccuaucggcuaccuggggcuccugucccaaagaacccgggacauuuauaucucucgcagacggcgcggaacauucaccuggacccuuagcgauuccgagggcaacgaaacacccggcggguacugucugacgagauggaugcucaucgaggcugagcugaaaugcuuuggaaauaccgccguggcuaaguguaacgaaaaacaugacgaggaguucugcgauaugcugcggcucuuugacuucaauaagcaggccauucgcagacugaaaaccccugcgcagaugagcauccagcuuauuaacaaggccguuaaugcucugaucaacgaucaacucauuaugaagaaucaucugcgggacaucaugggcauccccuauugcaacuacucuaaauauuguuaccuuaaucacacagugacagggaagaccucccugccucgcugcugucucgucagcaacggaucuuaccugaaugaaacgcacuucagcgacgauauugaacagcaggccgacaacaugaucacagagaugcugcaaaaagaguauauggauagacagggcaagaccccgcucgggcugguggaccuuuuuguguucuccaccucuuuuuaccugauuagcaucuuccuccaccuggucaaaauucccacacaucggcacguuaucggaaagccuugccccaaaccucaucgccugaaucacaugggcauuuguuccugcggccuuuauaagcaccccggggugccggugaaguggaaaagaugaggacuagucccuguucccagagcccacuuuuuuuucuuuuuuugaaauaaaauagccugucuuucagaucuaaaaaaaaaaaaaaaaaaaaaaaaaaaaaaaaaaaaaaaaaaaaaaaaaaaaaaaaaaaaaaaaaaaaaaaaaaaaaaaaaaaaaaaaaaaaaaaaaaaa

SEQ ID NO: 25559 - RNA, 1740 nt, Artificial Sequence
  mRNA product Design a-2 (A100) comprising derived and/or modified sequence from LASV(LASV237-NIG-2010;Clade II)__AIT17638__GPCmut3 (opt5)
aggagaguccgcucagccagguugcagaagcggcuuagcguguguccuaaucuucucucugcguguagguaggccugugccgcaaacaagcuuaccaugggccagaucauuaccuucuuucaagaggugccccacgucaucgaagagguuaugaacauugugcugaucgcccucagccugcuugcuauucugaaggggaucuacaauguggccacaugcggacucuucggccuggucuccuuucuucugcucugugggagaucuugcagcacgaccuauaaaggaguguacgaacugcagacacuggagcucgacauggcgucccugaacaugaccaugccucuuucuuguacaaagaauaacagccaucacuauaucaugguuggcaaugaaaccgggcuggagcucacacugaccaacacguccauuaucaaucauaaauucugcaaccuuucugaugcucacaagaaagaccuguacgaucaugcccucaugagcauuaucuccaccuuucaccugagcauuccgaauuucaaccaguaugaggccaugucuugugacuuuaauggaggcaagaucuccgugcaguacaaccugagccacacauaugcugucgaugccgcuaaucauugcggcaccauugccaacggggugcuccaaacauucaugcggauggcguggggaggcucuuacaucgcccuggacuccgggaagggaagcugggauuguaucaugaccucuuaccaguaucuuauuauccagaauacgacaugggaagaccacugccaguuuucccgccccagcccuauuggcuaccuggggcuccugucccaaagaacccgggauaucuauauuucucgcagacggcgcggaacauucaccuggacccuuagcgacuccgagggcaacgaaacacccggcggguacugucugacgagauggaugcucaucgaggcugagcugaaaugcuuuggaaacaccgccguugcuaaguguaaugaaaaacaugaugaggaguucugcgacaugcugcggcucuuugauuucaacaagcaggccauccgcagacugaaaaccccugcgcagaugagcauucagcuuaucaauaaggccgugaacgcucugauuaaugaccaacucaucaugaagaaccaucugcgggacauuaugggcauccccuauugcaauuacucuaaauauuguuaccuuaaccacacagucacagggaagaccucccugccucgcugcugucucgugagcaauggaucuuaccugaacgaaacgcacuucagcgaugacaucgaacagcaggccgauaauaugauuacagagcugcuccaaaaagaguauauggacagacagggcaagaccccgcuggggcuuguggaucuguuugucuucuccaccucuuuuuaccucaucagcauuuuccugcaccugaucaaaauucccacacaucggcacaucaccggaaagccuugccccaaaccucaucgccuuaaccacaugggcauuuguuccugcggccucuauaagcaccccgggguuccggugaaguggaaaagaugaggacuagucccuguucccagagcccacuuuuuuuucuuuuuuugaaauaaaauagccugucuuucagaucuaaaaaaaaaaaaaaaaaaaaaaaaaaaaaaaaaaaaaaaaaaaaaaaaaaaaaaaaaaaaaaaaaaaaaaaaaaaaaaaaaaaaaaaaaaaaaaaaaaaa

SEQ ID NO: 25560 - RNA, 1740 nt, Artificial Sequence
  mRNA product Design a-2 (A100) comprising derived and/or modified sequence from LASV(LASV253-NIG-2011;Clade II)__AIT17670__GPCmut3 (opt5)
aggagaguccgcucagccagguugcagaagcggcuuagcguguguccuaaucuucucucugcguguagguaggccugugccgcaaacaagcuuaccaugggccagaucauuaccuucuuucaagaggugccccacgucaucgaagagguuaugaacauugugcugaucgcccucagccugcuugcuauucugaaggggaucuacaauguggccacaugcggacucuucggccuggucuccuuucuucugcucugugggagaucuugcagcacgaccuauaaaggaguguacgaacugcagacacuggagcucgacauggcgucccugaacaugaccaugccucuuucuuguacaaagaauaacagccaucacuauaucaugguuggcaaugaaaccgggcuggagcucacacugaccaacacguccauuaucaaucauaaauucugcaaccuuucugaugcucacaagaaaaaucuguacgaccaugcccucaugagcauuaucuccaccuuucaccugagcauuccgaacuucaaucaguaugaggccaugucuugugauuuuaacggaggcaagaucuccgugcaguacaaucugagccacacauaugcugucgacgccgcuaaccauugcggcaccauugccaauggggugcuccaaacauucaugcggauggcguggggaggcucuuacaucgcccuggauuccgggaagggaagcugggacuguaucaugaccucuuaccaguaucuuauuauccagaacacgacaugggaagaucacugccaguuuucccgccccagcccuauuggcuaccuggggcuccugucccaaagaacccgggacaucuauauuucucgcagacggcgcggaacauucaccuggacccuuagcgauuccgagggcaacgaaacacccggcggguacugucugacgagauggaugcucaucgaggcugagcugaaaugcuuuggaaauaccgccguugcuaaguguaacgaaaaacaugacgaggaguucugcgauaugcugcggcucuuugacuucaauaagcaggccauccgcagacugaaagcgccugcccagaugagcauucagcuuaucaacaaggcugugaaugcccugauuaacgaucaacucaucaugaagaaucaucugcgggacauuaugggcauccccuauugcaacuacucuaaauauuguuaccuuaaucacacagucaccgggcgcacaucccugccuagaugcugucucgugagcaacggaucuuaccugaaugaaacccacuucagcgacgauaucgaacagcaggcugacaacaugauuacggagcugcuccaaaaggaguauaucgaucggcagggcaaaacaccgcuggggcuuguggaccuguuugucuucuccaccucuuuuuaccucauuagcaucuuccugcaccugguuaagauucccacccaucgccacaucauuggaaaaccuugccccaagccucauagacuuaaucacaugggcaucuguuccugcggccucuauaaacaccccggggugccggugaaguggaagcggugaggacuagucccuguucccagagcccacuuuuuuuucuuuuuuugaaauaaaauagccugucuuucagaucuaaaaaaaaaaaaaaaaaaaaaaaaaaaaaaaaaaaaaaaaaaaaaaaaaaaaaaaaaaaaaaaaaaaaaaaaaaaaaaaaaaaaaaaaaaaaaaaaaaaa

SEQ ID NO: 25561 - RNA, 1740 nt, Artificial Sequence
  mRNA product Design a-2 (A100) comprising derived and/or modified sequence from LASV(LASV254-NIG-2011;Clade II)__AIT17674__GPCmut3 (opt5)
aggagaguccgcucagccagguugcagaagcggcuuagcguguguccuaaucuucucucugcguguagguaggccugugccgcaaacaagcuuaccaugggccagaucauuaccuucuuucaagaggugccccacgucaucgaagagguuaugaacauugugcugaucgcccucagccugcuugcuauucugaaggggaucuacaauguggccacaugcggacucuucggccuggucuccuuucuucugcucugugggagaucuugcagcacgaccuauaaaggaguguacgaacugcagacacuggagcucgacaugaccaaccugaauaugacaaugccucuuuccuguaccaagaacaauucucaucacuauaucaugguuggcaacgaaacagggcuggagcucacccugacgaauaccagcauuaucaaccauaaauucugcaaucuuuccgaugcgcacaagaaaaaccuguacaaucaugcucucaugucuauuaucagcacauuucaccuguccauuccgaacuucaaucaguaugaggccaugagcugugacuuuaacggaggcaagaucucugugcaguacaaucugucccacagcuaugccgucgaugcugccaaccauugcggcaccauugcuaacggggugcuccaaacauucaugcggauggccuggggaggcucuuacaucgcgcuggacuccgggaagggaaauugggauuguaucaugaccagcuaccaguaucuuauuauccagaacacgacaugggaagaccacugccaguuuucucgccccuccccuauuggcuaccuggggcuccugagccaaagaacccgggauaucuauauuucccgcagacggcgcggaacauucaccuggacccuuucugacagcgagggcaaugaaacacccggcggguacugucugacgagauggaugcucaucgaggccgagcugaaaugcuuuggaaacaccgcuguugccaaguguaaugaaaaacaugaugaggaguucugcgacaugcugcggcucuuugauuucaacaagcaggcuauccgcagacugaaaaccccugcccaggcgaauauucagcuuaucaacaaggccgugaaugcucugauuaacgaccaacucaucaugaagaaucaucugcgggauauuaugggcauccccuauugcaacuacuccaaauauuguuaccuuaaucacacagucacagggaagaccagccugccucgcugcugucucgugucuaacggauccuaccugaaugaaacgcacuucagcgacgacaucgaacagcaggccgauaacaugauuacagagcugcuccaaaaagaguauauggacagacagggcaagaccccgcuggggcuuguggaucuguuugucuucucuaccagcuuuuaccucaucuccauuuuccugcaccugguuaaaauccccacacaucggcacgugauuggaaagccuugccccaaaccucaucgccuuaaccacaugggcaucuguucuugcggccucuauaagcaccccggggugccggucaaguggaaaagaugaggacuagucccuguucccagagcccacuuuuuuuucuuuuuuugaaauaaaauagccugucuuucagaucuaaaaaaaaaaaaaaaaaaaaaaaaaaaaaaaaaaaaaaaaaaaaaaaaaaaaaaaaaaaaaaaaaaaaaaaaaaaaaaaaaaaaaaaaaaaaaaaaaaaa

SEQ ID NO: 25562 - RNA, 1740 nt, Artificial Sequence
  mRNA product Design a-2 (A100) comprising derived and/or modified sequence from LASV(Nig08-A19;Clade III)__ADU56618__GPCmut3 (opt5)
aggagaguccgcucagccagguugcagaagcggcuuagcguguguccuaaucuucucucugcguguagguaggccugugccgcaaacaagcuuaccaugggccagaucgugaccuucuuucaagaggucccccacguuauugaagaggugaugaacaucgugcugauugcccucagcauccuggcuauucuuaaggggcuguacaauaucgccacaugcggacucaucggccuggucacguuccuucugcucuccgggagaucuuguagcaugaccuauaaaggaguguacgaacugcagacacuggagcucaacaugaauacccugaacaugacaaugccucuuuccugcaccaagaauaacucucaucacuauauuaugguuggcaaugaaacagggcuggagcucacccugacgaacaccagccuucugcaucacaaauuuuguaaucucuccgacgcgcauaagaaaaaccuguacgaucacacacugaugucuaucauuagcaccuuccaccucuccaucccgaauuuuaaccaguaugaggcuaugagcugcgacuucaauggaggcaagauuacagugcaguacaaccugucucauuccuaugccaucgaugccgcuaaucacuguggcaccgucgccaacggggugcuucaaacguuuaugcggauggcuuggggaggcagcuacauugcccuggacucugggcgcggaaagugggauugcaucaugacauccuaccaguaucucaucauucagaacaccacaugggaagaccauugucaguucagcagacccucuccuaucggcuaccuggggcuucugucccaacggacccgcgauauuuauaucagcagacggcgcagaggaaccuuuacauggacgcucuccgacucugagggcaaugaaacccccggcggguacugccugacacgguggaugcugauugaggcggagcucaaauguuucggaaacaccgccguugcuaagugcaaugaaaaacacgaugaggaauuuugugacaugcugcgccuuuucgauuuuaacaagcaggccaucagacggcugaaagcuccugcccagaugagcauccagcucauuaauaaggcggugaacgcccugaucaaugaccaacuuauuaugaagaaccaucugcgcgauaucaugggcauucccuauugcaauuacuccaaauauugcuaccucaaccacacaagcaccgggagaacgucucugccucgguguugccuggucuccaauggaagcuaccucaacgagacacacuucucugacgacaucgaacagcaggcugauaauaugaucaccgagaugcugcaaaaggaguaucuugaccgccagggcaaaaccccgcuggggcucguggaucuguucguguuuagcacauccuucuaccugauuucuaucuuucuucaucucgucaagauucccacccacagacauaucguuggaaaaccuugucccaagccucaccggcugaaccacaugggcauuugcagcuguggccuguauaaacagcccggggugccggugagauggaagcgcugaggacuagucccuguucccagagcccacuuuuuuuucuuuuuuugaaauaaaauagccugucuuucagaucuaaaaaaaaaaaaaaaaaaaaaaaaaaaaaaaaaaaaaaaaaaaaaaaaaaaaaaaaaaaaaaaaaaaaaaaaaaaaaaaaaaaaaaaaaaaaaaaaaaaa

SEQ ID NO: 25563 - RNA, 1743 nt, Artificial Sequence
  mRNA product Design a-2 (A100) comprising derived and/or modified sequence from LASV(G1180-SLE-2010;Clade IV)__AIT17168__GPCmut3 (opt5)
aggagaguccgcucagccagguugcagaagcggcuuagcguguguccuaaucuucucucugcguguagguaggccugugccgcaaacaagcuuaccaugggccagaucgugaccuucuuucaagaggucccccacguuauugaagaggugaugaacaucgugcugauugcccucagcauccuggcuguccuuaaggggcuguacaauuucgccacaugcggacucgugggccugcuuacguuucugcuccugugugggagauccugcaccgcgucucgguauaaaggaguuuacgaacugcagacacucgagcugaacauggaaacccuuaauaugacaaugccucugagcuguaccaagaacaauucccaucacuauauuauggugggcaacgagacagggcucgagcugacccuuacgaauaccucuaucaucaaccauaaauucugcaaucugagcgacgcucacaagaaaaaccucuacgaucaugcccugauguccauuaucucuacauuucaccugagcauuccgaauuucaaccaguaugaagccauguccugugacuuuaauggaggcaagaucagcguccaguacaaccucucucacuccuaugcuggcgaugccgcuaaucauugcgggaccguggccaacggaguucugcaaacauucaugcgcauggcguggggcgggagcuacauugcccuugacucuggacacggcuccugggauuguaucaugaccagcuaccaguaucugauuauccagaacacgacaugggaggaccauugccaguuuucuagacccuccccuaucggguaccucggacugcuuagccaacggacccgcgauauuuauaucuccagacggcgcagaggcacauucaccuggacccugucugacagcgaaggcaaggauacacccgggggauacugucucacgcgguggaugcugauugaggcugagcugaaaugcuuuggcaauaccgccguggcuaaguguaacgaaaaacacgacgaggaguucugcgauaugcuccgccuguuugacuucaauaagcaggccauccagagacuuaaagcgccugcccagauguccauucaacugaucaacaaggcugucaaugcccucaucaacgaucagcugauuaugaagaaucaccuucgggacaucauggggauucccuauugcaacuacagcaaauauuguuaccugaaucauacaaccacaggaaagaccucucucccuaaaugcugucugguguccaacggcagcuaccugaaugaaacgcacuucucugacgauaucgaacagcaagcugacaacaugauuacagagaugcuccagaaggaguauauggaacgccaggggaaaaccccgcugggacuuguggaucuguuugucuucagcaccuccuuuuaccucaucucuaucuuccugcaucugguuaagauucccacacacagacauaucgugggcaaaagcugcccuaagccccaccggcuuaaucacaugggcauuuguuccugcgggcucuauaagcagccuggagugcccgucaaauggaagcgcugaggacuagucccuguucccagagcccacuuuuuuuucuuuuuuugaaauaaaauagccugucuuucagaucuaaaaaaaaaaaaaaaaaaaaaaaaaaaaaaaaaaaaaaaaaaaaaaaaaaaaaaaaaaaaaaaaaaaaaaaaaaaaaaaaaaaaaaaaaaaaaaaaaaaa

SEQ ID NO: 25564 - RNA, 1743 nt, Artificial Sequence
  mRNA product Design a-2 (A100) comprising derived and/or modified sequence from LASV(G1442-SLE-2011;Clade IV)__AIT17180__GPCmut3 (opt5)
aggagaguccgcucagccagguugcagaagcggcuuagcguguguccuaaucuucucucugcguguagguaggccugugccgcaaacaagcuuaccaugggccagaucgugaccuucuuucaagaggucccccacguuauugaagaggugaugaacaucgugcugauugcccucagcauccuggcuguccuuaaggggcuguacaauguggccacaugcggacucauuggccugguuacguuccuucugcucugugggagauccugcaccacaacccuguauaaaggaguguacgaacugcagacacucgagcugaacauggaaacccuuaauaugacaaugccucugucuuguaccaagaacaauagccaucacuauauccgggucggcaacgagacggggcucgagcugacccuuacaaauaccuccaucauuaaccauaaauuuugcaaucugucugacgcgcacaagaaaaaccucuacgaucaugcucugaugagcaucauuuccacauuccaccugucuaucccgaauuuuaaccaguaugaagccaugagcugugacuucaauggaggcaagauuuccgugcaguacaaccucagccacucuuaugccggcgaugcugccaaucauugcgggaccguugcuaacggagugcugcaaacguuuaugcgcauggccuggggcggguccuacaucgcgcuugacagcggaagaggcaacugggauuguauuaugacaucuuaccaguaucugaucauccagaauaccacaugggacgaucacugccaguucucccggcccagcccuauuggguaccucggacugcuuucucaacgcaccagagacgucuauaucucccggcgcagacggggcaccuuuacauggacgcugagcgauuccgagggcaaggacacccccgggggauacugucucacacgcuggaugcugauugaagccgagcugaaaugcuucggcaacaccgcuguggccaaguguaaugagaaacaugaugaagaguuuugcgacaugcucagacuguucgauuuuaacaagcaggcuauccagcggcuuaaagccccugcgcagaugucuauucaacugaucaauaaggccgugaacgcucucaucaaugaccagcugauuaugaagaaccaccuucgcgacaucauggggauucccuauugcaauuacagcaaauauuguuaccugaacaauacagccaccggaaagacgucccucccuaaaugcugucugaucagcaacggcucuuaccugaaugaaacacacuucuccgaugacauugagcaggaagcugauaacaugaucaccgagaugcuccaaaaggaguauauggaaagacaggggaaaaccccgcugggacuugucgaccuguucguuuuuagcacaucuuucuaccucaucagcauuuuucugcaucuggugaagauccccacccaccggcauauugugggcaaauccugcccuaagccccaccgccuuaaucauaugggcaucuguucuugcgggcucuauaagcagccuggaguccccgugagauggaaacggugaggacuagucccuguucccagagcccacuuuuuuuucuuuuuuugaaauaaaauagccugucuuucagaucuaaaaaaaaaaaaaaaaaaaaaaaaaaaaaaaaaaaaaaaaaaaaaaaaaaaaaaaaaaaaaaaaaaaaaaaaaaaaaaaaaaaaaaaaaaaaaaaaaaaa

SEQ ID NO: 25565 - RNA, 1743 nt, Artificial Sequence
  mRNA product Design a-2 (A100) comprising derived and/or modified sequence from LASV(G3010-SLE-2013;Clade IV)__AIT17344__GPCmut3 (opt5)
aggagaguccgcucagccagguugcagaagcggcuuagcguguguccuaaucuucucucugcguguagguaggccugugccgcaaacaagcuuaccaugggccagaucgugaccuucuuucaagaggucccccacguuauugaagaggugaugaacaucgugcugauugcccucagcauccuggcuguccuuaaggggcuguacaauuucgccacaugcggacucgugggccugguuacguuucuucugcucugugggagauccugcaccacaucucuguauaaaggaguguacgaacugcagacccucgagcugaacauggaaacacuuaauaugaccaugccucugagcuguacaaagaacaauucccaucacuauauuauggucggcaacgagaccgggcucgagcugacgcuuaccaauacaucuaucaucaaccauaaauucugcaaucugagcgacgcgcacaagaaaaaccucuacaaucaugcucugauguccauuaucucuaccuuucaccugagcauuccgaacuucaaucaguaugaagccauguccugugauuuuaacggaggcaagaucagcgugcaguacaaucucucucacuccuaugccggcgacgcugccagccauugcgggacaguugcuaacggagugcugcaaaccuucaugcggauggccuggggcgggucuuacauugcgcuugauuccggauacggcaagugggacuguaucaugacgagcuaucaguaccugauuauccagaacacaaccugggaggaucacugccaguuuucucgccccuccccuaucggguaucucggacugcuuagccaaagaacacgggacauuuacaucucccgcagacggcgcggcaccuucaccuggacacugucugauagcgaaggcaaagacacgcccgggggauauugucucaccagauggaugcugauugaggccgagcugaagugcuuuggcaauacagcugucgccaaauguaacgaaaagcaugaugaggaguucugcgacaugcuccggcuguuugauuucaauaaacaggcuauccagcgccuuaagaccccugcccagauguccauucaacugaucaacaaggcggugaaugcccucaucaacgaccagcugauuaugaaaaaucaccuuagagauaucauggggauucccuacugcaacuauagcaaguacuguuaccugaaucacacaaccacgggaaaaacaucucucccuaagugcugucugguguccaacggcagcuaucugaaugaaacccauuucucugacgacaucgaacagcaagcugauaacaugauuaccgagaugcuccagaaagaguacauggaacggcaggggaagacaccgcugggacuugucgaccuguuuguuuucagcaccuccuuuuaucucaucucuaucuuccugcaccuggugaaaauucccacacaucgccacaucgugggcaagagcugcccuaagccccauagacuuaaucacaugggcauuuguuccugcgggcucuacaaacagccuggaguccccgugcgguggaagcgcugaggacuagucccuguucccagagcccacuuuuuuuucuuuuuuugaaauaaaauagccugucuuucagaucuaaaaaaaaaaaaaaaaaaaaaaaaaaaaaaaaaaaaaaaaaaaaaaaaaaaaaaaaaaaaaaaaaaaaaaaaaaaaaaaaaaaaaaaaaaaaaaaaaaaa

SEQ ID NO: 25566 - RNA, 1743 nt, Artificial Sequence
  mRNA product Design a-2 (A100) comprising derived and/or modified sequence from LASV(G502-SLE-2009;Clade IV)__AIT17126__GPCmut3 (opt5)
aggagaguccgcucagccagguugcagaagcggcuuagcguguguccuaaucuucucucugcguguagguaggccugugccgcaaacaagcuuaccaugggccagaucgugaccuucuuucaagaggucccccacguuauugaagaggugaugaacaucgugcugauugcccucagcauccuggcuguccuuaaggggcuguacaauuucgccacaugcggacucgugggccugcuuacguuucugcuccugugugggagauccugcaccacaggacuguauaaaggcguuuacgaacuccagacccuggagcuuaacauggaaacacugaauaugaccaugccucucucuuguacaaagaacaauagccaucacuauauuaugguggggaacgagaccggacuggagcuuacgcugaccaauacauccaucaucaaccauaaauucugcaaucucucugacgcgcacaagaaaaaccuguacgaucaugcucugaugagcauuaucuccaccuuucaccucucuauuccgaauuucaaccaguaugaagccaugagcugugacuuuaauggcggcaagaucuccguccaguacaaccugagccacucuuaugccggggaugcugccgaccauugcggaacaguggcuaauggcguucuucaaaccuucaugcggauggccuggggaggguccuacauugcgcuggauagcggccgcgggagaugggacuguaucaugacgucuuaccaguaucucauuauccagaacacaaccugggaggaucacugccaguuuucccggcccagcccuaucggauaccugggccuucugucucaacgcacaagagacauuuauaucucccggcgcagacggggcaccuucaccuggacacucagcgauuccgaagggaaggacacgcccggaggcuacugucugacccgcuggaugcugauugaggccgagcucaaaugcuuugggaacacagcuguggccaaguguaaugaaaaacaugaugaggaguucugcgacaugcugagacuuuuugauuucaacaagcaggcuauccagcggcugaaagccccugcgcagaugucuauucaacucaucaauaaggccgucaacgcucugaucaaugaccagcuugugaugaagaaccaucugcgcgacauuaugggaauccccuauugcaauuacagcagauauuguuaccucaaccacaccacaaccggccggacgucccugccuaaaugcugucuggugagcaaugggucuuaccucaacgaaacacacuucuccgaugacauugaacagcaagccgauaauaugaucaccgagaugcugcagaaggaguauauggaacgccagggaaaaaccccgcuuggccuggucgaccucuuuguuuucagcacaucuuuuuaccugauuagcaucuuccugcaccuugugaagauccccacccauagacacauugugggcaaauccugcccuaagccccaucggcucaaccacauggggaucuguucuugcggacuguauaaacagccuggcguccccgugaaguggaagagaugaggacuagucccuguucccagagcccacuuuuuuuucuuuuuuugaaauaaaauagccugucuuucagaucuaaaaaaaaaaaaaaaaaaaaaaaaaaaaaaaaaaaaaaaaaaaaaaaaaaaaaaaaaaaaaaaaaaaaaaaaaaaaaaaaaaaaaaaaaaaaaaaaaaaa

SEQ ID NO: 25567 - RNA, 1743 nt, Artificial Sequence
  mRNA product Design a-2 (A100) comprising derived and/or modified sequence from LASV(G733-SLE-2010;Clade IV)__AIT17154__GPCmut3 (opt5)
aggagaguccgcucagccagguugcagaagcggcuuagcguguguccuaaucuucucucugcguguagguaggccugugccgcaaacaagcuuaccaugggccagaucgugaccuucuuucaagaggucccccacguuauugaagaggugaugaacaucgugcugauugcccucagcauccuggcuguccuuaaggggcuguacaauuucgccacaugcggaauugugggccucguuuccuuucugcuucugugugggagaucuugcacgaccagccucuauaaaggaguguacgaacugcagacacuggagcucaacauggaaacccugaauaugacaaugccucuuuccuguaccaagaacaauucucaucacuauaucauggucggcaacgagacagggcuggagcucacccugacgaauaccagcaucauuaaccauaaauucugcaaucuuuccgacgcgcacaagaaaaaccuguacgaucaugcucucaugucuaucauuagcacauuucaccuguccaucccgaauuucaaccaguaugaagccaugagcugugacuuuaauggaggcaagauuucugugcaguacaaccugucccacagcuaugccggcgaugcugccaaucauugcgggaccaucgcuaacggaguucuccaaacauucaugcggauggccuggggcgggucuuacauugcgcuggacuccggacgcgauagaugggacuguaucaugaccagcuaccaguaucuuaucauucagaacacgacaugggaggaucacugccaguuuucucggcccuccccuaucggcuaccuggggcuccugagccaacgcaccagagacauuuauaucucccggcgcagacggggaacauucaccuggacccuuucugauagcgaaggcaaggacacacccggcggguacugucugacgcgcuggaugcucauugaggccgagcugaaaugcuuuggaaauaccgcuguggccaaguguaacgaaaaacaugaugaggaguucugcgacaugcugagacucuuugauuucaauaagcaggcuauccagcggcugaaagccccugcgcagauguccauccaacuuauuaacaaggccgucaaugcucugaucaacgaccagcucauuaugaagaaucaucugcgcgacaucaugggcauucccuauugcaacuacagcaaauauuguuaccuuaaucacacaaccacagggaagaccucucugccuaaaugcugucucguguccaacggaagcuaccugaaugaaacgcacuucucugaugacaucgaacagcaagccgauaacaugaucacagagaugcugcagaaggaguauauggaaagacagggcaaaaccccgcucgggcugguggaccuuuuugucuucagcaccuccuuuuaccugauuucuaucuuccuccaccugguuaagauucccacacaucggcacguggugggaaaaagcugcccuaagccccaucgccugaaucacaugggcaucuguuccugcggccuuuaugggcagccuggaguccccgugaaguggaaaagaugaggacuagucccuguucccagagcccacuuuuuuuucuuuuuuugaaauaaaauagccugucuuucagaucuaaaaaaaaaaaaaaaaaaaaaaaaaaaaaaaaaaaaaaaaaaaaaaaaaaaaaaaaaaaaaaaaaaaaaaaaaaaaaaaaaaaaaaaaaaaaaaaaaaaa

SEQ ID NO: 25568 - RNA, 1743 nt, Artificial Sequence
  mRNA product Design a-2 (A100) comprising derived and/or modified sequence from MOPV/LASV reassortant(IGS-1;Clade IV)__AFY05576__GPCmut3 (opt5)
aggagaguccgcucagccagguugcagaagcggcuuagcguguguccuaaucuucucucugcguguagguaggccugugccgcaaacaagcuuaccaugggccagaucgugaccuucuuucaagaggucccccacguuauugaagaggugaugaacaucgugcugauugcccucagcguccuggcugugcuuaaggggcuguacaauuucgccacaugcggacucguuggccuggugacguuucuucugcucugugggagauccugcaccacaucucuguauaaaggagucuacgaacugcagacccucgagcugaacauggaaacacuuaauaugaccaugccucugagcuguacaaagaacaauucccaucacuauaucauggugggcaacgagaccgggcucgagcugacgcuuaccaauacaucuauuaucaaccauaaauucugcaaucugagcgacgcgcacaagaaaaaccucuacgaucaugcucugauguccaucauuucuaccuuucaccugagcaucccgaauuucaaccaguaugaagccauguccugugacuuuaauggaggcaagauuagcguucaguacaaccucucucacuccuaugccggcgaugcugccaaucauugcgggacaguggcuaacggaguccugcaaaccuucaugcggauggccuggggcgggagcuacaucgcgcuugacucuggacgcggcaacugggauuguauuaugacguccuaccaguaucugaucauucagaauacaaccugggaggaccacugccaguuuagcagacccucuccuaucggguaccucggacugcuuucccaacggacacgcgauaucuauauuagcagacggcgcagaggcaccuucaccuggacacuguccgacucugaaggcgaggauacgcccgggggauacugucucacccgguggaugcugaucgaggccgaacugaagugcuuuggcaacacagcuguggccaaauguaaugagaagcaugacgaagaguucugcgauaugcuccgccuguuugacuucaacaaacaggcuauucagagacuuaaggccccugcgcagaugagcauccaacugauuaauaaagccgugaacgcucucaucaaugaucagcugaucaugaagaaccaccuucgggacauuauggggauccccuauugcaauuacuccaaguauuguuaccugaaccacaccacaaccggacgcacgagccucccuaaaugcugucuggucucuaauggcuccuaccugaacgaaacacauuucagcgacgauauugagcagcaagccgacaauaugaucaccgagaugcuccagaaggaauauauggagagacaggggaaaaccccgcugggacuuguugaucuguuuguguucucuaccagcuuuuaccucauuuccaucuuccugcaccuggugaagauccccacacaucggcacauugucggcaaaucuugcccuaagccccaucgccuuaaccacaugggcaucuguagcugcgggcucuauaaacagccuggagugcccguuaaguggaagagaugaggacuagucccuguucccagagcccacuuuuuuuucuuuuuuugaaauaaaauagccugucuuucagaucuaaaaaaaaaaaaaaaaaaaaaaaaaaaaaaaaaaaaaaaaaaaaaaaaaaaaaaaaaaaaaaaaaaaaaaaaaaaaaaaaaaaaaaaaaaaaaaaaaaaa

SEQ ID NO: 25569 - RNA, 1743 nt, Artificial Sequence
  mRNA product Design a-2 (A100) comprising derived and/or modified sequence from LASV(LM765-SLE-2012;Clade IV)__AIT17814__GPCmut3 (opt5)
aggagaguccgcucagccagguugcagaagcggcuuagcguguguccuaaucuucucucugcguguagguaggccugugccgcaaacaagcuuaccaugggccagaucgugaccuucuuucaagaggucccccacguuauugaagaggugaugaacaucgugcugauugcccucagcauccuggcuguccuuaaggggcuguacaauuucgccacaugcggacucgugggccugguuacguuucuucugcucugugggagauccugcaccacaucucuguauaaaggaguguacgaacugcagacccucgagcugaacauggaaacacuuaauaugaccaugccucugagcuguacaaagaacaauucccaucacuauauuauggucggcaacgagaccgggcucgagcugacgcuuaccaauacaucuaucaucgaccauaaauucugcaaccugagcgaugcgcaccggaagaaucucuacgaccaugcucugauguccauuaucucuaccuuucaccugagcauuccgaacuucaaucaguaugaagccauguccugugauuuuaacggaggcaaaaucagcgugcaguacaaucucucucacuccuaugccaaggacgcugccgaucauugcggcacaguugcuaacggggugcugcaaaccuucaugcgcauggccuggggaggcagcuacauugcgcuugacucugggagaggacggugggauuguaucaugacguccuaccaguaucugauuauccagaauacaaccugggaggaccacugccaguuuagccgccccucuccuaucggcuaccucgggcugcuuucccaaagaacacgggauauuuauaucagccgcagacggcgcggaaccuucaccuggacacuguccgacucugaaggcaaggauacgcccggcggguacugucucaccagauggaugcugauugaggccgagcugaaaugcuuuggaaacacagcugucgccaaguguaacgaaaaacaugacgaggaguucugcgauaugcuccggcuguuugacuucaauaagcaggcuauccagcgccuuaaagccccugcgcagaugagcauucaacugaucaacaaggccgugaaugcucucaucaacgaccagcugauuaugaagaaucaccuuagagauaucaugggcauucccuauugcaacuacuccaaauauuguuaccugaaucacaccacaaccgggaagacgagccucccuaaaugcugucuggugucuaacggauccuaccugaaugaaacacauuucagcgacgauaucgaacagcaagccgacaacaugauuaccgagaugcuccagaaggaguauauggaacggcagggcaaaaccccgcuggggcuugucgaucuguuuguuuucucuaccagcuuuuaccucaucuccaucuuccugcaccuggugaagauucccacacaucgccacaucgugggaaaaccuugccccaagccucauagacuuaaucacaugggcauuuguucuugcggccucuauaagcagcccggggucccggugaaauggaagcggugaggacuagucccuguucccagagcccacuuuuuuuucuuuuuuugaaauaaaauagccugucuuucagaucuaaaaaaaaaaaaaaaaaaaaaaaaaaaaaaaaaaaaaaaaaaaaaaaaaaaaaaaaaaaaaaaaaaaaaaaaaaaaaaaaaaaaaaaaaaaaaaaaaaaa

SEQ ID NO: 25570 - RNA, 1743 nt, Artificial Sequence
  mRNA product Design a-2 (A100) comprising derived and/or modified sequence from LASV(LM776-SLE-2012;Clade IV)__AIT17824__GPCmut3 (opt5)
aggagaguccgcucagccagguugcagaagcggcuuagcguguguccuaaucuucucucugcguguagguaggccugugccgcaaacaagcuuaccaugggccagaucgugaccuucuuucaagaggucccccacguuauugaagaggugaugaacaucgugcugauugcccucagcauccuggcuguccuuaaggggcuguacaauuucgccacaugcggacucgugggccugguuacguuucuucugcucugugggagauccugcaccacaucuguguauaaaggagucuacgaacugcagacccuggagcucaacauggaaacacugaauaugaccaugccucuuagcuguacaaagaacaauucccaucacuauauuauggugggcaacgagaccgggcuggagcucacgcugaccaauacaucuaucaucaaccauaaauucugcaaucuuagcgacgcgcacaagaaaaaccuguacgaucaugcucucauguccauuaucucuaccuuucaccugagcauuccgaauuucaaccaguaugaagccauguccugugacuuuaauggaggcaagaucagcguucaguacaaccugucucacuccuaugccggcgaugcugccaaucauugcgggacaguggcuaacggaguccuccaaaccuucaugcggauggccuggggcgggagcuacauugcgcuggacucuggacacggcaagugggauuguaucaugacguccuaccaguaucuuauuauccagaacacaaccugggaggaccauugccaguuuagccgccccucuccuaucggguaccugggacuccugucccaaagaacacgggauauuuauaucagccgcagacggcgcggcaccuucaccuggacacuuuccgacucugaaggcaaagauacgcccgggggauacugucugaccagauggaugcucauugaggccgagcugaagugcuuuggcaauacagcuguggccaaauguaacgaaaagcacgacgaggaguucugcgauaugcugcggcucuuugacuucaauaaacaggcuauccagcgccugaaggccccugcgcagaugagcauucaacuuaucaacaaggccgugaaugcucugaucaacgaucagcucauuaugaaaaaucaccugagagacaucauggggauucccuauugcaacuacuccaaguauuguuaccuuaaucauaccacaaccggaaaaacgagccugccuaagugcugucucgucucuaacggcuccuaccugaaugaaacacacuucagcgacgauaucgaacagcaagccgacaacaugauuaccgagaugcugcagaaagaguauauggaacggcaggggaagaccccgcucggacugguugaucuuuuuguguucucuaccagcuuuuaccugaucuccaucuuccuccaucuggugaaaauucccacacaccgccauaucgucggcaagucuugcccuaagccccacagacugaaucacaugggcauuuguagcugcgggcuuuauaaacagccuggagugcccguucgguggaagcgcugaggacuagucccuguucccagagcccacuuuuuuuucuuuuuuugaaauaaaauagccugucuuucagaucuaaaaaaaaaaaaaaaaaaaaaaaaaaaaaaaaaaaaaaaaaaaaaaaaaaaaaaaaaaaaaaaaaaaaaaaaaaaaaaaaaaaaaaaaaaaaaaaaaaaa

SEQ ID NO: 25571 - RNA, 1743 nt, Artificial Sequence
  mRNA product Design a-2 (A100) comprising derived and/or modified sequence from LASV(Mad39;Clade IV)__ANH09722__GPCmut3 (opt5)
aggagaguccgcucagccagguugcagaagcggcuuagcguguguccuaaucuucucucugcguguagguaggccugugccgcaaacaagcuuaccaugggccagaucgugaccuucuuucaagaggucccccacguuauugaagaggugaugaacaucgugcugauugcccucagcauccuggcuguccuuaaggggcuguacaauguggccacaugcggacucauuggccugguuacguuccuucugcucugugggagauccugcaccacaacccuguauaaaggaguguacgaacugcaggcgcucgagcugaacauggaaacacuuaauaugaccaugccucugucuuguacaaagaacaauagccaucacuauauccgggucggcaacgagaccgggcucgagcugacgcuuaccaauacaucccugaucaaccauaaauuuugcaaucucucugacgcucacaagaaaaaccuguacgaucaugcccugaugagcauuaucuccaccuuccaccucucuauuccgaauuuuaaccaguaugaagccaugagcugugacuucaaugauggaaagaucuccgugcaguacaaccugagccacacauaugcuggcgacaccgccaaucauugcggcacgguugcuaacggggugcuucaaacauuuaugcgcauggccuggggaggcucuuacauugcgcuggauuccgggagaggaggcugggacuguaucaugaccagcuaccaguaucucauuauccagaacacaaccugggaggaucacugccaguucucucggcccuccccuaucggguaccugggacuucugagccaacgcaccagagacauuuauaucucucggcgcagacggggcacauuuacguggacccucuccgauagcgaaggcaaggacacacccgggggauacugucugacccgcuggaugcugauugaggccgagcucaaaugcuucggcaauacagcugucgccaaguguaacgaaaaacaugaugaggaauuuugcgacaugcugagacuuuucgauuuuaauaagcaggcuauccagcggcugaaagccccugcgcagauguccauucaacucaucaacaaggccgugaaugcucugaucaacgaccagcuuauuaugaagaaucaucugcgcgacaucauggggauucccuauugcaacuacucuaaauauuguuaccucaaucacaccgugacgggaaagacaagccugccuaaaugcugucuggucuccaacggcagcuaccucaaugagacccacuucucugaugacaucgaacagcaagccgauaacaugauuaccgagaugcugcagaaggaguauauggaaagacaggggaaaacaccgcuuggacugguugaccucuucguguuuuccaccagcuucuaccugaucucuaucuuucugcaccuugugaagauucccacacaucggcacgucgugggcaaaccuugccccaagccucaucgccucaaucacaugggcaucuguagcugcggguucuauaagcagcccggaguuccggugagauggaaacggugaggacuagucccuguucccagagcccacuuuuuuuucuuuuuuugaaauaaaauagccugucuuucagaucuaaaaaaaaaaaaaaaaaaaaaaaaaaaaaaaaaaaaaaaaaaaaaaaaaaaaaaaaaaaaaaaaaaaaaaaaaaaaaaaaaaaaaaaaaaaaaaaaaaaa

SEQ ID NO: 25572 - RNA, 1743 nt, Artificial Sequence
  mRNA product Design a-2 (A100) comprising derived and/or modified sequence from LASV(Z0947-SLE-2011;Clade IV)__AIT17840__GPCmut3 (opt5)
aggagaguccgcucagccagguugcagaagcggcuuagcguguguccuaaucuucucucugcguguagguaggccugugccgcaaacaagcuuaccaugggccagaucgugaccuucuuucaagaggucccccacguuauugaagaggugaugaacaucgugcugauugcccucagcauccuggcuguccuuaaggggcuguacaauuucgccacaugcggacucgugggccugguuacguuucuucugcucugugggagauccugcaccauuucucuguauaaaggaguguacgaacugcagacacucgagcugaacauggaaacccuuaauaugacaaugccucugagcuguaccaagaacaauucccaucacuauaucauggucggcaacgagacagggcucgagcugacccuuacgaauaccucuaucauuaaccauaaauucugcaaucugagcgacgcgcacaagaaaaaccucuacgaucaugcucugauguccaucauuucuacauuucaccugagcaucccgaauuucaaccaguaugaagccauguccugugacuuuaauggaggcaagauuagcgugcaguacaaccucucucacuccuaugccggcgaugcugccaaucauugcgggaccguugcuaacggagugcugcaaacauucaugcggauggccuggggcgggagcuacaucgcgcuugacucuggacgcgauagaugggacuguauuaugaccuccuaccaguaucugaucauccagaacacgacaugggaggaucacugccaguuuagccggcccucuccuauuggcuaccucgggcugcuuucccaacgcaccagagacaucuauauuagccggcgcagacggggaacauucaccuggacccuguccgauucugaaggcaaggacacacccggcggguacugucucacgcgcuggaugcugaucgaggccgagcugaaaugcuuuggaaauaccgcugucgccaaguguaacgaaaaacaugaugaggaguucugcgacaugcucagacuguuugauuucaauaagcaggcuauucagcggcuuaaagccccugcgcagaugagcauccaacugaucaacaaggccgugaaugcucucauuaacgaccagcugaucaugaagaaucaccuucgcgacauuaugggcauccccuauugcaacuacuccaaauauuguuaccugaaucacacaaccacagggaagaccagccucccuaaaugcugucuggugucuaacggauccuaccugaaugaaacgcauuucagcgaugacauugaacagcaagccgauaacaugaucacagagaugcuccagaaggaguauauggaaagacagggcaaaaccccgcuggggcuugucgaccuguuuguuuucucuaccagcuuuuaccucaucuccauuuuccugcaccuggugaagauccccacacaucggcacauugugggaaaaccuugccccaagccucaucgccuuaaucacaugggcaucuguucuugcggccucuauaagcagcccggggucccggugaaauggaagagaugaggacuagucccuguucccagagcccacuuuuuuuucuuuuuuugaaauaaaauagccugucuuucagaucuaaaaaaaaaaaaaaaaaaaaaaaaaaaaaaaaaaaaaaaaaaaaaaaaaaaaaaaaaaaaaaaaaaaaaaaaaaaaaaaaaaaaaaaaaaaaaaaaaaaa

SEQ ID NO: 25573 - RNA, 1781 nt, Artificial Sequence
  mRNA product Design b-4 (hSL-A64-N5) comprising derived and/or modified sequence from LASV(Josiah;Clade IV)__NP_694870__GPCmut3 (opt1)
aggagagucccgcagucggcguccagcggcucugcuuguucgugugugugucguugcaggccuuauucaagcuuaccaugggccagaucgugaccuucuuccaggaggucccccacgugaucgaggaggugaugaacaucguccugaucgcccucagcgugcuggccgugcugaaggggcucuacaacuucgcgaccugcggccuggucgggcuggugacguuccuccugcugugcggccgcuccugcaccaccagccucuacaaggggguguacgagcugcagacccuggagcucaacauggagacgcugaacaugaccaugccgcuguccugcaccaagaacaacagccaccacuacaucauggucggcaacgagaccggccucgagcugacgcugaccaacaccuccaucaucaaccacaaguucugcaaccucagcgacgcccacaagaagaaccuguacgaccacgcccugauguccaucaucagcaccuuccaccucuccauccccaacuucaaccaguacgaggccaugagcugcgacuucaacgggggcaagaucuccgugcaguacaaccugagccacuccuacgccggggacgcggccaaccacugcggcacgguggccaacgggguccugcagaccuucaugcggauggccuggggcggcagcuacaucgcgcucgacuccgggcgcggcaacugggacugcaucaugaccagcuaccaguaccugaucauccagaacaccacgugggaggaccacugccaguucucccggcccagccccaucggguaccugggccuccugucccagcgcacccgggacaucuacaucagccgccggcgccggggcaccuucaccuggacgcugagcgacuccgaggggaaggacaccccgggcggguacugccugacccgcuggaugcucaucgaggccgagcugaagugcuucggcaacaccgccguggccaagugcaacgagaagcacgacgaggaguucugcgacaugcugcggcuguucgacuucaacaagcaggccauccagcgccugaaggcgcccgcccagaugagcauccagcugaucaacaaggccgugaacgcccucaucaacgaccagcugaucaugaagaaccaccuccgggacaucauggggauccccuacugcaacuacuccaaguacugcuaccucaaccacacgaccaccggccgcaccagccugcccaagugcugccuggucuccaacggcagcuaccucaacgagacgcacuucuccgacgacaucgagcagcaggccgacaacaugaucaccgagaugcugcagaaggaguacauggagcggcaggggaagacgccccugggccucguggaccuguucguguucagcaccuccuucuaccugaucagcaucuuccugcaccucgucaagaucccgacccaccgccacaucguggggaaguccugccccaagccccaccggcugaaccacaugggcaucugcagcugcgggcuguacaagcagcccggcgugccggucaaguggaagcgcugaggacuaguaauaaggaaacuguaugaaugucugugggcaggaagugaagagauccuucuguaaagguuuuuggaauuaugucugcugaauaauaaacuuuuuugaaauaauaaaucugguagaaaaaugagaucucaaaggcucuuuucagagccaccaaaaaaaaaaaaaaaaaaaaaaaaaaaaaaaaaaaaaaaaaaaaaaaaaaaaaaaaaaaaaaaaagaauu

SEQ ID NO: 25574 - RNA, 1778 nt, Artificial Sequence
  mRNA product Design b-4 (hSL-A64-N5) comprising derived and/or modified sequence from LASV(LP;Clade I)__AAF86701__GPCmut3 (opt1)
aggagagucccgcagucggcguccagcggcucugcuuguucgugugugugucguugcaggccuuauucaagcuuaccaugggccagaucaucaccuucuuccaggaggugccccacgucaucgaggaggugaugaacaucgugcugaucgcccucagccugcuggccauccucaaggggcuguacaacaucgcgaccugcggcaucaucgggcuggucgccuuccucuuccugugcggcaaguccugcagccugacgcucaagggcggguacgagcugcagacccuggagcucaacauggagacccugaacaugaccaugccgcuguccugcacgaagaacagcucccaccacuacauccgcgugggcaacgagaccgggcucgagcugacccugaccaacacgagcaucaucaaccacaaguucugcaaccucuccgacgcccacaagaagaaccuguacgaccacgcccugaugagcaucaucuccaccuuccaccucagcauccccaacuucaaccaguacgaggccauguccugcgacuucaacggcgggaagaucagcgugcaguacaaccugucccacagcuacgcgggcgacgccgccgagcacugcgggaccgucgccaacggcgugcugcagaccuucaugcggauggcguggggcgggcgcuacaucgcccucgacuccggcaaggggaacugggacugcaucaugacgagcuaccaguaccugaucauccagaacaccaccugggaggaccacugccaguucucccggcccagccccaucggcuaccugggccuccugucccagcgcacccgggacaucuacaucagccgccggcgccgggggacguucaccuggacccugagcgacuccgagggcaacgagacccccgggggcuacugccugacgcgcuggaugcucaucgaggccgagcugaagugcuucgggaacaccgccguggccaagugcaacgagaagcacgacgaggaguucugcgacaugcugcggcuguucgacuucaacaagcaggcgauccgccggcugaaggcccccgcccagaugagcauccagcugaucaacaaggccgucaacgcccucaucaacgaccagcugaucaugaagaaccaccuccgcgacaucaugggcauccccuacugcaacuacuccaaguacugcuaccucaaccacaccagcuccggccggaccagccugcccaagugcugccugaucuccaacgggagcuaccucaacgagacgcaguucuccgacgacaucgagcagcaggcggacaacaugaucaccgagaugcugcagaaggaguacaucgagcgccagggcaagaccccgcuggggcucguggacaucuucaucuucagcaccuccuucuaccugaucagcaucuuccugcaccugaucaagaucccgacgcaccggcacaucgugggcaagcccugccccaagccccaccgccucaaccacaugggggucugcuccugcggccuguacaagcacccgggcgugcccaccaaguggaagcggugaggacuaguaauaaggaaacuguaugaaugucugugggcaggaagugaagagauccuucuguaaagguuuuuggaauuaugucugcugaauaauaaacuuuuuugaaauaauaaaucugguagaaaaaugagaucucaaaggcucuuuucagagccaccaaaaaaaaaaaaaaaaaaaaaaaaaaaaaaaaaaaaaaaaaaaaaaaaaaaaaaaaaaaaaaaaagaauu

SEQ ID NO: 25575 - RNA, 1778 nt, Artificial Sequence
  mRNA product Design b-4 (hSL-A64-N5) comprising derived and/or modified sequence from LASV(803213;Clade II)__AAF86703__GPCmut3 (opt1)
aggagagucccgcagucggcguccagcggcucugcuuguucgugugugugucguugcaggccuuauucaagcuuaccaugggccagaucaucaccuucuuccaggaggugccccacgucaucgaggaggugaugaacaucgugcugaucgcccucagccugcuggccauccucaaggggaucuacaacgucgcgaccugcggccuguucgggcugaucuccuuccuccugcugugcggccgcagcugcuccgugacguacaaggggguguacgagcuccagacccuggagcugaacauggccaaccucaacaugaccaugccgcugagcugcaccaagaacaacucccaccacuacaucauggucggcaacgagacgggccuggagcucacccugaccaacaccagcaucaucaaccacaaguucugcaaccuguccgacgcccacaagaagaaccucuacgaccacgcccugaugagcaucaucuccacguuccaccugagcauccccaacuucaaccaguacgaggccauguccugcgacuucaacgggggcaagaucagcgugcaguacaaccucucccacagcuucgcgguggacgccgccaaccacugcgggaccaucgccaacggcguccugcagaccuucaugcggauggcguggggcggguccuacaucgcccuggacagcggcaaggggaacugggacugcaucaugaccuccuaccaguaccucaucauccagaacacgaccugggaggaccacugccaguucagccgccccucccccaucggcuaccuggggcugcucagccagcggacccgcgacaucuacaucagccggcgccgccggggcaccuucacguggacccucuccgacagcgagggcaacgaggcccccgggggcuacugccugacccgguggaugcugaucgaggccgagcucaagugcuucgggaacaccgccguggcgaagugcaacgagaagcacgacgaggaguucugcgacaugcugcgccuguucgacuucaacaagcaggccaucaagcggcucaagacgcccgcccagauguccauccagcugaucaacaaggccgugaacgcccugaucaacgaccagcucaucaugaagaaccaccuccgcgacaucaugggcauccccuacugcaacuacagccgguacugcuaccugaaccacaccgucaccgggaagaccucccugccccgcugcugccuggugagcaacggcuccuaccugaacgagacgcacuucagcgacgacaucgagcagcaggcggacaacaugaucaccgagaugcuccagaaggaguacauggaccggcagggcaagaccccgcuggggcugguggaccucuucgucuucuccaccagcuucuaccugaucuccaucuuccugcaccuggugaagaucccgacgcaccgccacaucgugggcaagcccugccccaagccccaccggcucaaccacauggggaucugcagcugcggccuguacaagcacccggggguccccgugaaguggaagcgcugaggacuaguaauaaggaaacuguaugaaugucugugggcaggaagugaagagauccuucuguaaagguuuuuggaauuaugucugcugaauaauaaacuuuuuugaaauaauaaaucugguagaaaaaugagaucucaaaggcucuuuucagagccaccaaaaaaaaaaaaaaaaaaaaaaaaaaaaaaaaaaaaaaaaaaaaaaaaaaaaaaaaaaaaaaaaagaauu

SEQ ID NO: 25576 - RNA, 1778 nt, Artificial Sequence
  mRNA product Design b-4 (hSL-A64-N5) comprising derived and/or modified sequence from LASV(GA391;Clade III)__CAA36645__GPCmut3 (opt1)
aggagagucccgcagucggcguccagcggcucugcuuguucgugugugugucguugcaggccuuauucaagcuuaccaugggccagaucgugaccuucuuccaggaggucccccacgugaucgaggaggugaugaacaucguccugaucgcccucagcauccuggccauccugaaggggcucuacaacguggcgaccugcggccugaucgggcuggugacguuccuccugcuguccggccgcagcugcucccucaucuacaaggggaccuacgagcugcagacccuggagcucaacauggagacccugaacaugacgaugccgcugagcugcaccaagaacaacucccaccacuacauccgggucggcaacgagaccggccucgagcugacccugacgaacaccagcauccucaaccacaaguucugcaaccuguccgacgcccacaagcgcaaccuguacgaccacagccucauguccaucaucagcaccuuccaccuguccauccccaacuucaaccaguacgaggccaugagcugcgacuucaacgggggcaagaucaccgugcaguacaaccugucccacagcuucgccguggacgccgcggggcacugcggcacgcucgccaacgggguccugcagaccuucaugcggauggccuggggcggcuccuacaucgcccuggacagcgggcgcggcaacugggacugcaucaugaccuccuaccaguaccucaucauccagaacaccacgugggacgaccacugccaguucagccggcccucccccaucggguaccugggccugcucagccagcgcacccgggacaucuacaucagccgccggcgccggggcaccuucaccuggacgcucuccgacagcgaggggaacgagaccccgggcggguacugccugacccgcuggaugcugaucgaggcggagcucaagugcuucggcaacaccgccguggccaagugcaacgagaagcacgacgaggaguucugcgacaugcugcggcuguucgacuucaacaagcaggccauccgccggcucaagacgcccgcccagauguccauccagcugaucaacaaggcggugaacgcccugaucaacgaccagcucaucaugaagaaccaccuccgcgacaucauggggauccccuacugcaacuacagccgguacugcuaccugaaccacaccuccaccggcaagaccagccugccccgcugcugccugaucuccaacggcagcuaccugaacgagacgaaguucuccgacgacaucgagcagcaggccgacaacaugaucaccgagaugcuccagaaggaguacaucgaccggcaggggaagacgccccugggccuggucgaccuguucguguucagcaccuccuucuaccucaucagcaucuuccugcaccuggugaagaucccgacccaccgccacaucgucgggaagcccugccccaagccccaccggcucaaccacaugggcaucugcuccugcgggcuguacaagcagccgggcgugcccgugcgcuggaagcggugaggacuaguaauaaggaaacuguaugaaugucugugggcaggaagugaagagauccuucuguaaagguuuuuggaauuaugucugcugaauaauaaacuuuuuugaaauaauaaaucugguagaaaaaugagaucucaaaggcucuuuucagagccaccaaaaaaaaaaaaaaaaaaaaaaaaaaaaaaaaaaaaaaaaaaaaaaaaaaaaaaaaaaaaaaaaagaauu

SEQ ID NO: 25577 - RNA, 1781 nt, Artificial Sequence
  mRNA product Design b-4 (hSL-A64-N5) comprising derived and/or modified sequence from LASV(AV;Clade V)__CCA30314__GPCmut3 (opt1)
aggagagucccgcagucggcguccagcggcucugcuuguucgugugugugucguugcaggccuuauucaagcuuaccaugggccagaucgugaccuucuuccaggaggucccccacgugaucgaggaggugaugaacaucguccugaucgcccucagcauccuggccgugcugaaggggcucuacaacaucgcgaccugcggccugaucgggcugaucacguuccuccugcugugcggccgcuccugcagcuccaaccucuacaaggggguguacgagcugcagagccuggaccucaacauggagacccugaacaugaccaugccgcuguccugcaccaagaacaacagccaccacuacauccgggucggcaacgacacgggccucgagcugacccugaccaacaccuccauccucaaccacaaguucugcaaccugagcgacgcccacaagaaggaccuguacgaccacgcccucauguccaucaucagcacguuccaccuguccauccccaacuucaaccaguacgaggccaugagcugcgacuucaacgggggcaagaucuccgugcaguacaaccugagccacuccuacgccaucgacgcggccaaccacugcgggaccguggccaacggcauccuccagaccuucaugcgcauggccuggggcgggagcuacaucgcgcuggacuccggccgggggaacugggacugcaucaugaccagcuaccaguaccugaucauccagaacacgaccugggagaaccacugccaguucucccgccccagccccaucggcuaccucgggcugcugagccagcggacccgcgacaucuacaucucccggcgccgccggggcaccuucacguggacccugagcgacuccgagggcaacgccacccccgggggcuacugccucacccgguggaugcugaucgaggccgagcugaagugcuucgggaacacggccgucgccaagugcaacgagaagcacgacgaggaguucugcgacaugcuccgccuguucgacuucaacaagcaggcgaucagccggcugaagucccccgcccagaugagcauccagcucaucaacaaggccgugaacgcccugaucaacgaccagcugaucaugaagaaccaccuccgcgacaucaugggcauccccuacugcaacuacuccaaguacugcuaccugaaccacaccaucaccgggaagaccagccugcccaagugcugccucguguccaacggcagcuaccugaacgagacgcacuucuccgacgacaucgagcagcaggccgacaacaugaucaccgagaugcugcagaaggaguacauggagcggcagggcaagaccccgcucgggcuggucgaccuguucguguucagcaccuccuucuaccugaucagcaucuuccuccgccuggugaagaucccgacgcaccggcacaucgucggcaagcccugccccaagccccaccgccugaaccacauggggaucugcuccugcggccucuacaagcagccgggggugcccgugcgguggaagcgcugaggacuaguaauaaggaaacuguaugaaugucugugggcaggaagugaagagauccuucuguaaagguuuuuggaauuaugucugcugaauaauaaacuuuuuugaaauaauaaaucugguagaaaaaugagaucucaaaggcucuuuucagagccaccaaaaaaaaaaaaaaaaaaaaaaaaaaaaaaaaaaaaaaaaaaaaaaaaaaaaaaaaaaaaaaaaagaauu

SEQ ID NO: 25578 - RNA, 1778 nt, Artificial Sequence
  mRNA product Design b-4 (hSL-A64-N5) comprising derived and/or modified sequence from LASV(Togo/2016/7082;Clade VI)__AMR44577__GPCmut3 (opt1)
aggagagucccgcagucggcguccagcggcucugcuuguucgugugugugucguugcaggccuuauucaagcuuaccaugggccagaucaucaccuucuuccaggaggugccccacgucaucgaggaggugaugaacaucgugcugaucgcccucagccugcuggccauccucaagggggucuacaacguggcgaccugcggcaucaucgggcuggugacguuccuguuccucugcggccgcuccugcagccugaucuacaagggguccuacgagcugcagacccucgagcugaacauggagacccugaacaugaccaugccgcucagcugcacgaagaacuccagccaccacuacauccgggucggcaacgagaccggccuggagcugacccucaccaacacguccaucaucaaccacaaguucugcaaccugagcgacgcccacaagcgcaaccuguacgaccacgcccucauguccauccugagcaccuuccaccuguccauccccaacuucaaccaguacgaggccaugagcugcgacuucaacgggggcaagaucuccgugcaguacaaccucagccacgccuacgcgguggacgccgccgagcacugcgggaccgucgccaacggcgugcugcagaccuucaugcggauggcguggggcggguccuacaucgcccuggacagcggccgcgggaacugggacugcaucaugacguccuaccaguaccucaucauccagaacaccaccugggaggaccacugccaguucagccggcccucccccaucggcuaccuggggcugcucagccagcgcacccgggacaucuacaucagccgccggcgccggggcacguucaccuggacccucuccgacagcgagggcaacgagacccccgggggcuacugccugacgcgcuggaugcugaucgaggccgagcucaagugcuucgggaacaccgccguggccaagugcaacgagaagcacgacgaggaguucugcgacaugcugcggcuguucgacuucaacaagcaggcgauccagcgccucaagucccccgcccagaugagcauccagcugaucaacaaggccgucaacgcccugaucaacgaccagcucaucaugaagaaccaccuccgggacaugaugggcauccccuacugcaacuacuccaaguacugcuaccugaaccacaccagcuccgggcgcaccagccugcccaagugcugccugguguccaacggcagcuaccugaacgagacgcacuucuccgacgacaucgagcagcaggccgacaacaugaucaccgagaugcuccagaaggaguacaucgaccggcagggcaagaccccgcuggggcugguggaccucuucgucuucagcaccuccuucuaccugaucagcaucuuccugcaccugaucaagaucccgacgcaccgccacaucgugggcaagcccugccccaagccccaccggcucaaccacauggggaucugcuccugcggccuguacaagcagccgggggugcccacccgcuggaagcggugaggacuaguaauaaggaaacuguaugaaugucugugggcaggaagugaagagauccuucuguaaagguuuuuggaauuaugucugcugaauaauaaacuuuuuugaaauaauaaaucugguagaaaaaugagaucucaaaggcucuuuucagagccaccaaaaaaaaaaaaaaaaaaaaaaaaaaaaaaaaaaaaaaaaaaaaaaaaaaaaaaaaaaaaaaaaagaauu

SEQ ID NO: 25579 - RNA, 1778 nt, Artificial Sequence
  mRNA product Design b-4 (hSL-A64-N5) comprising derived and/or modified sequence from LASV(KAK-428;Clade n.d. (VII))__ANH09740__GPCmut3 (opt1)
aggagagucccgcagucggcguccagcggcucugcuuguucgugugugugucguugcaggccuuauucaagcuuaccaugggccagaucgugaccuucuuccaggaggucccccacgugaucgaggaggugaugaacaucguccugaucgcccucagccugcuggccauccucaaggggcuguacaacuucgcgaccugcggcgugaucgggcugaucacguuccuccugcugugcggccgcuccugcagcgccaccuacaaggggcaguacgagcuccagacccuggagcugaacauggagucccucaacaugaccaugccgcugagcugcacgaagaacaacucccaccacuacauccgggccggcaacaacaccggccuggagcucacccugaccaacacgagcaucaucucccacaaguucugcaaccugagcgacgcccacaagaagaaccucuacgaccacacccugauguccaucaucaccaccuuccaccugagcauccccaacuucaaccaguacgaggccauguccugcgacuucaacgggggcaagaucagcauccaguacaaccucucccacagcuacgcgggggacgccgcccagcacugcggcacgguggccaacgggguccugcagaccuucaugcgcauggcguggggcggcuccuaccuggcccucgacagcgggcggcgcggcugggacugcaucaucuccagcuaccaguaccugaucauccagaacaccaccugggacgaccacugccaguucucccggcccagccccaucggguaccugggcuucgugagccagaagacgcgcgacaucuacaucucccggcgccgccggggcaccuucaccuggacccugagcgacuccgaggggcacgacaugccgggcggguacugccucacgcgguggaugcugaucgaggccgaccugaagugcuucggcaacaccgccguggccaagugcaacgagaagcacgacgaggaguucugcgacauguggcgccucuucgacuucaacaagcaggcgauccagcggcugaaggcccccgcccagaugaacauccagcugaucaacaaggccgucaacgcccucaucaacgaccagcugaugaugaagaaccaccuccgcgacaucauggggauccccuacugcaacuacagcaaguucugcuaccugaacaacaccaccacgggccggaccucccugccccgcugcugccugaucagcaacggcuccuaccucaacgagacccacuucagcgacgacaucgagcagcaggcggacaacaugaucaccgagaugcugcagaaggaguacauggaccggcaggggaagacgccccugggccucguggaccuguucguguucuccaccagcuucuaccugaucaccaucuuccuccaccuggucaagaucccgacccaccgccacaucguggggaagcccugccccaagccccaccggcugaaccacaugggcaucugcuccugcgggcuguacaagcagccgggcgugcccguccgcuggaagcggugaggacuaguaauaaggaaacuguaugaaugucugugggcaggaagugaagagauccuucuguaaagguuuuuggaauuaugucugcugaauaauaaacuuuuuugaaauaauaaaucugguagaaaaaugagaucucaaaggcucuuuucagagccaccaaaaaaaaaaaaaaaaaaaaaaaaaaaaaaaaaaaaaaaaaaaaaaaaaaaaaaaaaaaaaaaaagaauu

SEQ ID NO: 25580 - RNA, 1778 nt, Artificial Sequence; identical to SEQ ID NO: 25574
  mRNA product Design b-4 (hSL-A64-N5) comprising derived and/or modified sequence from LASV(Pinneo-NIG-1969;Clade I)__AIT17836__GPCmut3 (opt1)

SEQ ID NO: 25581 - RNA, 1778 nt, Artificial Sequence
  mRNA product Design b-4 (hSL-A64-N5) comprising derived and/or modified sequence from LASV(ISTH0009-NIG-2011;Clade II)__AIT17404__GPCmut3 (opt1)
aggagagucccgcagucggcguccagcggcucugcuuguucgugugugugucguugcaggccuuauucaagcuuaccaugggccagaucaucaccuucuuccaggaggugccccacgucaucgaggaggugaugaacaucgugcugaucgcccucagccugcuggccauccucaaggggaucuacaacgucgcgaccugcggccuguucgggcugguguccuuccuccugcugugcggccgcagcugcuccacgaccuacaaggggguguacgagcuccagacccuggagcuggacauggccagccucaacaugaccaugccgcuguccugcacgaagaacaacagccaccacuacaucauggucggcaacgagaccggccuggagcucacccugaccaacacguccaucaucaaccacaaguucugcaaccugagcgacgcccacaagaagaaccucuacgaccacgcccugauguccaucaucagcaccuuccaccuguccauccccaacuucaaccaguacgaggccaugagcugcgacuucaacgggggcaagaucuccgugcaguacaaccucagccacgcguacgccguggacgccgccaaccacugcgggaccaucgcgaacggcguccugcagaccuucaugcggauggccuggggcggguccuacaucgcccuggacagcggcaagggguccugggacugcaucaugacgagcuaccaguaccucaucauccagaacaccaccugggaggaccacugccaguucucccgccccagccccaucggcuaccuggggcugcucagccagcggacccgcgacaucuacaucucccggcgccgccggggcacguucaccuggacccucagcgacuccgagggcaacgagacccccgggggcuacugccugacgcgguggaugcugaucgaggccgagcucaagugcuucgggaacaccgccguggcgaagugcaacgagaagcacgacgaggaguucugcgacaugcugcgccuguucgacuucaacaagcaggccauccggcgccucaagacccccgcccagaugagcauccagcugaucaacaaggccgugaacgcccugaucaacgaccagcucaucaugaagaaccaccuccgggacaucaugggcaucccguacugcaacuacuccaaguacugcuaccugaaccacaccgucacggggaagaccagccugccccgcugcugccugguguccaacggcagcuaccugaacgagacccacuucuccgacgacaucgagcagcaggcggacaacaugaucaccgagcuccugcagaaggaguacauggaccggcagggcaagacgccccuggggcucguggaccuguucgucuucagcaccuccuucuaccugaucagcaucuuccugcaccucaucaagaucccgacccaccgccacaucaccggcaagcccugccccaagccccaccggcugaaccacauggggaucugcuccugcggccuguacaagcacccgggggugcccgugaaguggaagcgcugaggacuaguaauaaggaaacuguaugaaugucugugggcaggaagugaagagauccuucuguaaagguuuuuggaauuaugucugcugaauaauaaacuuuuuugaaauaauaaaucugguagaaaaaugagaucucaaaggcucuuuucagagccaccaaaaaaaaaaaaaaaaaaaaaaaaaaaaaaaaaaaaaaaaaaaaaaaaaaaaaaaaaaaaaaaaagaauu

SEQ ID NO: 25582 - RNA, 1778 nt, Artificial Sequence
  mRNA product Design b-4 (hSL-A64-N5) comprising derived and/or modified sequence from LASV(ISTH2010-NIG-2012;Clade II)__AIT17482__GPCmut3 (opt1)
aggagagucccgcagucggcguccagcggcucugcuuguucgugugugugucguugcaggccuuauucaagcuuaccaugggccagaucaucaccuucuuccaggaggugccccacgucaucgaggaggugaugaacaucgugcugaucgcccucagccugcuggccauccucaaggggaucuacaacgucgcgaccugcggccuguucgggcugguguccuuccuccugcugugcggccgcagcugcuccacgaccuacaaggggguguacgagcuccagacccuggagcuggacauggccagccucaacaugaccaugccgcuguccugcacgaagaacaacagccaccacuacaucauggucggcaacgagaccggccuggagcucacccugaccaacacguccaucaucaaccacaaguucugcaaccugagcgacgcccacaagaagaaccucuacgaccacgcccugauguccaucaucagcaccuuccaccuguccauccccaacuucaaccaguacgaggccaugagcugcgacuucaacgggggcaagaucuccgugcaguacaaccucagccacgcguacgccguggacgccgccaaccacugcgggaccaucgcgaacggcguccugcagaccuucaugcggauggccuggggcggguccuacaucgcccuggacagcggcaagggguccugggacugcaucaugacgagcuaccaguaccucaucauccagaacaucaccugggaggaccacugccaguucucccgccccagccccaucggcuaccuggggcugcucagccagcggacccgcgacaucuacaucucccggcgccgccggggcaccuucacguggacccucagcgacuccgagggcaacgagacccccgggggcuacugccugacccgguggaugcugaucgaggccgagcucaagugcuucgggaacacggccguggcgaagugcaacgagaagcacgacgaggaguucugcgacaugcugcgccuguucgacuucaacaagcaggccauccggcgccucaagacccccgcccagaugagcauccagcugaucaacaaggccgugaacgcccugaucaacgaccagcucaucaugaagaaccaccuccgggacaucaugggcauccccuacugcaacuacuccaaguacugcuaccugaaccacaccgucaccgggaagacgagccugccccgcugcugccugguguccaacggcagcuaccugaacgagacccacuucuccgacgacaucgagcagcaggcggacaacaugaucaccgagcuccugcagaaggaguacaucgaccggcagggcaagaccccgcuggggcucguggaccuguucgucuucagcacguccuucuaccugaucagcaucuuccugcaccucgugaagaucccgacccaccgccacguggucggcaagcccugccccaagccccaccggcugaaccacauggggaucugcuccugcggccuguacaagcacccgggggugcccgugaaguggaagcgcugaggacuaguaauaaggaaacuguaugaaugucugugggcaggaagugaagagauccuucuguaaagguuuuuggaauuaugucugcugaauaauaaacuuuuuugaaauaauaaaucugguagaaaaaugagaucucaaaggcucuuuucagagccaccaaaaaaaaaaaaaaaaaaaaaaaaaaaaaaaaaaaaaaaaaaaaaaaaaaaaaaaaaaaaaaaaagaauu

SEQ ID NO: 25583 - RNA, 1778 nt, Artificial Sequence
  mRNA product Design b-4 (hSL-A64-N5) comprising derived and/or modified sequence from LASV(Lassa virus/H.sapiens-wt/NGA/2015/ISTH_0543;Clade II)__AVO03639__GPCmut3 (opt1)
aggagagucccgcagucggcguccagcggcucugcuuguucgugugugugucguugcaggccuuauucaagcuuaccaugggccagaucaucaccuucuuccaggaggugccccacgucaucgaggaggugaugaacaucgugcugaucgcccucagccugcuggccauccucaaggggaucuacaacgucgcgaccugcggccuguucgggcugguguccuuccuccugcugugcggccgcagcugcuccacgaccuacaaggggguguacgagcuccagacccuggagcuggacauggccaaccucaacaugaccaugccgcugagcugcacgaagaacaacucccaccacuacaucauggucggcaacgagaccggccuggagcucacccugaccaacacgagcaucaucaaccacaaguucugcaaccuguccgacgcccacaagaagaaccucuacgaccacgcccugaugagcaucaucuccaccuuccaccugagcauccccaacuucaaccaguacgaggccauguccugcgacuucaacgggggcaagaucagcgugcaguacaaccucucccacaccuacgcgguggacgccgccaaccacugcgggaccaucgccaacggcguccugcagacguucaugcggauggcguggggcgggagcuacaucgcccuggacuccggcaaggggagcugggacugcaucaugaccuccuaccaguaccucgugauccagaacaccaccugggaggaccacugccaguucagccgccccucccccaucggcuaccuggggcugcucagccagcggacgcgcgacaucuacaucagccggcgccgccggggcaccuucaccuggacccucuccgacagcgagggcaacgagacgcccgggggcuacugccugacccgguggaugcugaucgaggccgagcucaagugcuucgggaacaccgccguggccaagugcaacgagaagcacgacgaggaguucugcgacaugcugcgccuguucgacuucaacaagcaggcgauccggcgccucaagacccccgcccagauguccauccagcugaucaacaaggccgucaacgcccugaucaacgaccagcucaucaugaagaaccaccuccgggacaucaugggcauccccuacugcaacuacagcaaguacugcuaccugaaccacacggugaccgggaagaccucccugccccgcugcugccuggugagcaacggcuccuaccugaacgagacccacuucagcgacgacaucgagcagcaggccgacaacaugaucacggagcuccugcagaaggaguacaucgaccggcagggcaagaccccgcuggggcucgucgaccuguucguguucuccaccagcuucuaccugaucuccaucuuccugcaccucgugaagaucccgacccaccgccacaucacgggcaagcccugccccaagccccaccggcugaaccacauggggaucugcagcugcggccuguacaagcacccggggguccccgugaaguggaagcgcugaggacuaguaauaaggaaacuguaugaaugucugugggcaggaagugaagagauccuucuguaaagguuuuuggaauuaugucugcugaauaauaaacuuuuuugaaauaauaaaucugguagaaaaaugagaucucaaaggcucuuuucagagccaccaaaaaaaaaaaaaaaaaaaaaaaaaaaaaaaaaaaaaaaaaaaaaaaaaaaaaaaaaaaaaaaaagaauu

SEQ ID NO: 25584 - RNA, 1778 nt, Artificial Sequence
  mRNA product Design b-4 (hSL-A64-N5) comprising derived and/or modified sequence from LASV(Lassa virus/H.sapiens-wt/NGA/2016/ISTH_0009;Clade II)__AVO03571__GPCmut3 (opt1)
aggagagucccgcagucggcguccagcggcucugcuuguucgugugugugucguugcaggccuuauucaagcuuaccaugggccagaucaucaccuucuuccaggaggugccccacgucaucgaggaggugaugaacaucgugcugaucgcccucagccugcuggccauccucaaggggaucuacaacgucgcgaccugcggccugcuggggcucguguccuuccugcugcucugcggccgcagcugcuccacgaccuacaaggggguguacgagcugcagacccuggagcucgacauggccagccugaacaugaccaugccgcuguccugcacgaagaacaacagccaccacuacaucauggucggcaacgagaccggccucgagcugacccugaccaacacguccaucaucaaccacaaguucugcaaccucagcgacgcccacaagaagaaccuguacgaccacgcccugauguccaucaucagcaccuuccaccucuccauccccaacuucaaccaguacgaggccaugagcugcgacuucaacgggggccggaucuccgugcaguacaaccugagccacuccuacgcgguggacgccgccaaccacugcgggaccaucgccaacggcguccugcagaccuucaugcgcauggcguggggcgggagcuacaucgcccucgacuccggcaaggggagcugggacugcaucaugacguccuaccaguaccugaucauccagaacaccaccugggaggaccacugccaguucagccggcccagccccaucggcuaccuggggcuccugucccagcgcacccgggacaucuacaucagccgccggcgccggggcacguucaccuggacccuguccgacagcgagggcaacgagacccccgggggcuacugccugacgcgcuggaugcucaucgaggccgagcugaagugcuucgggaacaccgccguggccaagugcaacgagaagcacgacgaggaguucugcgacaugcugcggcuguucgacuucaacaagcaggcgauccgccggcugaagacccccgcccagauguccauccagcugaucaacaaggccgugaacgcccucaucaacgaccagcugaucaugaagaaccaccuccgcgacaucaugggcaucccguacugcaacuacagcaaguacugcuaccucaaccacaccgucacggggaagaccucccugccccggugcugccuggugagcaacggcuccuaccucaacgagacccacuucagcgacgacaucgagcagcaggccgacaacaugaucaccgagcugcugcagaaggaguacaucgaccgccagggcaagacgccccucgggcugguggaccuguucgucuucuccaccagcuucuaccugaucuccaucuuccuccaccuggugaagaucccgacccaccggcacaucaccggcaagcccugccccaagccccaccgccugaaccacauggggaucugcagcugcggccucuacaaccacccgggggugcccgucaaguggaagcggugaggacuaguaauaaggaaacuguaugaaugucugugggcaggaagugaagagauccuucuguaaagguuuuuggaauuaugucugcugaauaauaaacuuuuuugaaauaauaaaucugguagaaaaaugagaucucaaaggcucuuuucagagccaccaaaaaaaaaaaaaaaaaaaaaaaaaaaaaaaaaaaaaaaaaaaaaaaaaaaaaaaaaaaaaaaaagaauu

SEQ ID NO: 25585 - RNA, 1778 nt, Artificial Sequence
  mRNA product Design b-4 (hSL-A64-N5) comprising derived and/or modified sequence from LASV(Lassa virus/H.sapiens-wt/NGA/2016/ISTH_0017;Clade II)__AVO03567__GPCmut3 (opt1)
aggagagucccgcagucggcguccagcggcucugcuuguucgugugugugucguugcaggccuuauucaagcuuaccaugggccagaucaucaccuucuuccaggaggugccccacgucaucgaggaggugaugaacaucgugcugaucgcccucagccugcuggccauccucaaggggaucuacaacgucgcgaccugcggccuguucgggcugguguccuuccuccugcugugcggccgcagcugcuccacgaccuacaaggggguguacgagcuccagacccuggagcuggacauggccagccucaacaugaccaugccgcuguccugcacgaagaacaacagccaccacuacaucauggucggcaacgagaccggccuggagcucacccugaccaacacguccaucaucaaccacaaguucugcaaccugagcgacgcccacaagaagaaccucuacgaccacgcccugauguccaucaucagcaccuuccaccuguccauccccaacuucaaccaguacgaggccaugagcugcgacuucaacgggggcaagaucuccgugcaguacaaccucagccacaccuacgcgaucgacgccgccaaccacugcgggaccaucgccaacggcgugcugcagacguucaugcggauggcguggggcggguccuacaucgcccuggacagcggcaagggguccugggacugcaucaugaccagcuaccaguaccucaucauccagaacaccaccugggaggaccacugccaguucucccgccccagccccaucggcuaccuggggcugcucagccagcggacgcgcgacaucuacaucucccggcgccgccggggcaccuucaccuggacccucagcgacuccgagggcaacgagacgcccgggggcuacugccugacccgguggaugcugaucgaggccgagcucaagugcuucgggaacaccgccgucgccaagugcaacgagaagcacgacgaggaguucugcgacaugcugcgccuguucgacuucaacaagcaggcgauccggcgccucaagacccccgcccagaugagcauccagcugaucaacaaggccgugaacgcccugaucaacgaccagcucaucaugaagaaccaccuccgggacaucaugggcauccccuacugcaacuacuccaaguacugcuaccugaaccacacggugaccgggaagaccagccugccccgcugcugccuggucuccaacggcagcuaccugaacgagacccacuucuccgacgacaucgagcagcaggccgacaacaugaucacggagcuccugcagaaggaguacauggaccggcagggcaagaccccgcuggggcucguggaccuguucguguucagcaccuccuucuaccugaucagcaucuuccugcaccucguccgcaucccgacccaccggcacgugaucggcaagcccugccccaagccccaccgccugaaccacauggggaucugcuccugcggccuguacaagcacccgggggugcccgucaaguggaagcggugaggacuaguaauaaggaaacuguaugaaugucugugggcaggaagugaagagauccuucuguaaagguuuuuggaauuaugucugcugaauaauaaacuuuuuugaaauaauaaaucugguagaaaaaugagaucucaaaggcucuuuucagagccaccaaaaaaaaaaaaaaaaaaaaaaaaaaaaaaaaaaaaaaaaaaaaaaaaaaaaaaaaaaaaaaaaagaauu

SEQ ID NO: 25586 - RNA, 1778 nt, Artificial Sequence
  mRNA product Design b-4 (hSL-A64-N5) comprising derived and/or modified sequence from LASV(Lassa virus/H.sapiens-wt/NGA/2018/ISTH_0959;Clade II)__AVV65099__GPCmut3 (opt1)
aggagagucccgcagucggcguccagcggcucugcuuguucgugugugugucguugcaggccuuauucaagcuuaccaugggccagaucaucaccuucuuccaggaggugccccacgucaucgaggaggugaugaacaucgugcugaucgcccucagccugcuggccauccucaaggggaucuacaacgucgugaccugcggccuguucgggcugguguccuuccuccugcugugcggccgcagcugcuccacgaccuacaagggggucuacgagcuccagacccuggagcuggacauggcgagccucaacaugaccaugccgcuguccugcacgaagaacaacagccaccacuacaucauggugggcaacgagaccggccuggagcucacccugaccaacacguccaucaucaaccacaaguucugcaaccugagcgacgcccacaagaagaaccucuacgaccacgcccugauguccaucaucagcaccuuccaccuguccauccccaacuucaaccaguacgaggccaugagcugcgacuucaacgggggcaagaucuccgugcaguacaaccucagccacgccuacgcgaucgacgccgccaaccacugcgggaccaucgccaacggcguccugcagaccuucaugcggauggcguggggcggguccuacaucgcccuggacagcggcaagggguccugggacugcaucaugacgagcuaccaguaccucaucauccagaacaccaccugggaggaccacugccaguucucccgccccagccccaucggcuaccuggggcugcucagccagcggacccgcgacaucuacaucucccggcgccgccggggcacguucaccuggacccucagcgacuccgagggcaacgagacccccgggggcuacugccugacgcgguggaugcugaucgaggccgagcucaagugcuucgggaacaccgccguggccaagugcaacgagaagcacgacgaggaguucugcgacaugcugcgccuguucgacuucaacaagcaggcgauccggcgccucaagacccccgcccagaugagcauccagcugaucaacaaggccgugaacgcccugaucaacgaccagcucaucaugaagaaccaccuccgggacaucaugggcaucccguacugcaacuacuccaaguacugcuaccugaaccacaccgucacggggaagaccagccugccccgcugcugccugguguccaacggcagcuaccugaacgagacccacuucuccgacgacaucgagcagcaggccgacaacaugaucaccgagcuccugcagaaggaguacaucgaccggcagggcaagacgccccuggggcucguggaccuguucgucuucagcaccuccuucuaccugaucagcaucuuccugcaccucgugaagaucccgacccaccgccacgugaucggcaagcccugccccaagccccaccggcugaaccacauggggaucugcuccugcggccuguacaagcacccggggguccccgugaaguggaagcgcugaggacuaguaauaaggaaacuguaugaaugucugugggcaggaagugaagagauccuucuguaaagguuuuuggaauuaugucugcugaauaauaaacuuuuuugaaauaauaaaucugguagaaaaaugagaucucaaaggcucuuuucagagccaccaaaaaaaaaaaaaaaaaaaaaaaaaaaaaaaaaaaaaaaaaaaaaaaaaaaaaaaaaaaaaaaaagaauu

SEQ ID NO: 25587 - RNA, 1778 nt, Artificial Sequence
  mRNA product Design b-4 (hSL-A64-N5) comprising derived and/or modified sequence from LASV(LASV003-NIG-2008;Clade II)__AIT17580__GPCmut3 (opt1)
aggagagucccgcagucggcguccagcggcucugcuuguucgugugugugucguugcaggccuuauucaagcuuaccaugggccagaucaucaccuucuuccaggaggugccccacgucaucgaggaggugaugaacaucgugcugaucgcccucagccugcuggccauccucaaggggaucuacaacgucgcgaccugcggccuguucgggcugguguccuuccuccugcugugcggccgcagcugcuccacgaccuacaaggggguguacgagcuccagacccuggagcuggacauggccagccucaacaugaccaugccgcuguccugcacgaagaacaacagccaccacuacaucauggucggcaacgagaccggccuggagcucacccugaccaacacguccaucaucaaccacaaguucugcaaccugagcgacgcccacaagaagaaccucuacgaccacgcccugauguccaucaucagcaccuuccaccuguccauccccaacuucaaccaguacgaggccaugagcugcgacuucaacgggggcaagaucuccgugcaguacaaccucagccacaccuacgcgguggacgccgccaaccacugcgggaccaucgccaacggcguccugcagacguucaugcggauggcguggggcggguccuacaucgcccuggacagcggcaagggguccugggacugcaucaugaccagcuaccaguaccucaucauccagaacaccaccugggaggaccacugccaguucucccgccccagccccaucggcuaccuggggcugcucagccagcggacgcgcgacaucuacaucucccggcgccgccggggcaccuucaccuggacccucagcgacuccgagagcaacgagacgccgggcggguacugccugacccgguggaugcugaucgaggccgagcucaagugcuucggcaacaccgccguggccaagugcaacgagaagcacgacgaggaguucugcgacaugcugcgccuguucgacuucaacaagcaggcgauccggcgccucaaggcccccgcccagauguccauccagcugaucaacaaggccgugaacgcccugaucaacgaccagcucaucaugaagaaccaccuccgggacaucauggggauccccuacugcaacuacagcaaguacugcuaccugaaccacaccgucacgggccgcaccucccugccccggugcugccuggugagcaacggguccuaccugaacgagacccacuucagcgacgacaucgagcagcaggcggacaacaugaucaccgagcuccugcagaaggaguacauggaccgccagggcaagacgccccugggccucguggaccuguucgucuucuccaccagcuucuaccugaucuccaucuuccugcaccucgugaagaucccgacccaccggcacgugaucgggaagcccugccccaagccccaccgccugaaccacaugggcaucugcagcugcgggcuguacaagcacccgggcguccccgugaaguggaagcggugaggacuaguaauaaggaaacuguaugaaugucugugggcaggaagugaagagauccuucuguaaagguuuuuggaauuaugucugcugaauaauaaacuuuuuugaaauaauaaaucugguagaaaaaugagaucucaaaggcucuuuucagagccaccaaaaaaaaaaaaaaaaaaaaaaaaaaaaaaaaaaaaaaaaaaaaaaaaaaaaaaaaaaaaaaaaagaauu

SEQ ID NO: 25588 - RNA, 1778 nt, Artificial Sequence
  mRNA product Design b-4 (hSL-A64-N5) comprising derived and/or modified sequence from LASV(LASV035-NIG-2009;Clade II)__AIT17588__GPCmut3 (opt1)
aggagagucccgcagucggcguccagcggcucugcuuguucgugugugugucguugcaggccuuauucaagcuuaccaugggccagaucaucaccuucuuccaggaggugccccacgucaucgaggaggugaugaacaucgugcugaucgcccucagccugcuggccauccucaaggggaucuacaacgucgcgaccugcggccuguucgggcugguguccuuccuccugcugugcggccgcagcugcuccacgaccuacaaggggguguacgagcuccagacccuggagcuggacauggccagccucaacaugaccaugccgcuguccugcacgaagaacaacagccaccacuacaucauggucggcaacgagaccggccuggagcucacccugaccaacacguccaucaucaaccacaaguucugcaaccugagcgacgcccacaagaagaaccucuacgaccacgcccugauguccaucaucagcaccuuccaccuguccauccccaacuucaaccaguacgaggccaugagcugcgacuucaacgggggcaagaucuccgugcaguacaaccucagccacgcguacgccguggacgccgccaaccacugcgggaccaucgcgaacggcguccugcagaccuucaugcggauggccuggggcggguccuacaucgcccuggacagcggcaagggguccugggacugcaucaugacgagcuaccaguaccucaucauccagaacaccaccugggaggaccacugccaguucucccgccccagccccaucggcuaccuggggcugcucagccagcggacccgcgacaucuacaucucccggcgccgccggggcacguucaccuggacccucagcgacuccgagggcaacgagacccccgggggcuacugccugacgcgguggaugcugaucgaggccgagcucaagugcuucgggaacaccgccguggcgaagugcaacgagaagcacgacgaggaguucugcgacaugcugcgccuguucgacuucaacaagcaggccauccggcgccucaaggcccccgcccagaugagcauccagcugaucaacaaggccgugaacgcgcugaucaacgaccagcucaucaugaagaaccaccuccgggacaucaugggcauccccuacugcaacuacuccaaguacugcuaccugaaccacaccgucaccgggaagacgagccugccccgcugcugccugguguccaacggcagcuaccugaacgagacccacuucuccgacgacaucgagcagcaggccgacaacaugaucaccgagcuccugcagaaggaguacaucgaccggcagggcaagaccccgcuggggcucguggaccuguucgucuucagcacguccuucuaccugaucagcaucuuccugcaccucgugaagaucccgacccaccgccacgugaucggcaagcccugccccaagccccaccggcugaaccacauggggaucugcuccugcggccuguacaagcacccggggguccccgugaaguggaagcgcugaggacuaguaauaaggaaacuguaugaaugucugugggcaggaagugaagagauccuucuguaaagguuuuuggaauuaugucugcugaauaauaaacuuuuuugaaauaauaaaucugguagaaaaaugagaucucaaaggcucuuuucagagccaccaaaaaaaaaaaaaaaaaaaaaaaaaaaaaaaaaaaaaaaaaaaaaaaaaaaaaaaaaaaaaaaaagaauu

SEQ ID NO: 25589 - RNA, 1778 nt, Artificial Sequence
  mRNA product Design b-4 (hSL-A64-N5) comprising derived and/or modified sequence from LASV(LASV1000-NIG-2009;Clade II)__AIT17782__GPCmut3 (opt1)
aggagagucccgcagucggcguccagcggcucugcuuguucgugugugugucguugcaggccuuauucaagcuuaccaugggccagaucaucaccuucuuccaggaggugccccacgucaucgaggaggugaugaacaucgugcugaucgcccucagccugcuggccauccucaaggggaucuacaacgucgcgaccugcggccuguucgggcugguguccuuccuccugcugugcggccgcagcugcuccacgaccuacaaggggguguacgagcuccagacccuggagcuggacauggccagccucaacaugaccaugccgcuguccugcacgaagaacaacagccaccacuacaucauggucggcaacgagaccggccuggagcucacccugaccaacacguccaucaucaaccacaaguucugcaaccugagcgacgcccacaagaagaaccucuacgaccacgcccugauguccaucaucagcaccuuccaccuguccauccccaacuucaaccaguacgaggccaugagcugcgacuucaacgggggcaagaucuccgugcaguacaaccucagccacaccuacgcgguggacgccgccaaccacugcgggaccaucgccaacggcguccugcagacguucaugcggauggcguggggcggguccuacaucgcccuggacagcggcaagggguccugggacugcaucaugaccagcuaccaguaccucaucauccagaacaccaccugggaggaccacugccaguucucccgccccagccccaucggcuaccuggggcugcucagccagcggacgcgcgacaucuacaucucccggcgccgccggggcaccuucaccuggacccucagcgacuccgagggcaacgagacgcccgggggcuacugccugacccgguggaugcugaucgaggccgagcucaagugcuucgggaacaccgccguggccaagugcaacgagaagcacgacgaggaguucugcgacaugcugcgccuguucgacuucaacaagcaggcgaucaagcggcucaagacccccgcccagaugagcauccagcugaucaacaaggccgugaacgcccugaucaacgaccagcucaucaugaagaaccaccuccgcgacaucaugggcauccccuacugcaacuacuccaaguacugcuaccugaaccacacggucaccgggaagaccagccugccccggugcugccugguguccaacggcagcuaccugaacgagacccacuucuccgacgacaucgagcagcaggccgacaacaugaucacggagcuccugcagaaggaguacaucgaccgccagggcaagaccccgcuggggcucguggaccuguucgucuucagcaccuccuucuaccugaucagcaucuuccugcaccucgugaagaucccgacccaccggcacguggucggcaagcccugccccaagccccaccgccugaaccacauggggaucugcuccugcggccuguacaagcacccgggggugcccgugaaguggaagcggugaggacuaguaauaaggaaacuguaugaaugucugugggcaggaagugaagagauccuucuguaaagguuuuuggaauuaugucugcugaauaauaaacuuuuuugaaauaauaaaucugguagaaaaaugagaucucaaaggcucuuuucagagccaccaaaaaaaaaaaaaaaaaaaaaaaaaaaaaaaaaaaaaaaaaaaaaaaaaaaaaaaaaaaaaaaaagaauu

SEQ ID NO: 25590 - RNA, 1778 nt, Artificial Sequence
  mRNA product Design b-4 (hSL-A64-N5) comprising derived and/or modified sequence from LASV(LASV221-NIG-2010;Clade II)__AIT17624__GPCmut3 (opt1)
aggagagucccgcagucggcguccagcggcucugcuuguucgugugugugucguugcaggccuuauucaagcuuaccaugggccagaucaucaccuucuuccaggaggugccccacgucaucgaggaggugaugaacaucgugcugaucgcccucagccugcuggccauccucaaggggaucuacaacgucgcgaccugcggccuguucgggcugguguccuuccuccugcugugcggccgcagcugcuccacgaccuacaaggggguguacgagcuccagacccuggagcuggacauggccagccucaacaugaccaugccgcuguccugcacgaagaacaacagccaccacuacaucauggucggcaacgagaccggccuggagcucacccugaccaacacguccaucaucaaccacaaguucugcaaccugagcgacgcccacaagaagaaccucuacgaccacgcccugauguccaucaucagcaccuuccaccuguccauccccaacuucaaccaguacgaggccaugagcugcgacuucaacgggggcaagaucuccgugcaguacaaccucagccacaccuacgcgaucgacgccgccaaccacugcgggaccaucgccaacggcgugcugcagacguucaugcggauggcguggggcggguccuacaucgcccuggacagcggcaagggguccugggacugcaucaugaccagcuaccaguaccucaucauccagaacaccaccugggaggaccacugccaguucucccgccccagccccaucggcuaccuggggcugcucagccagcggacgcgcgacaucuacaucucccggcgccgccggggcaccuucaccuggacccucagcgacuccgagggcaacgagacgcccgggggcuacugccugacccgguggaugcugaucgaggccgagcucaagugcuucgggaacaccgccgucgccaagugcaacgagaagcacgacgaggaguucugcgacaugcugcgccuguucgacuucaacaagcaggcgauccggcgccucaagacccccgcccagaugagcauccagcugaucaacaaggccgugaacgcccugaucaacgaccagcucaucaugaagaaccaccuccgggacaucaugggcauccccuacugcaacuacuccaaguacugcuaccugaaccacacggugaccgggaagaccagccugccccgcugcugccuggucuccaacggcagcuaccugaacgagacccacuucuccgacgacaucgagcagcaggccgacaacaugaucacggagaugcuccagaaggaguacauggaccggcagggcaagaccccgcuggggcugguggaccucuucguguucagcaccuccuucuaccugaucagcaucuuccugcaccuggucaagaucccgacccaccgccacgugaucggcaagcccugccccaagccccaccggcucaaccacauggggaucugcuccugcggccuguacaagcacccgggggugcccgucaaguggaagcgcugaggacuaguaauaaggaaacuguaugaaugucugugggcaggaagugaagagauccuucuguaaagguuuuuggaauuaugucugcugaauaauaaacuuuuuugaaauaauaaaucugguagaaaaaugagaucucaaaggcucuuuucagagccaccaaaaaaaaaaaaaaaaaaaaaaaaaaaaaaaaaaaaaaaaaaaaaaaaaaaaaaaaaaaaaaaaagaauu

SEQ ID NO: 25591 - RNA, 1778 nt, Artificial Sequence
  mRNA product Design b-4 (hSL-A64-N5) comprising derived and/or modified sequence from LASV(LASV237-NIG-2010;Clade II)__AIT17638__GPCmut3 (opt1)
aggagagucccgcagucggcguccagcggcucugcuuguucgugugugugucguugcaggccuuauucaagcuuaccaugggccagaucaucaccuucuuccaggaggugccccacgucaucgaggaggugaugaacaucgugcugaucgcccucagccugcuggccauccucaaggggaucuacaacgucgcgaccugcggccuguucgggcugguguccuuccuccugcugugcggccgcagcugcuccacgaccuacaaggggguguacgagcuccagacccuggagcuggacauggccagccucaacaugaccaugccgcuguccugcacgaagaacaacagccaccacuacaucauggucggcaacgagaccggccuggagcucacccugaccaacacguccaucaucaaccacaaguucugcaaccugagcgacgcccacaagaaggaccucuacgaccacgcccugauguccaucaucagcaccuuccaccuguccauccccaacuucaaccaguacgaggccaugagcugcgacuucaacgggggcaagaucuccgugcaguacaaccucagccacaccuacgcgguggacgccgccaaccacugcgggaccaucgccaacggcguccugcagacguucaugcggauggcguggggcggguccuacaucgcccuggacagcggcaagggguccugggacugcaucaugaccagcuaccaguaccucaucauccagaacaccaccugggaggaccacugccaguucucccgccccagccccaucggcuaccuggggcugcucagccagcggacgcgcgacaucuacaucucccggcgccgccggggcaccuucaccuggacccucagcgacuccgagggcaacgagacgcccgggggcuacugccugacccgguggaugcugaucgaggccgagcucaagugcuucgggaacaccgccguggccaagugcaacgagaagcacgacgaggaguucugcgacaugcugcgccuguucgacuucaacaagcaggcgauccggcgccucaagacccccgcccagaugagcauccagcugaucaacaaggccgugaacgcccugaucaacgaccagcucaucaugaagaaccaccuccgggacaucaugggcauccccuacugcaacuacuccaaguacugcuaccugaaccacacggucaccgggaagaccagccugccccgcugcugccugguguccaacggcagcuaccugaacgagacccacuucuccgacgacaucgagcagcaggccgacaacaugaucacggagcuccugcagaaggaguacauggaccggcagggcaagaccccgcuggggcucguggaccuguucgucuucagcaccuccuucuaccugaucagcaucuuccugcaccucaucaagaucccgacccaccgccacaucacgggcaagcccugccccaagccccaccggcugaaccacauggggaucugcuccugcggccuguacaagcacccgggggugcccgugaaguggaagcgcugaggacuaguaauaaggaaacuguaugaaugucugugggcaggaagugaagagauccuucuguaaagguuuuuggaauuaugucugcugaauaauaaacuuuuuugaaauaauaaaucugguagaaaaaugagaucucaaaggcucuuuucagagccaccaaaaaaaaaaaaaaaaaaaaaaaaaaaaaaaaaaaaaaaaaaaaaaaaaaaaaaaaaaaaaaaaagaauu

SEQ ID NO: 25592 - RNA, 1778 nt, Artificial Sequence
  mRNA product Design b-4 (hSL-A64-N5) comprising derived and/or modified sequence from LASV(LASV253-NIG-2011;Clade II)__AIT17670__GPCmut3 (opt1)
aggagagucccgcagucggcguccagcggcucugcuuguucgugugugugucguugcaggccuuauucaagcuuaccaugggccagaucaucaccuucuuccaggaggugccccacgucaucgaggaggugaugaacaucgugcugaucgcccucagccugcuggccauccucaaggggaucuacaacgucgcgaccugcggccuguucgggcugguguccuuccuccugcugugcggccgcagcugcuccacgaccuacaaggggguguacgagcuccagacccuggagcuggacauggccagccucaacaugaccaugccgcuguccugcacgaagaacaacagccaccacuacaucauggucggcaacgagaccggccuggagcucacccugaccaacacguccaucaucaaccacaaguucugcaaccugagcgacgcccacaagaagaaccucuacgaccacgcccugauguccaucaucagcaccuuccaccuguccauccccaacuucaaccaguacgaggccaugagcugcgacuucaacgggggcaagaucuccgugcaguacaaccucagccacaccuacgcgguggacgccgccaaccacugcgggaccaucgccaacggcguccugcagacguucaugcggauggcguggggcggguccuacaucgcccuggacagcggcaagggguccugggacugcaucaugaccagcuaccaguaccucaucauccagaacaccaccugggaggaccacugccaguucucccgccccagccccaucggcuaccuggggcugcucagccagcggacgcgcgacaucuacaucucccggcgccgccggggcaccuucaccuggacccucagcgacuccgagggcaacgagacgcccgggggcuacugccugacccgguggaugcugaucgaggccgagcucaagugcuucgggaacaccgccguggccaagugcaacgagaagcacgacgaggaguucugcgacaugcugcgccuguucgacuucaacaagcaggcgauccggcgccucaaggcccccgcccagaugagcauccagcugaucaacaaggccgugaacgcccugaucaacgaccagcucaucaugaagaaccaccuccgggacaucaugggcaucccguacugcaacuacuccaaguacugcuaccugaaccacaccgucacggggcgcaccagccugccccggugcugccugguguccaacggcagcuaccugaacgagacccacuucuccgacgacaucgagcagcaggcggacaacaugaucaccgagcuccugcagaaggaguacaucgaccgccagggcaagacgccccuggggcucguggaccuguucgucuucagcaccuccuucuaccugaucagcaucuuccugcaccucgugaagaucccgacccaccggcacaucaucggcaagcccugccccaagccccaccgccugaaccacauggggaucugcuccugcggccuguacaagcacccgggggugcccgucaaguggaagcggugaggacuaguaauaaggaaacuguaugaaugucugugggcaggaagugaagagauccuucuguaaagguuuuuggaauuaugucugcugaauaauaaacuuuuuugaaauaauaaaucugguagaaaaaugagaucucaaaggcucuuuucagagccaccaaaaaaaaaaaaaaaaaaaaaaaaaaaaaaaaaaaaaaaaaaaaaaaaaaaaaaaaaaaaaaaaagaauu

SEQ ID NO: 25593 - RNA, 1778 nt, Artificial Sequence
  mRNA product Design b-4 (hSL-A64-N5) comprising derived and/or modified sequence from LASV(LASV254-NIG-2011;Clade II)__AIT17674__GPCmut3 (opt1)
aggagagucccgcagucggcguccagcggcucugcuuguucgugugugugucguugcaggccuuauucaagcuuaccaugggccagaucaucaccuucuuccaggaggugccccacgucaucgaggaggugaugaacaucgugcugaucgcccucagccugcuggccauccucaaggggaucuacaacgucgcgaccugcggccuguucgggcugguguccuuccuccugcugugcggccgcagcugcuccacgaccuacaaggggguguacgagcuccagacccuggagcuggacaugaccaaccucaacaugacgaugccgcugagcugcaccaagaacaacucccaccacuacaucauggucggcaacgagaccggccuggagcucacccugacgaacaccagcaucaucaaccacaaguucugcaaccuguccgacgcccacaagaagaaccucuacaaccacgcccugaugagcaucaucuccaccuuccaccugagcauccccaacuucaaccaguacgaggccauguccugcgacuucaacgggggcaagaucagcgugcaguacaaccucucccacagcuacgccguggacgcggccaaccacugcgggaccaucgccaacggcguccugcagacguucaugcggauggccuggggcggguccuacaucgcgcuggacagcggcaaggggaacugggacugcaucaugaccuccuaccaguaccucaucauccagaacaccaccugggaggaccacugccaguucagccgccccucccccaucggcuaccuggggcugcucagccagcggacgcgcgacaucuacaucagccggcgccgccggggcaccuucaccuggacccucuccgacagcgagggcaacgagacgcccgggggcuacugccugacccgguggaugcugaucgaggccgagcucaagugcuucgggaacaccgccguggccaagugcaacgagaagcacgacgaggaguucugcgacaugcugcgccuguucgacuucaacaagcaggccauccggcgccucaagacccccgcgcaggccaacauccagcugaucaacaaggccgugaacgcccugaucaacgaccagcucaucaugaagaaccaccuccgggacaucaugggcauccccuacugcaacuacuccaaguacugcuaccugaaccacacggucaccgggaagaccagccugccccgcugcugccugguguccaacggcagcuaccugaacgagacccacuucuccgacgacaucgagcagcaggccgacaacaugaucacggagcuccugcagaaggaguacauggaccggcagggcaagaccccgcuggggcucguggaccuguucgucuucagcaccuccuucuaccugaucagcaucuuccugcaccucgugaagaucccgacccaccgccacgugaucggcaagcccugccccaagccccaccggcugaaccacauggggaucugcuccugcggccuguacaagcacccggggguccccgugaaguggaagcgcugaggacuaguaauaaggaaacuguaugaaugucugugggcaggaagugaagagauccuucuguaaagguuuuuggaauuaugucugcugaauaauaaacuuuuuugaaauaauaaaucugguagaaaaaugagaucucaaaggcucuuuucagagccaccaaaaaaaaaaaaaaaaaaaaaaaaaaaaaaaaaaaaaaaaaaaaaaaaaaaaaaaaaaaaaaaaagaauu

SEQ ID NO: 25594 - RNA, 1778 nt, Artificial Sequence
  mRNA product Design b-4 (hSL-A64-N5) comprising derived and/or modified sequence from LASV(Nig08-A19;Clade III)__ADU56618__GPCmut3 (opt1)
aggagagucccgcagucggcguccagcggcucugcuuguucgugugugugucguugcaggccuuauucaagcuuaccaugggccagaucgugaccuucuuccaggaggucccccacgugaucgaggaggugaugaacaucguccugaucgcccucagcauccuggccauccugaaggggcucuacaacaucgcgaccugcggccugaucgggcuggugacguuccuccugcuguccggccgcagcugcuccaugaccuacaaggggguguacgagcuccagacccuggagcugaacaugaacacccucaacaugacgaugccgcugagcugcaccaagaacaacucccaccacuacaucauggucggcaacgagaccggccuggagcucacccugacgaacaccagccugcuccaccacaaguucugcaaccuguccgacgcccacaagaagaaccuguacgaccacacccucaugagcaucaucuccaccuuccaccugagcauccccaacuucaaccaguacgaggccauguccugcgacuucaacgggggcaagaucacggugcaguacaaccugagccacuccuacgccaucgacgccgcgaaccacugcgggaccguggccaacggcguccuccagaccuucaugcggauggccuggggcgggagcuacaucgcccuggacuccggccgcgggaagugggacugcaucaugaccagcuaccaguaccugaucauccagaacacgaccugggaggaccacugccaguucucccggcccagccccaucggcuaccucgggcugcugucccagcgcacccgggacaucuacaucagccgccggcgccggggcaccuucacguggacccugagcgacuccgagggcaacgagacccccgggggcuacugccucacccgcuggaugcugaucgaggcggagcugaagugcuucgggaacacggccguggccaagugcaacgagaagcacgacgaggaguucugcgacaugcuccggcuguucgacuucaacaagcaggccauccgccggcugaaggcccccgcgcagaugagcauccagcucaucaacaaggccgugaacgcccugaucaacgaccagcugaucaugaagaaccaccuccgcgacaucaugggcauccccuacugcaacuacuccaaguacugcuaccugaaccacaccagcaccgggcggaccucccugccccgcugcugccucgucagcaacggcuccuaccugaacgagacgcacuucagcgacgacaucgagcagcaggccgacaacaugaucaccgagaugcugcagaaggaguaccucgaccggcagggcaagaccccgcuggggcugguggaccuguucguguucuccaccagcuucuaccucaucuccaucuuccugcaccuggucaagaucccgacgcaccgccacaucgugggcaagcccugccccaagccccaccggcucaaccacauggggaucugcagcugcggccuguacaagcagccgggggugcccguccgcuggaagcggugaggacuaguaauaaggaaacuguaugaaugucugugggcaggaagugaagagauccuucuguaaagguuuuuggaauuaugucugcugaauaauaaacuuuuuugaaauaauaaaucugguagaaaaaugagaucucaaaggcucuuuucagagccaccaaaaaaaaaaaaaaaaaaaaaaaaaaaaaaaaaaaaaaaaaaaaaaaaaaaaaaaaaaaaaaaaagaauu

SEQ ID NO: 25595 - RNA, 1781 nt, Artificial Sequence
  mRNA product Design b-4 (hSL-A64-N5) comprising derived and/or modified sequence from LASV(G1180-SLE-2010;Clade IV)__AIT17168__GPCmut3 (opt1)
aggagagucccgcagucggcguccagcggcucugcuuguucgugugugugucguugcaggccuuauucaagcuuaccaugggccagaucgugaccuucuuccaggaggucccccacgugaucgaggaggugaugaacaucguccugaucgcccucagcauccuggccgugcugaaggggcucuacaacuucgcgaccugcggccugguggggcugcucaccuuccugcugcucugcggccgcuccugcaccgccagccgguacaagggggucuacgagcugcagacccuggagcucaacauggagacccugaacaugacgaugccgcuguccugcaccaagaacaacagccaccacuacaucauggugggcaacgagaccggccucgagcugacccugacgaacaccuccaucaucaaccacaaguucugcaaccucagcgacgcccacaagaagaaccuguacgaccacgcccugauguccaucaucagcaccuuccaccucuccauccccaacuucaaccaguacgaggccaugagcugcgacuucaacgggggcaagaucuccgugcaguacaaccugagccacuccuacgcgggggacgccgccaaccacugcggcaccgucgccaacggggugcugcagacguucaugcgcauggcguggggcggcagcuacaucgcccucgacuccgggcacggcagcugggacugcaucaugaccuccuaccaguaccugaucauccagaacaccaccugggaggaccacugccaguucagccggcccucccccaucggguaccugggccuccugagccagcgcacgcgggacaucuacaucagccgccggcgccggggcaccuucaccuggacccuguccgacagcgaggggaaggacacgccgggcggguacugccugacccgcuggaugcucaucgaggccgagcugaagugcuucggcaacaccgccguggccaagugcaacgagaagcacgacgaggaguucugcgacaugcugcggcuguucgacuucaacaagcaggcgauccagcgccugaaggcccccgcccagauguccauccagcugaucaacaaggccgucaacgcccucaucaacgaccagcugaucaugaagaaccaccuccgggacaucauggggauccccuacugcaacuacagcaaguacugcuaccucaaccacaccacgaccggcaagaccucccugcccaagugcugccuggugagcaacggcuccuaccucaacgagacccacuucagcgacgacaucgagcagcaggcggacaacaugaucacggagaugcugcagaaggaguacauggagcgccaggggaagacgccccugggccucguggaccuguucgucuucuccaccagcuucuaccugaucuccaucuuccugcaccucgugaagaucccgacccaccggcacaucgugggcaagagcugccccaagccccaccgccugaaccacauggggaucugcuccugcgggcuguacaagcagcccggcgucccggugaaguggaagcggugaggacuaguaauaaggaaacuguaugaaugucugugggcaggaagugaagagauccuucuguaaagguuuuuggaauuaugucugcugaauaauaaacuuuuuugaaauaauaaaucugguagaaaaaugagaucucaaaggcucuuuucagagccaccaaaaaaaaaaaaaaaaaaaaaaaaaaaaaaaaaaaaaaaaaaaaaaaaaaaaaaaaaaaaaaaaagaauu

SEQ ID NO: 25596 - RNA, 1781 nt, Artificial Sequence
  mRNA product Design b-4 (hSL-A64-N5) comprising derived and/or modified sequence from LASV(G1442-SLE-2011;Clade IV)__AIT17180__GPCmut3 (opt1)
aggagagucccgcagucggcguccagcggcucugcuuguucgugugugugucguugcaggccuuauucaagcuuaccaugggccagaucgugaccuucuuccaggaggucccccacgugaucgaggaggugaugaacaucguccugaucgcccucagcauccuggccgugcugaaggggcucuacaacguggcgaccugcggccugaucgggcuggucacguuccuccugcugugcggccgcuccugcaccaccacccucuacaaggggguguacgagcugcagacgcuggagcucaacauggagacccugaacaugaccaugccgcugagcugcaccaagaacaacucccaccacuacauccgggugggcaacgagacgggccucgagcugacccugaccaacaccagcaucaucaaccacaaguucugcaaccucuccgacgcccacaagaagaaccuguacgaccacgcccugaugagcaucaucuccacguuccaccucagcauccccaacuucaaccaguacgaggccauguccugcgacuucaacgggggcaagaucagcguccaguacaaccugucccacagcuacgccggggacgcggccaaccacugcggcaccguggccaacggggugcugcagaccuucaugcgcauggccuggggcggcuccuacaucgcgcucgacagcgggcggggcaacugggacugcaucaugaccuccuaccaguaccugaucauccagaacacgaccugggacgaccacugccaguucagccgccccucccccaucggguaccugggccuccugagccagcggacccgcgacgucuacaucucccggcgccgccggggcaccuucacguggacccugagcgacagcgaggggaaggacaccccgggcggguacugccugacccgguggaugcucaucgaggccgagcugaagugcuucggcaacacggccguggccaagugcaacgagaagcacgacgaggaguucugcgacaugcugcgccucuucgacuucaacaagcaggccauccagcggcugaaggcgcccgcccagauguccauccagcugaucaacaaggccgugaacgcccucaucaacgaccagcugaucaugaagaaccaccuccgcgacaucauggggauccccuacugcaacuacagcaaguacugcuaccugaacaacaccgccaccggcaagaccucccugcccaagugcugccugaucagcaacggcuccuaccucaacgagacgcacuucagcgacgacaucgagcaggaggcggacaacaugaucaccgagaugcugcagaaggaguacauggagcggcaggggaagacgccccugggccucgucgaccuguucguguucuccaccagcuucuaccugaucuccaucuuccugcaccucgugaagaucccgacccaccgccacaucgucggcaagagcugccccaagccccaccggcugaaccacauggggaucugcuccugcgggcuguacaagcagcccggcgugccggugcgcuggaagcggugaggacuaguaauaaggaaacuguaugaaugucugugggcaggaagugaagagauccuucuguaaagguuuuuggaauuaugucugcugaauaauaaacuuuuuugaaauaauaaaucugguagaaaaaugagaucucaaaggcucuuuucagagccaccaaaaaaaaaaaaaaaaaaaaaaaaaaaaaaaaaaaaaaaaaaaaaaaaaaaaaaaaaaaaaaaaagaauu

SEQ ID NO: 25597 - RNA, 1781 nt, Artificial Sequence
  mRNA product Design b-4 (hSL-A64-N5) comprising derived and/or modified sequence from LASV(G3010-SLE-2013;Clade IV)__AIT17344__GPCmut3 (opt1)
aggagagucccgcagucggcguccagcggcucugcuuguucgugugugugucguugcaggccuuauucaagcuuaccaugggccagaucgugaccuucuuccaggaggucccccacgugaucgaggaggugaugaacaucguccugaucgcccucagcauccuggccgugcugaaggggcucuacaacuucgcgaccugcggccugguggggcuggucacguuccuccugcugugcggccgcuccugcaccaccagccucuacaaggggguguacgagcugcagacccuggagcucaacauggagacgcugaacaugaccaugccgcuguccugcaccaagaacaacagccaccacuacaucauggugggcaacgagaccggccucgagcugacgcugaccaacaccuccaucaucaaccacaaguucugcaaccucagcgacgcccacaagaagaaccuguacaaccacgcccugauguccaucaucagcaccuuccaccucuccauccccaacuucaaccaguacgaggccaugagcugcgacuucaacgggggcaagaucuccguccaguacaaccugagccacuccuacgccggggacgcggccagccacugcggcacgguggccaacggggugcugcagaccuucaugcggauggccuggggcggcuccuacaucgcgcucgacagcggguacggcaagugggacugcaucaugaccuccuaccaguaccugaucauccagaacaccacgugggaggaccacugccaguucagccgccccucccccaucggguaccugggccuccugagccagcggacccgcgacaucuacaucagccggcgccgccggggcaccuucaccuggacgcuguccgacagcgaggggaaggacaccccgggcggguacugccugacccgguggaugcucaucgaggccgagcugaagugcuucggcaacaccgccgucgccaagugcaacgagaagcacgacgaggaguucugcgacaugcugcgccucuucgacuucaacaagcaggccauccagcggcugaagacgcccgcgcagauguccauccagcugaucaacaaggccgugaacgcccucaucaacgaccagcugaucaugaagaaccaccuccgcgacaucauggggauccccuacugcaacuacagcaaguacugcuaccugaaccacaccaccaccggcaagacgucccugcccaagugcugccuggugagcaacggcuccuaccucaacgagacccacuucagcgacgacaucgagcagcaggccgacaacaugaucaccgagaugcugcagaaggaguacauggagcggcaggggaagacgccccugggccucgucgaccuguucguguucuccaccagcuucuaccugaucuccaucuuccugcaccucgugaagaucccgacccaccgccacaucgucggcaagagcugccccaagccccaccggcugaaccacauggggaucugcuccugcgggcuguacaagcagcccggcgugccggugcgcuggaagcggugaggacuaguaauaaggaaacuguaugaaugucugugggcaggaagugaagagauccuucuguaaagguuuuuggaauuaugucugcugaauaauaaacuuuuuugaaauaauaaaucugguagaaaaaugagaucucaaaggcucuuuucagagccaccaaaaaaaaaaaaaaaaaaaaaaaaaaaaaaaaaaaaaaaaaaaaaaaaaaaaaaaaaaaaaaaaagaauu

SEQ ID NO: 25598 - RNA, 1781 nt, Artificial Sequence
  mRNA product Design b-4 (hSL-A64-N5) comprising derived and/or modified sequence from LASV(G502-SLE-2009;Clade IV)__AIT17126__GPCmut3 (opt1)
aggagagucccgcagucggcguccagcggcucugcuuguucgugugugugucguugcaggccuuauucaagcuuaccaugggccagaucgugaccuucuuccaggaggucccccacgugaucgaggaggugaugaacaucguccugaucgcccucagcauccuggccgugcugaaggggcucuacaacuucgcgaccugcggccugguggggcugcucacguuccugcugcucugcggccgcuccugcaccaccgggcuguacaagggcgucuacgagcugcagacccucgagcugaacauggagacgcugaacaugaccaugccgcucagcugcaccaagaacaacucccaccacuacaucauggugggcaacgagaccgggcuggagcugacgcucaccaacaccagcaucaucaaccacaaguucugcaaccuguccgacgcccacaagaagaaccuguacgaccacgcccucaugagcaucaucuccaccuuccaccugagcauccccaacuucaaccaguacgaggccauguccugcgacuucaacggcgggaagaucagcgugcaguacaaccugucccacagcuacgccggcgacgcggccgaccacugcgggacggucgccaacggcgugcuccagaccuucaugcggauggccuggggcggguccuacaucgcgcuggacagcggccgcgggcggugggacugcaucaugaccuccuaccaguaccugaucauccagaacaccacgugggaggaccacugccaguucagccgccccucccccaucggcuaccucggccugcugagccagcggacccgcgacaucuacaucucccggcgccgccgggggaccuucaccuggacgcugagcgacagcgagggcaaggacacccccgggggcuacugccucacccgguggaugcugaucgaggccgagcugaagugcuucgggaacaccgccguggccaagugcaacgagaagcacgacgaggaguucugcgacaugcuccgccuguucgacuucaacaagcaggccauccagcggcugaaggcgcccgcccagauguccauccagcucaucaacaaggccgucaacgcccugaucaacgaccagcuggugaugaagaaccaccuccgcgacaucaugggcauccccuacugcaacuacagccgguacugcuaccugaaccacacgaccaccggccgcaccucccugcccaagugcugccucgugagcaacggguccuaccugaacgagacgcacuucagcgacgacaucgagcagcaggccgacaacaugaucaccgagaugcugcagaaggaguacauggagcggcagggcaagaccccgcucgggcuggucgaccuguucguguucuccaccagcuucuaccugaucuccaucuuccuccaccuggugaagaucccgacgcaccgccacaucgucggcaagagcugccccaagccccaccggcugaaccacauggggaucugcuccugcggccucuacaagcagcccggcgugccggugaaguggaagcgcugaggacuaguaauaaggaaacuguaugaaugucugugggcaggaagugaagagauccuucuguaaagguuuuuggaauuaugucugcugaauaauaaacuuuuuugaaauaauaaaucugguagaaaaaugagaucucaaaggcucuuuucagagccaccaaaaaaaaaaaaaaaaaaaaaaaaaaaaaaaaaaaaaaaaaaaaaaaaaaaaaaaaaaaaaaaaagaauu

SEQ ID NO: 25599 - RNA, 1781 nt, Artificial Sequence
  mRNA product Design b-4 (hSL-A64-N5) comprising derived and/or modified sequence from LASV(G733-SLE-2010;Clade IV)__AIT17154__GPCmut3 (opt1)
aggagagucccgcagucggcguccagcggcucugcuuguucgugugugugucguugcaggccuuauucaagcuuaccaugggccagaucgugaccuucuuccaggaggucccccacgugaucgaggaggugaugaacaucguccugaucgcccucagcauccuggccgugcugaaggggcucuacaacuucgcgaccugcggcaucguggggcuggucuccuuccugcuccugugcggccgcagcugcacgaccucccuguacaaggggguguacgagcuccagacccuggagcugaacauggagacccucaacaugacgaugccgcugagcugcaccaagaacaacucccaccacuacaucauggugggcaacgagaccggccuggagcucacccugacgaacaccagcaucaucaaccacaaguucugcaaccuguccgacgcccacaagaagaaccucuacgaccacgcccugaugagcaucaucuccaccuuccaccugagcauccccaacuucaaccaguacgaggccauguccugcgacuucaacgggggcaagaucagcguccaguacaaccucucccacagcuacgccggggacgcggccaaccacugcggcaccaucgccaacggggugcugcagacguucaugcggauggccuggggcggcuccuacaucgcgcuggacagcgggcgcgaccggugggacugcaucaugaccuccuaccaguaccucaucauccagaacaccaccugggaggaccacugccaguucagccgccccucccccaucggcuaccuggggcugcucagccagcggacgcgcgacaucuacaucagccggcgccgccggggcaccuucaccuggacccucuccgacagcgagggcaaggacacgcccgggggcuacugccugacccgguggaugcugaucgaggccgagcucaagugcuucgggaacaccgccguggccaagugcaacgagaagcacgacgaggaguucugcgacaugcugcgccuguucgacuucaacaagcaggccauccagcggcucaaggcgcccgcccagauguccauccagcugaucaacaaggccgucaacgcccugaucaacgaccagcucaucaugaagaaccaccuccgcgacaucaugggcauccccuacugcaacuacagcaaguacugcuaccugaaccacaccacgaccgggaagaccucccugcccaagugcugccuggugagcaacggcuccuaccugaacgagacccacuucagcgacgacaucgagcagcaggccgacaacaugaucacggagaugcuccagaaggaguacauggagcggcagggcaagaccccgcuggggcugguggaccucuucgucuucuccaccagcuucuaccugaucuccaucuuccugcaccuggugaagaucccgacccaccgccacguggucggcaagagcugccccaagccccaccggcucaaccacauggggaucugcuccugcggccuguacgggcagcccggcgugccggugaaguggaagcgcugaggacuaguaauaaggaaacuguaugaaugucugugggcaggaagugaagagauccuucuguaaagguuuuuggaauuaugucugcugaauaauaaacuuuuuugaaauaauaaaucugguagaaaaaugagaucucaaaggcucuuuucagagccaccaaaaaaaaaaaaaaaaaaaaaaaaaaaaaaaaaaaaaaaaaaaaaaaaaaaaaaaaaaaaaaaaagaauu

SEQ ID NO: 25600 - RNA, 1781 nt, Artificial Sequence
  mRNA product Design b-4 (hSL-A64-N5) comprising derived and/or modified sequence from MOPV/LASV reassortant(IGS-1;Clade IV)__AFY05576__GPCmut3 (opt1)
aggagagucccgcagucggcguccagcggcucugcuuguucgugugugugucguugcaggccuuauucaagcuuaccaugggccagaucgugaccuucuuccaggaggucccccacgugaucgaggaggugaugaacaucguccugaucgcccucagcgugcuggccgugcugaaggggcucuacaacuucgcgaccugcggccuggucgggcuggugacguuccuccugcugugcggccgcuccugcaccaccagccucuacaaggggguguacgagcugcagacccuggagcucaacauggagacgcugaacaugaccaugccgcuguccugcaccaagaacaacagccaccacuacaucauggucggcaacgagaccggccucgagcugacgcugaccaacaccuccaucaucaaccacaaguucugcaaccucagcgacgcccacaagaagaaccuguacgaccacgcccugauguccaucaucagcaccuuccaccucuccauccccaacuucaaccaguacgaggccaugagcugcgacuucaacgggggcaagaucuccgugcaguacaaccugagccacuccuacgccggggacgcggccaaccacugcggcacgguggccaacgggguccugcagaccuucaugcggauggccuggggcggcagcuacaucgcgcucgacuccgggcgcggcaacugggacugcaucaugaccagcuaccaguaccugaucauccagaacaccacgugggaggaccacugccaguucucccggcccagccccaucggguaccugggccuccugucccagcgcacccgggacaucuacaucagccgccggcgccggggcaccuucaccuggacgcugagcgacuccgagggggaggacaccccgggcggguacugccugacccgcuggaugcucaucgaggccgagcugaagugcuucggcaacaccgccguggccaagugcaacgagaagcacgacgaggaguucugcgacaugcugcggcuguucgacuucaacaagcaggccauccagcgccugaaggcgcccgcccagaugagcauccagcugaucaacaaggccgugaacgcccucaucaacgaccagcugaucaugaagaaccaccuccgggacaucauggggauccccuacugcaacuacuccaaguacugcuaccucaaccacacgaccaccggccgcaccagccugcccaagugcugccuggucuccaacggcagcuaccucaacgagacgcacuucuccgacgacaucgagcagcaggccgacaacaugaucaccgagaugcugcagaaggaguacauggagcggcaggggaagacgccccugggccucguggaccuguucguguucagcaccuccuucuaccugaucagcaucuuccugcaccucgucaagaucccgacccaccgccacaucguggggaaguccugccccaagccccaccggcugaaccacaugggcaucugcagcugcgggcuguacaagcagcccggcgugccggucaaguggaagcgcugaggacuaguaauaaggaaacuguaugaaugucugugggcaggaagugaagagauccuucuguaaagguuuuuggaauuaugucugcugaauaauaaacuuuuuugaaauaauaaaucugguagaaaaaugagaucucaaaggcucuuuucagagccaccaaaaaaaaaaaaaaaaaaaaaaaaaaaaaaaaaaaaaaaaaaaaaaaaaaaaaaaaaaaaaaaaagaauu

SEQ ID NO: 25601 - RNA, 1781 nt, Artificial Sequence
  mRNA product Design b-4 (hSL-A64-N5) comprising derived and/or modified sequence from LASV(LM765-SLE-2012;Clade IV)__AIT17814__GPCmut3 (opt1)
aggagagucccgcagucggcguccagcggcucugcuuguucgugugugugucguugcaggccuuauucaagcuuaccaugggccagaucgugaccuucuuccaggaggucccccacgugaucgaggaggugaugaacaucguccugaucgcccucagcauccuggccgugcugaaggggcucuacaacuucgcgaccugcggccugguggggcuggucacguuccuccugcugugcggccgcuccugcaccaccagccucuacaaggggguguacgagcugcagacccuggagcucaacauggagacgcugaacaugaccaugccgcuguccugcaccaagaacaacagccaccacuacaucauggugggcaacgagaccggccucgagcugacgcugaccaacaccuccaucaucgaccacaaguucugcaaccucagcgacgcccaccggaagaaccuguacgaccacgcccugauguccaucaucagcaccuuccaccucuccauccccaacuucaaccaguacgaggccaugagcugcgacuucaacgggggcaagaucuccguccaguacaaccugagccacuccuacgccaaggacgcggccgaccacugcgggacgguggccaacggcgugcugcagaccuucaugcgcauggccuggggcgggagcuacaucgcgcucgacuccggccgggggcgcugggacugcaucaugaccagcuaccaguaccugaucauccagaacaccacgugggaggaccacugccaguucucccggcccagccccaucggcuaccuggggcuccugucccagcgcacccgggacaucuacaucagccgccggcgccggggcaccuucaccuggacgcugagcgacuccgagggcaaggacacccccgggggcuacugccugacccgcuggaugcucaucgaggccgagcugaagugcuucgggaacaccgccgucgccaagugcaacgagaagcacgacgaggaguucugcgacaugcugcggcuguucgacuucaacaagcaggccauccagcgccugaaggcgcccgcccagaugagcauccagcugaucaacaaggccgugaacgcccucaucaacgaccagcugaucaugaagaaccaccuccgggacaucaugggcauccccuacugcaacuacuccaaguacugcuaccucaaccacacgaccaccgggaagaccagccugcccaagugcugccugguguccaacggcagcuaccucaacgagacgcacuucuccgacgacaucgagcagcaggccgacaacaugaucaccgagaugcugcagaaggaguacauggagcgccagggcaagaccccgcuggggcucgucgaccuguucguguucagcaccuccuucuaccugaucagcaucuuccugcaccucgugaagaucccgacgcaccggcacaucgucggcaagcccugccccaagccccaccgccugaaccacauggggaucugcuccugcggccuguacaagcagccgggggugcccgugaaguggaagcggugaggacuaguaauaaggaaacuguaugaaugucugugggcaggaagugaagagauccuucuguaaagguuuuuggaauuaugucugcugaauaauaaacuuuuuugaaauaauaaaucugguagaaaaaugagaucucaaaggcucuuuucagagccaccaaaaaaaaaaaaaaaaaaaaaaaaaaaaaaaaaaaaaaaaaaaaaaaaaaaaaaaaaaaaaaaaagaauu

SEQ ID NO: 25602 - RNA, 1781 nt, Artificial Sequence
  mRNA product Design b-4 (hSL-A64-N5) comprising derived and/or modified sequence from LASV(LM776-SLE-2012;Clade IV)__AIT17824__GPCmut3 (opt1)
aggagagucccgcagucggcguccagcggcucugcuuguucgugugugugucguugcaggccuuauucaagcuuaccaugggccagaucgugaccuucuuccaggaggucccccacgugaucgaggaggugaugaacaucguccugaucgcccucagcauccuggccgugcugaaggggcucuacaacuucgcgaccugcggccugguggggcuggucacguuccuccugcugugcggccgcuccugcaccaccagcguguacaaggggguguacgagcuccagacccuggagcugaacauggagacgcucaacaugaccaugccgcuguccugcaccaagaacaacagccaccacuacaucauggucggcaacgagaccggccuggagcucacgcugaccaacaccuccaucaucaaccacaaguucugcaaccugagcgacgcccacaagaagaaccucuacgaccacgcccugauguccaucaucagcaccuuccaccuguccauccccaacuucaaccaguacgaggccaugagcugcgacuucaacgggggcaagaucuccgugcaguacaaccucagccacuccuacgccggggacgcggccaaccacugcggcacgguggccaacgggguccugcagaccuucaugcggauggccuggggcggcagcuacaucgcgcuggacuccgggcacggcaagugggacugcaucaugaccagcuaccaguaccucaucauccagaacaccacgugggaggaccacugccaguucucccgccccagccccaucggguaccugggccugcucucccagcggacccgcgacaucuacaucagccggcgccgccggggcaccuucaccuggacgcucagcgacuccgaggggaaggacaccccgggcggguacugccugacccgguggaugcugaucgaggccgagcucaagugcuucggcaacaccgccguggccaagugcaacgagaagcacgacgaggaguucugcgacaugcugcgccuguucgacuucaacaagcaggccauccagcggcucaaggcgcccgcccagaugagcauccagcugaucaacaaggccgugaacgcccugaucaacgaccagcucaucaugaagaaccaccuccgcgacaucauggggauccccuacugcaacuacuccaaguacugcuaccugaaccacacgaccaccggcaagaccagccugcccaagugcugccuggucuccaacggcagcuaccugaacgagacgcacuucuccgacgacaucgagcagcaggccgacaacaugaucaccgagaugcuccagaaggaguacauggagcggcaggggaagacgccccugggccugguggaccucuucguguucagcaccuccuucuaccugaucagcaucuuccugcaccuggucaagaucccgacccaccgccacaucguggggaaguccugccccaagccccaccggcucaaccacaugggcaucugcagcugcgggcuguacaagcagcccggcgugccgguccgcuggaagcggugaggacuaguaauaaggaaacuguaugaaugucugugggcaggaagugaagagauccuucuguaaagguuuuuggaauuaugucugcugaauaauaaacuuuuuugaaauaauaaaucugguagaaaaaugagaucucaaaggcucuuuucagagccaccaaaaaaaaaaaaaaaaaaaaaaaaaaaaaaaaaaaaaaaaaaaaaaaaaaaaaaaaaaaaaaaaagaauu

SEQ ID NO: 25603 - RNA, 1781 nt, Artificial Sequence
  mRNA product Design b-4 (hSL-A64-N5) comprising derived and/or modified sequence from LASV(Mad39;Clade IV)__ANH09722__GPCmut3 (opt1)
aggagagucccgcagucggcguccagcggcucugcuuguucgugugugugucguugcaggccuuauucaagcuuaccaugggccagaucgugaccuucuuccaggaggucccccacgugaucgaggaggugaugaacaucguccugaucgcccucagcauccuggccgugcugaaggggcucuacaacguggcgaccugcggccugaucgggcuggucacguuccuccugcugugcggccgcuccugcaccaccacccucuacaaggggguguacgagcugcaggcccuggagcucaacauggagacgcugaacaugaccaugccgcugagcugcaccaagaacaacucccaccacuacauccgggugggcaacgagaccggccucgagcugacgcugaccaacaccagccucaucaaccacaaguucugcaaccuguccgacgcccacaagaagaaccuguacgaccacgcccucaugagcaucaucuccaccuuccaccugagcauccccaacuucaaccaguacgaggccauguccugcgacuucaacgacgggaagaucagcguccaguacaaccugucccacacguacgcgggcgacaccgccaaccacugcgggaccguggccaacggcgugcuccagaccuucaugcgcauggccuggggcgggagcuacaucgcgcuggacuccggccgcgggggcugggacugcaucaugacgagcuaccaguaccugaucauccagaacaccaccugggaggaccacugccaguucucccggcccagccccaucggguaccucggccugcugucccagcggacccgcgacaucuacaucagccggcgccgccggggcacguucaccuggacccuguccgacagcgaggggaaggacaccccgggcggguacugccucacgcgguggaugcugaucgaggccgagcugaagugcuucggcaacaccgccgucgccaagugcaacgagaagcacgacgaggaguucugcgacaugcuccgccuguucgacuucaacaagcaggccauccagcggcugaaggcgcccgcccagaugagcauccagcucaucaacaaggccgugaacgcccugaucaacgaccagcugaucaugaagaaccaccuccgcgacaucauggggauccccuacugcaacuacuccaaguacugcuaccugaaccacaccgugaccggcaagacgagccugcccaagugcugccucgucuccaacggcagcuaccugaacgagacccacuucuccgacgacaucgagcagcaggccgacaacaugaucaccgagaugcugcagaaggaguacauggagcggcaggggaagacgccccucggccugguggaccuguucguguucagcaccuccuucuaccugaucagcaucuuccuccaccuggucaagaucccgacccaccgccacgugguggggaagcccugccccaagccccaccggcugaaccacaugggcaucugcuccugcggguucuacaagcagccgggcguccccgugcgcuggaagcggugaggacuaguaauaaggaaacuguaugaaugucugugggcaggaagugaagagauccuucuguaaagguuuuuggaauuaugucugcugaauaauaaacuuuuuugaaauaauaaaucugguagaaaaaugagaucucaaaggcucuuuucagagccaccaaaaaaaaaaaaaaaaaaaaaaaaaaaaaaaaaaaaaaaaaaaaaaaaaaaaaaaaaaaaaaaaagaauu

SEQ ID NO: 25604 - RNA, 1781 nt, Artificial Sequence
  mRNA product Design b-4 (hSL-A64-N5) comprising derived and/or modified sequence from LASV(Z0947-SLE-2011;Clade IV)__AIT17840__GPCmut3 (opt1)
aggagagucccgcagucggcguccagcggcucugcuuguucgugugugugucguugcaggccuuauucaagcuuaccaugggccagaucgugaccuucuuccaggaggucccccacgugaucgaggaggugaugaacaucguccugaucgcccucagcauccuggccgugcugaaggggcucuacaacuucgcgaccugcggccugguggggcuggucacguuccuccugcugugcggccgcuccugcaccaucagccucuacaaggggguguacgagcugcagacccuggagcucaacauggagacccugaacaugacgaugccgcuguccugcaccaagaacaacagccaccacuacaucauggugggcaacgagaccggccucgagcugacccugacgaacaccuccaucaucaaccacaaguucugcaaccucagcgacgcccacaagaagaaccuguacgaccacgcccugauguccaucaucagcaccuuccaccucuccauccccaacuucaaccaguacgaggccaugagcugcgacuucaacgggggcaagaucuccguccaguacaaccugagccacuccuacgccggggacgcggccaaccacugcggcaccguggccaacggggugcugcagacguucaugcggauggccuggggcggcagcuacaucgcgcucgacuccgggcgcgaccggugggacugcaucaugaccagcuaccaguaccugaucauccagaacaccaccugggaggaccacugccaguucucccgccccagccccaucggcuaccuggggcuccugucccagcggacgcgcgacaucuacaucagccggcgccgccggggcaccuucaccuggacccugagcgacuccgagggcaaggacacgcccgggggcuacugccugacccgguggaugcucaucgaggccgagcugaagugcuucgggaacaccgccgucgccaagugcaacgagaagcacgacgaggaguucugcgacaugcugcgccucuucgacuucaacaagcaggccauccagcggcugaaggcgcccgcccagaugagcauccagcugaucaacaaggccgugaacgcccucaucaacgaccagcugaucaugaagaaccaccuccgcgacaucaugggcauccccuacugcaacuacuccaaguacugcuaccugaaccacaccacgaccgggaagaccagccugcccaagugcugccugguguccaacggcagcuaccucaacgagacccacuucuccgacgacaucgagcagcaggccgacaacaugaucacggagaugcugcagaaggaguacauggagcggcagggcaagaccccgcuggggcucgucgaccuguucguguucagcaccuccuucuaccugaucagcaucuuccugcaccucgugaagaucccgacccaccgccacaucgucggcaagcccugccccaagccccaccggcugaaccacauggggaucugcuccugcggccuguacaagcagccgggggugcccgugaaguggaagcgcugaggacuaguaauaaggaaacuguaugaaugucugugggcaggaagugaagagauccuucuguaaagguuuuuggaauuaugucugcugaauaauaaacuuuuuugaaauaauaaaucugguagaaaaaugagaucucaaaggcucuuuucagagccaccaaaaaaaaaaaaaaaaaaaaaaaaaaaaaaaaaaaaaaaaaaaaaaaaaaaaaaaaaaaaaaaaagaauu

SEQ ID NO: 25605 - RNA, 1781 nt, Artificial Sequence
  mRNA product Design b-4 (hSL-A64-N5) comprising derived and/or modified sequence from LASV(Josiah;Clade IV)__NP_694870__GPCmut3 (opt1)
aggagagucccgcagucggcguccagcggcucugcuuguucgugugugugucguugcaggccuuauucaagcuuaccaugggccagaucgugaccuucuuccaggaggucccccacgugaucgaggaggugaugaacaucguccugaucgcccucagcgugcuggccgugcugaaggggcucuacaacuucgcgaccugcggccuggucgggcuggugacguuccuccugcugugcggccgcuccugcaccaccagccucuacaaggggguguacgagcugcagacccuggagcucaacauggagacgcugaacaugaccaugccgcuguccugcaccaagaacaacagccaccacuacaucauggucggcaacgagaccggccucgagcugacgcugaccaacaccuccaucaucaaccacaaguucugcaaccucagcgacgcccacaagaagaaccuguacgaccacgcccugauguccaucaucagcaccuuccaccucuccauccccaacuucaaccaguacgaggccaugagcugcgacuucaacgggggcaagaucuccgugcaguacaaccugagccacuccuacgccggggacgcggccaaccacugcggcacgguggccaacgggguccugcagaccuucaugcggauggccuggggcggcagcuacaucgcgcucgacuccgggcgcggcaacugggacugcaucaugaccagcuaccaguaccugaucauccagaacaccacgugggaggaccacugccaguucucccggcccagccccaucggguaccugggccuccugucccagcgcacccgggacaucuacaucagccgccggcgccggggcaccuucaccuggacgcugagcgacuccgaggggaaggacaccccgggcggguacugccucacccgcuggaugcugaucgaggccgagcugaagugcuucggcaacaccgccguggccaagugcaacgagaagcacgacgaggaguucugcgacaugcuccggcuguucgacuucaacaagcaggccauccagcgccugaaggcgcccgcccagaugagcauccagcucaucaacaaggccgugaacgcccugaucaacgaccagcugaucaugaagaaccaccuccgggacaucauggggauccccuacugcaacuacuccaaguacugcuaccugaaccacacgaccaccggccgcaccagccugcccaagugcugccucgucuccaacggcagcuaccugaacgagacgcacuucuccgacgacaucgagcagcaggccgacaacaugaucaccgagaugcugcagaaggaguacauggagcggcaggggaagaccccgcucggccugguggaccuguucguguucagcaccuccuucuaccugaucagcaucuuccuccaccuggucaagauccccacgcaccgccacaucguggggaaguccugccccaagccccaccggcugaaccacaugggcaucugcagcugcgggcucuacaagcagccgggcgugcccgucaaguggaagcgcugaggacuaguaauaaggaaacuguaugaaugucugugggcaggaagugaagagauccuucuguaaagguuuuuggaauuaugucugcugaauaauaaacuuuuuugaaauaauaaaucugguagaaaaaugagaucucaaaggcucuuuucagagccaccaaaaaaaaaaaaaaaaaaaaaaaaaaaaaaaaaaaaaaaaaaaaaaaaaaaaaaaaaaaaaaaaagaauu

SEQ ID NO: 25606 - RNA, 1778 nt, Artificial Sequence
  mRNA product Design b-4 (hSL-A64-N5) comprising derived and/or modified sequence from LASV(LP;Clade I)__AAF86701__GPCmut3 (opt1)
aggagagucccgcagucggcguccagcggcucugcuuguucgugugugugucguugcaggccuuauucaagcuuaccaugggccagaucaucaccuucuuccaggaggugccccacgucaucgaggaggugaugaacaucgugcugaucgcccucagccugcuggccauccucaaggggcuguacaacaucgcgaccugcggcaucaucgggcuggucgccuuccucuuccugugcggcaaguccugcagccugacgcucaagggcggguacgagcugcagacccuggagcucaacauggagacccugaacaugaccaugccgcuguccugcacgaagaacagcucccaccacuacauccgcgugggcaacgagaccgggcucgagcugacccugaccaacacgagcaucaucaaccacaaguucugcaaccucuccgacgcccacaagaagaaccuguacgaccacgcccugaugagcaucaucuccaccuuccaccucagcauccccaacuucaaccaguacgaggccauguccugcgacuucaacggcgggaagaucagcgugcaguacaaccugucccacagcuacgcgggcgacgccgccgagcacugcgggaccgucgccaacggcgugcugcagaccuucaugcggauggcguggggcgggcgcuacaucgcccucgacuccggcaaggggaacugggacugcaucaugacgagcuaccaguaccugaucauccagaacaccaccugggaggaccacugccaguucucccggcccagccccaucggcuaccugggccuccugucccagcgcacccgggacaucuacaucagccgccggcgccgggggacguucaccuggacccugagcgacuccgagggcaacgagacccccgggggcuacugccucacgcgcuggaugcugaucgaggccgagcugaagugcuucgggaacaccgccguggccaagugcaacgagaagcacgacgaggaguucugcgacaugcuccggcuguucgacuucaacaagcaggcgauccgccggcugaaggccccggcccagaugagcauccagcucaucaacaaggccgucaacgcccugaucaacgaccagcugaucaugaagaaccaccuccgcgacaucaugggcauccccuacugcaacuacuccaaguacugcuaccugaaccacaccagcuccggccggaccagccugcccaagugcugccucaucuccaacgggagcuaccugaacgagacgcaguucuccgacgacaucgagcagcaggcggacaacaugaucaccgagaugcugcagaaggaguacaucgagcgccagggcaagaccccgcucgggcugguggacaucuucaucuucagcaccuccuucuaccugaucagcaucuuccugcaccucaucaagauccccacgcaccggcacaucgugggcaagcccugccccaagccgcaccgccugaaccacaugggggucugcuccugcggccuguacaagcaccccggcgugcccaccaaguggaagcggugaggacuaguaauaaggaaacuguaugaaugucugugggcaggaagugaagagauccuucuguaaagguuuuuggaauuaugucugcugaauaauaaacuuuuuugaaauaauaaaucugguagaaaaaugagaucucaaaggcucuuuucagagccaccaaaaaaaaaaaaaaaaaaaaaaaaaaaaaaaaaaaaaaaaaaaaaaaaaaaaaaaaaaaaaaaaagaauu

SEQ ID NO: 25607 - RNA, 1778 nt, Artificial Sequence
  mRNA product Design b-4 (hSL-A64-N5) comprising derived and/or modified sequence from LASV(803213;Clade II)__AAF86703__GPCmut3 (opt1)
aggagagucccgcagucggcguccagcggcucugcuuguucgugugugugucguugcaggccuuauucaagcuuaccaugggccagaucaucaccuucuuccaggaggugccccacgucaucgaggaggugaugaacaucgugcugaucgcccucagccugcuggccauccucaaggggaucuacaacgucgcgaccugcggccuguucgggcugaucuccuuccuccugcugugcggccgcagcugcuccgugacguacaaggggguguacgagcuccagacccuggagcugaacauggccaaccucaacaugaccaugccgcugagcugcaccaagaacaacucccaccacuacaucauggucggcaacgagacgggccuggagcucacccugaccaacaccagcaucaucaaccacaaguucugcaaccuguccgacgcccacaagaagaaccucuacgaccacgcccugaugagcaucaucuccacguuccaccugagcauccccaacuucaaccaguacgaggccauguccugcgacuucaacgggggcaagaucagcgugcaguacaaccucucccacagcuucgcgguggacgccgccaaccacugcgggaccaucgccaacggcguccugcagaccuucaugcggauggcguggggcggguccuacaucgcccuggacagcggcaaggggaacugggacugcaucaugaccuccuaccaguaccucaucauccagaacacgaccugggaggaccacugccaguucagccgccccucccccaucggcuaccuggggcugcucagccagcggacccgcgacaucuacaucagccggcgccggcgcggcaccuucacguggacccuguccgacagcgagggcaacgaggcccccgggggcuacugccugacccgguggaugcucaucgaggccgagcugaagugcuucgggaacaccgccguggcgaagugcaacgagaagcacgacgaggaguucugcgacaugcugcgccucuucgacuucaacaagcaggccaucaagcggcugaagacgccggcccagauguccauccagcugaucaacaaggccgugaacgcccucaucaacgaccagcugaucaugaagaaccaccuccgcgacaucaugggcauccccuacugcaacuacagccgguacugcuaccugaaccacaccgucaccgggaagaccucccugccccgcugcugccuggugagcaacggcuccuaccucaacgagacgcacuucagcgacgacaucgagcagcaggcggacaacaugaucaccgagaugcugcagaaggaguacauggaccggcagggcaagaccccgcuggggcucguggaccuguucgucuucuccaccagcuucuaccugaucuccaucuuccugcaccucgugaagauccccacgcaccgccacaucgugggcaagcccugccccaagccgcaccggcugaaccacauggggaucugcagcugcggccuguacaagcaccccgggguccccgugaaguggaagcgcugaggacuaguaauaaggaaacuguaugaaugucugugggcaggaagugaagagauccuucuguaaagguuuuuggaauuaugucugcugaauaauaaacuuuuuugaaauaauaaaucugguagaaaaaugagaucucaaaggcucuuuucagagccaccaaaaaaaaaaaaaaaaaaaaaaaaaaaaaaaaaaaaaaaaaaaaaaaaaaaaaaaaaaaaaaaaagaauu

SEQ ID NO: 25608 - RNA, 1778 nt, Artificial Sequence
  mRNA product Design b-4 (hSL-A64-N5) comprising derived and/or modified sequence from LASV(GA391;Clade III)__CAA36645__GPCmut3 (opt1)
aggagagucccgcagucggcguccagcggcucugcuuguucgugugugugucguugcaggccuuauucaagcuuaccaugggccagaucgugaccuucuuccaggaggucccccacgugaucgaggaggugaugaacaucguccugaucgcccucagcauccuggccauccugaaggggcucuacaacguggcgaccugcggccugaucgggcuggugacguuccuccugcuguccggccgcagcugcucccucaucuacaaggggaccuacgagcugcagacccuggagcucaacauggagacccugaacaugacgaugccgcugagcugcaccaagaacaacucccaccacuacauccgggucggcaacgagaccggccucgagcugacccugacgaacaccagcauccucaaccacaaguucugcaaccuguccgacgcccacaagcgcaaccuguacgaccacagccucauguccaucaucagcaccuuccaccuguccauccccaacuucaaccaguacgaggccaugagcugcgacuucaacgggggcaagaucaccgugcaguacaaccugucccacagcuucgccguggacgccgcggggcacugcggcacgcucgccaacgggguccugcagaccuucaugcggauggccuggggcggcuccuacaucgcccuggacagcgggcgcggcaacugggacugcaucaugaccuccuaccaguaccucaucauccagaacaccacgugggacgaccacugccaguucagccggcccucccccaucggguaccugggccugcucagccagcgcacccgggacaucuacaucagccgccggcgccggggcaccuucaccuggacgcuguccgacagcgaggggaacgagaccccgggcggguacugccugacccgcuggaugcucaucgaggcggagcugaagugcuucggcaacaccgccguggccaagugcaacgagaagcacgacgaggaguucugcgacaugcugcggcuguucgacuucaacaagcaggccauccgccggcugaagacgcccgcccagauguccauccagcugaucaacaaggcggugaacgcccucaucaacgaccagcugaucaugaagaaccaccuccgcgacaucauggggauccccuacugcaacuacagccgguacugcuaccucaaccacaccuccaccggcaagaccagccugccccgcugcugccugaucuccaacggcagcuaccucaacgagacgaaguucuccgacgacaucgagcagcaggccgacaacaugaucaccgagaugcugcagaaggaguacaucgaccggcaggggaagaccccgcugggccuggucgaccucuucguguucagcaccuccuucuaccugaucagcaucuuccugcaccucgugaagauccccacgcaccgccacaucgucgggaagcccugccccaagccgcaccggcugaaccacaugggcaucugcuccugcgggcuguacaagcagcccggcgugcccgugcgcuggaagcgcugaggacuaguaauaaggaaacuguaugaaugucugugggcaggaagugaagagauccuucuguaaagguuuuuggaauuaugucugcugaauaauaaacuuuuuugaaauaauaaaucugguagaaaaaugagaucucaaaggcucuuuucagagccaccaaaaaaaaaaaaaaaaaaaaaaaaaaaaaaaaaaaaaaaaaaaaaaaaaaaaaaaaaaaaaaaaagaauu

SEQ ID NO: 25609 - RNA, 1781 nt, Artificial Sequence
  mRNA product Design b-4 (hSL-A64-N5) comprising derived and/or modified sequence from LASV(AV;Clade V)__CCA30314__GPCmut3 (opt1)
aggagagucccgcagucggcguccagcggcucugcuuguucgugugugugucguugcaggccuuauucaagcuuaccaugggccagaucgugaccuucuuccaggaggucccccacgugaucgaggaggugaugaacaucguccugaucgcccucagcauccuggccgugcugaaggggcucuacaacaucgcgaccugcggccugaucgggcugaucacguuccuccugcugugcggccgcuccugcagcuccaaccucuacaaggggguguacgagcugcagagccuggaccucaacauggagacccugaacaugaccaugccgcuguccugcaccaagaacaacagccaccacuacauccgggucggcaacgacacgggccucgagcugacccugaccaacaccuccauccucaaccacaaguucugcaaccugagcgacgcccacaagaaggaccuguacgaccacgcccucauguccaucaucagcacguuccaccuguccauccccaacuucaaccaguacgaggccaugagcugcgacuucaacgggggcaagaucuccgugcaguacaaccugagccacuccuacgccaucgacgcggccaaccacugcgggaccguggccaacggcauccuccagaccuucaugcgcauggccuggggcgggagcuacaucgcgcuggacuccggccgggggaacugggacugcaucaugaccagcuaccaguaccugaucauccagaacacgaccugggagaaccacugccaguucucccgccccagccccaucggcuaccucgggcugcugagccagcggacccgcgacaucuacaucucccggcgccggcgcggcaccuucacguggacccucagcgacuccgagggcaacgccacccccgggggcuacugccugacccgguggaugcugaucgaggccgagcucaagugcuucgggaacacggccgucgccaagugcaacgagaagcacgacgaggaguucugcgacaugcugcgccuguucgacuucaacaagcaggcgaucagccggcucaaguccccggcccagaugagcauccagcugaucaacaaggccgugaacgcccugaucaacgaccagcucaucaugaagaaccaccuccgcgacaucaugggcauccccuacugcaacuacuccaaguacugcuaccugaaccacaccaucaccgggaagaccagccugcccaagugcugccugguguccaacggcagcuaccugaacgagacgcacuucuccgacgacaucgagcagcaggccgacaacaugaucaccgagaugcuccagaaggaguacauggagcggcagggcaagaccccgcuggggcuggucgaccuguucguguucagcaccuccuucuaccucaucagcaucuuccugcgccuggugaagauccccacgcaccggcacaucgucggcaagcccugccccaagccgcaccgccucaaccacauggggaucugcuccugcggccuguacaagcagcccggggugcccgugcgguggaagcgcugaggacuaguaauaaggaaacuguaugaaugucugugggcaggaagugaagagauccuucuguaaagguuuuuggaauuaugucugcugaauaauaaacuuuuuugaaauaauaaaucugguagaaaaaugagaucucaaaggcucuuuucagagccaccaaaaaaaaaaaaaaaaaaaaaaaaaaaaaaaaaaaaaaaaaaaaaaaaaaaaaaaaaaaaaaaaagaauu

SEQ ID NO: 25610 - RNA, 1778 nt, Artificial Sequence
  mRNA product Design b-4 (hSL-A64-N5) comprising derived and/or modified sequence from LASV(Togo/2016/7082;Clade VI)__AMR44577__GPCmut3 (opt1)
aggagagucccgcagucggcguccagcggcucugcuuguucgugugugugucguugcaggccuuauucaagcuuaccaugggccagaucaucaccuucuuccaggaggugccccacgucaucgaggaggugaugaacaucgugcugaucgcccucagccugcuggccauccucaagggggucuacaacguggcgaccugcggcaucaucgggcuggugacguuccuguuccucugcggccgcuccugcagccugaucuacaagggguccuacgagcugcagacccucgagcugaacauggagacccugaacaugaccaugccgcucagcugcacgaagaacuccagccaccacuacauccgggucggcaacgagaccggccuggagcugacccucaccaacacguccaucaucaaccacaaguucugcaaccugagcgacgcccacaagcgcaaccuguacgaccacgcccucauguccauccugagcaccuuccaccuguccauccccaacuucaaccaguacgaggccaugagcugcgacuucaacgggggcaagaucuccgugcaguacaaccucagccacgccuacgcgguggacgccgccgagcacugcgggaccgucgccaacggcgugcugcagaccuucaugcggauggcguggggcggguccuacaucgcccuggacagcggccgcgggaacugggacugcaucaugacguccuaccaguaccucaucauccagaacaccaccugggaggaccacugccaguucagccggcccucccccaucggcuaccuggggcugcucagccagcgcacccgggacaucuacaucagccgccggcgccggggcacguucaccuggacccuguccgacagcgagggcaacgagacccccgggggcuacugccugacgcgcuggaugcucaucgaggccgagcugaagugcuucgggaacaccgccguggccaagugcaacgagaagcacgacgaggaguucugcgacaugcugcggcuguucgacuucaacaagcaggcgauccagcgccugaaguccccggcccagaugagcauccagcugaucaacaaggccgucaacgcccucaucaacgaccagcugaucaugaagaaccaccuccgggacaugaugggcauccccuacugcaacuacuccaaguacugcuaccucaaccacaccagcuccgggcgcaccagccugcccaagugcugccugguguccaacggcagcuaccucaacgagacgcacuucuccgacgacaucgagcagcaggccgacaacaugaucaccgagaugcugcagaaggaguacaucgaccggcagggcaagaccccgcuggggcucguggaccuguucgucuucagcaccuccuucuaccugaucagcaucuuccugcaccucaucaagauccccacgcaccgccacaucgugggcaagcccugccccaagccgcaccggcugaaccacauggggaucugcuccugcggccuguacaagcagcccggggugcccacccgcuggaagcggugaggacuaguaauaaggaaacuguaugaaugucugugggcaggaagugaagagauccuucuguaaagguuuuuggaauuaugucugcugaauaauaaacuuuuuugaaauaauaaaucugguagaaaaaugagaucucaaaggcucuuuucagagccaccaaaaaaaaaaaaaaaaaaaaaaaaaaaaaaaaaaaaaaaaaaaaaaaaaaaaaaaaaaaaaaaaagaauu

SEQ ID NO: 25611 - RNA, 1778 nt, Artificial Sequence
  mRNA product Design b-4 (hSL-A64-N5) comprising derived and/or modified sequence from LASV(KAK-428;Clade n.d. (VII))__ANH09740__GPCmut3 (opt1)
aggagagucccgcagucggcguccagcggcucugcuuguucgugugugugucguugcaggccuuauucaagcuuaccaugggccagaucgugaccuucuuccaggaggucccccacgugaucgaggaggugaugaacaucguccugaucgcccucagccugcuggccauccucaaggggcuguacaacuucgcgaccugcggcgugaucgggcugaucacguuccuccugcugugcggccgcuccugcagcgccaccuacaaggggcaguacgagcuccagacccuggagcugaacauggagucccucaacaugaccaugccgcugagcugcacgaagaacaacucccaccacuacauccgggccggcaacaacaccggccuggagcucacccugaccaacacgagcaucaucucccacaaguucugcaaccugagcgacgcccacaagaagaaccucuacgaccacacccugauguccaucaucaccaccuuccaccugagcauccccaacuucaaccaguacgaggccauguccugcgacuucaacgggggcaagaucagcauccaguacaaccucucccacagcuacgcgggggacgccgcccagcacugcggcacgguggccaacgggguccugcagaccuucaugcgcauggcguggggcggcuccuaccuggcccucgacagcgggcggcgcggcugggacugcaucaucuccagcuaccaguaccugaucauccagaacaccaccugggacgaccacugccaguucucccggcccagccccaucggguaccugggcuucgugagccagaagacgcgcgacaucuacaucucccggcgccggcgcggcaccuucaccuggacccucagcgacuccgaggggcacgacaugccgggcggguacugccugacgcgguggaugcugaucgaggccgaccucaagugcuucggcaacaccgccguggccaagugcaacgagaagcacgacgaggaguucugcgacauguggcgccuguucgacuucaacaagcaggcgauccagcggcugaaggcccccgcccagaugaacauccagcucaucaacaaggccgucaacgcccugaucaacgaccagcugaugaugaagaaccaccuccgcgacaucauggggauccccuacugcaacuacagcaaguucugcuaccugaacaacaccaccacgggccggaccucccugccccgcugcugccucaucagcaacggcuccuaccugaacgagacccacuucagcgacgacaucgagcagcaggcggacaacaugaucaccgagaugcugcagaaggaguacauggaccggcaggggaagacgccgcucggccugguggaccuguucguguucuccaccagcuucuaccucaucaccaucuuccugcaccuggucaagauccccacccaccgccacaucguggggaagcccugccccaagccgcaccggcugaaccacaugggcaucugcuccugcgggcucuacaagcagcccggcgugcccguccgcuggaagcggugaggacuaguaauaaggaaacuguaugaaugucugugggcaggaagugaagagauccuucuguaaagguuuuuggaauuaugucugcugaauaauaaacuuuuuugaaauaauaaaucugguagaaaaaugagaucucaaaggcucuuuucagagccaccaaaaaaaaaaaaaaaaaaaaaaaaaaaaaaaaaaaaaaaaaaaaaaaaaaaaaaaaaaaaaaaaagaauu

SEQ ID NO: 25612 - RNA, 1778 nt, Artificial Sequence; identical to SEQ ID NO: 25606
  mRNA product Design b-4 (hSL-A64-N5) comprising derived and/or modified sequence from LASV(Pinneo-NIG-1969;Clade I)__AIT17836__GPCmut3 (opt1)

SEQ ID NO: 25613 - RNA, 1778 nt, Artificial Sequence
  mRNA product Design b-4 (hSL-A64-N5) comprising derived and/or modified sequence from LASV(ISTH0009-NIG-2011;Clade II)__AIT17404__GPCmut3 (opt1)
aggagagucccgcagucggcguccagcggcucugcuuguucgugugugugucguugcaggccuuauucaagcuuaccaugggccagaucaucaccuucuuccaggaggugccccacgucaucgaggaggugaugaacaucgugcugaucgcccucagccugcuggccauccucaaggggaucuacaacgucgcgaccugcggccuguucgggcugguguccuuccuccugcugugcggccgcagcugcuccacgaccuacaaggggguguacgagcuccagacccuggagcuggacauggccagccucaacaugaccaugccgcuguccugcacgaagaacaacagccaccacuacaucauggucggcaacgagaccggccuggagcucacccugaccaacacguccaucaucaaccacaaguucugcaaccugagcgacgcccacaagaagaaccucuacgaccacgcccugauguccaucaucagcaccuuccaccuguccauccccaacuucaaccaguacgaggccaugagcugcgacuucaacgggggcaagaucuccgugcaguacaaccucagccacgcguacgccguggacgccgccaaccacugcgggaccaucgcgaacggcguccugcagaccuucaugcggauggccuggggcggguccuacaucgcccuggacagcggcaagggguccugggacugcaucaugacgagcuaccaguaccucaucauccagaacaccaccugggaggaccacugccaguucucccgccccagccccaucggcuaccuggggcugcucagccagcggacccgcgacaucuacaucucccggcgccggcgcggcacguucaccuggacccugagcgacuccgagggcaacgagacccccgggggcuacugccugacgcgguggaugcucaucgaggccgagcugaagugcuucgggaacaccgccguggcgaagugcaacgagaagcacgacgaggaguucugcgacaugcugcgccucuucgacuucaacaagcaggccauccggcgccugaagaccccggcccagaugagcauccagcugaucaacaaggccgugaacgcccucaucaacgaccagcugaucaugaagaaccaccuccgggacaucaugggcauccccuacugcaacuacuccaaguacugcuaccugaaccacaccgucacggggaagaccagccugccccgcugcugccugguguccaacggcagcuaccucaacgagacccacuucuccgacgacaucgagcagcaggcggacaacaugaucaccgagcugcugcagaaggaguacauggaccggcagggcaagacgccgcucgggcugguggaccuguucgucuucagcaccuccuucuaccugaucagcaucuuccuccaccugaucaagauccccacccaccgccacaucaccggcaagcccugccccaagccgcaccggcugaaccacauggggaucugcuccugcggccucuacaagcaccccggggugcccgugaaguggaagcgcugaggacuaguaauaaggaaacuguaugaaugucugugggcaggaagugaagagauccuucuguaaagguuuuuggaauuaugucugcugaauaauaaacuuuuuugaaauaauaaaucugguagaaaaaugagaucucaaaggcucuuuucagagccaccaaaaaaaaaaaaaaaaaaaaaaaaaaaaaaaaaaaaaaaaaaaaaaaaaaaaaaaaaaaaaaaaagaauu

SEQ ID NO: 25614 - RNA, 1778 nt, Artificial Sequence
  mRNA product Design b-4 (hSL-A64-N5) comprising derived and/or modified sequence from LASV(ISTH2010-NIG-2012;Clade II)__AIT17482__GPCmut3 (opt1)
aggagagucccgcagucggcguccagcggcucugcuuguucgugugugugucguugcaggccuuauucaagcuuaccaugggccagaucaucaccuucuuccaggaggugccccacgucaucgaggaggugaugaacaucgugcugaucgcccucagccugcuggccauccucaaggggaucuacaacgucgcgaccugcggccuguucgggcugguguccuuccuccugcugugcggccgcagcugcuccacgaccuacaaggggguguacgagcuccagacccuggagcuggacauggccagccucaacaugaccaugccgcuguccugcacgaagaacaacagccaccacuacaucauggucggcaacgagaccggccuggagcucacccugaccaacacguccaucaucaaccacaaguucugcaaccugagcgacgcccacaagaagaaccucuacgaccacgcccugauguccaucaucagcaccuuccaccuguccauccccaacuucaaccaguacgaggccaugagcugcgacuucaacgggggcaagaucuccgugcaguacaaccucagccacgcguacgccguggacgccgccaaccacugcgggaccaucgcgaacggcguccugcagaccuucaugcggauggccuggggcggguccuacaucgcccuggacagcggcaagggguccugggacugcaucaugacgagcuaccaguaccucaucauccagaacaucaccugggaggaccacugccaguucucccgccccagccccaucggcuaccuggggcugcucagccagcggacccgcgacaucuacaucucccggcgccggcgcggcaccuucacguggacccugagcgacuccgagggcaacgagacccccgggggcuacugccugacccgguggaugcucaucgaggccgagcugaagugcuucgggaacacggccguggcgaagugcaacgagaagcacgacgaggaguucugcgacaugcugcgccucuucgacuucaacaagcaggccauccggcgccugaagaccccggcccagaugagcauccagcugaucaacaaggccgugaacgcccucaucaacgaccagcugaucaugaagaaccaccuccgggacaucaugggcauccccuacugcaacuacuccaaguacugcuaccugaaccacaccgucaccgggaagacgagccugccccgcugcugccugguguccaacggcagcuaccucaacgagacccacuucuccgacgacaucgagcagcaggcggacaacaugaucaccgagcugcugcagaaggaguacaucgaccggcagggcaagaccccgcucgggcugguggaccuguucgucuucagcacguccuucuaccugaucagcaucuuccuccaccuggugaagauccccacccaccgccacguggucggcaagcccugccccaagccgcaccggcugaaccacauggggaucugcuccugcggccucuacaagcaccccggggugcccgugaaguggaagcgcugaggacuaguaauaaggaaacuguaugaaugucugugggcaggaagugaagagauccuucuguaaagguuuuuggaauuaugucugcugaauaauaaacuuuuuugaaauaauaaaucugguagaaaaaugagaucucaaaggcucuuuucagagccaccaaaaaaaaaaaaaaaaaaaaaaaaaaaaaaaaaaaaaaaaaaaaaaaaaaaaaaaaaaaaaaaaagaauu

SEQ ID NO: 25615 - RNA, 1778 nt, Artificial Sequence
  mRNA product Design b-4 (hSL-A64-N5) comprising derived and/or modified sequence from LASV(Lassa virus/H.sapiens-wt/NGA/2015/ISTH_0543;Clade II)__AVO03639__GPCmut3 (opt1)
aggagagucccgcagucggcguccagcggcucugcuuguucgugugugugucguugcaggccuuauucaagcuuaccaugggccagaucaucaccuucuuccaggaggugccccacgucaucgaggaggugaugaacaucgugcugaucgcccucagccugcuggccauccucaaggggaucuacaacgucgcgaccugcggccuguucgggcugguguccuuccuccugcugugcggccgcagcugcuccacgaccuacaaggggguguacgagcuccagacccuggagcuggacauggccaaccucaacaugaccaugccgcugagcugcacgaagaacaacucccaccacuacaucauggucggcaacgagaccggccuggagcucacccugaccaacacgagcaucaucaaccacaaguucugcaaccuguccgacgcccacaagaagaaccucuacgaccacgcccugaugagcaucaucuccaccuuccaccugagcauccccaacuucaaccaguacgaggccauguccugcgacuucaacgggggcaagaucagcgugcaguacaaccucucccacaccuacgcgguggacgccgccaaccacugcgggaccaucgccaacggcguccugcagacguucaugcggauggcguggggcgggagcuacaucgcccuggacuccggcaaggggagcugggacugcaucaugaccuccuaccaguaccucgugauccagaacaccaccugggaggaccacugccaguucagccgccccucccccaucggcuaccuggggcugcucagccagcggacgcgcgacaucuacaucagccggcgccggcgcggcaccuucaccuggacccuguccgacagcgagggcaacgagacgcccgggggcuacugccugacccgguggaugcucaucgaggccgagcugaagugcuucgggaacaccgccguggccaagugcaacgagaagcacgacgaggaguucugcgacaugcugcgccucuucgacuucaacaagcaggcgauccggcgccugaagaccccggcccagauguccauccagcugaucaacaaggccgucaacgcccucaucaacgaccagcugaucaugaagaaccaccuccgggacaucaugggcauccccuacugcaacuacagcaaguacugcuaccugaaccacacggugaccgggaagaccucccugccccgcugcugccuggugagcaacggcuccuaccucaacgagacccacuucagcgacgacaucgagcagcaggccgacaacaugaucacggagcugcugcagaaggaguacaucgaccggcagggcaagaccccgcucgggcuggucgaccuguucguguucuccaccagcuucuaccugaucuccaucuuccuccaccuggugaagauccccacccaccgccacaucacgggcaagcccugccccaagccgcaccggcugaaccacauggggaucugcagcugcggccucuacaagcaccccgggguccccgugaaguggaagcgcugaggacuaguaauaaggaaacuguaugaaugucugugggcaggaagugaagagauccuucuguaaagguuuuuggaauuaugucugcugaauaauaaacuuuuuugaaauaauaaaucugguagaaaaaugagaucucaaaggcucuuuucagagccaccaaaaaaaaaaaaaaaaaaaaaaaaaaaaaaaaaaaaaaaaaaaaaaaaaaaaaaaaaaaaaaaaagaauu

SEQ ID NO: 25616 - RNA, 1778 nt, Artificial Sequence
  mRNA product Design b-4 (hSL-A64-N5) comprising derived and/or modified sequence from LASV(Lassa virus/H.sapiens-wt/NGA/2016/ISTH_0009;Clade II)__AVO03571__GPCmut3 (opt1)
aggagagucccgcagucggcguccagcggcucugcuuguucgugugugugucguugcaggccuuauucaagcuuaccaugggccagaucaucaccuucuuccaggaggugccccacgucaucgaggaggugaugaacaucgugcugaucgcccucagccugcuggccauccucaaggggaucuacaacgucgcgaccugcggccugcuggggcucguguccuuccugcugcucugcggccgcagcugcuccacgaccuacaaggggguguacgagcugcagacccuggagcucgacauggccagccugaacaugaccaugccgcuguccugcacgaagaacaacagccaccacuacaucauggucggcaacgagaccggccucgagcugacccugaccaacacguccaucaucaaccacaaguucugcaaccucagcgacgcccacaagaagaaccuguacgaccacgcccugauguccaucaucagcaccuuccaccucuccauccccaacuucaaccaguacgaggccaugagcugcgacuucaacgggggccggaucuccgugcaguacaaccugagccacuccuacgcgguggacgccgccaaccacugcgggaccaucgccaacggcguccugcagaccuucaugcgcauggcguggggcgggagcuacaucgcccucgacuccggcaaggggagcugggacugcaucaugacguccuaccaguaccugaucauccagaacaccaccugggaggaccacugccaguucagccggcccagccccaucggcuaccuggggcuccugucccagcgcacccgggacaucuacaucagccgccggcgccggggcacguucaccuggacccuguccgacagcgagggcaacgagacccccgggggcuacugccucacgcgcuggaugcugaucgaggccgagcugaagugcuucgggaacaccgccguggccaagugcaacgagaagcacgacgaggaguucugcgacaugcuccggcuguucgacuucaacaagcaggcgauccgccggcugaagaccccggcccagauguccauccagcucaucaacaaggccgugaacgcccugaucaacgaccagcugaucaugaagaaccaccuccgcgacaucaugggcauccccuacugcaacuacagcaaguacugcuaccugaaccacaccgucacggggaagaccucccugccccggugcugccucgugagcaacggcuccuaccugaacgagacccacuucagcgacgacaucgagcagcaggccgacaacaugaucaccgagcugcuccagaaggaguacaucgaccgccagggcaagacgccgcuggggcugguggaccuguucgucuucuccaccagcuucuaccucaucuccaucuuccugcaccuggugaagauccccacccaccggcacaucaccggcaagcccugccccaagccgcaccgccucaaccacauggggaucugcagcugcggccuguacaaccaccccggggugcccgucaaguggaagcggugaggacuaguaauaaggaaacuguaugaaugucugugggcaggaagugaagagauccuucuguaaagguuuuuggaauuaugucugcugaauaauaaacuuuuuugaaauaauaaaucugguagaaaaaugagaucucaaaggcucuuuucagagccaccaaaaaaaaaaaaaaaaaaaaaaaaaaaaaaaaaaaaaaaaaaaaaaaaaaaaaaaaaaaaaaaaagaauu

SEQ ID NO: 25617 - RNA, 1778 nt, Artificial Sequence
  mRNA product Design b-4 (hSL-A64-N5) comprising derived and/or modified sequence from LASV(Lassa virus/H.sapiens-wt/NGA/2016/ISTH_0017;Clade II)__AVO03567__GPCmut3 (opt1)
aggagagucccgcagucggcguccagcggcucugcuuguucgugugugugucguugcaggccuuauucaagcuuaccaugggccagaucaucaccuucuuccaggaggugccccacgucaucgaggaggugaugaacaucgugcugaucgcccucagccugcuggccauccucaaggggaucuacaacgucgcgaccugcggccuguucgggcugguguccuuccuccugcugugcggccgcagcugcuccacgaccuacaaggggguguacgagcuccagacccuggagcuggacauggccagccucaacaugaccaugccgcuguccugcacgaagaacaacagccaccacuacaucauggucggcaacgagaccggccuggagcucacccugaccaacacguccaucaucaaccacaaguucugcaaccugagcgacgcccacaagaagaaccucuacgaccacgcccugauguccaucaucagcaccuuccaccuguccauccccaacuucaaccaguacgaggccaugagcugcgacuucaacgggggcaagaucuccgugcaguacaaccucagccacaccuacgcgaucgacgccgccaaccacugcgggaccaucgccaacggcgugcugcagacguucaugcggauggcguggggcggguccuacaucgcccuggacagcggcaagggguccugggacugcaucaugaccagcuaccaguaccucaucauccagaacaccaccugggaggaccacugccaguucucccgccccagccccaucggcuaccuggggcugcucagccagcggacgcgcgacaucuacaucucccggcgccggcgcggcaccuucaccuggacccugagcgacuccgagggcaacgagacgcccgggggcuacugccugacccgguggaugcucaucgaggccgagcugaagugcuucgggaacaccgccgucgccaagugcaacgagaagcacgacgaggaguucugcgacaugcugcgccucuucgacuucaacaagcaggcgauccggcgccugaagaccccggcccagaugagcauccagcugaucaacaaggccgugaacgcccucaucaacgaccagcugaucaugaagaaccaccuccgggacaucaugggcauccccuacugcaacuacuccaaguacugcuaccugaaccacacggugaccgggaagaccagccugccccgcugcugccuggucuccaacggcagcuaccucaacgagacccacuucuccgacgacaucgagcagcaggccgacaacaugaucacggagcugcugcagaaggaguacauggaccggcagggcaagaccccgcucgggcugguggaccuguucguguucagcaccuccuucuaccugaucagcaucuuccuccaccugguccgcauccccacccaccggcacgugaucggcaagcccugccccaagccgcaccgccugaaccacauggggaucugcuccugcggccucuacaagcaccccggggugcccgucaaguggaagcggugaggacuaguaauaaggaaacuguaugaaugucugugggcaggaagugaagagauccuucuguaaagguuuuuggaauuaugucugcugaauaauaaacuuuuuugaaauaauaaaucugguagaaaaaugagaucucaaaggcucuuuucagagccaccaaaaaaaaaaaaaaaaaaaaaaaaaaaaaaaaaaaaaaaaaaaaaaaaaaaaaaaaaaaaaaaaagaauu

SEQ ID NO: 25618 - RNA, 1778 nt, Artificial Sequence
  mRNA product Design b-4 (hSL-A64-N5) comprising derived and/or modified sequence from LASV(Lassa virus/H.sapiens-wt/NGA/2018/ISTH_0959;Clade II)__AVV65099__GPCmut3 (opt1)
aggagagucccgcagucggcguccagcggcucugcuuguucgugugugugucguugcaggccuuauucaagcuuaccaugggccagaucaucaccuucuuccaggaggugccccacgucaucgaggaggugaugaacaucgugcugaucgcccucagccugcuggccauccucaaggggaucuacaacgucgugaccugcggccuguucgggcugguguccuuccuccugcugugcggccgcagcugcuccacgaccuacaagggggucuacgagcuccagacccuggagcuggacauggcgagccucaacaugaccaugccgcuguccugcacgaagaacaacagccaccacuacaucauggugggcaacgagaccggccuggagcucacccugaccaacacguccaucaucaaccacaaguucugcaaccugagcgacgcccacaagaagaaccucuacgaccacgcccugauguccaucaucagcaccuuccaccuguccauccccaacuucaaccaguacgaggccaugagcugcgacuucaacgggggcaagaucuccgugcaguacaaccucagccacgccuacgcgaucgacgccgccaaccacugcgggaccaucgccaacggcguccugcagaccuucaugcggauggcguggggcggguccuacaucgcccuggacagcggcaagggguccugggacugcaucaugacgagcuaccaguaccucaucauccagaacaccaccugggaggaccacugccaguucucccgccccagccccaucggcuaccuggggcugcucagccagcggacccgcgacaucuacaucucccggcgccggcgcggcacguucaccuggacccugagcgacuccgagggcaacgagacccccgggggcuacugccugacgcgguggaugcucaucgaggccgagcugaagugcuucgggaacaccgccguggccaagugcaacgagaagcacgacgaggaguucugcgacaugcugcgccucuucgacuucaacaagcaggcgauccggcgccugaagaccccggcccagaugagcauccagcugaucaacaaggccgugaacgcccucaucaacgaccagcugaucaugaagaaccaccuccgggacaucaugggcauccccuacugcaacuacuccaaguacugcuaccugaaccacaccgucacggggaagaccagccugccccgcugcugccugguguccaacggcagcuaccucaacgagacccacuucuccgacgacaucgagcagcaggccgacaacaugaucaccgagcugcugcagaaggaguacaucgaccggcagggcaagacgccgcucgggcugguggaccuguucgucuucagcaccuccuucuaccugaucagcaucuuccuccaccuggugaagauccccacccaccgccacgugaucggcaagcccugccccaagccgcaccggcugaaccacauggggaucugcuccugcggccucuacaagcaccccgggguccccgugaaguggaagcgcugaggacuaguaauaaggaaacuguaugaaugucugugggcaggaagugaagagauccuucuguaaagguuuuuggaauuaugucugcugaauaauaaacuuuuuugaaauaauaaaucugguagaaaaaugagaucucaaaggcucuuuucagagccaccaaaaaaaaaaaaaaaaaaaaaaaaaaaaaaaaaaaaaaaaaaaaaaaaaaaaaaaaaaaaaaaaagaauu

SEQ ID NO: 25619 - RNA, 1778 nt, Artificial Sequence
  mRNA product Design b-4 (hSL-A64-N5) comprising derived and/or modified sequence from LASV(LASV003-NIG-2008;Clade II)__AIT17580__GPCmut3 (opt1)
aggagagucccgcagucggcguccagcggcucugcuuguucgugugugugucguugcaggccuuauucaagcuuaccaugggccagaucaucaccuucuuccaggaggugccccacgucaucgaggaggugaugaacaucgugcugaucgcccucagccugcuggccauccucaaggggaucuacaacgucgcgaccugcggccuguucgggcugguguccuuccuccugcugugcggccgcagcugcuccacgaccuacaaggggguguacgagcuccagacccuggagcuggacauggccagccucaacaugaccaugccgcuguccugcacgaagaacaacagccaccacuacaucauggucggcaacgagaccggccuggagcucacccugaccaacacguccaucaucaaccacaaguucugcaaccugagcgacgcccacaagaagaaccucuacgaccacgcccugauguccaucaucagcaccuuccaccuguccauccccaacuucaaccaguacgaggccaugagcugcgacuucaacgggggcaagaucuccgugcaguacaaccucagccacaccuacgcgguggacgccgccaaccacugcgggaccaucgccaacggcguccugcagacguucaugcggauggcguggggcggguccuacaucgcccuggacagcggcaagggguccugggacugcaucaugaccagcuaccaguaccucaucauccagaacaccaccugggaggaccacugccaguucucccgccccagccccaucggcuaccuggggcugcucagccagcggacgcgcgacaucuacaucucccggcgccggcgcggcaccuucaccuggacccugagcgacuccgagagcaacgagacgccgggcggguacugccugacccgguggaugcucaucgaggccgagcugaagugcuucggcaacaccgccguggccaagugcaacgagaagcacgacgaggaguucugcgacaugcugcgccucuucgacuucaacaagcaggcgauccggcgccugaaggcccccgcccagauguccauccagcugaucaacaaggccgugaacgcccucaucaacgaccagcugaucaugaagaaccaccuccgggacaucauggggauccccuacugcaacuacagcaaguacugcuaccugaaccacaccgucacgggccgcaccucccugccccggugcugccuggugagcaacggguccuaccucaacgagacccacuucagcgacgacaucgagcagcaggcggacaacaugaucaccgagcugcugcagaaggaguacauggaccgccagggcaagacgccgcucggccugguggaccuguucgucuucuccaccagcuucuaccugaucuccaucuuccuccaccuggugaagauccccacccaccggcacgugaucgggaagcccugccccaagccgcaccgccugaaccacaugggcaucugcagcugcgggcucuacaagcaccccggcguccccgugaaguggaagcggugaggacuaguaauaaggaaacuguaugaaugucugugggcaggaagugaagagauccuucuguaaagguuuuuggaauuaugucugcugaauaauaaacuuuuuugaaauaauaaaucugguagaaaaaugagaucucaaaggcucuuuucagagccaccaaaaaaaaaaaaaaaaaaaaaaaaaaaaaaaaaaaaaaaaaaaaaaaaaaaaaaaaaaaaaaaaagaauu

SEQ ID NO: 25620 - RNA, 1778 nt, Artificial Sequence
  mRNA product Design b-4 (hSL-A64-N5) comprising derived and/or modified sequence from LASV(LASV035-NIG-2009;Clade II)__AIT17588__GPCmut3 (opt1)
aggagagucccgcagucggcguccagcggcucugcuuguucgugugugugucguugcaggccuuauucaagcuuaccaugggccagaucaucaccuucuuccaggaggugccccacgucaucgaggaggugaugaacaucgugcugaucgcccucagccugcuggccauccucaaggggaucuacaacgucgcgaccugcggccuguucgggcugguguccuuccuccugcugugcggccgcagcugcuccacgaccuacaaggggguguacgagcuccagacccuggagcuggacauggccagccucaacaugaccaugccgcuguccugcacgaagaacaacagccaccacuacaucauggucggcaacgagaccggccuggagcucacccugaccaacacguccaucaucaaccacaaguucugcaaccugagcgacgcccacaagaagaaccucuacgaccacgcccugauguccaucaucagcaccuuccaccuguccauccccaacuucaaccaguacgaggccaugagcugcgacuucaacgggggcaagaucuccgugcaguacaaccucagccacgcguacgccguggacgccgccaaccacugcgggaccaucgcgaacggcguccugcagaccuucaugcggauggccuggggcggguccuacaucgcccuggacagcggcaagggguccugggacugcaucaugacgagcuaccaguaccucaucauccagaacaccaccugggaggaccacugccaguucucccgccccagccccaucggcuaccuggggcugcucagccagcggacccgcgacaucuacaucucccggcgccggcgcggcacguucaccuggacccugagcgacuccgagggcaacgagacccccgggggcuacugccugacgcgguggaugcucaucgaggccgagcugaagugcuucgggaacaccgccguggcgaagugcaacgagaagcacgacgaggaguucugcgacaugcugcgccucuucgacuucaacaagcaggccauccggcgccugaaggccccggcccagaugagcauccagcugaucaacaaggccgugaacgcgcucaucaacgaccagcugaucaugaagaaccaccuccgggacaucaugggcauccccuacugcaacuacuccaaguacugcuaccugaaccacaccgucaccgggaagacgagccugccccgcugcugccugguguccaacggcagcuaccucaacgagacccacuucuccgacgacaucgagcagcaggccgacaacaugaucaccgagcugcugcagaaggaguacaucgaccggcagggcaagaccccgcucgggcugguggaccuguucgucuucagcacguccuucuaccugaucagcaucuuccuccaccuggugaagauccccacccaccgccacgugaucggcaagcccugccccaagccgcaccggcugaaccacauggggaucugcuccugcggccucuacaagcaccccgggguccccgugaaguggaagcgcugaggacuaguaauaaggaaacuguaugaaugucugugggcaggaagugaagagauccuucuguaaagguuuuuggaauuaugucugcugaauaauaaacuuuuuugaaauaauaaaucugguagaaaaaugagaucucaaaggcucuuuucagagccaccaaaaaaaaaaaaaaaaaaaaaaaaaaaaaaaaaaaaaaaaaaaaaaaaaaaaaaaaaaaaaaaaagaauu

SEQ ID NO: 25621 - RNA, 1778 nt, Artificial Sequence
  mRNA product Design b-4 (hSL-A64-N5) comprising derived and/or modified sequence from LASV(LASV1000-NIG-2009;Clade II)__AIT17782__GPCmut3 (opt1)
aggagagucccgcagucggcguccagcggcucugcuuguucgugugugugucguugcaggccuuauucaagcuuaccaugggccagaucaucaccuucuuccaggaggugccccacgucaucgaggaggugaugaacaucgugcugaucgcccucagccugcuggccauccucaaggggaucuacaacgucgcgaccugcggccuguucgggcugguguccuuccuccugcugugcggccgcagcugcuccacgaccuacaaggggguguacgagcuccagacccuggagcuggacauggccagccucaacaugaccaugccgcuguccugcacgaagaacaacagccaccacuacaucauggucggcaacgagaccggccuggagcucacccugaccaacacguccaucaucaaccacaaguucugcaaccugagcgacgcccacaagaagaaccucuacgaccacgcccugauguccaucaucagcaccuuccaccuguccauccccaacuucaaccaguacgaggccaugagcugcgacuucaacgggggcaagaucuccgugcaguacaaccucagccacaccuacgcgguggacgccgccaaccacugcgggaccaucgccaacggcguccugcagacguucaugcggauggcguggggcggguccuacaucgcccuggacagcggcaagggguccugggacugcaucaugaccagcuaccaguaccucaucauccagaacaccaccugggaggaccacugccaguucucccgccccagccccaucggcuaccuggggcugcucagccagcggacgcgcgacaucuacaucucccggcgccggcgcggcaccuucaccuggacccugagcgacuccgagggcaacgagacgcccgggggcuacugccugacccgguggaugcucaucgaggccgagcugaagugcuucgggaacaccgccguggccaagugcaacgagaagcacgacgaggaguucugcgacaugcugcgccucuucgacuucaacaagcaggcgaucaagcggcugaagaccccggcccagaugagcauccagcugaucaacaaggccgugaacgcccucaucaacgaccagcugaucaugaagaaccaccuccgcgacaucaugggcauccccuacugcaacuacuccaaguacugcuaccugaaccacacggucaccgggaagaccagccugccccggugcugccugguguccaacggcagcuaccucaacgagacccacuucuccgacgacaucgagcagcaggccgacaacaugaucacggagcugcugcagaaggaguacaucgaccgccagggcaagaccccgcucgggcugguggaccuguucgucuucagcaccuccuucuaccugaucagcaucuuccuccaccuggugaagauccccacccaccggcacguggucggcaagcccugccccaagccgcaccgccugaaccacauggggaucugcuccugcggccucuacaagcaccccggggugcccgugaaguggaagcggugaggacuaguaauaaggaaacuguaugaaugucugugggcaggaagugaagagauccuucuguaaagguuuuuggaauuaugucugcugaauaauaaacuuuuuugaaauaauaaaucugguagaaaaaugagaucucaaaggcucuuuucagagccaccaaaaaaaaaaaaaaaaaaaaaaaaaaaaaaaaaaaaaaaaaaaaaaaaaaaaaaaaaaaaaaaaagaauu

SEQ ID NO: 25622 - RNA, 1778 nt, Artificial Sequence
  mRNA product Design b-4 (hSL-A64-N5) comprising derived and/or modified sequence from LASV(LASV221-NIG-2010;Clade II)__AIT17624__GPCmut3 (opt1)
aggagagucccgcagucggcguccagcggcucugcuuguucgugugugugucguugcaggccuuauucaagcuuaccaugggccagaucaucaccuucuuccaggaggugccccacgucaucgaggaggugaugaacaucgugcugaucgcccucagccugcuggccauccucaaggggaucuacaacgucgcgaccugcggccuguucgggcugguguccuuccuccugcugugcggccgcagcugcuccacgaccuacaaggggguguacgagcuccagacccuggagcuggacauggccagccucaacaugaccaugccgcuguccugcacgaagaacaacagccaccacuacaucauggucggcaacgagaccggccuggagcucacccugaccaacacguccaucaucaaccacaaguucugcaaccugagcgacgcccacaagaagaaccucuacgaccacgcccugauguccaucaucagcaccuuccaccuguccauccccaacuucaaccaguacgaggccaugagcugcgacuucaacgggggcaagaucuccgugcaguacaaccucagccacaccuacgcgaucgacgccgccaaccacugcgggaccaucgccaacggcgugcugcagacguucaugcggauggcguggggcggguccuacaucgcccuggacagcggcaagggguccugggacugcaucaugaccagcuaccaguaccucaucauccagaacaccaccugggaggaccacugccaguucucccgccccagccccaucggcuaccuggggcugcucagccagcggacgcgcgacaucuacaucucccggcgccggcgcggcaccuucaccuggacccugagcgacuccgagggcaacgagacgcccgggggcuacugccugacccgguggaugcucaucgaggccgagcugaagugcuucgggaacaccgccgucgccaagugcaacgagaagcacgacgaggaguucugcgacaugcugcgccucuucgacuucaacaagcaggcgauccggcgccugaagaccccggcccagaugagcauccagcugaucaacaaggccgugaacgcccucaucaacgaccagcugaucaugaagaaccaccuccgggacaucaugggcauccccuacugcaacuacuccaaguacugcuaccugaaccacacggugaccgggaagaccagccugccccgcugcugccuggucuccaacggcagcuaccucaacgagacccacuucuccgacgacaucgagcagcaggccgacaacaugaucacggagaugcugcagaaggaguacauggaccggcagggcaagaccccgcuggggcucguggaccuguucguguucagcaccuccuucuaccugaucagcaucuuccugcaccucgucaagauccccacccaccgccacgugaucggcaagcccugccccaagccgcaccggcugaaccacauggggaucugcuccugcggccuguacaagcaccccggggugcccgucaaguggaagcgcugaggacuaguaauaaggaaacuguaugaaugucugugggcaggaagugaagagauccuucuguaaagguuuuuggaauuaugucugcugaauaauaaacuuuuuugaaauaauaaaucugguagaaaaaugagaucucaaaggcucuuuucagagccaccaaaaaaaaaaaaaaaaaaaaaaaaaaaaaaaaaaaaaaaaaaaaaaaaaaaaaaaaaaaaaaaaagaauu

SEQ ID NO: 25623 - RNA, 1778 nt, Artificial Sequence
  mRNA product Design b-4 (hSL-A64-N5) comprising derived and/or modified sequence from LASV(LASV237-NIG-2010;Clade II)__AIT17638__GPCmut3 (opt1)
aggagagucccgcagucggcguccagcggcucugcuuguucgugugugugucguugcaggccuuauucaagcuuaccaugggccagaucaucaccuucuuccaggaggugccccacgucaucgaggaggugaugaacaucgugcugaucgcccucagccugcuggccauccucaaggggaucuacaacgucgcgaccugcggccuguucgggcugguguccuuccuccugcugugcggccgcagcugcuccacgaccuacaaggggguguacgagcuccagacccuggagcuggacauggccagccucaacaugaccaugccgcuguccugcacgaagaacaacagccaccacuacaucauggucggcaacgagaccggccuggagcucacccugaccaacacguccaucaucaaccacaaguucugcaaccugagcgacgcccacaagaaggaccucuacgaccacgcccugauguccaucaucagcaccuuccaccuguccauccccaacuucaaccaguacgaggccaugagcugcgacuucaacgggggcaagaucuccgugcaguacaaccucagccacaccuacgcgguggacgccgccaaccacugcgggaccaucgccaacggcguccugcagacguucaugcggauggcguggggcggguccuacaucgcccuggacagcggcaagggguccugggacugcaucaugaccagcuaccaguaccucaucauccagaacaccaccugggaggaccacugccaguucucccgccccagccccaucggcuaccuggggcugcucagccagcggacgcgcgacaucuacaucucccggcgccggcgcggcaccuucaccuggacccugagcgacuccgagggcaacgagacgcccgggggcuacugccugacccgguggaugcucaucgaggccgagcugaagugcuucgggaacaccgccguggccaagugcaacgagaagcacgacgaggaguucugcgacaugcugcgccucuucgacuucaacaagcaggcgauccggcgccugaagaccccggcccagaugagcauccagcugaucaacaaggccgugaacgcccucaucaacgaccagcugaucaugaagaaccaccuccgggacaucaugggcauccccuacugcaacuacuccaaguacugcuaccugaaccacacggucaccgggaagaccagccugccccgcugcugccugguguccaacggcagcuaccucaacgagacccacuucuccgacgacaucgagcagcaggccgacaacaugaucacggagcugcugcagaaggaguacauggaccggcagggcaagaccccgcucgggcugguggaccuguucgucuucagcaccuccuucuaccugaucagcaucuuccuccaccugaucaagauccccacccaccgccacaucacgggcaagcccugccccaagccgcaccggcugaaccacauggggaucugcuccugcggccucuacaagcaccccggggugcccgugaaguggaagcgcugaggacuaguaauaaggaaacuguaugaaugucugugggcaggaagugaagagauccuucuguaaagguuuuuggaauuaugucugcugaauaauaaacuuuuuugaaauaauaaaucugguagaaaaaugagaucucaaaggcucuuuucagagccaccaaaaaaaaaaaaaaaaaaaaaaaaaaaaaaaaaaaaaaaaaaaaaaaaaaaaaaaaaaaaaaaaagaauu

SEQ ID NO: 25624 - RNA, 1778 nt, Artificial Sequence
  mRNA product Design b-4 (hSL-A64-N5) comprising derived and/or modified sequence from LASV(LASV253-NIG-2011;Clade II)__AIT17670__GPCmut3 (opt1)
aggagagucccgcagucggcguccagcggcucugcuuguucgugugugugucguugcaggccuuauucaagcuuaccaugggccagaucaucaccuucuuccaggaggugccccacgucaucgaggaggugaugaacaucgugcugaucgcccucagccugcuggccauccucaaggggaucuacaacgucgcgaccugcggccuguucgggcugguguccuuccuccugcugugcggccgcagcugcuccacgaccuacaaggggguguacgagcuccagacccuggagcuggacauggccagccucaacaugaccaugccgcuguccugcacgaagaacaacagccaccacuacaucauggucggcaacgagaccggccuggagcucacccugaccaacacguccaucaucaaccacaaguucugcaaccugagcgacgcccacaagaagaaccucuacgaccacgcccugauguccaucaucagcaccuuccaccuguccauccccaacuucaaccaguacgaggccaugagcugcgacuucaacgggggcaagaucuccgugcaguacaaccucagccacaccuacgcgguggacgccgccaaccacugcgggaccaucgccaacggcguccugcagacguucaugcggauggcguggggcggguccuacaucgcccuggacagcggcaagggguccugggacugcaucaugaccagcuaccaguaccucaucauccagaacaccaccugggaggaccacugccaguucucccgccccagccccaucggcuaccuggggcugcucagccagcggacgcgcgacaucuacaucucccggcgccggcgcggcaccuucaccuggacccugagcgacuccgagggcaacgagacgcccgggggcuacugccugacccgguggaugcucaucgaggccgagcugaagugcuucgggaacaccgccguggccaagugcaacgagaagcacgacgaggaguucugcgacaugcugcgccucuucgacuucaacaagcaggcgauccggcgccugaaggccccggcccagaugagcauccagcugaucaacaaggccgugaacgcccucaucaacgaccagcugaucaugaagaaccaccuccgggacaucaugggcauccccuacugcaacuacuccaaguacugcuaccugaaccacaccgucacggggcgcaccagccugccccggugcugccugguguccaacggcagcuaccucaacgagacccacuucuccgacgacaucgagcagcaggcggacaacaugaucaccgagcugcugcagaaggaguacaucgaccgccagggcaagacgccgcucgggcugguggaccuguucgucuucagcaccuccuucuaccugaucagcaucuuccuccaccuggugaagauccccacccaccggcacaucaucggcaagcccugccccaagccgcaccgccugaaccacauggggaucugcuccugcggccucuacaagcaccccggggugcccgucaaguggaagcggugaggacuaguaauaaggaaacuguaugaaugucugugggcaggaagugaagagauccuucuguaaagguuuuuggaauuaugucugcugaauaauaaacuuuuuugaaauaauaaaucugguagaaaaaugagaucucaaaggcucuuuucagagccaccaaaaaaaaaaaaaaaaaaaaaaaaaaaaaaaaaaaaaaaaaaaaaaaaaaaaaaaaaaaaaaaaagaauu

SEQ ID NO: 25625 - RNA, 1778 nt, Artificial Sequence
  mRNA product Design b-4 (hSL-A64-N5) comprising derived and/or modified sequence from LASV(LASV254-NIG-2011;Clade II)__AIT17674__GPCmut3 (opt1)
aggagagucccgcagucggcguccagcggcucugcuuguucgugugugugucguugcaggccuuauucaagcuuaccaugggccagaucaucaccuucuuccaggaggugccccacgucaucgaggaggugaugaacaucgugcugaucgcccucagccugcuggccauccucaaggggaucuacaacgucgcgaccugcggccuguucgggcugguguccuuccuccugcugugcggccgcagcugcuccacgaccuacaaggggguguacgagcuccagacccuggagcuggacaugaccaaccucaacaugacgaugccgcugagcugcaccaagaacaacucccaccacuacaucauggucggcaacgagaccggccuggagcucacccugacgaacaccagcaucaucaaccacaaguucugcaaccuguccgacgcccacaagaagaaccucuacaaccacgcccugaugagcaucaucuccaccuuccaccugagcauccccaacuucaaccaguacgaggccauguccugcgacuucaacgggggcaagaucagcgugcaguacaaccucucccacagcuacgccguggacgcggccaaccacugcgggaccaucgccaacggcguccugcagacguucaugcggauggccuggggcggguccuacaucgcgcuggacagcggcaaggggaacugggacugcaucaugaccuccuaccaguaccucaucauccagaacaccaccugggaggaccacugccaguucagccgccccucccccaucggcuaccuggggcugcucagccagcggacgcgcgacaucuacaucagccggcgccggcgcggcaccuucaccuggacccuguccgacagcgagggcaacgagacgcccgggggcuacugccugacccgguggaugcucaucgaggccgagcugaagugcuucgggaacaccgccguggccaagugcaacgagaagcacgacgaggaguucugcgacaugcugcgccucuucgacuucaacaagcaggccauccggcgccugaagaccccggcgcaggccaacauccagcugaucaacaaggccgugaacgcccucaucaacgaccagcugaucaugaagaaccaccuccgggacaucaugggcauccccuacugcaacuacuccaaguacugcuaccugaaccacacggucaccgggaagaccagccugccccgcugcugccugguguccaacggcagcuaccucaacgagacccacuucuccgacgacaucgagcagcaggccgacaacaugaucacggagcugcugcagaaggaguacauggaccggcagggcaagaccccgcucgggcugguggaccuguucgucuucagcaccuccuucuaccugaucagcaucuuccuccaccuggugaagauccccacccaccgccacgugaucggcaagcccugccccaagccgcaccggcugaaccacauggggaucugcuccugcggccucuacaagcaccccgggguccccgugaaguggaagcgcugaggacuaguaauaaggaaacuguaugaaugucugugggcaggaagugaagagauccuucuguaaagguuuuuggaauuaugucugcugaauaauaaacuuuuuugaaauaauaaaucugguagaaaaaugagaucucaaaggcucuuuucagagccaccaaaaaaaaaaaaaaaaaaaaaaaaaaaaaaaaaaaaaaaaaaaaaaaaaaaaaaaaaaaaaaaaagaauu

SEQ ID NO: 25626 - RNA, 1778 nt, Artificial Sequence
  mRNA product Design b-4 (hSL-A64-N5) comprising derived and/or modified sequence from LASV(Nig08-A19;Clade III)__ADU56618__GPCmut3 (opt1)
aggagagucccgcagucggcguccagcggcucugcuuguucgugugugugucguugcaggccuuauucaagcuuaccaugggccagaucgugaccuucuuccaggaggucccccacgugaucgaggaggugaugaacaucguccugaucgcccucagcauccuggccauccugaaggggcucuacaacaucgcgaccugcggccugaucgggcuggugacguuccuccugcuguccggccgcagcugcuccaugaccuacaaggggguguacgagcuccagacccuggagcugaacaugaacacccucaacaugacgaugccgcugagcugcaccaagaacaacucccaccacuacaucauggucggcaacgagaccggccuggagcucacccugacgaacaccagccugcuccaccacaaguucugcaaccuguccgacgcccacaagaagaaccuguacgaccacacccucaugagcaucaucuccaccuuccaccugagcauccccaacuucaaccaguacgaggccauguccugcgacuucaacgggggcaagaucacggugcaguacaaccugagccacuccuacgccaucgacgccgcgaaccacugcgggaccguggccaacggcguccuccagaccuucaugcggauggccuggggcgggagcuacaucgcccuggacuccggccgcgggaagugggacugcaucaugaccagcuaccaguaccugaucauccagaacacgaccugggaggaccacugccaguucucccggcccagccccaucggcuaccucgggcugcugucccagcgcacccgggacaucuacaucagccgccggcgccggggcaccuucacguggacccucagcgacuccgagggcaacgagacccccgggggcuacugccugacccgcuggaugcugaucgaggcggagcucaagugcuucgggaacacggccguggccaagugcaacgagaagcacgacgaggaguucugcgacaugcugcggcuguucgacuucaacaagcaggccauccgccggcucaaggccccggcgcagaugagcauccagcugaucaacaaggccgugaacgcccugaucaacgaccagcucaucaugaagaaccaccuccgcgacaucaugggcauccccuacugcaacuacuccaaguacugcuaccugaaccacaccagcaccgggcggaccucccugccccgcugcugccuggucagcaacggcuccuaccugaacgagacgcacuucagcgacgacaucgagcagcaggccgacaacaugaucaccgagaugcuccagaaggaguaccuggaccggcagggcaagaccccgcuggggcugguggaccucuucguguucuccaccagcuucuaccugaucuccaucuuccugcaccucgucaagauccccacgcaccgccacaucgugggcaagcccugccccaagccgcaccggcugaaccacauggggaucugcagcugcggccuguacaagcagcccggggugcccguccgcuggaagcggugaggacuaguaauaaggaaacuguaugaaugucugugggcaggaagugaagagauccuucuguaaagguuuuuggaauuaugucugcugaauaauaaacuuuuuugaaauaauaaaucugguagaaaaaugagaucucaaaggcucuuuucagagccaccaaaaaaaaaaaaaaaaaaaaaaaaaaaaaaaaaaaaaaaaaaaaaaaaaaaaaaaaaaaaaaaaagaauu

SEQ ID NO: 25627 - RNA, 1781 nt, Artificial Sequence
  mRNA product Design b-4 (hSL-A64-N5) comprising derived and/or modified sequence from LASV(G1180-SLE-2010;Clade IV)__AIT17168__GPCmut3 (opt1)
aggagagucccgcagucggcguccagcggcucugcuuguucgugugugugucguugcaggccuuauucaagcuuaccaugggccagaucgugaccuucuuccaggaggucccccacgugaucgaggaggugaugaacaucguccugaucgcccucagcauccuggccgugcugaaggggcucuacaacuucgcgaccugcggccugguggggcugcucacguuccugcugcucugcggccgcuccugcaccgccagccgguacaagggggucuacgagcugcagacccuggagcucaacauggagacccugaacaugacgaugccgcuguccugcaccaagaacaacagccaccacuacaucauggugggcaacgagaccggccucgagcugacccugacgaacaccuccaucaucaaccacaaguucugcaaccucagcgacgcccacaagaagaaccuguacgaccacgcccugauguccaucaucagcaccuuccaccucuccauccccaacuucaaccaguacgaggccaugagcugcgacuucaacgggggcaagaucuccgugcaguacaaccugagccacuccuacgcgggggacgccgccaaccacugcggcaccgucgccaacggggugcugcagacguucaugcgcauggcguggggcggcagcuacaucgcccucgacuccgggcacggcagcugggacugcaucaugaccuccuaccaguaccugaucauccagaacaccaccugggaggaccacugccaguucagccggcccucccccaucggguaccugggccuccugagccagcgcacgcgggacaucuacaucagccgccggcgccggggcaccuucaccuggacccuguccgacagcgaggggaaggacacgccgggcggguacugccucacccgcuggaugcugaucgaggccgagcugaagugcuucggcaacaccgccguggccaagugcaacgagaagcacgacgaggaguucugcgacaugcuccggcuguucgacuucaacaagcaggcgauccagcgccugaaggcccccgcccagauguccauccagcucaucaacaaggccgucaacgcccugaucaacgaccagcugaucaugaagaaccaccuccgggacaucauggggauccccuacugcaacuacagcaaguacugcuaccugaaccacaccacgaccggcaagaccucccugcccaagugcugccucgugagcaacggcuccuaccugaacgagacccacuucagcgacgacaucgagcagcaggcggacaacaugaucacggagaugcugcagaaggaguacauggagcgccaggggaagaccccgcucggccugguggaccuguucgucuucuccaccagcuucuaccugaucuccaucuuccuccaccuggugaagauccccacccaccggcacaucgugggcaagagcugccccaagccccaccgccugaaccacauggggaucugcuccugcgggcucuacaagcagccgggcguccccgugaaguggaagcggugaggacuaguaauaaggaaacuguaugaaugucugugggcaggaagugaagagauccuucuguaaagguuuuuggaauuaugucugcugaauaauaaacuuuuuugaaauaauaaaucugguagaaaaaugagaucucaaaggcucuuuucagagccaccaaaaaaaaaaaaaaaaaaaaaaaaaaaaaaaaaaaaaaaaaaaaaaaaaaaaaaaaaaaaaaaaagaauu

SEQ ID NO: 25628 - RNA, 1781 nt, Artificial Sequence
  mRNA product Design b-4 (hSL-A64-N5) comprising derived and/or modified sequence from LASV(G1442-SLE-2011;Clade IV)__AIT17180__GPCmut3 (opt1)
aggagagucccgcagucggcguccagcggcucugcuuguucgugugugugucguugcaggccuuauucaagcuuaccaugggccagaucgugaccuucuuccaggaggucccccacgugaucgaggaggugaugaacaucguccugaucgcccucagcauccuggccgugcugaaggggcucuacaacguggcgaccugcggccugaucgggcuggucacguuccuccugcugugcggccgcuccugcaccaccacccucuacaaggggguguacgagcugcagacgcuggagcucaacauggagacccugaacaugaccaugccgcugagcugcaccaagaacaacucccaccacuacauccgggugggcaacgagacgggccucgagcugacccugaccaacaccagcaucaucaaccacaaguucugcaaccucuccgacgcccacaagaagaaccuguacgaccacgcccugaugagcaucaucuccacguuccaccucagcauccccaacuucaaccaguacgaggccauguccugcgacuucaacgggggcaagaucagcguccaguacaaccugucccacagcuacgccggggacgcggccaaccacugcggcaccguggccaacggggugcugcagaccuucaugcgcauggccuggggcggcuccuacaucgcgcucgacagcgggcggggcaacugggacugcaucaugaccuccuaccaguaccugaucauccagaacacgaccugggacgaccacugccaguucagccgccccucccccaucggguaccugggccuccugagccagcggacccgcgacgucuacaucucccggcgccggcgcggcaccuucacguggacccugagcgacagcgaggggaaggacaccccgggcggguacugccucacccgguggaugcugaucgaggccgagcugaagugcuucggcaacacggccguggccaagugcaacgagaagcacgacgaggaguucugcgacaugcuccgccuguucgacuucaacaagcaggccauccagcggcugaaggcgcccgcccagauguccauccagcucaucaacaaggccgugaacgcccugaucaacgaccagcugaucaugaagaaccaccuccgcgacaucauggggauccccuacugcaacuacagcaaguacugcuaccugaacaacaccgccaccggcaagaccucccugcccaagugcugccucaucagcaacggcuccuaccugaacgagacgcacuucagcgacgacaucgagcaggaggcggacaacaugaucaccgagaugcugcagaaggaguacauggagcggcaggggaagaccccgcucggccuggucgaccuguucguguucuccaccagcuucuaccugaucuccaucuuccuccaccuggugaagauccccacgcaccgccacaucgucggcaagagcugccccaagccccaccggcugaaccacauggggaucugcuccugcgggcucuacaagcagccgggcgugcccgugcgcuggaagcggugaggacuaguaauaaggaaacuguaugaaugucugugggcaggaagugaagagauccuucuguaaagguuuuuggaauuaugucugcugaauaauaaacuuuuuugaaauaauaaaucugguagaaaaaugagaucucaaaggcucuuuucagagccaccaaaaaaaaaaaaaaaaaaaaaaaaaaaaaaaaaaaaaaaaaaaaaaaaaaaaaaaaaaaaaaaaagaauu

SEQ ID NO: 25629 - RNA, 1781 nt, Artificial Sequence
  mRNA product Design b-4 (hSL-A64-N5) comprising derived and/or modified sequence from LASV(G3010-SLE-2013;Clade IV)__AIT17344__GPCmut3 (opt1)
aggagagucccgcagucggcguccagcggcucugcuuguucgugugugugucguugcaggccuuauucaagcuuaccaugggccagaucgugaccuucuuccaggaggucccccacgugaucgaggaggugaugaacaucguccugaucgcccucagcauccuggccgugcugaaggggcucuacaacuucgcgaccugcggccugguggggcuggucacguuccuccugcugugcggccgcuccugcaccaccagccucuacaaggggguguacgagcugcagacccuggagcucaacauggagacgcugaacaugaccaugccgcuguccugcaccaagaacaacagccaccacuacaucauggugggcaacgagaccggccucgagcugacgcugaccaacaccuccaucaucaaccacaaguucugcaaccucagcgacgcccacaagaagaaccuguacaaccacgcccugauguccaucaucagcaccuuccaccucuccauccccaacuucaaccaguacgaggccaugagcugcgacuucaacgggggcaagaucuccguccaguacaaccugagccacuccuacgccggggacgcggccagccacugcggcacgguggccaacggggugcugcagaccuucaugcggauggccuggggcggcuccuacaucgcgcucgacagcggguacggcaagugggacugcaucaugaccuccuaccaguaccugaucauccagaacaccacgugggaggaccacugccaguucagccgccccucccccaucggguaccugggccuccugagccagcggacccgcgacaucuacaucagccggcgccggcgcggcaccuucaccuggacgcuguccgacagcgaggggaaggacaccccgggcggguacugccucacccgguggaugcugaucgaggccgagcugaagugcuucggcaacaccgccgucgccaagugcaacgagaagcacgacgaggaguucugcgacaugcuccgccuguucgacuucaacaagcaggccauccagcggcugaagacgcccgcgcagauguccauccagcucaucaacaaggccgugaacgcccugaucaacgaccagcugaucaugaagaaccaccuccgcgacaucauggggauccccuacugcaacuacagcaaguacugcuaccugaaccacaccaccaccggcaagacgucccugcccaagugcugccucgugagcaacggcuccuaccugaacgagacccacuucagcgacgacaucgagcagcaggccgacaacaugaucaccgagaugcugcagaaggaguacauggagcggcaggggaagaccccgcucggccuggucgaccuguucguguucuccacgagcuucuaccugaucuccaucuuccuccaccuggugaagauccccacccaccgccacaucgucggcaagagcugccccaagccccaccggcugaaccacauggggaucugcuccugcgggcucuacaagcagccgggcgugcccgugcgcuggaagcggugaggacuaguaauaaggaaacuguaugaaugucugugggcaggaagugaagagauccuucuguaaagguuuuuggaauuaugucugcugaauaauaaacuuuuuugaaauaauaaaucugguagaaaaaugagaucucaaaggcucuuuucagagccaccaaaaaaaaaaaaaaaaaaaaaaaaaaaaaaaaaaaaaaaaaaaaaaaaaaaaaaaaaaaaaaaaagaauu

SEQ ID NO: 25630 - RNA, 1781 nt, Artificial Sequence
  mRNA product Design b-4 (hSL-A64-N5) comprising derived and/or modified sequence from LASV(G502-SLE-2009;Clade IV)__AIT17126__GPCmut3 (opt1)
aggagagucccgcagucggcguccagcggcucugcuuguucgugugugugucguugcaggccuuauucaagcuuaccaugggccagaucgugaccuucuuccaggaggucccccacgugaucgaggaggugaugaacaucguccugaucgcccucagcauccuggccgugcugaaggggcucuacaacuucgcgaccugcggccugguggggcugcucacguuccugcugcucugcggccgcuccugcaccaccgggcuguacaagggcgucuacgagcugcagacccucgagcugaacauggagacgcugaacaugaccaugccgcucagcugcaccaagaacaacucccaccacuacaucauggugggcaacgagaccgggcuggagcugacgcucaccaacaccagcaucaucaaccacaaguucugcaaccuguccgacgcccacaagaagaaccuguacgaccacgcccucaugagcaucaucuccaccuuccaccugagcauccccaacuucaaccaguacgaggccauguccugcgacuucaacggcgggaagaucagcgugcaguacaaccugucccacagcuacgccggcgacgcggccgaccacugcgggacggucgccaacggcgugcuccagaccuucaugcggauggccuggggcggguccuacaucgcgcuggacagcggccgcgggcggugggacugcaucaugaccuccuaccaguaccugaucauccagaacaccacgugggaggaccacugccaguucagccgccccucccccaucggcuaccucggccugcugagccagcggacccgcgacaucuacaucucccggcgccggcgcgggaccuucaccuggacgcucagcgacagcgagggcaaggacacccccgggggcuacugccugacccgguggaugcugaucgaggccgagcucaagugcuucgggaacaccgccguggccaagugcaacgagaagcacgacgaggaguucugcgacaugcugcgccuguucgacuucaacaagcaggccauccagcggcucaaggcgccggcccagauguccauccagcugaucaacaaggccgucaacgcccugaucaacgaccagcucgugaugaagaaccaccuccgcgacaucaugggcauccccuacugcaacuacagccgguacugcuaccugaaccacacgaccaccggccgcaccucccugcccaagugcugccuggugagcaacggguccuaccugaacgagacgcacuucagcgacgacaucgagcagcaggccgacaacaugaucaccgagaugcuccagaaggaguacauggagcggcagggcaagaccccgcuggggcuggucgaccuguucguguucuccaccagcuucuaccucaucuccaucuuccugcaccuggugaagauccccacgcaccgccacaucgucggcaagagcugccccaagccccaccggcucaaccacauggggaucugcuccugcggccuguacaagcagccgggcgugcccgugaaguggaagcgcugaggacuaguaauaaggaaacuguaugaaugucugugggcaggaagugaagagauccuucuguaaagguuuuuggaauuaugucugcugaauaauaaacuuuuuugaaauaauaaaucugguagaaaaaugagaucucaaaggcucuuuucagagccaccaaaaaaaaaaaaaaaaaaaaaaaaaaaaaaaaaaaaaaaaaaaaaaaaaaaaaaaaaaaaaaaaagaauu

SEQ ID NO: 25631 - RNA, 1781 nt, Artificial Sequence
  mRNA product Design b-4 (hSL-A64-N5) comprising derived and/or modified sequence from LASV(G733-SLE-2010;Clade IV)__AIT17154__GPCmut3 (opt1)
aggagagucccgcagucggcguccagcggcucugcuuguucgugugugugucguugcaggccuuauucaagcuuaccaugggccagaucgugaccuucuuccaggaggucccccacgugaucgaggaggugaugaacaucguccugaucgcccucagcauccuggccgugcugaaggggcucuacaacuucgcgaccugcggcaucguggggcuggucuccuuccugcuccugugcggccgcagcugcacgaccucccuguacaaggggguguacgagcuccagacccuggagcugaacauggagacccucaacaugacgaugccgcugagcugcaccaagaacaacucccaccacuacaucauggugggcaacgagaccggccuggagcucacccugacgaacaccagcaucaucaaccacaaguucugcaaccuguccgacgcccacaagaagaaccucuacgaccacgcccugaugagcaucaucuccaccuuccaccugagcauccccaacuucaaccaguacgaggccauguccugcgacuucaacgggggcaagaucagcguccaguacaaccucucccacagcuacgccggggacgcggccaaccacugcggcaccaucgccaacggggugcugcagacguucaugcggauggccuggggcggcuccuacaucgcgcuggacagcgggcgcgaccggugggacugcaucaugaccuccuaccaguaccucaucauccagaacaccaccugggaggaccacugccaguucagccgccccucccccaucggcuaccuggggcugcucagccagcggacgcgcgacaucuacaucagccggcgccggcgcggcaccuucaccuggacccuguccgacagcgagggcaaggacacgcccgggggcuacugccugacccgguggaugcucaucgaggccgagcugaagugcuucgggaacaccgccguggccaagugcaacgagaagcacgacgaggaguucugcgacaugcugcgccucuucgacuucaacaagcaggccauccagcggcugaaggcgccggcccagauguccauccagcugaucaacaaggccgucaacgcccucaucaacgaccagcugaucaugaagaaccaccuccgcgacaucaugggcauccccuacugcaacuacagcaaguacugcuaccugaaccacaccacgaccgggaagaccucccugcccaagugcugccuggugagcaacggcuccuaccucaacgagacccacuucagcgacgacaucgagcagcaggccgacaacaugaucacggagaugcugcagaaggaguacauggagcggcagggcaagaccccgcuggggcucguggaccuguucgucuucuccaccagcuucuaccugaucuccaucuuccugcaccucgugaagauccccacccaccgccacguggucggcaagagcugccccaagccccaccggcugaaccacauggggaucugcuccugcggccuguacgggcagccgggcgugcccgugaaguggaagcgcugaggacuaguaauaaggaaacuguaugaaugucugugggcaggaagugaagagauccuucuguaaagguuuuuggaauuaugucugcugaauaauaaacuuuuuugaaauaauaaaucugguagaaaaaugagaucucaaaggcucuuuucagagccaccaaaaaaaaaaaaaaaaaaaaaaaaaaaaaaaaaaaaaaaaaaaaaaaaaaaaaaaaaaaaaaaaagaauu

SEQ ID NO: 25632 - RNA, 1781 nt, Artificial Sequence
  mRNA product Design b-4 (hSL-A64-N5) comprising derived and/or modified sequence from MOPV/LASV reassortant(IGS-1;Clade IV)__AFY05576__GPCmut3 (opt1)
aggagagucccgcagucggcguccagcggcucugcuuguucgugugugugucguugcaggccuuauucaagcuuaccaugggccagaucgugaccuucuuccaggaggucccccacgugaucgaggaggugaugaacaucguccugaucgcccucagcgugcuggccgugcugaaggggcucuacaacuucgcgaccugcggccuggucgggcuggugacguuccuccugcugugcggccgcuccugcaccaccagccucuacaaggggguguacgagcugcagacccuggagcucaacauggagacgcugaacaugaccaugccgcuguccugcaccaagaacaacagccaccacuacaucauggucggcaacgagaccggccucgagcugacgcugaccaacaccuccaucaucaaccacaaguucugcaaccucagcgacgcccacaagaagaaccuguacgaccacgcccugauguccaucaucagcaccuuccaccucuccauccccaacuucaaccaguacgaggccaugagcugcgacuucaacgggggcaagaucuccgugcaguacaaccugagccacuccuacgccggggacgcggccaaccacugcggcacgguggccaacgggguccugcagaccuucaugcggauggccuggggcggcagcuacaucgcgcucgacuccgggcgcggcaacugggacugcaucaugaccagcuaccaguaccugaucauccagaacaccacgugggaggaccacugccaguucucccggcccagccccaucggguaccugggccuccugucccagcgcacccgggacaucuacaucagccgccggcgccggggcaccuucaccuggacgcugagcgacuccgagggggaggacaccccgggcggguacugccucacccgcuggaugcugaucgaggccgagcugaagugcuucggcaacaccgccguggccaagugcaacgagaagcacgacgaggaguucugcgacaugcuccggcuguucgacuucaacaagcaggccauccagcgccugaaggcgcccgcccagaugagcauccagcucaucaacaaggccgugaacgcccugaucaacgaccagcugaucaugaagaaccaccuccgggacaucauggggauccccuacugcaacuacuccaaguacugcuaccugaaccacacgaccaccggccgcaccagccugcccaagugcugccucgucuccaacggcagcuaccugaacgagacgcacuucuccgacgacaucgagcagcaggccgacaacaugaucaccgagaugcugcagaaggaguacauggagcggcaggggaagaccccgcucggccugguggaccuguucguguucagcaccuccuucuaccugaucagcaucuuccuccaccuggucaagauccccacgcaccgccacaucguggggaaguccugccccaagccccaccggcugaaccacaugggcaucugcagcugcgggcucuacaagcagccgggcgugcccgucaaguggaagcgcugaggacuaguaauaaggaaacuguaugaaugucugugggcaggaagugaagagauccuucuguaaagguuuuuggaauuaugucugcugaauaauaaacuuuuuugaaauaauaaaucugguagaaaaaugagaucucaaaggcucuuuucagagccaccaaaaaaaaaaaaaaaaaaaaaaaaaaaaaaaaaaaaaaaaaaaaaaaaaaaaaaaaaaaaaaaaagaauu

SEQ ID NO: 25633 - RNA, 1781 nt, Artificial Sequence
  mRNA product Design b-4 (hSL-A64-N5) comprising derived and/or modified sequence from LASV(LM765-SLE-2012;Clade IV)__AIT17814__GPCmut3 (opt1)
aggagagucccgcagucggcguccagcggcucugcuuguucgugugugugucguugcaggccuuauucaagcuuaccaugggccagaucgugaccuucuuccaggaggucccccacgugaucgaggaggugaugaacaucguccugaucgcccucagcauccuggccgugcugaaggggcucuacaacuucgcgaccugcggccugguggggcuggucacguuccuccugcugugcggccgcuccugcaccaccagccucuacaaggggguguacgagcugcagacccuggagcucaacauggagacgcugaacaugaccaugccgcuguccugcaccaagaacaacagccaccacuacaucauggugggcaacgagaccggccucgagcugacgcugaccaacaccuccaucaucgaccacaaguucugcaaccucagcgacgcccaccggaagaaccuguacgaccacgcccugauguccaucaucagcaccuuccaccucuccauccccaacuucaaccaguacgaggccaugagcugcgacuucaacgggggcaagaucuccguccaguacaaccugagccacuccuacgccaaggacgcggccgaccacugcgggacgguggccaacggcgugcugcagaccuucaugcgcauggccuggggcgggagcuacaucgcgcucgacuccggccgggggcgcugggacugcaucaugaccagcuaccaguaccugaucauccagaacaccacgugggaggaccacugccaguucucccggcccagccccaucggcuaccuggggcuccugucccagcgcacccgggacaucuacaucagccgccggcgccggggcaccuucaccuggacgcugagcgacuccgagggcaaggacacccccgggggcuacugccucacccgcuggaugcugaucgaggccgagcugaagugcuucgggaacaccgccgucgccaagugcaacgagaagcacgacgaggaguucugcgacaugcuccggcuguucgacuucaacaagcaggccauccagcgccugaaggcgccggcccagaugagcauccagcucaucaacaaggccgugaacgcccugaucaacgaccagcugaucaugaagaaccaccuccgggacaucaugggcauccccuacugcaacuacuccaaguacugcuaccugaaccacacgaccaccgggaagaccagccugcccaagugcugccucguguccaacggcagcuaccugaacgagacgcacuucuccgacgacaucgagcagcaggccgacaacaugaucaccgagaugcugcagaaggaguacauggagcgccagggcaagaccccgcucgggcuggucgaccuguucguguucagcaccuccuucuaccugaucagcaucuuccuccaccuggugaagauccccacgcaccggcacaucgucggcaagcccugccccaagccgcaccgccugaaccacauggggaucugcuccugcggccucuacaagcagcccggggugcccgugaaguggaagcggugaggacuaguaauaaggaaacuguaugaaugucugugggcaggaagugaagagauccuucuguaaagguuuuuggaauuaugucugcugaauaauaaacuuuuuugaaauaauaaaucugguagaaaaaugagaucucaaaggcucuuuucagagccaccaaaaaaaaaaaaaaaaaaaaaaaaaaaaaaaaaaaaaaaaaaaaaaaaaaaaaaaaaaaaaaaaagaauu

SEQ ID NO: 25634 - RNA, 1781 nt, Artificial Sequence
  mRNA product Design b-4 (hSL-A64-N5) comprising derived and/or modified sequence from LASV(LM776-SLE-2012;Clade IV)__AIT17824__GPCmut3 (opt1)
aggagagucccgcagucggcguccagcggcucugcuuguucgugugugugucguugcaggccuuauucaagcuuaccaugggccagaucgugaccuucuuccaggaggucccccacgugaucgaggaggugaugaacaucguccugaucgcccucagcauccuggccgugcugaaggggcucuacaacuucgcgaccugcggccugguggggcuggucacguuccuccugcugugcggccgcuccugcaccaccagcguguacaaggggguguacgagcuccagacccuggagcugaacauggagacgcucaacaugaccaugccgcuguccugcaccaagaacaacagccaccacuacaucauggucggcaacgagaccggccuggagcucacgcugaccaacaccuccaucaucaaccacaaguucugcaaccugagcgacgcccacaagaagaaccucuacgaccacgcccugauguccaucaucagcaccuuccaccuguccauccccaacuucaaccaguacgaggccaugagcugcgacuucaacgggggcaagaucuccgugcaguacaaccucagccacuccuacgccggggacgcggccaaccacugcggcacgguggccaacgggguccugcagaccuucaugcggauggccuggggcggcagcuacaucgcgcuggacuccgggcacggcaagugggacugcaucaugaccagcuaccaguaccucaucauccagaacaccacgugggaggaccacugccaguucucccgccccagccccaucggguaccugggccugcucucccagcggacccgcgacaucuacaucagccggcgccggcgcggcaccuucaccuggacgcugagcgacuccgaggggaaggacaccccgggcggguacugccugacccgguggaugcucaucgaggccgagcugaagugcuucggcaacaccgccguggccaagugcaacgagaagcacgacgaggaguucugcgacaugcugcgccucuucgacuucaacaagcaggccauccagcggcugaaggcgcccgcccagaugagcauccagcugaucaacaaggccgugaacgcccucaucaacgaccagcugaucaugaagaaccaccuccgcgacaucauggggauccccuacugcaacuacuccaaguacugcuaccugaaccacacgaccaccggcaagaccagccugcccaagugcugccuggucuccaacggcagcuaccucaacgagacgcacuucuccgacgacaucgagcagcaggccgacaacaugaucaccgagaugcugcagaaggaguacauggagcggcaggggaagaccccgcugggccucguggaccuguucguguucagcaccuccuucuaccugaucagcaucuuccugcaccucgucaagauccccacgcaccgccacaucguggggaaguccugccccaagccccaccggcugaaccacaugggcaucugcagcugcgggcuguacaagcagccgggcgugcccguccgcuggaagcggugaggacuaguaauaaggaaacuguaugaaugucugugggcaggaagugaagagauccuucuguaaagguuuuuggaauuaugucugcugaauaauaaacuuuuuugaaauaauaaaucugguagaaaaaugagaucucaaaggcucuuuucagagccaccaaaaaaaaaaaaaaaaaaaaaaaaaaaaaaaaaaaaaaaaaaaaaaaaaaaaaaaaaaaaaaaaagaauu

SEQ ID NO: 25635 - RNA, 1781 nt, Artificial Sequence
  mRNA product Design b-4 (hSL-A64-N5) comprising derived and/or modified sequence from LASV(Mad39;Clade IV)__ANH09722__GPCmut3 (opt1)
aggagagucccgcagucggcguccagcggcucugcuuguucgugugugugucguugcaggccuuauucaagcuuaccaugggccagaucgugaccuucuuccaggaggucccccacgugaucgaggaggugaugaacaucguccugaucgcccucagcauccuggccgugcugaaggggcucuacaacguggcgaccugcggccugaucgggcuggucacguuccuccugcugugcggccgcuccugcaccaccacccucuacaaggggguguacgagcugcaggcccuggagcucaacauggagacgcugaacaugaccaugccgcugagcugcaccaagaacaacucccaccacuacauccgggugggcaacgagaccggccucgagcugacgcugaccaacaccagccucaucaaccacaaguucugcaaccuguccgacgcccacaagaagaaccuguacgaccacgcccucaugagcaucaucuccaccuuccaccugagcauccccaacuucaaccaguacgaggccauguccugcgacuucaacgacgggaagaucagcguccaguacaaccugucccacacguacgcgggcgacaccgccaaccacugcgggaccguggccaacggcgugcuccagaccuucaugcgcauggccuggggcgggagcuacaucgcgcuggacuccggccgcgggggcugggacugcaucaugacgagcuaccaguaccugaucauccagaacaccaccugggaggaccacugccaguucucccggcccagccccaucggguaccucggccugcugucccagcggacccgcgacaucuacaucagccggcgccggcgcggcacguucaccuggacccucuccgacagcgaggggaaggacaccccgggcggguacugccugacgcgguggaugcugaucgaggccgagcucaagugcuucggcaacaccgccgucgccaagugcaacgagaagcacgacgaggaguucugcgacaugcugcgccuguucgacuucaacaagcaggccauccagcggcucaaggcgcccgcccagaugagcauccagcugaucaacaaggccgugaacgcccugaucaacgaccagcucaucaugaagaaccaccuccgcgacaucauggggauccccuacugcaacuacuccaaguacugcuaccugaaccacaccgugaccggcaagacgagccugcccaagugcugccuggucuccaacggcagcuaccugaacgagacccacuucuccgacgacaucgagcagcaggccgacaacaugaucaccgagaugcuccagaaggaguacauggagcggcaggggaagaccccgcugggccugguggaccuguucguguucagcacguccuucuaccucaucagcaucuuccugcaccuggucaagauccccacccaccgccacgugguggggaagcccugccccaagccgcaccggcucaaccacaugggcaucugcuccugcggguucuacaagcagcccggcguccccgugcgcuggaagcggugaggacuaguaauaaggaaacuguaugaaugucugugggcaggaagugaagagauccuucuguaaagguuuuuggaauuaugucugcugaauaauaaacuuuuuugaaauaauaaaucugguagaaaaaugagaucucaaaggcucuuuucagagccaccaaaaaaaaaaaaaaaaaaaaaaaaaaaaaaaaaaaaaaaaaaaaaaaaaaaaaaaaaaaaaaaaagaauu

SEQ ID NO: 25636 - RNA, 1781 nt, Artificial Sequence
  mRNA product Design b-4 (hSL-A64-N5) comprising derived and/or modified sequence from LASV(Z0947-SLE-2011;Clade IV)__AIT17840__GPCmut3 (opt1)
aggagagucccgcagucggcguccagcggcucugcuuguucgugugugugucguugcaggccuuauucaagcuuaccaugggccagaucgugaccuucuuccaggaggucccccacgugaucgaggaggugaugaacaucguccugaucgcccucagcauccuggccgugcugaaggggcucuacaacuucgcgaccugcggccugguggggcuggucacguuccuccugcugugcggccgcuccugcaccaucagccucuacaaggggguguacgagcugcagacccuggagcucaacauggagacccugaacaugacgaugccgcuguccugcaccaagaacaacagccaccacuacaucauggugggcaacgagaccggccucgagcugacccugacgaacaccuccaucaucaaccacaaguucugcaaccucagcgacgcccacaagaagaaccuguacgaccacgcccugauguccaucaucagcaccuuccaccucuccauccccaacuucaaccaguacgaggccaugagcugcgacuucaacgggggcaagaucuccguccaguacaaccugagccacuccuacgccggggacgcggccaaccacugcggcaccguggccaacggggugcugcagacguucaugcggauggccuggggcggcagcuacaucgcgcucgacuccgggcgcgaccggugggacugcaucaugaccagcuaccaguaccugaucauccagaacaccaccugggaggaccacugccaguucucccgccccagccccaucggcuaccuggggcuccugucccagcggacgcgcgacaucuacaucagccggcgccggcgcggcaccuucaccuggacccugagcgacuccgagggcaaggacacgcccgggggcuacugccucacccgguggaugcugaucgaggccgagcugaagugcuucgggaacaccgccgucgccaagugcaacgagaagcacgacgaggaguucugcgacaugcuccgccuguucgacuucaacaagcaggccauccagcggcugaaggcgccggcccagaugagcauccagcucaucaacaaggccgugaacgcccugaucaacgaccagcugaucaugaagaaccaccuccgcgacaucaugggcauccccuacugcaacuacuccaaguacugcuaccugaaccacaccacgaccgggaagaccagccugcccaagugcugccucguguccaacggcagcuaccugaacgagacccacuucuccgacgacaucgagcagcaggccgacaacaugaucacggagaugcugcagaaggaguacauggagcggcagggcaagaccccgcucgggcuggucgaccuguucguguucagcaccuccuucuaccugaucagcaucuuccuccaccuggugaagauccccacccaccgccacaucgucggcaagcccugccccaagccgcaccggcugaaccacauggggaucugcuccugcggccucuacaagcagcccggggugcccgugaaguggaagcgcugaggacuaguaauaaggaaacuguaugaaugucugugggcaggaagugaagagauccuucuguaaagguuuuuggaauuaugucugcugaauaauaaacuuuuuugaaauaauaaaucugguagaaaaaugagaucucaaaggcucuuuucagagccaccaaaaaaaaaaaaaaaaaaaaaaaaaaaaaaaaaaaaaaaaaaaaaaaaaaaaaaaaaaaaaaaaagaauu

SEQ ID NO: 25637 - RNA, 1781 nt, Artificial Sequence
  mRNA product Design b-4 (hSL-A64-N5) comprising derived and/or modified sequence from LASV(Josiah;Clade IV)__NP_694870__GPCmut3 (opt4)
aggagagucccgcagucggcguccagcggcucugcuuguucgugugugugucguugcaggccuuauucaagcuuaccaugggccagaucgugaccuucuuccaggaggugccccacgugaucgaggaggugaugaacaucgugcugaucgcccugagcgugcuggccgugcugaagggccuguacaacuucgccaccugcggccuggugggccuggugaccuuccugcugcugugcggcagaagcugcaccaccagccuguacaagggcguguacgagcugcagacccuggagcugaacauggagacccugaacaugaccaugccccugagcugcaccaagaacaacagccaccacuacaucauggugggcaacgagaccggccuggagcugacccugaccaacaccagcaucaucaaccacaaguucugcaaccugagcgacgcccacaagaagaaccuguacgaccacgcccugaugagcaucaucagcaccuuccaccugagcauccccaacuucaaccaguacgaggccaugagcugcgacuucaacggcggcaagaucagcgugcaguacaaccugagccacagcuacgccggcgacgccgccaaccacugcggcaccguggccaacggcgugcugcagaccuucaugagaauggccuggggcggcagcuacaucgcccuggacagcggcagaggcaacugggacugcaucaugaccagcuaccaguaccugaucauccagaacaccaccugggaggaccacugccaguucagcagacccagccccaucggcuaccugggccugcugagccagagaaccagagacaucuacaucagcagaagaagaagaggcaccuucaccuggacccugagcgacagcgagggcaaggacacccccggcggcuacugccugaccagauggaugcugaucgaggccgagcugaagugcuucggcaacaccgccguggccaagugcaacgagaagcacgacgaggaguucugcgacaugcugagacuguucgacuucaacaagcaggccauccagagacugaaggcccccgcccagaugagcauccagcugaucaacaaggccgugaacgcccugaucaacgaccagcugaucaugaagaaccaccugagagacaucaugggcauccccuacugcaacuacagcaaguacugcuaccugaaccacaccaccaccggcagaaccagccugcccaagugcugccuggugagcaacggcagcuaccugaacgagacccacuucagcgacgacaucgagcagcaggccgacaacaugaucaccgagaugcugcagaaggaguacauggagagacagggcaagaccccccugggccugguggaccuguucguguucagcaccagcuucuaccugaucagcaucuuccugcaccuggugaagauccccacccacagacacaucgugggcaagagcugccccaagccccacagacugaaccacaugggcaucugcagcugcggccuguacaagcagcccggcgugcccgugaaguggaagagaugaggacuaguaauaaggaaacuguaugaaugucugugggcaggaagugaagagauccuucuguaaagguuuuuggaauuaugucugcugaauaauaaacuuuuuugaaauaauaaaucugguagaaaaaugagaucucaaaggcucuuuucagagccaccaaaaaaaaaaaaaaaaaaaaaaaaaaaaaaaaaaaaaaaaaaaaaaaaaaaaaaaaaaaaaaaaagaauu

SEQ ID NO: 25638 - RNA, 1778 nt, Artificial Sequence
  mRNA product Design b-4 (hSL-A64-N5) comprising derived and/or modified sequence from LASV(LP;Clade I)__AAF86701__GPCmut3 (opt4)
aggagagucccgcagucggcguccagcggcucugcuuguucgugugugugucguugcaggccuuauucaagcuuaccaugggccagaucaucaccuucuuccaggaggugccccacgugaucgaggaggugaugaacaucgugcugaucgcccugagccugcuggccauccugaagggccuguacaacaucgccaccugcggcaucaucggccugguggccuuccuguuccugugcggcaagagcugcagccugacccugaagggcggcuacgagcugcagacccuggagcugaacauggagacccugaacaugaccaugccccugagcugcaccaagaacagcagccaccacuacaucagagugggcaacgagaccggccuggagcugacccugaccaacaccagcaucaucaaccacaaguucugcaaccugagcgacgcccacaagaagaaccuguacgaccacgcccugaugagcaucaucagcaccuuccaccugagcauccccaacuucaaccaguacgaggccaugagcugcgacuucaacggcggcaagaucagcgugcaguacaaccugagccacagcuacgccggcgacgccgccgagcacugcggcaccguggccaacggcgugcugcagaccuucaugagaauggccuggggcggcagauacaucgcccuggacagcggcaagggcaacugggacugcaucaugaccagcuaccaguaccugaucauccagaacaccaccugggaggaccacugccaguucagcagacccagccccaucggcuaccugggccugcugagccagagaaccagagacaucuacaucagcagaagaagaagaggcaccuucaccuggacccugagcgacagcgagggcaacgagacccccggcggcuacugccugaccagauggaugcugaucgaggccgagcugaagugcuucggcaacaccgccguggccaagugcaacgagaagcacgacgaggaguucugcgacaugcugagacuguucgacuucaacaagcaggccaucagaagacugaaggcccccgcccagaugagcauccagcugaucaacaaggccgugaacgcccugaucaacgaccagcugaucaugaagaaccaccugagagacaucaugggcauccccuacugcaacuacagcaaguacugcuaccugaaccacaccagcagcggcagaaccagccugcccaagugcugccugaucagcaacggcagcuaccugaacgagacccaguucagcgacgacaucgagcagcaggccgacaacaugaucaccgagaugcugcagaaggaguacaucgagagacagggcaagaccccccugggccugguggacaucuucaucuucagcaccagcuucuaccugaucagcaucuuccugcaccugaucaagauccccacccacagacacaucgugggcaagcccugccccaagccccacagacugaaccacaugggcgugugcagcugcggccuguacaagcaccccggcgugcccaccaaguggaagagaugaggacuaguaauaaggaaacuguaugaaugucugugggcaggaagugaagagauccuucuguaaagguuuuuggaauuaugucugcugaauaauaaacuuuuuugaaauaauaaaucugguagaaaaaugagaucucaaaggcucuuuucagagccaccaaaaaaaaaaaaaaaaaaaaaaaaaaaaaaaaaaaaaaaaaaaaaaaaaaaaaaaaaaaaaaaaagaauu

SEQ ID NO: 25639 - RNA, 1778 nt, Artificial Sequence
  mRNA product Design b-4 (hSL-A64-N5) comprising derived and/or modified sequence from LASV(803213;Clade II)__AAF86703__GPCmut3 (opt4)
aggagagucccgcagucggcguccagcggcucugcuuguucgugugugugucguugcaggccuuauucaagcuuaccaugggccagaucaucaccuucuuccaggaggugccccacgugaucgaggaggugaugaacaucgugcugaucgcccugagccugcuggccauccugaagggcaucuacaacguggccaccugcggccuguucggccugaucagcuuccugcugcugugcggcagaagcugcagcgugaccuacaagggcguguacgagcugcagacccuggagcugaacauggccaaccugaacaugaccaugccccugagcugcaccaagaacaacagccaccacuacaucauggugggcaacgagaccggccuggagcugacccugaccaacaccagcaucaucaaccacaaguucugcaaccugagcgacgcccacaagaagaaccuguacgaccacgcccugaugagcaucaucagcaccuuccaccugagcauccccaacuucaaccaguacgaggccaugagcugcgacuucaacggcggcaagaucagcgugcaguacaaccugagccacagcuucgccguggacgccgccaaccacugcggcaccaucgccaacggcgugcugcagaccuucaugagaauggccuggggcggcagcuacaucgcccuggacagcggcaagggcaacugggacugcaucaugaccagcuaccaguaccugaucauccagaacaccaccugggaggaccacugccaguucagcagacccagccccaucggcuaccugggccugcugagccagagaaccagagacaucuacaucagcagaagaagaagaggcaccuucaccuggacccugagcgacagcgagggcaacgaggcccccggcggcuacugccugaccagauggaugcugaucgaggccgagcugaagugcuucggcaacaccgccguggccaagugcaacgagaagcacgacgaggaguucugcgacaugcugagacuguucgacuucaacaagcaggccaucaagagacugaagacccccgcccagaugagcauccagcugaucaacaaggccgugaacgcccugaucaacgaccagcugaucaugaagaaccaccugagagacaucaugggcauccccuacugcaacuacagcagauacugcuaccugaaccacaccgugaccggcaagaccagccugcccagaugcugccuggugagcaacggcagcuaccugaacgagacccacuucagcgacgacaucgagcagcaggccgacaacaugaucaccgagaugcugcagaaggaguacauggacagacagggcaagaccccccugggccugguggaccuguucguguucagcaccagcuucuaccugaucagcaucuuccugcaccuggugaagauccccacccacagacacaucgugggcaagcccugccccaagccccacagacugaaccacaugggcaucugcagcugcggccuguacaagcaccccggcgugcccgugaaguggaagagaugaggacuaguaauaaggaaacuguaugaaugucugugggcaggaagugaagagauccuucuguaaagguuuuuggaauuaugucugcugaauaauaaacuuuuuugaaauaauaaaucugguagaaaaaugagaucucaaaggcucuuuucagagccaccaaaaaaaaaaaaaaaaaaaaaaaaaaaaaaaaaaaaaaaaaaaaaaaaaaaaaaaaaaaaaaaaagaauu

SEQ ID NO: 25640 - RNA, 1778 nt, Artificial Sequence
  mRNA product Design b-4 (hSL-A64-N5) comprising derived and/or modified sequence from LASV(GA391;Clade III)__CAA36645__GPCmut3 (opt4)
aggagagucccgcagucggcguccagcggcucugcuuguucgugugugugucguugcaggccuuauucaagcuuaccaugggccagaucgugaccuucuuccaggaggugccccacgugaucgaggaggugaugaacaucgugcugaucgcccugagcauccuggccauccugaagggccuguacaacguggccaccugcggccugaucggccuggugaccuuccugcugcugagcggcagaagcugcagccugaucuacaagggcaccuacgagcugcagacccuggagcugaacauggagacccugaacaugaccaugccccugagcugcaccaagaacaacagccaccacuacaucagagugggcaacgagaccggccuggagcugacccugaccaacaccagcauccugaaccacaaguucugcaaccugagcgacgcccacaagagaaaccuguacgaccacagccugaugagcaucaucagcaccuuccaccugagcauccccaacuucaaccaguacgaggccaugagcugcgacuucaacggcggcaagaucaccgugcaguacaaccugagccacagcuucgccguggacgccgccggccacugcggcacccuggccaacggcgugcugcagaccuucaugagaauggccuggggcggcagcuacaucgcccuggacagcggcagaggcaacugggacugcaucaugaccagcuaccaguaccugaucauccagaacaccaccugggacgaccacugccaguucagcagacccagccccaucggcuaccugggccugcugagccagagaaccagagacaucuacaucagcagaagaagaagaggcaccuucaccuggacccugagcgacagcgagggcaacgagacccccggcggcuacugccugaccagauggaugcugaucgaggccgagcugaagugcuucggcaacaccgccguggccaagugcaacgagaagcacgacgaggaguucugcgacaugcugagacuguucgacuucaacaagcaggccaucagaagacugaagacccccgcccagaugagcauccagcugaucaacaaggccgugaacgcccugaucaacgaccagcugaucaugaagaaccaccugagagacaucaugggcauccccuacugcaacuacagcagauacugcuaccugaaccacaccagcaccggcaagaccagccugcccagaugcugccugaucagcaacggcagcuaccugaacgagaccaaguucagcgacgacaucgagcagcaggccgacaacaugaucaccgagaugcugcagaaggaguacaucgacagacagggcaagaccccccugggccugguggaccuguucguguucagcaccagcuucuaccugaucagcaucuuccugcaccuggugaagauccccacccacagacacaucgugggcaagcccugccccaagccccacagacugaaccacaugggcaucugcagcugcggccuguacaagcagcccggcgugcccgugagauggaagagaugaggacuaguaauaaggaaacuguaugaaugucugugggcaggaagugaagagauccuucuguaaagguuuuuggaauuaugucugcugaauaauaaacuuuuuugaaauaauaaaucugguagaaaaaugagaucucaaaggcucuuuucagagccaccaaaaaaaaaaaaaaaaaaaaaaaaaaaaaaaaaaaaaaaaaaaaaaaaaaaaaaaaaaaaaaaaagaauu

SEQ ID NO: 25641 - RNA, 1781 nt, Artificial Sequence
  mRNA product Design b-4 (hSL-A64-N5) comprising derived and/or modified sequence from LASV(AV;Clade V)__CCA30314__GPCmut3 (opt4)
aggagagucccgcagucggcguccagcggcucugcuuguucgugugugugucguugcaggccuuauucaagcuuaccaugggccagaucgugaccuucuuccaggaggugccccacgugaucgaggaggugaugaacaucgugcugaucgcccugagcauccuggccgugcugaagggccuguacaacaucgccaccugcggccugaucggccugaucaccuuccugcugcugugcggcagaagcugcagcagcaaccuguacaagggcguguacgagcugcagagccuggaccugaacauggagacccugaacaugaccaugccccugagcugcaccaagaacaacagccaccacuacaucagagugggcaacgacaccggccuggagcugacccugaccaacaccagcauccugaaccacaaguucugcaaccugagcgacgcccacaagaaggaccuguacgaccacgcccugaugagcaucaucagcaccuuccaccugagcauccccaacuucaaccaguacgaggccaugagcugcgacuucaacggcggcaagaucagcgugcaguacaaccugagccacagcuacgccaucgacgccgccaaccacugcggcaccguggccaacggcauccugcagaccuucaugagaauggccuggggcggcagcuacaucgcccuggacagcggcagaggcaacugggacugcaucaugaccagcuaccaguaccugaucauccagaacaccaccugggagaaccacugccaguucagcagacccagccccaucggcuaccugggccugcugagccagagaaccagagacaucuacaucagcagaagaagaagaggcaccuucaccuggacccugagcgacagcgagggcaacgccacccccggcggcuacugccugaccagauggaugcugaucgaggccgagcugaagugcuucggcaacaccgccguggccaagugcaacgagaagcacgacgaggaguucugcgacaugcugagacuguucgacuucaacaagcaggccaucagcagacugaagagccccgcccagaugagcauccagcugaucaacaaggccgugaacgcccugaucaacgaccagcugaucaugaagaaccaccugagagacaucaugggcauccccuacugcaacuacagcaaguacugcuaccugaaccacaccaucaccggcaagaccagccugcccaagugcugccuggugagcaacggcagcuaccugaacgagacccacuucagcgacgacaucgagcagcaggccgacaacaugaucaccgagaugcugcagaaggaguacauggagagacagggcaagaccccccugggccugguggaccuguucguguucagcaccagcuucuaccugaucagcaucuuccugagacuggugaagauccccacccacagacacaucgugggcaagcccugccccaagccccacagacugaaccacaugggcaucugcagcugcggccuguacaagcagcccggcgugcccgugagauggaagagaugaggacuaguaauaaggaaacuguaugaaugucugugggcaggaagugaagagauccuucuguaaagguuuuuggaauuaugucugcugaauaauaaacuuuuuugaaauaauaaaucugguagaaaaaugagaucucaaaggcucuuuucagagccaccaaaaaaaaaaaaaaaaaaaaaaaaaaaaaaaaaaaaaaaaaaaaaaaaaaaaaaaaaaaaaaaaagaauu

SEQ ID NO: 25642 - RNA, 1778 nt, Artificial Sequence
  mRNA product Design b-4 (hSL-A64-N5) comprising derived and/or modified sequence from LASV(Togo/2016/7082;Clade VI)__AMR44577__GPCmut3 (opt4)
aggagagucccgcagucggcguccagcggcucugcuuguucgugugugugucguugcaggccuuauucaagcuuaccaugggccagaucaucaccuucuuccaggaggugccccacgugaucgaggaggugaugaacaucgugcugaucgcccugagccugcuggccauccugaagggcguguacaacguggccaccugcggcaucaucggccuggugaccuuccuguuccugugcggcagaagcugcagccugaucuacaagggcagcuacgagcugcagacccuggagcugaacauggagacccugaacaugaccaugccccugagcugcaccaagaacagcagccaccacuacaucagagugggcaacgagaccggccuggagcugacccugaccaacaccagcaucaucaaccacaaguucugcaaccugagcgacgcccacaagagaaaccuguacgaccacgcccugaugagcauccugagcaccuuccaccugagcauccccaacuucaaccaguacgaggccaugagcugcgacuucaacggcggcaagaucagcgugcaguacaaccugagccacgccuacgccguggacgccgccgagcacugcggcaccguggccaacggcgugcugcagaccuucaugagaauggccuggggcggcagcuacaucgcccuggacagcggcagaggcaacugggacugcaucaugaccagcuaccaguaccugaucauccagaacaccaccugggaggaccacugccaguucagcagacccagccccaucggcuaccugggccugcugagccagagaaccagagacaucuacaucagcagaagaagaagaggcaccuucaccuggacccugagcgacagcgagggcaacgagacccccggcggcuacugccugaccagauggaugcugaucgaggccgagcugaagugcuucggcaacaccgccguggccaagugcaacgagaagcacgacgaggaguucugcgacaugcugagacuguucgacuucaacaagcaggccauccagagacugaagagccccgcccagaugagcauccagcugaucaacaaggccgugaacgcccugaucaacgaccagcugaucaugaagaaccaccugagagacaugaugggcauccccuacugcaacuacagcaaguacugcuaccugaaccacaccagcagcggcagaaccagccugcccaagugcugccuggugagcaacggcagcuaccugaacgagacccacuucagcgacgacaucgagcagcaggccgacaacaugaucaccgagaugcugcagaaggaguacaucgacagacagggcaagaccccccugggccugguggaccuguucguguucagcaccagcuucuaccugaucagcaucuuccugcaccugaucaagauccccacccacagacacaucgugggcaagcccugccccaagccccacagacugaaccacaugggcaucugcagcugcggccuguacaagcagcccggcgugcccaccagauggaagagaugaggacuaguaauaaggaaacuguaugaaugucugugggcaggaagugaagagauccuucuguaaagguuuuuggaauuaugucugcugaauaauaaacuuuuuugaaauaauaaaucugguagaaaaaugagaucucaaaggcucuuuucagagccaccaaaaaaaaaaaaaaaaaaaaaaaaaaaaaaaaaaaaaaaaaaaaaaaaaaaaaaaaaaaaaaaaagaauu

SEQ ID NO: 25643 - RNA, 1778 nt, Artificial Sequence
  mRNA product Design b-4 (hSL-A64-N5) comprising derived and/or modified sequence from LASV(KAK-428;Clade n.d. (VII))__ANH09740__GPCmut3 (opt4)
aggagagucccgcagucggcguccagcggcucugcuuguucgugugugugucguugcaggccuuauucaagcuuaccaugggccagaucgugaccuucuuccaggaggugccccacgugaucgaggaggugaugaacaucgugcugaucgcccugagccugcuggccauccugaagggccuguacaacuucgccaccugcggcgugaucggccugaucaccuuccugcugcugugcggcagaagcugcagcgccaccuacaagggccaguacgagcugcagacccuggagcugaacauggagagccugaacaugaccaugccccugagcugcaccaagaacaacagccaccacuacaucagagccggcaacaacaccggccuggagcugacccugaccaacaccagcaucaucagccacaaguucugcaaccugagcgacgcccacaagaagaaccuguacgaccacacccugaugagcaucaucaccaccuuccaccugagcauccccaacuucaaccaguacgaggccaugagcugcgacuucaacggcggcaagaucagcauccaguacaaccugagccacagcuacgccggcgacgccgcccagcacugcggcaccguggccaacggcgugcugcagaccuucaugagaauggccuggggcggcagcuaccuggcccuggacagcggcagaagaggcugggacugcaucaucagcagcuaccaguaccugaucauccagaacaccaccugggacgaccacugccaguucagcagacccagccccaucggcuaccugggcuucgugagccagaagaccagagacaucuacaucagcagaagaagaagaggcaccuucaccuggacccugagcgacagcgagggccacgacaugcccggcggcuacugccugaccagauggaugcugaucgaggccgaccugaagugcuucggcaacaccgccguggccaagugcaacgagaagcacgacgaggaguucugcgacauguggagacuguucgacuucaacaagcaggccauccagagacugaaggcccccgcccagaugaacauccagcugaucaacaaggccgugaacgcccugaucaacgaccagcugaugaugaagaaccaccugagagacaucaugggcauccccuacugcaacuacagcaaguucugcuaccugaacaacaccaccaccggcagaaccagccugcccagaugcugccugaucagcaacggcagcuaccugaacgagacccacuucagcgacgacaucgagcagcaggccgacaacaugaucaccgagaugcugcagaaggaguacauggacagacagggcaagaccccccugggccugguggaccuguucguguucagcaccagcuucuaccugaucaccaucuuccugcaccuggugaagauccccacccacagacacaucgugggcaagcccugccccaagccccacagacugaaccacaugggcaucugcagcugcggccuguacaagcagcccggcgugcccgugagauggaagagaugaggacuaguaauaaggaaacuguaugaaugucugugggcaggaagugaagagauccuucuguaaagguuuuuggaauuaugucugcugaauaauaaacuuuuuugaaauaauaaaucugguagaaaaaugagaucucaaaggcucuuuucagagccaccaaaaaaaaaaaaaaaaaaaaaaaaaaaaaaaaaaaaaaaaaaaaaaaaaaaaaaaaaaaaaaaaagaauu

SEQ ID NO: 25644 - RNA, 1778 nt, Artificial Sequence; identical to SEQ ID NO: 25638
  mRNA product Design b-4 (hSL-A64-N5) comprising derived and/or modified sequence from LASV(Pinneo-NIG-1969;Clade I)__AIT17836__GPCmut3 (opt4)

SEQ ID NO: 25645 - RNA, 1778 nt, Artificial Sequence
  mRNA product Design b-4 (hSL-A64-N5) comprising derived and/or modified sequence from LASV(ISTH0009-NIG-2011;Clade II)__AIT17404__GPCmut3 (opt4)
aggagagucccgcagucggcguccagcggcucugcuuguucgugugugugucguugcaggccuuauucaagcuuaccaugggccagaucaucaccuucuuccaggaggugccccacgugaucgaggaggugaugaacaucgugcugaucgcccugagccugcuggccauccugaagggcaucuacaacguggccaccugcggccuguucggccuggugagcuuccugcugcugugcggcagaagcugcagcaccaccuacaagggcguguacgagcugcagacccuggagcuggacauggccagccugaacaugaccaugccccugagcugcaccaagaacaacagccaccacuacaucauggugggcaacgagaccggccuggagcugacccugaccaacaccagcaucaucaaccacaaguucugcaaccugagcgacgcccacaagaagaaccuguacgaccacgcccugaugagcaucaucagcaccuuccaccugagcauccccaacuucaaccaguacgaggccaugagcugcgacuucaacggcggcaagaucagcgugcaguacaaccugagccacgccuacgccguggacgccgccaaccacugcggcaccaucgccaacggcgugcugcagaccuucaugagaauggccuggggcggcagcuacaucgcccuggacagcggcaagggcagcugggacugcaucaugaccagcuaccaguaccugaucauccagaacaccaccugggaggaccacugccaguucagcagacccagccccaucggcuaccugggccugcugagccagagaaccagagacaucuacaucagcagaagaagaagaggcaccuucaccuggacccugagcgacagcgagggcaacgagacccccggcggcuacugccugaccagauggaugcugaucgaggccgagcugaagugcuucggcaacaccgccguggccaagugcaacgagaagcacgacgaggaguucugcgacaugcugagacuguucgacuucaacaagcaggccaucagaagacugaagacccccgcccagaugagcauccagcugaucaacaaggccgugaacgcccugaucaacgaccagcugaucaugaagaaccaccugagagacaucaugggcauccccuacugcaacuacagcaaguacugcuaccugaaccacaccgugaccggcaagaccagccugcccagaugcugccuggugagcaacggcagcuaccugaacgagacccacuucagcgacgacaucgagcagcaggccgacaacaugaucaccgagcugcugcagaaggaguacauggacagacagggcaagaccccccugggccugguggaccuguucguguucagcaccagcuucuaccugaucagcaucuuccugcaccugaucaagauccccacccacagacacaucaccggcaagcccugccccaagccccacagacugaaccacaugggcaucugcagcugcggccuguacaagcaccccggcgugcccgugaaguggaagagaugaggacuaguaauaaggaaacuguaugaaugucugugggcaggaagugaagagauccuucuguaaagguuuuuggaauuaugucugcugaauaauaaacuuuuuugaaauaauaaaucugguagaaaaaugagaucucaaaggcucuuuucagagccaccaaaaaaaaaaaaaaaaaaaaaaaaaaaaaaaaaaaaaaaaaaaaaaaaaaaaaaaaaaaaaaaaagaauu

SEQ ID NO: 25646 - RNA, 1778 nt, Artificial Sequence
  mRNA product Design b-4 (hSL-A64-N5) comprising derived and/or modified sequence from LASV(ISTH2010-NIG-2012;Clade II)__AIT17482__GPCmut3 (opt4)
aggagagucccgcagucggcguccagcggcucugcuuguucgugugugugucguugcaggccuuauucaagcuuaccaugggccagaucaucaccuucuuccaggaggugccccacgugaucgaggaggugaugaacaucgugcugaucgcccugagccugcuggccauccugaagggcaucuacaacguggccaccugcggccuguucggccuggugagcuuccugcugcugugcggcagaagcugcagcaccaccuacaagggcguguacgagcugcagacccuggagcuggacauggccagccugaacaugaccaugccccugagcugcaccaagaacaacagccaccacuacaucauggugggcaacgagaccggccuggagcugacccugaccaacaccagcaucaucaaccacaaguucugcaaccugagcgacgcccacaagaagaaccuguacgaccacgcccugaugagcaucaucagcaccuuccaccugagcauccccaacuucaaccaguacgaggccaugagcugcgacuucaacggcggcaagaucagcgugcaguacaaccugagccacgccuacgccguggacgccgccaaccacugcggcaccaucgccaacggcgugcugcagaccuucaugagaauggccuggggcggcagcuacaucgcccuggacagcggcaagggcagcugggacugcaucaugaccagcuaccaguaccugaucauccagaacaucaccugggaggaccacugccaguucagcagacccagccccaucggcuaccugggccugcugagccagagaaccagagacaucuacaucagcagaagaagaagaggcaccuucaccuggacccugagcgacagcgagggcaacgagacccccggcggcuacugccugaccagauggaugcugaucgaggccgagcugaagugcuucggcaacaccgccguggccaagugcaacgagaagcacgacgaggaguucugcgacaugcugagacuguucgacuucaacaagcaggccaucagaagacugaagacccccgcccagaugagcauccagcugaucaacaaggccgugaacgcccugaucaacgaccagcugaucaugaagaaccaccugagagacaucaugggcauccccuacugcaacuacagcaaguacugcuaccugaaccacaccgugaccggcaagaccagccugcccagaugcugccuggugagcaacggcagcuaccugaacgagacccacuucagcgacgacaucgagcagcaggccgacaacaugaucaccgagcugcugcagaaggaguacaucgacagacagggcaagaccccccugggccugguggaccuguucguguucagcaccagcuucuaccugaucagcaucuuccugcaccuggugaagauccccacccacagacacguggugggcaagcccugccccaagccccacagacugaaccacaugggcaucugcagcugcggccuguacaagcaccccggcgugcccgugaaguggaagagaugaggacuaguaauaaggaaacuguaugaaugucugugggcaggaagugaagagauccuucuguaaagguuuuuggaauuaugucugcugaauaauaaacuuuuuugaaauaauaaaucugguagaaaaaugagaucucaaaggcucuuuucagagccaccaaaaaaaaaaaaaaaaaaaaaaaaaaaaaaaaaaaaaaaaaaaaaaaaaaaaaaaaaaaaaaaaagaauu

SEQ ID NO: 25647 - RNA, 1778 nt, Artificial Sequence
  mRNA product Design b-4 (hSL-A64-N5) comprising derived and/or modified sequence from LASV(Lassa virus/H.sapiens-wt/NGA/2015/ISTH_0543;Clade II)__AVO03639__GPCmut3 (opt4)
aggagagucccgcagucggcguccagcggcucugcuuguucgugugugugucguugcaggccuuauucaagcuuaccaugggccagaucaucaccuucuuccaggaggugccccacgugaucgaggaggugaugaacaucgugcugaucgcccugagccugcuggccauccugaagggcaucuacaacguggccaccugcggccuguucggccuggugagcuuccugcugcugugcggcagaagcugcagcaccaccuacaagggcguguacgagcugcagacccuggagcuggacauggccaaccugaacaugaccaugccccugagcugcaccaagaacaacagccaccacuacaucauggugggcaacgagaccggccuggagcugacccugaccaacaccagcaucaucaaccacaaguucugcaaccugagcgacgcccacaagaagaaccuguacgaccacgcccugaugagcaucaucagcaccuuccaccugagcauccccaacuucaaccaguacgaggccaugagcugcgacuucaacggcggcaagaucagcgugcaguacaaccugagccacaccuacgccguggacgccgccaaccacugcggcaccaucgccaacggcgugcugcagaccuucaugagaauggccuggggcggcagcuacaucgcccuggacagcggcaagggcagcugggacugcaucaugaccagcuaccaguaccuggugauccagaacaccaccugggaggaccacugccaguucagcagacccagccccaucggcuaccugggccugcugagccagagaaccagagacaucuacaucagcagaagaagaagaggcaccuucaccuggacccugagcgacagcgagggcaacgagacccccggcggcuacugccugaccagauggaugcugaucgaggccgagcugaagugcuucggcaacaccgccguggccaagugcaacgagaagcacgacgaggaguucugcgacaugcugagacuguucgacuucaacaagcaggccaucagaagacugaagacccccgcccagaugagcauccagcugaucaacaaggccgugaacgcccugaucaacgaccagcugaucaugaagaaccaccugagagacaucaugggcauccccuacugcaacuacagcaaguacugcuaccugaaccacaccgugaccggcaagaccagccugcccagaugcugccuggugagcaacggcagcuaccugaacgagacccacuucagcgacgacaucgagcagcaggccgacaacaugaucaccgagcugcugcagaaggaguacaucgacagacagggcaagaccccccugggccugguggaccuguucguguucagcaccagcuucuaccugaucagcaucuuccugcaccuggugaagauccccacccacagacacaucaccggcaagcccugccccaagccccacagacugaaccacaugggcaucugcagcugcggccuguacaagcaccccggcgugcccgugaaguggaagagaugaggacuaguaauaaggaaacuguaugaaugucugugggcaggaagugaagagauccuucuguaaagguuuuuggaauuaugucugcugaauaauaaacuuuuuugaaauaauaaaucugguagaaaaaugagaucucaaaggcucuuuucagagccaccaaaaaaaaaaaaaaaaaaaaaaaaaaaaaaaaaaaaaaaaaaaaaaaaaaaaaaaaaaaaaaaaagaauu

SEQ ID NO: 25648 - RNA, 1778 nt, Artificial Sequence
  mRNA product Design b-4 (hSL-A64-N5) comprising derived and/or modified sequence from LASV(Lassa virus/H.sapiens-wt/NGA/2016/ISTH_0009;Clade II)__AVO03571__GPCmut3 (opt4)
aggagagucccgcagucggcguccagcggcucugcuuguucgugugugugucguugcaggccuuauucaagcuuaccaugggccagaucaucaccuucuuccaggaggugccccacgugaucgaggaggugaugaacaucgugcugaucgcccugagccugcuggccauccugaagggcaucuacaacguggccaccugcggccugcugggccuggugagcuuccugcugcugugcggcagaagcugcagcaccaccuacaagggcguguacgagcugcagacccuggagcuggacauggccagccugaacaugaccaugccccugagcugcaccaagaacaacagccaccacuacaucauggugggcaacgagaccggccuggagcugacccugaccaacaccagcaucaucaaccacaaguucugcaaccugagcgacgcccacaagaagaaccuguacgaccacgcccugaugagcaucaucagcaccuuccaccugagcauccccaacuucaaccaguacgaggccaugagcugcgacuucaacggcggcagaaucagcgugcaguacaaccugagccacagcuacgccguggacgccgccaaccacugcggcaccaucgccaacggcgugcugcagaccuucaugagaauggccuggggcggcagcuacaucgcccuggacagcggcaagggcagcugggacugcaucaugaccagcuaccaguaccugaucauccagaacaccaccugggaggaccacugccaguucagcagacccagccccaucggcuaccugggccugcugagccagagaaccagagacaucuacaucagcagaagaagaagaggcaccuucaccuggacccugagcgacagcgagggcaacgagacccccggcggcuacugccugaccagauggaugcugaucgaggccgagcugaagugcuucggcaacaccgccguggccaagugcaacgagaagcacgacgaggaguucugcgacaugcugagacuguucgacuucaacaagcaggccaucagaagacugaagacccccgcccagaugagcauccagcugaucaacaaggccgugaacgcccugaucaacgaccagcugaucaugaagaaccaccugagagacaucaugggcauccccuacugcaacuacagcaaguacugcuaccugaaccacaccgugaccggcaagaccagccugcccagaugcugccuggugagcaacggcagcuaccugaacgagacccacuucagcgacgacaucgagcagcaggccgacaacaugaucaccgagcugcugcagaaggaguacaucgacagacagggcaagaccccccugggccugguggaccuguucguguucagcaccagcuucuaccugaucagcaucuuccugcaccuggugaagauccccacccacagacacaucaccggcaagcccugccccaagccccacagacugaaccacaugggcaucugcagcugcggccuguacaaccaccccggcgugcccgugaaguggaagagaugaggacuaguaauaaggaaacuguaugaaugucugugggcaggaagugaagagauccuucuguaaagguuuuuggaauuaugucugcugaauaauaaacuuuuuugaaauaauaaaucugguagaaaaaugagaucucaaaggcucuuuucagagccaccaaaaaaaaaaaaaaaaaaaaaaaaaaaaaaaaaaaaaaaaaaaaaaaaaaaaaaaaaaaaaaaaagaauu

SEQ ID NO: 25649 - RNA, 1778 nt, Artificial Sequence
  mRNA product Design b-4 (hSL-A64-N5) comprising derived and/or modified sequence from LASV(Lassa virus/H.sapiens-wt/NGA/2016/ISTH_0017;Clade II)__AVO03567__GPCmut3 (opt4)
aggagagucccgcagucggcguccagcggcucugcuuguucgugugugugucguugcaggccuuauucaagcuuaccaugggccagaucaucaccuucuuccaggaggugccccacgugaucgaggaggugaugaacaucgugcugaucgcccugagccugcuggccauccugaagggcaucuacaacguggccaccugcggccuguucggccuggugagcuuccugcugcugugcggcagaagcugcagcaccaccuacaagggcguguacgagcugcagacccuggagcuggacauggccagccugaacaugaccaugccccugagcugcaccaagaacaacagccaccacuacaucauggugggcaacgagaccggccuggagcugacccugaccaacaccagcaucaucaaccacaaguucugcaaccugagcgacgcccacaagaagaaccuguacgaccacgcccugaugagcaucaucagcaccuuccaccugagcauccccaacuucaaccaguacgaggccaugagcugcgacuucaacggcggcaagaucagcgugcaguacaaccugagccacaccuacgccaucgacgccgccaaccacugcggcaccaucgccaacggcgugcugcagaccuucaugagaauggccuggggcggcagcuacaucgcccuggacagcggcaagggcagcugggacugcaucaugaccagcuaccaguaccugaucauccagaacaccaccugggaggaccacugccaguucagcagacccagccccaucggcuaccugggccugcugagccagagaaccagagacaucuacaucagcagaagaagaagaggcaccuucaccuggacccugagcgacagcgagggcaacgagacccccggcggcuacugccugaccagauggaugcugaucgaggccgagcugaagugcuucggcaacaccgccguggccaagugcaacgagaagcacgacgaggaguucugcgacaugcugagacuguucgacuucaacaagcaggccaucagaagacugaagacccccgcccagaugagcauccagcugaucaacaaggccgugaacgcccugaucaacgaccagcugaucaugaagaaccaccugagagacaucaugggcauccccuacugcaacuacagcaaguacugcuaccugaaccacaccgugaccggcaagaccagccugcccagaugcugccuggugagcaacggcagcuaccugaacgagacccacuucagcgacgacaucgagcagcaggccgacaacaugaucaccgagcugcugcagaaggaguacauggacagacagggcaagaccccccugggccugguggaccuguucguguucagcaccagcuucuaccugaucagcaucuuccugcaccuggugagaauccccacccacagacacgugaucggcaagcccugccccaagccccacagacugaaccacaugggcaucugcagcugcggccuguacaagcaccccggcgugcccgugaaguggaagagaugaggacuaguaauaaggaaacuguaugaaugucugugggcaggaagugaagagauccuucuguaaagguuuuuggaauuaugucugcugaauaauaaacuuuuuugaaauaauaaaucugguagaaaaaugagaucucaaaggcucuuuucagagccaccaaaaaaaaaaaaaaaaaaaaaaaaaaaaaaaaaaaaaaaaaaaaaaaaaaaaaaaaaaaaaaaaagaauu

SEQ ID NO: 25650 - RNA, 1778 nt, Artificial Sequence
  mRNA product Design b-4 (hSL-A64-N5) comprising derived and/or modified sequence from LASV(Lassa virus/H.sapiens-wt/NGA/2018/ISTH_0959;Clade II)__AVV65099__GPCmut3 (opt4)
aggagagucccgcagucggcguccagcggcucugcuuguucgugugugugucguugcaggccuuauucaagcuuaccaugggccagaucaucaccuucuuccaggaggugccccacgugaucgaggaggugaugaacaucgugcugaucgcccugagccugcuggccauccugaagggcaucuacaacguggugaccugcggccuguucggccuggugagcuuccugcugcugugcggcagaagcugcagcaccaccuacaagggcguguacgagcugcagacccuggagcuggacauggccagccugaacaugaccaugccccugagcugcaccaagaacaacagccaccacuacaucauggugggcaacgagaccggccuggagcugacccugaccaacaccagcaucaucaaccacaaguucugcaaccugagcgacgcccacaagaagaaccuguacgaccacgcccugaugagcaucaucagcaccuuccaccugagcauccccaacuucaaccaguacgaggccaugagcugcgacuucaacggcggcaagaucagcgugcaguacaaccugagccacgccuacgccaucgacgccgccaaccacugcggcaccaucgccaacggcgugcugcagaccuucaugagaauggccuggggcggcagcuacaucgcccuggacagcggcaagggcagcugggacugcaucaugaccagcuaccaguaccugaucauccagaacaccaccugggaggaccacugccaguucagcagacccagccccaucggcuaccugggccugcugagccagagaaccagagacaucuacaucagcagaagaagaagaggcaccuucaccuggacccugagcgacagcgagggcaacgagacccccggcggcuacugccugaccagauggaugcugaucgaggccgagcugaagugcuucggcaacaccgccguggccaagugcaacgagaagcacgacgaggaguucugcgacaugcugagacuguucgacuucaacaagcaggccaucagaagacugaagacccccgcccagaugagcauccagcugaucaacaaggccgugaacgcccugaucaacgaccagcugaucaugaagaaccaccugagagacaucaugggcauccccuacugcaacuacagcaaguacugcuaccugaaccacaccgugaccggcaagaccagccugcccagaugcugccuggugagcaacggcagcuaccugaacgagacccacuucagcgacgacaucgagcagcaggccgacaacaugaucaccgagcugcugcagaaggaguacaucgacagacagggcaagaccccccugggccugguggaccuguucguguucagcaccagcuucuaccugaucagcaucuuccugcaccuggugaagauccccacccacagacacgugaucggcaagcccugccccaagccccacagacugaaccacaugggcaucugcagcugcggccuguacaagcaccccggcgugcccgugaaguggaagagaugaggacuaguaauaaggaaacuguaugaaugucugugggcaggaagugaagagauccuucuguaaagguuuuuggaauuaugucugcugaauaauaaacuuuuuugaaauaauaaaucugguagaaaaaugagaucucaaaggcucuuuucagagccaccaaaaaaaaaaaaaaaaaaaaaaaaaaaaaaaaaaaaaaaaaaaaaaaaaaaaaaaaaaaaaaaaagaauu

SEQ ID NO: 25651 - RNA, 1778 nt, Artificial Sequence
  mRNA product Design b-4 (hSL-A64-N5) comprising derived and/or modified sequence from LASV(LASV003-NIG-2008;Clade II)__AIT17580__GPCmut3 (opt4)
aggagagucccgcagucggcguccagcggcucugcuuguucgugugugugucguugcaggccuuauucaagcuuaccaugggccagaucaucaccuucuuccaggaggugccccacgugaucgaggaggugaugaacaucgugcugaucgcccugagccugcuggccauccugaagggcaucuacaacguggccaccugcggccuguucggccuggugagcuuccugcugcugugcggcagaagcugcagcaccaccuacaagggcguguacgagcugcagacccuggagcuggacauggccagccugaacaugaccaugccccugagcugcaccaagaacaacagccaccacuacaucauggugggcaacgagaccggccuggagcugacccugaccaacaccagcaucaucaaccacaaguucugcaaccugagcgacgcccacaagaagaaccuguacgaccacgcccugaugagcaucaucagcaccuuccaccugagcauccccaacuucaaccaguacgaggccaugagcugcgacuucaacggcggcaagaucagcgugcaguacaaccugagccacaccuacgccguggacgccgccaaccacugcggcaccaucgccaacggcgugcugcagaccuucaugagaauggccuggggcggcagcuacaucgcccuggacagcggcaagggcagcugggacugcaucaugaccagcuaccaguaccugaucauccagaacaccaccugggaggaccacugccaguucagcagacccagccccaucggcuaccugggccugcugagccagagaaccagagacaucuacaucagcagaagaagaagaggcaccuucaccuggacccugagcgacagcgagagcaacgagacccccggcggcuacugccugaccagauggaugcugaucgaggccgagcugaagugcuucggcaacaccgccguggccaagugcaacgagaagcacgacgaggaguucugcgacaugcugagacuguucgacuucaacaagcaggccaucagaagacugaaggcccccgcccagaugagcauccagcugaucaacaaggccgugaacgcccugaucaacgaccagcugaucaugaagaaccaccugagagacaucaugggcauccccuacugcaacuacagcaaguacugcuaccugaaccacaccgugaccggcagaaccagccugcccagaugcugccuggugagcaacggcagcuaccugaacgagacccacuucagcgacgacaucgagcagcaggccgacaacaugaucaccgagcugcugcagaaggaguacauggacagacagggcaagaccccccugggccugguggaccuguucguguucagcaccagcuucuaccugaucagcaucuuccugcaccuggugaagauccccacccacagacacgugaucggcaagcccugccccaagccccacagacugaaccacaugggcaucugcagcugcggccuguacaagcaccccggcgugcccgugaaguggaagagaugaggacuaguaauaaggaaacuguaugaaugucugugggcaggaagugaagagauccuucuguaaagguuuuuggaauuaugucugcugaauaauaaacuuuuuugaaauaauaaaucugguagaaaaaugagaucucaaaggcucuuuucagagccaccaaaaaaaaaaaaaaaaaaaaaaaaaaaaaaaaaaaaaaaaaaaaaaaaaaaaaaaaaaaaaaaaagaauu

SEQ ID NO: 25652 - RNA, 1778 nt, Artificial Sequence
  mRNA product Design b-4 (hSL-A64-N5) comprising derived and/or modified sequence from LASV(LASV035-NIG-2009;Clade II)__AIT17588__GPCmut3 (opt4)
aggagagucccgcagucggcguccagcggcucugcuuguucgugugugugucguugcaggccuuauucaagcuuaccaugggccagaucaucaccuucuuccaggaggugccccacgugaucgaggaggugaugaacaucgugcugaucgcccugagccugcuggccauccugaagggcaucuacaacguggccaccugcggccuguucggccuggugagcuuccugcugcugugcggcagaagcugcagcaccaccuacaagggcguguacgagcugcagacccuggagcuggacauggccagccugaacaugaccaugccccugagcugcaccaagaacaacagccaccacuacaucauggugggcaacgagaccggccuggagcugacccugaccaacaccagcaucaucaaccacaaguucugcaaccugagcgacgcccacaagaagaaccuguacgaccacgcccugaugagcaucaucagcaccuuccaccugagcauccccaacuucaaccaguacgaggccaugagcugcgacuucaacggcggcaagaucagcgugcaguacaaccugagccacgccuacgccguggacgccgccaaccacugcggcaccaucgccaacggcgugcugcagaccuucaugagaauggccuggggcggcagcuacaucgcccuggacagcggcaagggcagcugggacugcaucaugaccagcuaccaguaccugaucauccagaacaccaccugggaggaccacugccaguucagcagacccagccccaucggcuaccugggccugcugagccagagaaccagagacaucuacaucagcagaagaagaagaggcaccuucaccuggacccugagcgacagcgagggcaacgagacccccggcggcuacugccugaccagauggaugcugaucgaggccgagcugaagugcuucggcaacaccgccguggccaagugcaacgagaagcacgacgaggaguucugcgacaugcugagacuguucgacuucaacaagcaggccaucagaagacugaaggcccccgcccagaugagcauccagcugaucaacaaggccgugaacgcccugaucaacgaccagcugaucaugaagaaccaccugagagacaucaugggcauccccuacugcaacuacagcaaguacugcuaccugaaccacaccgugaccggcaagaccagccugcccagaugcugccuggugagcaacggcagcuaccugaacgagacccacuucagcgacgacaucgagcagcaggccgacaacaugaucaccgagcugcugcagaaggaguacaucgacagacagggcaagaccccccugggccugguggaccuguucguguucagcaccagcuucuaccugaucagcaucuuccugcaccuggugaagauccccacccacagacacgugaucggcaagcccugccccaagccccacagacugaaccacaugggcaucugcagcugcggccuguacaagcaccccggcgugcccgugaaguggaagagaugaggacuaguaauaaggaaacuguaugaaugucugugggcaggaagugaagagauccuucuguaaagguuuuuggaauuaugucugcugaauaauaaacuuuuuugaaauaauaaaucugguagaaaaaugagaucucaaaggcucuuuucagagccaccaaaaaaaaaaaaaaaaaaaaaaaaaaaaaaaaaaaaaaaaaaaaaaaaaaaaaaaaaaaaaaaaagaauu

SEQ ID NO: 25653 - RNA, 1778 nt, Artificial Sequence
  mRNA product Design b-4 (hSL-A64-N5) comprising derived and/or modified sequence from LASV(LASV1000-NIG-2009;Clade II)__AIT17782__GPCmut3 (opt4)
aggagagucccgcagucggcguccagcggcucugcuuguucgugugugugucguugcaggccuuauucaagcuuaccaugggccagaucaucaccuucuuccaggaggugccccacgugaucgaggaggugaugaacaucgugcugaucgcccugagccugcuggccauccugaagggcaucuacaacguggccaccugcggccuguucggccuggugagcuuccugcugcugugcggcagaagcugcagcaccaccuacaagggcguguacgagcugcagacccuggagcuggacauggccagccugaacaugaccaugccccugagcugcaccaagaacaacagccaccacuacaucauggugggcaacgagaccggccuggagcugacccugaccaacaccagcaucaucaaccacaaguucugcaaccugagcgacgcccacaagaagaaccuguacgaccacgcccugaugagcaucaucagcaccuuccaccugagcauccccaacuucaaccaguacgaggccaugagcugcgacuucaacggcggcaagaucagcgugcaguacaaccugagccacaccuacgccguggacgccgccaaccacugcggcaccaucgccaacggcgugcugcagaccuucaugagaauggccuggggcggcagcuacaucgcccuggacagcggcaagggcagcugggacugcaucaugaccagcuaccaguaccugaucauccagaacaccaccugggaggaccacugccaguucagcagacccagccccaucggcuaccugggccugcugagccagagaaccagagacaucuacaucagcagaagaagaagaggcaccuucaccuggacccugagcgacagcgagggcaacgagacccccggcggcuacugccugaccagauggaugcugaucgaggccgagcugaagugcuucggcaacaccgccguggccaagugcaacgagaagcacgacgaggaguucugcgacaugcugagacuguucgacuucaacaagcaggccaucaagagacugaagacccccgcccagaugagcauccagcugaucaacaaggccgugaacgcccugaucaacgaccagcugaucaugaagaaccaccugagagacaucaugggcauccccuacugcaacuacagcaaguacugcuaccugaaccacaccgugaccggcaagaccagccugcccagaugcugccuggugagcaacggcagcuaccugaacgagacccacuucagcgacgacaucgagcagcaggccgacaacaugaucaccgagcugcugcagaaggaguacaucgacagacagggcaagaccccccugggccugguggaccuguucguguucagcaccagcuucuaccugaucagcaucuuccugcaccuggugaagauccccacccacagacacguggugggcaagcccugccccaagccccacagacugaaccacaugggcaucugcagcugcggccuguacaagcaccccggcgugcccgugaaguggaagagaugaggacuaguaauaaggaaacuguaugaaugucugugggcaggaagugaagagauccuucuguaaagguuuuuggaauuaugucugcugaauaauaaacuuuuuugaaauaauaaaucugguagaaaaaugagaucucaaaggcucuuuucagagccaccaaaaaaaaaaaaaaaaaaaaaaaaaaaaaaaaaaaaaaaaaaaaaaaaaaaaaaaaaaaaaaaaagaauu

SEQ ID NO: 25654 - RNA, 1778 nt, Artificial Sequence
  mRNA product Design b-4 (hSL-A64-N5) comprising derived and/or modified sequence from LASV(LASV221-NIG-2010;Clade II)__AIT17624__GPCmut3 (opt4)
aggagagucccgcagucggcguccagcggcucugcuuguucgugugugugucguugcaggccuuauucaagcuuaccaugggccagaucaucaccuucuuccaggaggugccccacgugaucgaggaggugaugaacaucgugcugaucgcccugagccugcuggccauccugaagggcaucuacaacguggccaccugcggccuguucggccuggugagcuuccugcugcugugcggcagaagcugcagcaccaccuacaagggcguguacgagcugcagacccuggagcuggacauggccagccugaacaugaccaugccccugagcugcaccaagaacaacagccaccacuacaucauggugggcaacgagaccggccuggagcugacccugaccaacaccagcaucaucaaccacaaguucugcaaccugagcgacgcccacaagaagaaccuguacgaccacgcccugaugagcaucaucagcaccuuccaccugagcauccccaacuucaaccaguacgaggccaugagcugcgacuucaacggcggcaagaucagcgugcaguacaaccugagccacaccuacgccaucgacgccgccaaccacugcggcaccaucgccaacggcgugcugcagaccuucaugagaauggccuggggcggcagcuacaucgcccuggacagcggcaagggcagcugggacugcaucaugaccagcuaccaguaccugaucauccagaacaccaccugggaggaccacugccaguucagcagacccagccccaucggcuaccugggccugcugagccagagaaccagagacaucuacaucagcagaagaagaagaggcaccuucaccuggacccugagcgacagcgagggcaacgagacccccggcggcuacugccugaccagauggaugcugaucgaggccgagcugaagugcuucggcaacaccgccguggccaagugcaacgagaagcacgacgaggaguucugcgacaugcugagacuguucgacuucaacaagcaggccaucagaagacugaagacccccgcccagaugagcauccagcugaucaacaaggccgugaacgcccugaucaacgaccagcugaucaugaagaaccaccugagagacaucaugggcauccccuacugcaacuacagcaaguacugcuaccugaaccacaccgugaccggcaagaccagccugcccagaugcugccuggugagcaacggcagcuaccugaacgagacccacuucagcgacgacaucgagcagcaggccgacaacaugaucaccgagaugcugcagaaggaguacauggacagacagggcaagaccccccugggccugguggaccuguucguguucagcaccagcuucuaccugaucagcaucuuccugcaccuggugaagauccccacccacagacacgugaucggcaagcccugccccaagccccacagacugaaccacaugggcaucugcagcugcggccuguacaagcaccccggcgugcccgugaaguggaagagaugaggacuaguaauaaggaaacuguaugaaugucugugggcaggaagugaagagauccuucuguaaagguuuuuggaauuaugucugcugaauaauaaacuuuuuugaaauaauaaaucugguagaaaaaugagaucucaaaggcucuuuucagagccaccaaaaaaaaaaaaaaaaaaaaaaaaaaaaaaaaaaaaaaaaaaaaaaaaaaaaaaaaaaaaaaaaagaauu

SEQ ID NO: 25655 - RNA, 1778 nt, Artificial Sequence
  mRNA product Design b-4 (hSL-A64-N5) comprising derived and/or modified sequence from LASV(LASV237-NIG-2010;Clade II)__AIT17638__GPCmut3 (opt4)
aggagagucccgcagucggcguccagcggcucugcuuguucgugugugugucguugcaggccuuauucaagcuuaccaugggccagaucaucaccuucuuccaggaggugccccacgugaucgaggaggugaugaacaucgugcugaucgcccugagccugcuggccauccugaagggcaucuacaacguggccaccugcggccuguucggccuggugagcuuccugcugcugugcggcagaagcugcagcaccaccuacaagggcguguacgagcugcagacccuggagcuggacauggccagccugaacaugaccaugccccugagcugcaccaagaacaacagccaccacuacaucauggugggcaacgagaccggccuggagcugacccugaccaacaccagcaucaucaaccacaaguucugcaaccugagcgacgcccacaagaaggaccuguacgaccacgcccugaugagcaucaucagcaccuuccaccugagcauccccaacuucaaccaguacgaggccaugagcugcgacuucaacggcggcaagaucagcgugcaguacaaccugagccacaccuacgccguggacgccgccaaccacugcggcaccaucgccaacggcgugcugcagaccuucaugagaauggccuggggcggcagcuacaucgcccuggacagcggcaagggcagcugggacugcaucaugaccagcuaccaguaccugaucauccagaacaccaccugggaggaccacugccaguucagcagacccagccccaucggcuaccugggccugcugagccagagaaccagagacaucuacaucagcagaagaagaagaggcaccuucaccuggacccugagcgacagcgagggcaacgagacccccggcggcuacugccugaccagauggaugcugaucgaggccgagcugaagugcuucggcaacaccgccguggccaagugcaacgagaagcacgacgaggaguucugcgacaugcugagacuguucgacuucaacaagcaggccaucagaagacugaagacccccgcccagaugagcauccagcugaucaacaaggccgugaacgcccugaucaacgaccagcugaucaugaagaaccaccugagagacaucaugggcauccccuacugcaacuacagcaaguacugcuaccugaaccacaccgugaccggcaagaccagccugcccagaugcugccuggugagcaacggcagcuaccugaacgagacccacuucagcgacgacaucgagcagcaggccgacaacaugaucaccgagcugcugcagaaggaguacauggacagacagggcaagaccccccugggccugguggaccuguucguguucagcaccagcuucuaccugaucagcaucuuccugcaccugaucaagauccccacccacagacacaucaccggcaagcccugccccaagccccacagacugaaccacaugggcaucugcagcugcggccuguacaagcaccccggcgugcccgugaaguggaagagaugaggacuaguaauaaggaaacuguaugaaugucugugggcaggaagugaagagauccuucuguaaagguuuuuggaauuaugucugcugaauaauaaacuuuuuugaaauaauaaaucugguagaaaaaugagaucucaaaggcucuuuucagagccaccaaaaaaaaaaaaaaaaaaaaaaaaaaaaaaaaaaaaaaaaaaaaaaaaaaaaaaaaaaaaaaaaagaauu

SEQ ID NO: 25656 - RNA, 1778 nt, Artificial Sequence
  mRNA product Design b-4 (hSL-A64-N5) comprising derived and/or modified sequence from LASV(LASV253-NIG-2011;Clade II)__AIT17670__GPCmut3 (opt4)
aggagagucccgcagucggcguccagcggcucugcuuguucgugugugugucguugcaggccuuauucaagcuuaccaugggccagaucaucaccuucuuccaggaggugccccacgugaucgaggaggugaugaacaucgugcugaucgcccugagccugcuggccauccugaagggcaucuacaacguggccaccugcggccuguucggccuggugagcuuccugcugcugugcggcagaagcugcagcaccaccuacaagggcguguacgagcugcagacccuggagcuggacauggccagccugaacaugaccaugccccugagcugcaccaagaacaacagccaccacuacaucauggugggcaacgagaccggccuggagcugacccugaccaacaccagcaucaucaaccacaaguucugcaaccugagcgacgcccacaagaagaaccuguacgaccacgcccugaugagcaucaucagcaccuuccaccugagcauccccaacuucaaccaguacgaggccaugagcugcgacuucaacggcggcaagaucagcgugcaguacaaccugagccacaccuacgccguggacgccgccaaccacugcggcaccaucgccaacggcgugcugcagaccuucaugagaauggccuggggcggcagcuacaucgcccuggacagcggcaagggcagcugggacugcaucaugaccagcuaccaguaccugaucauccagaacaccaccugggaggaccacugccaguucagcagacccagccccaucggcuaccugggccugcugagccagagaaccagagacaucuacaucagcagaagaagaagaggcaccuucaccuggacccugagcgacagcgagggcaacgagacccccggcggcuacugccugaccagauggaugcugaucgaggccgagcugaagugcuucggcaacaccgccguggccaagugcaacgagaagcacgacgaggaguucugcgacaugcugagacuguucgacuucaacaagcaggccaucagaagacugaaggcccccgcccagaugagcauccagcugaucaacaaggccgugaacgcccugaucaacgaccagcugaucaugaagaaccaccugagagacaucaugggcauccccuacugcaacuacagcaaguacugcuaccugaaccacaccgugaccggcagaaccagccugcccagaugcugccuggugagcaacggcagcuaccugaacgagacccacuucagcgacgacaucgagcagcaggccgacaacaugaucaccgagcugcugcagaaggaguacaucgacagacagggcaagaccccccugggccugguggaccuguucguguucagcaccagcuucuaccugaucagcaucuuccugcaccuggugaagauccccacccacagacacaucaucggcaagcccugccccaagccccacagacugaaccacaugggcaucugcagcugcggccuguacaagcaccccggcgugcccgugaaguggaagagaugaggacuaguaauaaggaaacuguaugaaugucugugggcaggaagugaagagauccuucuguaaagguuuuuggaauuaugucugcugaauaauaaacuuuuuugaaauaauaaaucugguagaaaaaugagaucucaaaggcucuuuucagagccaccaaaaaaaaaaaaaaaaaaaaaaaaaaaaaaaaaaaaaaaaaaaaaaaaaaaaaaaaaaaaaaaaagaauu

SEQ ID NO: 25657 - RNA, 1778 nt, Artificial Sequence
  mRNA product Design b-4 (hSL-A64-N5) comprising derived and/or modified sequence from LASV(LASV254-NIG-2011;Clade II)__AIT17674__GPCmut3 (opt4)
aggagagucccgcagucggcguccagcggcucugcuuguucgugugugugucguugcaggccuuauucaagcuuaccaugggccagaucaucaccuucuuccaggaggugccccacgugaucgaggaggugaugaacaucgugcugaucgcccugagccugcuggccauccugaagggcaucuacaacguggccaccugcggccuguucggccuggugagcuuccugcugcugugcggcagaagcugcagcaccaccuacaagggcguguacgagcugcagacccuggagcuggacaugaccaaccugaacaugaccaugccccugagcugcaccaagaacaacagccaccacuacaucauggugggcaacgagaccggccuggagcugacccugaccaacaccagcaucaucaaccacaaguucugcaaccugagcgacgcccacaagaagaaccuguacaaccacgcccugaugagcaucaucagcaccuuccaccugagcauccccaacuucaaccaguacgaggccaugagcugcgacuucaacggcggcaagaucagcgugcaguacaaccugagccacagcuacgccguggacgccgccaaccacugcggcaccaucgccaacggcgugcugcagaccuucaugagaauggccuggggcggcagcuacaucgcccuggacagcggcaagggcaacugggacugcaucaugaccagcuaccaguaccugaucauccagaacaccaccugggaggaccacugccaguucagcagacccagccccaucggcuaccugggccugcugagccagagaaccagagacaucuacaucagcagaagaagaagaggcaccuucaccuggacccugagcgacagcgagggcaacgagacccccggcggcuacugccugaccagauggaugcugaucgaggccgagcugaagugcuucggcaacaccgccguggccaagugcaacgagaagcacgacgaggaguucugcgacaugcugagacuguucgacuucaacaagcaggccaucagaagacugaagacccccgcccaggccaacauccagcugaucaacaaggccgugaacgcccugaucaacgaccagcugaucaugaagaaccaccugagagacaucaugggcauccccuacugcaacuacagcaaguacugcuaccugaaccacaccgugaccggcaagaccagccugcccagaugcugccuggugagcaacggcagcuaccugaacgagacccacuucagcgacgacaucgagcagcaggccgacaacaugaucaccgagcugcugcagaaggaguacauggacagacagggcaagaccccccugggccugguggaccuguucguguucagcaccagcuucuaccugaucagcaucuuccugcaccuggugaagauccccacccacagacacgugaucggcaagcccugccccaagccccacagacugaaccacaugggcaucugcagcugcggccuguacaagcaccccggcgugcccgugaaguggaagagaugaggacuaguaauaaggaaacuguaugaaugucugugggcaggaagugaagagauccuucuguaaagguuuuuggaauuaugucugcugaauaauaaacuuuuuugaaauaauaaaucugguagaaaaaugagaucucaaaggcucuuuucagagccaccaaaaaaaaaaaaaaaaaaaaaaaaaaaaaaaaaaaaaaaaaaaaaaaaaaaaaaaaaaaaaaaaagaauu

SEQ ID NO: 25658 - RNA, 1778 nt, Artificial Sequence
  mRNA product Design b-4 (hSL-A64-N5) comprising derived and/or modified sequence from LASV(Nig08-A19;Clade III)__ADU56618__GPCmut3 (opt4)
aggagagucccgcagucggcguccagcggcucugcuuguucgugugugugucguugcaggccuuauucaagcuuaccaugggccagaucgugaccuucuuccaggaggugccccacgugaucgaggaggugaugaacaucgugcugaucgcccugagcauccuggccauccugaagggccuguacaacaucgccaccugcggccugaucggccuggugaccuuccugcugcugagcggcagaagcugcagcaugaccuacaagggcguguacgagcugcagacccuggagcugaacaugaacacccugaacaugaccaugccccugagcugcaccaagaacaacagccaccacuacaucauggugggcaacgagaccggccuggagcugacccugaccaacaccagccugcugcaccacaaguucugcaaccugagcgacgcccacaagaagaaccuguacgaccacacccugaugagcaucaucagcaccuuccaccugagcauccccaacuucaaccaguacgaggccaugagcugcgacuucaacggcggcaagaucaccgugcaguacaaccugagccacagcuacgccaucgacgccgccaaccacugcggcaccguggccaacggcgugcugcagaccuucaugagaauggccuggggcggcagcuacaucgcccuggacagcggcagaggcaagugggacugcaucaugaccagcuaccaguaccugaucauccagaacaccaccugggaggaccacugccaguucagcagacccagccccaucggcuaccugggccugcugagccagagaaccagagacaucuacaucagcagaagaagaagaggcaccuucaccuggacccugagcgacagcgagggcaacgagacccccggcggcuacugccugaccagauggaugcugaucgaggccgagcugaagugcuucggcaacaccgccguggccaagugcaacgagaagcacgacgaggaguucugcgacaugcugagacuguucgacuucaacaagcaggccaucagaagacugaaggcccccgcccagaugagcauccagcugaucaacaaggccgugaacgcccugaucaacgaccagcugaucaugaagaaccaccugagagacaucaugggcauccccuacugcaacuacagcaaguacugcuaccugaaccacaccagcaccggcagaaccagccugcccagaugcugccuggugagcaacggcagcuaccugaacgagacccacuucagcgacgacaucgagcagcaggccgacaacaugaucaccgagaugcugcagaaggaguaccuggacagacagggcaagaccccccugggccugguggaccuguucguguucagcaccagcuucuaccugaucagcaucuuccugcaccuggugaagauccccacccacagacacaucgugggcaagcccugccccaagccccacagacugaaccacaugggcaucugcagcugcggccuguacaagcagcccggcgugcccgugagauggaagagaugaggacuaguaauaaggaaacuguaugaaugucugugggcaggaagugaagagauccuucuguaaagguuuuuggaauuaugucugcugaauaauaaacuuuuuugaaauaauaaaucugguagaaaaaugagaucucaaaggcucuuuucagagccaccaaaaaaaaaaaaaaaaaaaaaaaaaaaaaaaaaaaaaaaaaaaaaaaaaaaaaaaaaaaaaaaaagaauu

SEQ ID NO: 25659 - RNA, 1781 nt, Artificial Sequence
  mRNA product Design b-4 (hSL-A64-N5) comprising derived and/or modified sequence from LASV(G1180-SLE-2010;Clade IV)__AIT17168__GPCmut3 (opt4)
aggagagucccgcagucggcguccagcggcucugcuuguucgugugugugucguugcaggccuuauucaagcuuaccaugggccagaucgugaccuucuuccaggaggugccccacgugaucgaggaggugaugaacaucgugcugaucgcccugagcauccuggccgugcugaagggccuguacaacuucgccaccugcggccuggugggccugcugaccuuccugcugcugugcggcagaagcugcaccgccagcagauacaagggcguguacgagcugcagacccuggagcugaacauggagacccugaacaugaccaugccccugagcugcaccaagaacaacagccaccacuacaucauggugggcaacgagaccggccuggagcugacccugaccaacaccagcaucaucaaccacaaguucugcaaccugagcgacgcccacaagaagaaccuguacgaccacgcccugaugagcaucaucagcaccuuccaccugagcauccccaacuucaaccaguacgaggccaugagcugcgacuucaacggcggcaagaucagcgugcaguacaaccugagccacagcuacgccggcgacgccgccaaccacugcggcaccguggccaacggcgugcugcagaccuucaugagaauggccuggggcggcagcuacaucgcccuggacagcggccacggcagcugggacugcaucaugaccagcuaccaguaccugaucauccagaacaccaccugggaggaccacugccaguucagcagacccagccccaucggcuaccugggccugcugagccagagaaccagagacaucuacaucagcagaagaagaagaggcaccuucaccuggacccugagcgacagcgagggcaaggacacccccggcggcuacugccugaccagauggaugcugaucgaggccgagcugaagugcuucggcaacaccgccguggccaagugcaacgagaagcacgacgaggaguucugcgacaugcugagacuguucgacuucaacaagcaggccauccagagacugaaggcccccgcccagaugagcauccagcugaucaacaaggccgugaacgcccugaucaacgaccagcugaucaugaagaaccaccugagagacaucaugggcauccccuacugcaacuacagcaaguacugcuaccugaaccacaccaccaccggcaagaccagccugcccaagugcugccuggugagcaacggcagcuaccugaacgagacccacuucagcgacgacaucgagcagcaggccgacaacaugaucaccgagaugcugcagaaggaguacauggagagacagggcaagaccccccugggccugguggaccuguucguguucagcaccagcuucuaccugaucagcaucuuccugcaccuggugaagauccccacccacagacacaucgugggcaagagcugccccaagccccacagacugaaccacaugggcaucugcagcugcggccuguacaagcagcccggcgugcccgugaaguggaagagaugaggacuaguaauaaggaaacuguaugaaugucugugggcaggaagugaagagauccuucuguaaagguuuuuggaauuaugucugcugaauaauaaacuuuuuugaaauaauaaaucugguagaaaaaugagaucucaaaggcucuuuucagagccaccaaaaaaaaaaaaaaaaaaaaaaaaaaaaaaaaaaaaaaaaaaaaaaaaaaaaaaaaaaaaaaaaagaauu

SEQ ID NO: 25660 - RNA, 1781 nt, Artificial Sequence
  mRNA product Design b-4 (hSL-A64-N5) comprising derived and/or modified sequence from LASV(G1442-SLE-2011;Clade IV)__AIT17180__GPCmut3 (opt4)
aggagagucccgcagucggcguccagcggcucugcuuguucgugugugugucguugcaggccuuauucaagcuuaccaugggccagaucgugaccuucuuccaggaggugccccacgugaucgaggaggugaugaacaucgugcugaucgcccugagcauccuggccgugcugaagggccuguacaacguggccaccugcggccugaucggccuggugaccuuccugcugcugugcggcagaagcugcaccaccacccuguacaagggcguguacgagcugcagacccuggagcugaacauggagacccugaacaugaccaugccccugagcugcaccaagaacaacagccaccacuacaucagagugggcaacgagaccggccuggagcugacccugaccaacaccagcaucaucaaccacaaguucugcaaccugagcgacgcccacaagaagaaccuguacgaccacgcccugaugagcaucaucagcaccuuccaccugagcauccccaacuucaaccaguacgaggccaugagcugcgacuucaacggcggcaagaucagcgugcaguacaaccugagccacagcuacgccggcgacgccgccaaccacugcggcaccguggccaacggcgugcugcagaccuucaugagaauggccuggggcggcagcuacaucgcccuggacagcggcagaggcaacugggacugcaucaugaccagcuaccaguaccugaucauccagaacaccaccugggacgaccacugccaguucagcagacccagccccaucggcuaccugggccugcugagccagagaaccagagacguguacaucagcagaagaagaagaggcaccuucaccuggacccugagcgacagcgagggcaaggacacccccggcggcuacugccugaccagauggaugcugaucgaggccgagcugaagugcuucggcaacaccgccguggccaagugcaacgagaagcacgacgaggaguucugcgacaugcugagacuguucgacuucaacaagcaggccauccagagacugaaggcccccgcccagaugagcauccagcugaucaacaaggccgugaacgcccugaucaacgaccagcugaucaugaagaaccaccugagagacaucaugggcauccccuacugcaacuacagcaaguacugcuaccugaacaacaccgccaccggcaagaccagccugcccaagugcugccugaucagcaacggcagcuaccugaacgagacccacuucagcgacgacaucgagcaggaggccgacaacaugaucaccgagaugcugcagaaggaguacauggagagacagggcaagaccccccugggccugguggaccuguucguguucagcaccagcuucuaccugaucagcaucuuccugcaccuggugaagauccccacccacagacacaucgugggcaagagcugccccaagccccacagacugaaccacaugggcaucugcagcugcggccuguacaagcagcccggcgugcccgugagauggaagagaugaggacuaguaauaaggaaacuguaugaaugucugugggcaggaagugaagagauccuucuguaaagguuuuuggaauuaugucugcugaauaauaaacuuuuuugaaauaauaaaucugguagaaaaaugagaucucaaaggcucuuuucagagccaccaaaaaaaaaaaaaaaaaaaaaaaaaaaaaaaaaaaaaaaaaaaaaaaaaaaaaaaaaaaaaaaaagaauu

SEQ ID NO: 25661 - RNA, 1781 nt, Artificial Sequence
  mRNA product Design b-4 (hSL-A64-N5) comprising derived and/or modified sequence from LASV(G3010-SLE-2013;Clade IV)__AIT17344__GPCmut3 (opt4)
aggagagucccgcagucggcguccagcggcucugcuuguucgugugugugucguugcaggccuuauucaagcuuaccaugggccagaucgugaccuucuuccaggaggugccccacgugaucgaggaggugaugaacaucgugcugaucgcccugagcauccuggccgugcugaagggccuguacaacuucgccaccugcggccuggugggccuggugaccuuccugcugcugugcggcagaagcugcaccaccagccuguacaagggcguguacgagcugcagacccuggagcugaacauggagacccugaacaugaccaugccccugagcugcaccaagaacaacagccaccacuacaucauggugggcaacgagaccggccuggagcugacccugaccaacaccagcaucaucaaccacaaguucugcaaccugagcgacgcccacaagaagaaccuguacaaccacgcccugaugagcaucaucagcaccuuccaccugagcauccccaacuucaaccaguacgaggccaugagcugcgacuucaacggcggcaagaucagcgugcaguacaaccugagccacagcuacgccggcgacgccgccagccacugcggcaccguggccaacggcgugcugcagaccuucaugagaauggccuggggcggcagcuacaucgcccuggacagcggcuacggcaagugggacugcaucaugaccagcuaccaguaccugaucauccagaacaccaccugggaggaccacugccaguucagcagacccagccccaucggcuaccugggccugcugagccagagaaccagagacaucuacaucagcagaagaagaagaggcaccuucaccuggacccugagcgacagcgagggcaaggacacccccggcggcuacugccugaccagauggaugcugaucgaggccgagcugaagugcuucggcaacaccgccguggccaagugcaacgagaagcacgacgaggaguucugcgacaugcugagacuguucgacuucaacaagcaggccauccagagacugaagacccccgcccagaugagcauccagcugaucaacaaggccgugaacgcccugaucaacgaccagcugaucaugaagaaccaccugagagacaucaugggcauccccuacugcaacuacagcaaguacugcuaccugaaccacaccaccaccggcaagaccagccugcccaagugcugccuggugagcaacggcagcuaccugaacgagacccacuucagcgacgacaucgagcagcaggccgacaacaugaucaccgagaugcugcagaaggaguacauggagagacagggcaagaccccccugggccugguggaccuguucguguucagcaccagcuucuaccugaucagcaucuuccugcaccuggugaagauccccacccacagacacaucgugggcaagagcugccccaagccccacagacugaaccacaugggcaucugcagcugcggccuguacaagcagcccggcgugcccgugagauggaagagaugaggacuaguaauaaggaaacuguaugaaugucugugggcaggaagugaagagauccuucuguaaagguuuuuggaauuaugucugcugaauaauaaacuuuuuugaaauaauaaaucugguagaaaaaugagaucucaaaggcucuuuucagagccaccaaaaaaaaaaaaaaaaaaaaaaaaaaaaaaaaaaaaaaaaaaaaaaaaaaaaaaaaaaaaaaaaagaauu

SEQ ID NO: 25662 - RNA, 1781 nt, Artificial Sequence
  mRNA product Design b-4 (hSL-A64-N5) comprising derived and/or modified sequence from LASV(G502-SLE-2009;Clade IV)__AIT17126__GPCmut3 (opt4)
aggagagucccgcagucggcguccagcggcucugcuuguucgugugugugucguugcaggccuuauucaagcuuaccaugggccagaucgugaccuucuuccaggaggugccccacgugaucgaggaggugaugaacaucgugcugaucgcccugagcauccuggccgugcugaagggccuguacaacuucgccaccugcggccuggugggccugcugaccuuccugcugcugugcggcagaagcugcaccaccggccuguacaagggcguguacgagcugcagacccuggagcugaacauggagacccugaacaugaccaugccccugagcugcaccaagaacaacagccaccacuacaucauggugggcaacgagaccggccuggagcugacccugaccaacaccagcaucaucaaccacaaguucugcaaccugagcgacgcccacaagaagaaccuguacgaccacgcccugaugagcaucaucagcaccuuccaccugagcauccccaacuucaaccaguacgaggccaugagcugcgacuucaacggcggcaagaucagcgugcaguacaaccugagccacagcuacgccggcgacgccgccgaccacugcggcaccguggccaacggcgugcugcagaccuucaugagaauggccuggggcggcagcuacaucgcccuggacagcggcagaggcagaugggacugcaucaugaccagcuaccaguaccugaucauccagaacaccaccugggaggaccacugccaguucagcagacccagccccaucggcuaccugggccugcugagccagagaaccagagacaucuacaucagcagaagaagaagaggcaccuucaccuggacccugagcgacagcgagggcaaggacacccccggcggcuacugccugaccagauggaugcugaucgaggccgagcugaagugcuucggcaacaccgccguggccaagugcaacgagaagcacgacgaggaguucugcgacaugcugagacuguucgacuucaacaagcaggccauccagagacugaaggcccccgcccagaugagcauccagcugaucaacaaggccgugaacgcccugaucaacgaccagcuggugaugaagaaccaccugagagacaucaugggcauccccuacugcaacuacagcagauacugcuaccugaaccacaccaccaccggcagaaccagccugcccaagugcugccuggugagcaacggcagcuaccugaacgagacccacuucagcgacgacaucgagcagcaggccgacaacaugaucaccgagaugcugcagaaggaguacauggagagacagggcaagaccccccugggccugguggaccuguucguguucagcaccagcuucuaccugaucagcaucuuccugcaccuggugaagauccccacccacagacacaucgugggcaagagcugccccaagccccacagacugaaccacaugggcaucugcagcugcggccuguacaagcagcccggcgugcccgugaaguggaagagaugaggacuaguaauaaggaaacuguaugaaugucugugggcaggaagugaagagauccuucuguaaagguuuuuggaauuaugucugcugaauaauaaacuuuuuugaaauaauaaaucugguagaaaaaugagaucucaaaggcucuuuucagagccaccaaaaaaaaaaaaaaaaaaaaaaaaaaaaaaaaaaaaaaaaaaaaaaaaaaaaaaaaaaaaaaaaagaauu

SEQ ID NO: 25663 - RNA, 1781 nt, Artificial Sequence
  mRNA product Design b-4 (hSL-A64-N5) comprising derived and/or modified sequence from LASV(G733-SLE-2010;Clade IV)__AIT17154__GPCmut3 (opt4)
aggagagucccgcagucggcguccagcggcucugcuuguucgugugugugucguugcaggccuuauucaagcuuaccaugggccagaucgugaccuucuuccaggaggugccccacgugaucgaggaggugaugaacaucgugcugaucgcccugagcauccuggccgugcugaagggccuguacaacuucgccaccugcggcaucgugggccuggugagcuuccugcugcugugcggcagaagcugcaccaccagccuguacaagggcguguacgagcugcagacccuggagcugaacauggagacccugaacaugaccaugccccugagcugcaccaagaacaacagccaccacuacaucauggugggcaacgagaccggccuggagcugacccugaccaacaccagcaucaucaaccacaaguucugcaaccugagcgacgcccacaagaagaaccuguacgaccacgcccugaugagcaucaucagcaccuuccaccugagcauccccaacuucaaccaguacgaggccaugagcugcgacuucaacggcggcaagaucagcgugcaguacaaccugagccacagcuacgccggcgacgccgccaaccacugcggcaccaucgccaacggcgugcugcagaccuucaugagaauggccuggggcggcagcuacaucgcccuggacagcggcagagacagaugggacugcaucaugaccagcuaccaguaccugaucauccagaacaccaccugggaggaccacugccaguucagcagacccagccccaucggcuaccugggccugcugagccagagaaccagagacaucuacaucagcagaagaagaagaggcaccuucaccuggacccugagcgacagcgagggcaaggacacccccggcggcuacugccugaccagauggaugcugaucgaggccgagcugaagugcuucggcaacaccgccguggccaagugcaacgagaagcacgacgaggaguucugcgacaugcugagacuguucgacuucaacaagcaggccauccagagacugaaggcccccgcccagaugagcauccagcugaucaacaaggccgugaacgcccugaucaacgaccagcugaucaugaagaaccaccugagagacaucaugggcauccccuacugcaacuacagcaaguacugcuaccugaaccacaccaccaccggcaagaccagccugcccaagugcugccuggugagcaacggcagcuaccugaacgagacccacuucagcgacgacaucgagcagcaggccgacaacaugaucaccgagaugcugcagaaggaguacauggagagacagggcaagaccccccugggccugguggaccuguucguguucagcaccagcuucuaccugaucagcaucuuccugcaccuggugaagauccccacccacagacacguggugggcaagagcugccccaagccccacagacugaaccacaugggcaucugcagcugcggccuguacggccagcccggcgugcccgugaaguggaagagaugaggacuaguaauaaggaaacuguaugaaugucugugggcaggaagugaagagauccuucuguaaagguuuuuggaauuaugucugcugaauaauaaacuuuuuugaaauaauaaaucugguagaaaaaugagaucucaaaggcucuuuucagagccaccaaaaaaaaaaaaaaaaaaaaaaaaaaaaaaaaaaaaaaaaaaaaaaaaaaaaaaaaaaaaaaaaagaauu

SEQ ID NO: 25664 - RNA, 1781 nt, Artificial Sequence
  mRNA product Design b-4 (hSL-A64-N5) comprising derived and/or modified sequence from MOPV/LASV reassortant(IGS-1;Clade IV)__AFY05576__GPCmut3 (opt4)
aggagagucccgcagucggcguccagcggcucugcuuguucgugugugugucguugcaggccuuauucaagcuuaccaugggccagaucgugaccuucuuccaggaggugccccacgugaucgaggaggugaugaacaucgugcugaucgcccugagcgugcuggccgugcugaagggccuguacaacuucgccaccugcggccuggugggccuggugaccuuccugcugcugugcggcagaagcugcaccaccagccuguacaagggcguguacgagcugcagacccuggagcugaacauggagacccugaacaugaccaugccccugagcugcaccaagaacaacagccaccacuacaucauggugggcaacgagaccggccuggagcugacccugaccaacaccagcaucaucaaccacaaguucugcaaccugagcgacgcccacaagaagaaccuguacgaccacgcccugaugagcaucaucagcaccuuccaccugagcauccccaacuucaaccaguacgaggccaugagcugcgacuucaacggcggcaagaucagcgugcaguacaaccugagccacagcuacgccggcgacgccgccaaccacugcggcaccguggccaacggcgugcugcagaccuucaugagaauggccuggggcggcagcuacaucgcccuggacagcggcagaggcaacugggacugcaucaugaccagcuaccaguaccugaucauccagaacaccaccugggaggaccacugccaguucagcagacccagccccaucggcuaccugggccugcugagccagagaaccagagacaucuacaucagcagaagaagaagaggcaccuucaccuggacccugagcgacagcgagggcgaggacacccccggcggcuacugccugaccagauggaugcugaucgaggccgagcugaagugcuucggcaacaccgccguggccaagugcaacgagaagcacgacgaggaguucugcgacaugcugagacuguucgacuucaacaagcaggccauccagagacugaaggcccccgcccagaugagcauccagcugaucaacaaggccgugaacgcccugaucaacgaccagcugaucaugaagaaccaccugagagacaucaugggcauccccuacugcaacuacagcaaguacugcuaccugaaccacaccaccaccggcagaaccagccugcccaagugcugccuggugagcaacggcagcuaccugaacgagacccacuucagcgacgacaucgagcagcaggccgacaacaugaucaccgagaugcugcagaaggaguacauggagagacagggcaagaccccccugggccugguggaccuguucguguucagcaccagcuucuaccugaucagcaucuuccugcaccuggugaagauccccacccacagacacaucgugggcaagagcugccccaagccccacagacugaaccacaugggcaucugcagcugcggccuguacaagcagcccggcgugcccgugaaguggaagagaugaggacuaguaauaaggaaacuguaugaaugucugugggcaggaagugaagagauccuucuguaaagguuuuuggaauuaugucugcugaauaauaaacuuuuuugaaauaauaaaucugguagaaaaaugagaucucaaaggcucuuuucagagccaccaaaaaaaaaaaaaaaaaaaaaaaaaaaaaaaaaaaaaaaaaaaaaaaaaaaaaaaaaaaaaaaaagaauu

SEQ ID NO: 25665 - RNA, 1781 nt, Artificial Sequence
  mRNA product Design b-4 (hSL-A64-N5) comprising derived and/or modified sequence from LASV(LM765-SLE-2012;Clade IV)__AIT17814__GPCmut3 (opt4)
aggagagucccgcagucggcguccagcggcucugcuuguucgugugugugucguugcaggccuuauucaagcuuaccaugggccagaucgugaccuucuuccaggaggugccccacgugaucgaggaggugaugaacaucgugcugaucgcccugagcauccuggccgugcugaagggccuguacaacuucgccaccugcggccuggugggccuggugaccuuccugcugcugugcggcagaagcugcaccaccagccuguacaagggcguguacgagcugcagacccuggagcugaacauggagacccugaacaugaccaugccccugagcugcaccaagaacaacagccaccacuacaucauggugggcaacgagaccggccuggagcugacccugaccaacaccagcaucaucgaccacaaguucugcaaccugagcgacgcccacagaaagaaccuguacgaccacgcccugaugagcaucaucagcaccuuccaccugagcauccccaacuucaaccaguacgaggccaugagcugcgacuucaacggcggcaagaucagcgugcaguacaaccugagccacagcuacgccaaggacgccgccgaccacugcggcaccguggccaacggcgugcugcagaccuucaugagaauggccuggggcggcagcuacaucgcccuggacagcggcagaggcagaugggacugcaucaugaccagcuaccaguaccugaucauccagaacaccaccugggaggaccacugccaguucagcagacccagccccaucggcuaccugggccugcugagccagagaaccagagacaucuacaucagcagaagaagaagaggcaccuucaccuggacccugagcgacagcgagggcaaggacacccccggcggcuacugccugaccagauggaugcugaucgaggccgagcugaagugcuucggcaacaccgccguggccaagugcaacgagaagcacgacgaggaguucugcgacaugcugagacuguucgacuucaacaagcaggccauccagagacugaaggcccccgcccagaugagcauccagcugaucaacaaggccgugaacgcccugaucaacgaccagcugaucaugaagaaccaccugagagacaucaugggcauccccuacugcaacuacagcaaguacugcuaccugaaccacaccaccaccggcaagaccagccugcccaagugcugccuggugagcaacggcagcuaccugaacgagacccacuucagcgacgacaucgagcagcaggccgacaacaugaucaccgagaugcugcagaaggaguacauggagagacagggcaagaccccccugggccugguggaccuguucguguucagcaccagcuucuaccugaucagcaucuuccugcaccuggugaagauccccacccacagacacaucgugggcaagcccugccccaagccccacagacugaaccacaugggcaucugcagcugcggccuguacaagcagcccggcgugcccgugaaguggaagagaugaggacuaguaauaaggaaacuguaugaaugucugugggcaggaagugaagagauccuucuguaaagguuuuuggaauuaugucugcugaauaauaaacuuuuuugaaauaauaaaucugguagaaaaaugagaucucaaaggcucuuuucagagccaccaaaaaaaaaaaaaaaaaaaaaaaaaaaaaaaaaaaaaaaaaaaaaaaaaaaaaaaaaaaaaaaaagaauu

SEQ ID NO: 25666 - RNA, 1781 nt, Artificial Sequence
  mRNA product Design b-4 (hSL-A64-N5) comprising derived and/or modified sequence from LASV(LM776-SLE-2012;Clade IV)__AIT17824__GPCmut3 (opt4)
aggagagucccgcagucggcguccagcggcucugcuuguucgugugugugucguugcaggccuuauucaagcuuaccaugggccagaucgugaccuucuuccaggaggugccccacgugaucgaggaggugaugaacaucgugcugaucgcccugagcauccuggccgugcugaagggccuguacaacuucgccaccugcggccuggugggccuggugaccuuccugcugcugugcggcagaagcugcaccaccagcguguacaagggcguguacgagcugcagacccuggagcugaacauggagacccugaacaugaccaugccccugagcugcaccaagaacaacagccaccacuacaucauggugggcaacgagaccggccuggagcugacccugaccaacaccagcaucaucaaccacaaguucugcaaccugagcgacgcccacaagaagaaccuguacgaccacgcccugaugagcaucaucagcaccuuccaccugagcauccccaacuucaaccaguacgaggccaugagcugcgacuucaacggcggcaagaucagcgugcaguacaaccugagccacagcuacgccggcgacgccgccaaccacugcggcaccguggccaacggcgugcugcagaccuucaugagaauggccuggggcggcagcuacaucgcccuggacagcggccacggcaagugggacugcaucaugaccagcuaccaguaccugaucauccagaacaccaccugggaggaccacugccaguucagcagacccagccccaucggcuaccugggccugcugagccagagaaccagagacaucuacaucagcagaagaagaagaggcaccuucaccuggacccugagcgacagcgagggcaaggacacccccggcggcuacugccugaccagauggaugcugaucgaggccgagcugaagugcuucggcaacaccgccguggccaagugcaacgagaagcacgacgaggaguucugcgacaugcugagacuguucgacuucaacaagcaggccauccagagacugaaggcccccgcccagaugagcauccagcugaucaacaaggccgugaacgcccugaucaacgaccagcugaucaugaagaaccaccugagagacaucaugggcauccccuacugcaacuacagcaaguacugcuaccugaaccacaccaccaccggcaagaccagccugcccaagugcugccuggugagcaacggcagcuaccugaacgagacccacuucagcgacgacaucgagcagcaggccgacaacaugaucaccgagaugcugcagaaggaguacauggagagacagggcaagaccccccugggccugguggaccuguucguguucagcaccagcuucuaccugaucagcaucuuccugcaccuggugaagauccccacccacagacacaucgugggcaagagcugccccaagccccacagacugaaccacaugggcaucugcagcugcggccuguacaagcagcccggcgugcccgugagauggaagagaugaggacuaguaauaaggaaacuguaugaaugucugugggcaggaagugaagagauccuucuguaaagguuuuuggaauuaugucugcugaauaauaaacuuuuuugaaauaauaaaucugguagaaaaaugagaucucaaaggcucuuuucagagccaccaaaaaaaaaaaaaaaaaaaaaaaaaaaaaaaaaaaaaaaaaaaaaaaaaaaaaaaaaaaaaaaaagaauu

SEQ ID NO: 25667 - RNA, 1781 nt, Artificial Sequence
  mRNA product Design b-4 (hSL-A64-N5) comprising derived and/or modified sequence from LASV(Mad39;Clade IV)__ANH09722__GPCmut3 (opt4)
aggagagucccgcagucggcguccagcggcucugcuuguucgugugugugucguugcaggccuuauucaagcuuaccaugggccagaucgugaccuucuuccaggaggugccccacgugaucgaggaggugaugaacaucgugcugaucgcccugagcauccuggccgugcugaagggccuguacaacguggccaccugcggccugaucggccuggugaccuuccugcugcugugcggcagaagcugcaccaccacccuguacaagggcguguacgagcugcaggcccuggagcugaacauggagacccugaacaugaccaugccccugagcugcaccaagaacaacagccaccacuacaucagagugggcaacgagaccggccuggagcugacccugaccaacaccagccugaucaaccacaaguucugcaaccugagcgacgcccacaagaagaaccuguacgaccacgcccugaugagcaucaucagcaccuuccaccugagcauccccaacuucaaccaguacgaggccaugagcugcgacuucaacgacggcaagaucagcgugcaguacaaccugagccacaccuacgccggcgacaccgccaaccacugcggcaccguggccaacggcgugcugcagaccuucaugagaauggccuggggcggcagcuacaucgcccuggacagcggcagaggcggcugggacugcaucaugaccagcuaccaguaccugaucauccagaacaccaccugggaggaccacugccaguucagcagacccagccccaucggcuaccugggccugcugagccagagaaccagagacaucuacaucagcagaagaagaagaggcaccuucaccuggacccugagcgacagcgagggcaaggacacccccggcggcuacugccugaccagauggaugcugaucgaggccgagcugaagugcuucggcaacaccgccguggccaagugcaacgagaagcacgacgaggaguucugcgacaugcugagacuguucgacuucaacaagcaggccauccagagacugaaggcccccgcccagaugagcauccagcugaucaacaaggccgugaacgcccugaucaacgaccagcugaucaugaagaaccaccugagagacaucaugggcauccccuacugcaacuacagcaaguacugcuaccugaaccacaccgugaccggcaagaccagccugcccaagugcugccuggugagcaacggcagcuaccugaacgagacccacuucagcgacgacaucgagcagcaggccgacaacaugaucaccgagaugcugcagaaggaguacauggagagacagggcaagaccccccugggccugguggaccuguucguguucagcaccagcuucuaccugaucagcaucuuccugcaccuggugaagauccccacccacagacacguggugggcaagcccugccccaagccccacagacugaaccacaugggcaucugcagcugcggcuucuacaagcagcccggcgugcccgugagauggaagagaugaggacuaguaauaaggaaacuguaugaaugucugugggcaggaagugaagagauccuucuguaaagguuuuuggaauuaugucugcugaauaauaaacuuuuuugaaauaauaaaucugguagaaaaaugagaucucaaaggcucuuuucagagccaccaaaaaaaaaaaaaaaaaaaaaaaaaaaaaaaaaaaaaaaaaaaaaaaaaaaaaaaaaaaaaaaaagaauu

SEQ ID NO: 25668 - RNA, 1781 nt, Artificial Sequence
  mRNA product Design b-4 (hSL-A64-N5) comprising derived and/or modified sequence from LASV(Z0947-SLE-2011;Clade IV)__AIT17840__GPCmut3 (opt4)
aggagagucccgcagucggcguccagcggcucugcuuguucgugugugugucguugcaggccuuauucaagcuuaccaugggccagaucgugaccuucuuccaggaggugccccacgugaucgaggaggugaugaacaucgugcugaucgcccugagcauccuggccgugcugaagggccuguacaacuucgccaccugcggccuggugggccuggugaccuuccugcugcugugcggcagaagcugcaccaucagccuguacaagggcguguacgagcugcagacccuggagcugaacauggagacccugaacaugaccaugccccugagcugcaccaagaacaacagccaccacuacaucauggugggcaacgagaccggccuggagcugacccugaccaacaccagcaucaucaaccacaaguucugcaaccugagcgacgcccacaagaagaaccuguacgaccacgcccugaugagcaucaucagcaccuuccaccugagcauccccaacuucaaccaguacgaggccaugagcugcgacuucaacggcggcaagaucagcgugcaguacaaccugagccacagcuacgccggcgacgccgccaaccacugcggcaccguggccaacggcgugcugcagaccuucaugagaauggccuggggcggcagcuacaucgcccuggacagcggcagagacagaugggacugcaucaugaccagcuaccaguaccugaucauccagaacaccaccugggaggaccacugccaguucagcagacccagccccaucggcuaccugggccugcugagccagagaaccagagacaucuacaucagcagaagaagaagaggcaccuucaccuggacccugagcgacagcgagggcaaggacacccccggcggcuacugccugaccagauggaugcugaucgaggccgagcugaagugcuucggcaacaccgccguggccaagugcaacgagaagcacgacgaggaguucugcgacaugcugagacuguucgacuucaacaagcaggccauccagagacugaaggcccccgcccagaugagcauccagcugaucaacaaggccgugaacgcccugaucaacgaccagcugaucaugaagaaccaccugagagacaucaugggcauccccuacugcaacuacagcaaguacugcuaccugaaccacaccaccaccggcaagaccagccugcccaagugcugccuggugagcaacggcagcuaccugaacgagacccacuucagcgacgacaucgagcagcaggccgacaacaugaucaccgagaugcugcagaaggaguacauggagagacagggcaagaccccccugggccugguggaccuguucguguucagcaccagcuucuaccugaucagcaucuuccugcaccuggugaagauccccacccacagacacaucgugggcaagcccugccccaagccccacagacugaaccacaugggcaucugcagcugcggccuguacaagcagcccggcgugcccgugaaguggaagagaugaggacuaguaauaaggaaacuguaugaaugucugugggcaggaagugaagagauccuucuguaaagguuuuuggaauuaugucugcugaauaauaaacuuuuuugaaauaauaaaucugguagaaaaaugagaucucaaaggcucuuuucagagccaccaaaaaaaaaaaaaaaaaaaaaaaaaaaaaaaaaaaaaaaaaaaaaaaaaaaaaaaaaaaaaaaaagaauu

SEQ ID NO: 25669 - RNA, 1781 nt, Artificial Sequence
  mRNA product Design b-4 (hSL-A64-N5) comprising derived and/or modified sequence from LASV(Josiah;Clade IV)__NP_694870__GPCmut3 (opt5)
aggagagucccgcagucggcguccagcggcucugcuuguucgugugugugucguugcaggccuuauucaagcuuaccaugggccagaucgugaccuucuuucaagaggucccccacguuauugaagaggugaugaacaucgugcugauugcccucagcguccuggcugugcuuaaggggcuguacaauuucgccacaugcggacucguuggccuggugacguuucuucugcucugugggagauccugcaccacaucucuguauaaaggagucuacgaacugcagacccucgagcugaacauggaaacacuuaauaugaccaugccucugagcuguacaaagaacaauucccaucacuauaucauggugggcaacgagaccgggcucgagcugacgcuuaccaauacaucuauuaucaaccauaaauucugcaaucugagcgacgcgcacaagaaaaaccucuacgaucaugcucugauguccaucauuucuaccuuucaccugagcaucccgaauuucaaccaguaugaagccauguccugugacuuuaauggaggcaagauuagcguucaguacaaccucucucacuccuaugccggcgaugcugccaaucauugcgggacaguggcuaacggaguccugcaaaccuucaugcggauggccuggggcgggagcuacaucgcgcuugacucuggacgcggcaacugggauuguauuaugacguccuaccaguaucugaucauucagaauacaaccugggaggaccacugccaguuuagcagacccucuccuaucggguaccucggacugcuuucccaacggacacgcgauaucuauauuagcagacggcgcagaggcaccuucaccuggacacuguccgacucugaaggcaaggauacgcccgggggauacugucucacccgguggaugcugaucgaggccgagcugaaaugcuuuggcaacacagcuguggccaaguguaaugaaaaacaugacgaggaguucugcgauaugcuccgccuguuugacuucaacaagcaggcuauucagagacuuaaagccccugcgcagaugagcauccaacugauuaauaaggccgugaacgcucucaucaaugaucagcugaucaugaagaaccaccuucgggacauuauggggauccccuauugcaauuacuccaaauauuguuaccugaaccacaccacaaccggacgcacgagccucccuaagugcugucuggucucuaauggcuccuaccugaacgaaacacauuucagcgacgauauugaacagcaagccgacaauaugaucaccgagaugcuccagaaagaguauauggaaagacaggggaagaccccgcugggacuuguugaucuguuuguguucucuaccagcuuuuaccucauuuccaucuuccugcaccuggugaaaauccccacacaucggcacauugucggcaagucuugcccuaaaccccaucgccuuaaccacaugggcaucuguagcugcgggcucuauaagcagccuggagugcccguuaaguggaaaagaugaggacuaguaauaaggaaacuguaugaaugucugugggcaggaagugaagagauccuucuguaaagguuuuuggaauuaugucugcugaauaauaaacuuuuuugaaauaauaaaucugguagaaaaaugagaucucaaaggcucuuuucagagccaccaaaaaaaaaaaaaaaaaaaaaaaaaaaaaaaaaaaaaaaaaaaaaaaaaaaaaaaaaaaaaaaaagaauu

SEQ ID NO: 25670 - RNA, 1778 nt, Artificial Sequence
  mRNA product Design b-4 (hSL-A64-N5) comprising derived and/or modified sequence from LASV(LP;Clade I)__AAF86701__GPCmut3 (opt5)
aggagagucccgcagucggcguccagcggcucugcuuguucgugugugugucguugcaggccuuauucaagcuuaccaugggccagaucauuaccuucuuucaagaggugccccacgucaucgaagagguuaugaacauugugcugaucgcccucagccugcuugcuauucugaaggggcucuacaauaucgccacaugcggaaucauuggccugguggcguuccuuuuucugugugggaaauccugcucucucacgcugaagggaggcuaugaacugcagacccucgagcugaacauggaaacacuuaauaugaccaugccucugagcuguaccaaaaacuccucucaucacuacaucagagucgggaaugagacaggacucgagcugacacuuaccaacacgagcauuaucaaucauaaguucugcaaccuguccgacgcucacaaaaagaaucucuaugaucaugcccugaugucuauuaucagcaccuuucaccuguccauuccgaacuucaaucaguacgaagccaugagcugugacuuuaacggcggcaagaucucugugcaguauaaucucucccacagcuacgcuggggaugccgcugagcauugcggaacaguugccaacggcgugcugcaaaccuucaugcggauggcguggggagggcgcuauaucgcccuugacucuggcaaagggaauugggauuguauuaugacauccuaccaguaccugaucauucagaacaccacgugggaagaccacugccaguuuagcagacccucuccuaucggauaucucggccugcuuucccaacggacacgcgauauuuacaucagcagacggcgcagaggcaccuucacauggacccuguccgacucugaggggaacgagacccccggaggcuauugucucacacgguggaugcugaucgaagcugagcugaagugcuuugggaauacggccgucgcuaaauguaacgaaaagcaugaugaggaguucugcgacaugcuccgccuguuugauuucaauaaacaggccauuagacggcuuaaggcgccugcccagaugagcauccagcugauuaacaaggcugugaaugcccucaucaacgaccaacugauuaugaaaaaucaccuucgcgauaucaugggaauccccuacugcaacuauuccaaguacuguuaucugaaucacaccagcucuggcagaacaucccucccuaaaugcugucugauuagcaacgggucuuaccugaaugaaacccaguucagcgacgacaucgagcagcaagcugauaacaugauuacagaaaugcuccagaaggaguacaucgaacggcagggaaaaaccccgcugggccuuguugacauuuuuaucuucuccacgucuuuuuaucugauuagcaucuuccuccaucugaucaagauucccacacaccgccauaucgugggcaaaccuugccccaagccucacagacugaaucauaugggggucuguuccugcggacuuuacaagcaccccggcgugccgaccaaauggaagcggugaggacuaguaauaaggaaacuguaugaaugucugugggcaggaagugaagagauccuucuguaaagguuuuuggaauuaugucugcugaauaauaaacuuuuuugaaauaauaaaucugguagaaaaaugagaucucaaaggcucuuuucagagccaccaaaaaaaaaaaaaaaaaaaaaaaaaaaaaaaaaaaaaaaaaaaaaaaaaaaaaaaaaaaaaaaaagaauu

SEQ ID NO: 25671 - RNA, 1778 nt, Artificial Sequence
  mRNA product Design b-4 (hSL-A64-N5) comprising derived and/or modified sequence from LASV(803213;Clade II)__AAF86703__GPCmut3 (opt5)
aggagagucccgcagucggcguccagcggcucugcuuguucgugugugugucguugcaggccuuauucaagcuuaccaugggccagaucauuaccuucuuucaagaggugccccacgucaucgaagagguuaugaacauugugcugaucgcccucagccugcuugcuauucugaaggggaucuacaauguggccacaugcggacucuucggccugaucuccuuucuucugcucugugggagaucuugcagcgucacguauaaaggaguguacgaacugcagacccuggagcucaacauggcgaaucugaacaugacaaugccucuuuccuguaccaagaauaacucucaucacuauauuaugguuggcaaugaaacagggcuggagcucacccugacaaacaccagcaucauuaaucauaaauucugcaaccuuuccgacgcucacaagaaaaaucuguacgaucaugcccucaugucuaucauuagcacguuucaccuguccaucccgaacuucaaucaguaugaggccaugagcugugacuuuaacggaggcaagauuucugugcaguacaaucugucccacagcuucgcugucgaugccgcuaaccauugcggcaccaucgccaacggggugcuccaaacauuuaugcggauggcguggggaggcucuuauaucgcccuggacuccgggaagggaaauugggauuguauuaugaccagcuaccaguaccuuaucauucagaacacaaccugggaagaccacugccaguucucucgccccuccccuaucggcuaucuggggcuccugagccaaagaacgcgggauauuuacaucucccgcagacggcgcggaacauuuaccuggacacuuucugacagcgagggcaaugaagcucccggcggguauugucugaccagauggaugcucaucgaggccgagcugaaaugcuucggaaacaccgcuguugccaaguguaaugaaaaacaugaugaggaauuuugcgacaugcugcgccucuucgauuucaacaagcaggcgauuaaacggcugaagacgccugcccagauguccauccagcuuauuaauaaggcugugaacgcccugaucaaugaccaacucauuaugaaaaaccaccugagagauaucaugggcauccccuacugcaauuauagccgguacuguuaucuuaaccacacagucaccgggaagacaucucugccucgcugcugucucguguccaauggaagcuaccugaacgagacccauuuuucugacgacauugaacagcaggcugauaauaugaucacagagaugcugcaaaaagaguacauggacagacagggcaagaccccgcucgggcugguggaucuuuucgucuuuagcacguccuucuaucugauuucuaucuuucuccaccugguuaaaauucccacacaucggcacaucgugggaaagccuugccccaaaccucaucgccugaaccacaugggcauuuguagcugcggccuuuacaagcaccccggggugccggucaaguggaaaagaugaggacuaguaauaaggaaacuguaugaaugucugugggcaggaagugaagagauccuucuguaaagguuuuuggaauuaugucugcugaauaauaaacuuuuuugaaauaauaaaucugguagaaaaaugagaucucaaaggcucuuuucagagccaccaaaaaaaaaaaaaaaaaaaaaaaaaaaaaaaaaaaaaaaaaaaaaaaaaaaaaaaaaaaaaaaaagaauu

SEQ ID NO: 25672 - RNA, 1778 nt, Artificial Sequence
  mRNA product Design b-4 (hSL-A64-N5) comprising derived and/or modified sequence from LASV(GA391;Clade III)__CAA36645__GPCmut3 (opt5)
aggagagucccgcagucggcguccagcggcucugcuuguucgugugugugucguugcaggccuuauucaagcuuaccaugggccagaucgugaccuucuuucaagaggucccccacguuauugaagaggugaugaacaucgugcugauugcccucagcauccuggcuauucuuaaggggcuguacaaugucgccacaugcggacucaucggccuggugacguuccuucugcucuccgggagaucuuguagccugaucuauaaaggaaccuacgaacugcagacacucgagcugaacauggaaacccuuaauaugacaaugccucuguccugcaccaagaacaauucucaucacuauauucggguuggcaacgagacagggcucgagcugacccuuacgaauaccagcauccugaaccauaaauuuuguaaucucuccgacgcgcacaagcgcaaccuguacgaucauucucugaugagcauuaucuccacauuccaccucagcauuccgaauuuuaaccaguaugaagcuaugucuugcgacuucaauggaggcaaaaucaccgugcaguacaaccugucccacagcuuugccgucgaugccgcuggccauugugggacacuugccaauggagugcugcaaaccuucaugagaauggcuuggggcgggucuuauauugcccucgacuccggacggggcaacugggauugcaucaugacgagcuaccaguaccugaucauucagaacacaaccugggacgaucacugucaguuuucucgccccuccccuaucggguaucuuggacugcucagccaaagaacacgggacauuuacaucucccgcagacggcgcggcaccuucaccuggacacugucugauagcgagggcaaugaaacgcccgggggauauugccugaccagauggaugcucauugaggcggagcugaaguguuuuggcaacacagccguugcuaagugcaaugaaaaacaugacgaggaguucugugauaugcuucggcuguuugacuucaacaagcaggccauccgcagacucaaaaccccugcucagauguccauccagcugauuaauaaggccgugaacgcgcuuaucaaugaucaacugauuaugaaaaaccaccuccgggacaucauggggauucccuacugcaauuauagccgcuacugcuaucugaaccacacaucuaccggaaagacgucccugccuagauguugccucaucagcaauggcucuuaccugaacgaaacaaaguucagcgacgauaucgaacagcaggccgacaauaugauuaccgagaugcuucaaaaagaguacaucgaucggcaggggaagaccccgcugggacucgucgaccuguuuguguucuccacaucuuuuuaucugauuagcaucuuccuucaucucgugaaaauucccacccacagacauaucgucggcaagccuugucccaaaccucaccgccugaaccauaugggcauuugcuccugugggcuguacaagcagcccggaguuccggugcgguggaaaagaugaggacuaguaauaaggaaacuguaugaaugucugugggcaggaagugaagagauccuucuguaaagguuuuuggaauuaugucugcugaauaauaaacuuuuuugaaauaauaaaucugguagaaaaaugagaucucaaaggcucuuuucagagccaccaaaaaaaaaaaaaaaaaaaaaaaaaaaaaaaaaaaaaaaaaaaaaaaaaaaaaaaaaaaaaaaaagaauu

SEQ ID NO: 25673 - RNA, 1781 nt, Artificial Sequence
  mRNA product Design b-4 (hSL-A64-N5) comprising derived and/or modified sequence from LASV(AV;Clade V)__CCA30314__GPCmut3 (opt5)
aggagagucccgcagucggcguccagcggcucugcuuguucgugugugugucguugcaggccuuauucaagcuuaccaugggccagaucgugaccuucuuucaagaggucccccacguuauugaagaggugaugaacaucgugcugauugcccucagcauccuggcuguccuuaaggggcuguacaauauugccacaugcggacucaucggccugaucacguuccuucugcucugugggagauccugcucuagcaaccuguauaaaggaguguacgaacugcagucccucgaccugaauauggagacccuuaacaugacaaugccucugucuuguaccaagaauaacagccaucacuauauucggguuggcaaugauacagggcucgaacugacccuuacaaacaccuccauccugaaucauaaauuuugcaaccucucugacgcgcacaagaaagaucuguacgaccaugcucugaugagcauuaucuccacguuccaccucagcauuccgaauuuuaaccaguaugaggccaugucuugugauuucaauggaggcaagaucuccgugcaguacaaccugagccacucuuaugccauugacgcugccaaucauugcggcaccgucgcuaacgggauccuucaaacauuuaugcgcauggccuggggaggcuccuacaucgcgcuggauagcgggagaggaaacugggacuguauuaugaccucuuaccaguaucucaucauucagaauacaaccugggagaaccacugccaguucucccggcccagcccuaucggcuaccuggggcuucugucccaacgcacgagagauauuuauaucucucggcgcagacggggaacauuuaccuggacacucagcgacuccgaaggcaaugccacccccggcggguacugucugacccgcuggaugcugaucgaggcugaacucaagugcuucggaaacacagccguggcuaaauguaaugagaagcaugaugaggaauuuugcgacaugcugagacuuuucgauuuuaacaaacaggccauuagccggcugaagucuccugcgcagauguccauccagcucauuaauaaagccguuaacgcucugaucaaugaccaacuuauuaugaagaaccaucugcgcgacaucaugggcauccccuauugcaauuacagcaaguauuguuaccucaaccacacgauuaccgggaaaacaucucugccuaagugcugucuggugagcaauggauccuaccucaacgagacccacuucucugaugacaucgaacagcaggccgauaauaugauuacagagaugcugcaaaaagaauauauggagagacagggcaagaccccgcuugggcuggucgaccucuucguguuuagcacguccuucuaccugaucagcauuuuucugcggcuugugaaaauccccacacaccgccauauugucggaaagccuugccccaaaccucacagacucaaccauaugggcaucuguucuugcggccuguauaagcagcccgggguuccggugcgguggaagagaugaggacuaguaauaaggaaacuguaugaaugucugugggcaggaagugaagagauccuucuguaaagguuuuuggaauuaugucugcugaauaauaaacuuuuuugaaauaauaaaucugguagaaaaaugagaucucaaaggcucuuuucagagccaccaaaaaaaaaaaaaaaaaaaaaaaaaaaaaaaaaaaaaaaaaaaaaaaaaaaaaaaaaaaaaaaaagaauu

SEQ ID NO: 25674 - RNA, 1778 nt, Artificial Sequence
  mRNA product Design b-4 (hSL-A64-N5) comprising derived and/or modified sequence from LASV(Togo/2016/7082;Clade VI)__AMR44577__GPCmut3 (opt5)
aggagagucccgcagucggcguccagcggcucugcuuguucgugugugugucguugcaggccuuauucaagcuuaccaugggccagaucauuaccuucuuucaagaggugccccacgucaucgaagagguuaugaacauugugcugaucgcccucagccugcuugcuauucugaaggggguguacaaugucgccacaugcggaaucaucggccucgugacguuccuguuucuuugugggagauccugcucucugauuuauaaaggaagcuacgaacuccagacccuggagcugaacauggaaacacucaauaugaccaugccucuguccuguacaaagaacucuagccaucacuauauccggguuggcaaugagaccgggcuugagcugacacucaccaacacguccauuaucaaucauaaauucugcaaccugucugacgcgcacaagcgcaaucuuuacgaucaugcucugaugagcauucucuccaccuuucaccugagcaucccgaacuucaaucaguaugaagccaugucuugugacuuuaacggaggcaaaauuuccgugcaguacaaucugagccacgccuaugcugucgaugccgcugagcauugcggcacaguggccaacgggguucuccaaaccuucaugagaauggcguggggaggcucuuacaucgcccuggacuccgggcggggaaauugggauuguaucaugacaagcuaccaguaucuuauuauccagaacaccacgugggaagaccacugccaguuuucucgccccuccccuauuggcuaccuggggcuccugagccaaagaacacgggauaucuauauuucccgcagacggcgcggaaccuucacauggacccuuucugacagcgagggcaacgagacccccggcggguacugucugacaagauggaugcucaucgaagcugagcugaagugcuuuggaaauacggccguggcuaaguguaacgaaaaacaugaugaggaguucugcgacaugcugcggcucuuugauuucaauaagcaggccauccagcgccugaaauccccugcgcagaugagcauucaacuuaucaacaaggccgucaaugcucugauuaacgaccagcucaucaugaaaaaucaccugagagauaugaugggcauucccuauugcaacuacucuaaguauuguuaccuuaaucacaccuccagcgggcggacaucucugccuaagugcugucucgugagcaacggauccuaccugaaugaaacccauuucucugacgacaucgagcagcaagccgauaacaugaucacagaaaugcugcagaaagaguauauugaccgccagggcaagaccccgcucgggcugguggaucuuuuugucuucagcacguccuuuuaccugaucagcauuuuccuccaccugaucaaaauucccacacauagacacaucguuggaaagccuugccccaaaccucaucggcugaaucacaugggcauuuguucuugcggccuuuauaagcagcccggggugccgaccagauggaaacgcugaggacuaguaauaaggaaacuguaugaaugucugugggcaggaagugaagagauccuucuguaaagguuuuuggaauuaugucugcugaauaauaaacuuuuuugaaauaauaaaucugguagaaaaaugagaucucaaaggcucuuuucagagccaccaaaaaaaaaaaaaaaaaaaaaaaaaaaaaaaaaaaaaaaaaaaaaaaaaaaaaaaaaaaaaaaaagaauu

SEQ ID NO: 25675 - RNA, 1778 nt, Artificial Sequence
  mRNA product Design b-4 (hSL-A64-N5) comprising derived and/or modified sequence from LASV(KAK-428;Clade n.d. (VII))__ANH09740__GPCmut3 (opt5)
aggagagucccgcagucggcguccagcggcucugcuuguucgugugugugucguugcaggccuuauucaagcuuaccaugggccagaucgugaccuucuuucaagaggucccccacguuauugaagaggugaugaacaucgugcugauugcccucagccugcuugcuauccugaaggggcucuacaauuucgccacaugcggagucauuggccugaucacguuucuucugcucugugggagauccugcucugcgaccuauaaaggacaguacgaacugcagacacuggagcucaacauggaaagccugaauaugaccaugccucuuuccuguacaaagaacaauucucaucacuauauccgggcuggcaacaauaccgggcuggagcucacacugaccaacacgagcauuaucucccauaaauucugcaaucuuucugacgcccacaagaaaaaccuguacgaucauacccucaugagcauuaucacaaccuuucaccuguccauuccgaauuucaaccaguaugaggccaugagcugugacuuuaauggaggcaagaucucuauucaauacaaccugucccacagcuaugcuggcgaugccgcucagcauugcgggacaguggccaauggaguucuccagaccuucaugcgcauggcguggggcgggucuuaccuggcccuugacuccggaagacggggcugggauuguaucaucagcucuuaccaguaucugauuauccaaaacacgacaugggacgaucacugccaguuuucccgccccagcccuauuggguaccucggauucgugucccagaagaccagagacaucuauauuucucggcgcagacggggcacauuuaccuggacccugagcgauuccgaaggccaugacaugcccgggggauacugucuuacacgcuggaugcugaucgaggcugaucucaaaugcuucggcaacacggccgucgcuaaguguaaugaaaaacacgacgaggaguuuugcgauauguggagacuguucgacuucaacaagcaggccauccaacggcugaaagcgccugcccagaugaauauucagcucaucaacaaggcugugaaugcccugauuaacgaccaacuuaugaugaagaaucaucugcgcgauaucauggggauucccuauugcaacuacagcaaauuuuguuaucucaauaacaccacaaccggaagaacaucucugccucggugcugucuuaucuccaauggcagcuaccugaacgaaacccacuucucugacgauaucgagcagcaggcugacaauaugauuacggaaaugcuccagaaggaguacauggaucgccaagggaaaacaccgcugggacugguugaccucuuuguguucagcaccuccuuuuaucugaucaccauuuuccuucaccuggucaagauccccacacauagacacauugugggcaaaccuugccccaagccucaucggcucaaccacaugggcaucuguucuugcgggcuguacaaacagcccggagugccggucagauggaagcgcugaggacuaguaauaaggaaacuguaugaaugucugugggcaggaagugaagagauccuucuguaaagguuuuuggaauuaugucugcugaauaauaaacuuuuuugaaauaauaaaucugguagaaaaaugagaucucaaaggcucuuuucagagccaccaaaaaaaaaaaaaaaaaaaaaaaaaaaaaaaaaaaaaaaaaaaaaaaaaaaaaaaaaaaaaaaaagaauu

SEQ ID NO: 25676 - RNA, 1778 nt, Artificial Sequence; identical to SEQ ID NO: 25670
  mRNA product Design b-4 (hSL-A64-N5) comprising derived and/or modified sequence from LASV(Pinneo-NIG-1969;Clade I)__AIT17836__GPCmut3 (opt5)

SEQ ID NO: 25677 - RNA, 1778 nt, Artificial Sequence
  mRNA product Design b-4 (hSL-A64-N5) comprising derived and/or modified sequence from LASV(ISTH0009-NIG-2011;Clade II)__AIT17404__GPCmut3 (opt5)
aggagagucccgcagucggcguccagcggcucugcuuguucgugugugugucguugcaggccuuauucaagcuuaccaugggccagaucauuaccuucuuucaagaggugccccacgucaucgaagagguuaugaacauugugcugaucgcccucagccugcuugcuauucugaaggggaucuacaauguggccacaugcggacucuucggccuggucuccuuucuucugcucugugggagaucuugcagcacgaccuauaaaggaguguacgaacugcagacacuggagcucgacauggcgucccugaacaugaccaugccucuuucuuguacaaagaauaacagccaucacuauaucaugguuggcaaugaaaccgggcuggagcucacacugaccaacacguccauuaucaaucauaaauucugcaaccuuucugaugcucacaagaaaaaucuguacgaccaugcccucaugagcauuaucuccaccuuucaccugagcauuccgaacuucaaucaguaugaggccaugucuugugauuuuaacggaggcaagaucuccgugcaguacaaucugagccacgcuuaugccgucgacgcugccaaccauugcggcacaauugcgaauggggugcuccaaaccuucaugcggauggccuggggaggcucuuacaucgcucuggauuccgggaagggaagcugggacuguaucaugacaucuuaccaguaucuuauuauccagaacaccacgugggaagaucacugccaguuuucccgccccagcccuauuggcuaccuggggcuccugucccaaagaacacgggacaucuauauuucucgcagacggcgcggaaccuucacauggacccuuagcgauuccgagggcaacgaaacccccggcggguacugucugacaagauggaugcucaucgaggccgagcugaaaugcuuuggaaauacggcuguugccaaguguaacgaaaaacaugacgaggaguucugcgauaugcugcggcucuuugacuucaauaagcaggcgauccgcagacugaaaaccccugcccagaugagcauucagcuuaucaacaaggcugugaaugcccugauuaacgaucaacucaucaugaagaaucaucugcgggacauuaugggcauccccuauugcaacuacucuaaauauuguuaccuuaaucacacagucaccgggaagacaucccugccucgcugcugucucgugagcaacggaucuuaccugaaugaaacccacuucagcgacgauaucgaacagcaggcugacaacaugauuacggagcugcuccaaaaagaguauauggauagacagggcaagacaccgcuggggcuuguggaccuguuugucuucuccaccucuuuuuaccucaucagcauuuuccugcaccugaucaaaauucccacccaucggcacaucacaggaaagccuugccccaaaccucaucgccuuaaucacaugggcauuuguuccugcggccucuauaagcaccccgggguuccggugaaguggaaaagaugaggacuaguaauaaggaaacuguaugaaugucugugggcaggaagugaagagauccuucuguaaagguuuuuggaauuaugucugcugaauaauaaacuuuuuugaaauaauaaaucugguagaaaaaugagaucucaaaggcucuuuucagagccaccaaaaaaaaaaaaaaaaaaaaaaaaaaaaaaaaaaaaaaaaaaaaaaaaaaaaaaaaaaaaaaaaagaauu

SEQ ID NO: 25678 - RNA, 1778 nt, Artificial Sequence
  mRNA product Design b-4 (hSL-A64-N5) comprising derived and/or modified sequence from LASV(ISTH2010-NIG-2012;Clade II)__AIT17482__GPCmut3 (opt5)
aggagagucccgcagucggcguccagcggcucugcuuguucgugugugugucguugcaggccuuauucaagcuuaccaugggccagaucauuaccuucuuucaagaggugccccacgucaucgaagagguuaugaacauugugcugaucgcccucagccugcuugcuauucugaaggggaucuacaauguggccacaugcggacucuucggccuggucuccuuucuucugcucugugggagaucuugcagcacgaccuauaaaggaguguacgaacugcagacacuggagcucgacauggcgucccugaacaugaccaugccucuuucuuguacaaagaauaacagccaucacuauaucaugguuggcaaugaaaccgggcuggagcucacacugaccaacacguccauuaucaaucauaaauucugcaaccuuucugaugcucacaagaaaaaucuguacgaccaugcccucaugagcauuaucuccaccuuucaccugagcauuccgaacuucaaucaguaugaggccaugucuugugauuuuaacggaggcaagaucuccgugcaguacaaucugagccacgcuuaugccgucgacgcugccaaccauugcggcacaauugcgaauggggugcuccaaaccuucaugcggauggccuggggaggcucuuacaucgcucuggauuccgggaagggaagcugggacuguaucaugacaucuuaccaguaucuuauuauccagaacauuaccugggaagaucacugccaguuuucccgccccagcccuaucggcuaccuggggcuccugucccaaagaacgcgggacauuuauaucucucgcagacggcgcggaacauucaccuggacacuuagcgauuccgagggcaacgaaacccccggcggguacugucugaccagauggaugcucaucgaggccgagcugaaaugcuuuggaaauacagcuguugccaaguguaacgaaaaacaugacgaggaguucugcgauaugcugcggcucuuugacuucaauaagcaggcgauucgcagacugaaaacgccugcccagaugagcauccagcuuauuaacaaggcugugaaugcccugaucaacgaucaacucauuaugaagaaucaucugcgggacaucaugggcauccccuauugcaacuacucuaaauauuguuaccuuaaucacaccgucacagggaagaccucccugccucgcugcugucucgugagcaacggaucuuaccugaaugaaacacacuucagcgacgauauugaacagcaggcugacaacaugaucaccgagcugcuccaaaaagaguauauugauagacagggcaagacgccgcuggggcuuguggaccuguuugucuucuccacaucuuuuuaccucaucagcauuuuccugcaccugguuaaaauccccacccaucggcacguggugggaaagccuugccccaaaccucaucgccuuaaucacaugggcauuuguuccugcggccucuauaagcaccccggggucccggugaaguggaaaagaugaggacuaguaauaaggaaacuguaugaaugucugugggcaggaagugaagagauccuucuguaaagguuuuuggaauuaugucugcugaauaauaaacuuuuuugaaauaauaaaucugguagaaaaaugagaucucaaaggcucuuuucagagccaccaaaaaaaaaaaaaaaaaaaaaaaaaaaaaaaaaaaaaaaaaaaaaaaaaaaaaaaaaaaaaaaaagaauu

SEQ ID NO: 25679 - RNA, 1778 nt, Artificial Sequence
  mRNA product Design b-4 (hSL-A64-N5) comprising derived and/or modified sequence from LASV(Lassa virus/H.sapiens-wt/NGA/2015/ISTH_0543;Clade II)__AVO03639__GPCmut3 (opt5)
aggagagucccgcagucggcguccagcggcucugcuuguucgugugugugucguugcaggccuuauucaagcuuaccaugggccagaucauuaccuucuuucaagaggugccccacgucaucgaagagguuaugaacauugugcugaucgcccucagccugcuugcuauucugaaggggaucuacaauguggccacaugcggacucuucggccuggucuccuuucuucugcucugugggagaucuugcagcacgaccuauaaaggaguguacgaacugcagacacuggagcucgacauggcgaaccugaauaugaccaugccucuuuccuguacaaagaacaauucucaucacuauaucaugguuggcaacgaaaccgggcuggagcucacacugaccaauacgagcauuaucaaccauaaauucugcaaucuuuccgaugcucacaagaaaaaccuguacgaccaugcccucaugucuauuaucagcaccuuucaccuguccauuccgaauuucaaccaguaugaggccaugagcugugauuuuaauggaggcaagaucucugugcaguacaaccugucccacacauaugcugucgacgccgcuaaucauugcggcaccauugccaacggggugcuccaaacauucaugcggauggcguggggaggcagcuacaucgcccuggauucugggaagggauccugggacuguaucaugaccagcuaccaguaucuuguuauucagaacacgacaugggaagaucacugccaguuuucucgccccuccccuaucggcuaccuggggcuccugagccaaagaacccgggacauuuauaucucccgcagacggcgcggaacauucaccuggacccuuucugauagcgagggcaaugaaacacccggcggguacugucugacgagauggaugcucauugaggcugagcugaaaugcuuuggaaacaccgccguggcuaaguguaaugaaaaacaugacgaggaguucugcgauaugcugcggcucuuugacuucaacaagcaggccauccgcagacugaaaaccccugcgcagauguccauccagcuuauuaauaaggccgucaacgcucugaucaaugaucaacucauuaugaagaaccaucugcgggacaucaugggcauucccuauugcaauuacagcaaauauuguuaccuuaaccacacagugacagggaagaccucucugccucgcugcugucucguguccaauggaagcuaccugaacgaaacgcacuucucugacgauaucgaacagcaggccgacaauaugaucacagagcugcuccaaaaagaguauauugauagacagggcaagaccccgcuggggcuugucgaccuguuuguuuucagcaccuccuuuuaccucaucucuauuuuccugcaccuggugaaaauccccacacaucggcacauuaccggaaagccuugccccaaaccucaucgccuuaaccacaugggcaucuguagcugcggccucuauaagcaccccggggugccggucaaguggaaaagaugaggacuaguaauaaggaaacuguaugaaugucugugggcaggaagugaagagauccuucuguaaagguuuuuggaauuaugucugcugaauaauaaacuuuuuugaaauaauaaaucugguagaaaaaugagaucucaaaggcucuuuucagagccaccaaaaaaaaaaaaaaaaaaaaaaaaaaaaaaaaaaaaaaaaaaaaaaaaaaaaaaaaaaaaaaaaagaauu

SEQ ID NO: 25680 - RNA, 1778 nt, Artificial Sequence
  mRNA product Design b-4 (hSL-A64-N5) comprising derived and/or modified sequence from LASV(Lassa virus/H.sapiens-wt/NGA/2016/ISTH_0009;Clade II)__AVO03571__GPCmut3 (opt5)
aggagagucccgcagucggcguccagcggcucugcuuguucgugugugugucguugcaggccuuauucaagcuuaccaugggccagaucauuaccuucuuucaagaggugccccacgucaucgaagagguuaugaacauugugcugaucgcccucagccugcuugcuauucugaaggggaucuacaauguggccacaugcggacuccugggccuugucuccuuccugcuccugugugggagaucuugcagcacgaccuauaaaggaguguacgaacugcagacacucgagcuggacauggcgucccuuaacaugaccaugccucugucuuguacaaagaauaacagccaucacuauaucaugguuggcaaugaaaccgggcucgagcugacacuuaccaacacguccauuaucaaucauaaauuuugcaaccugucugaugcucacaagaaaaaucucuacgaccaugcccugaugagcauuaucuccaccuuccaccugagcauuccgaacuuuaaucaguaugaggccaugucuugugauuucaacggaggccggaucuccgugcaguacaaucucagccacucuuaugcugucgacgccgcuaaccauugcggcacaauugccaauggggugcugcaaaccuuuaugcgcauggcguggggaggcuccuacaucgcccuugauagcgggaagggaucuugggacuguaucaugacauccuaccaguaucugauuauccagaacaccacgugggaagaucacugccaguucagcagacccuccccuauuggcuaccucgggcugcuuucucaacggacacgcgacaucuauauuagcagacggcgcagaggaaccuuuacauggacccuguccgauagcgagggcaacgaaacccccggcggguacugucucacacgguggaugcugaucgaggcugagcugaagugcuucggaaauacggccguugcuaaauguaacgaaaagcaugacgaggaauuuugcgauaugcuccgccuguucgacuuuaauaaacaggccaucagacggcuuaagaccccugcgcagaugucuauucagcugaucaacaaagccgugaaugcucucauuaacgaucaacugaucaugaagaaucaccuucgcgacauuaugggcauccccuauugcaacuacuccaaguauuguuaccugaaucacacagucaccgggaaaacaagccucccuagaugcugucuggugucuaacggaagcuaccugaaugagacccauuucuccgacgauaucgaacagcaggccgacaacaugauuacggagcuccugcaaaaggaguauaucgaucggcagggcaaaacaccgcuugggcugguggaccucuucgucuuuucuaccagcuucuaccugauuuccaucuuucugcaccuuguuaagauucccacccaucgccacaucacaggaaaaccuugccccaagccucauagacucaaucacaugggcauuuguagcugcggccuguauaaccaccccggggugccggugaaauggaagcggugaggacuaguaauaaggaaacuguaugaaugucugugggcaggaagugaagagauccuucuguaaagguuuuuggaauuaugucugcugaauaauaaacuuuuuugaaauaauaaaucugguagaaaaaugagaucucaaaggcucuuuucagagccaccaaaaaaaaaaaaaaaaaaaaaaaaaaaaaaaaaaaaaaaaaaaaaaaaaaaaaaaaaaaaaaaaagaauu

SEQ ID NO: 25681 - RNA, 1778 nt, Artificial Sequence
  mRNA product Design b-4 (hSL-A64-N5) comprising derived and/or modified sequence from LASV(Lassa virus/H.sapiens-wt/NGA/2016/ISTH_0017;Clade II)__AVO03567__GPCmut3 (opt5)
aggagagucccgcagucggcguccagcggcucugcuuguucgugugugugucguugcaggccuuauucaagcuuaccaugggccagaucauuaccuucuuucaagaggugccccacgucaucgaagagguuaugaacauugugcugaucgcccucagccugcuugcuauucugaaggggaucuacaauguggccacaugcggacucuucggccuggucuccuuucuucugcucugugggagaucuugcagcacgaccuauaaaggaguguacgaacugcagacacuggagcucgacauggcgucccugaacaugaccaugccucuuucuuguacaaagaauaacagccaucacuauaucaugguuggcaaugaaaccgggcuggagcucacacugaccaacacguccauuaucaaucauaaauucugcaaccuuucugaugcucacaagaaaaaucuguacgaccaugcccucaugagcauuaucuccaccuuucaccugagcauuccgaacuucaaucaguaugaggccaugucuugugauuuuaacggaggcaagaucuccgugcaguacaaucugagccacacauaugcuauugacgccgcuaaccauugcggcaccaucgccaaugggguccuccaaacauucaugcggauggcguggggaggcucuuacaucgcccuggauuccgggaagggaagcugggacuguauuaugaccucuuaccaguaucuuaucauucagaacacgacaugggaagaucacugccaguuuucccgccccagcccuaucggcuaccuggggcuccugucccaaagaacccgggacauuuauaucucucgcagacggcgcggaacauucaccuggacccuuagcgauuccgagggcaacgaaacacccggcggguacugucugacgagauggaugcucaucgaggcugagcugaaaugcuuuggaaauaccgccguggcuaaguguaacgaaaaacaugacgaggaguucugcgauaugcugcggcucuuugacuucaauaagcaggccauucgcagacugaaaaccccugcgcagaugagcauccagcuuauuaacaaggccguuaaugcucugaucaacgaucaacucauuaugaagaaucaucugcgggacaucaugggcauccccuauugcaacuacucuaaauauuguuaccuuaaucacacagugacagggaagaccucccugccucgcugcugucucgucagcaacggaucuuaccugaaugaaacgcacuucagcgacgauauugaacagcaggccgacaacaugaucacagagcugcuccaaaaagaguauauggauagacagggcaagaccccgcuggggcuuguggaccuguuuguguucuccaccucuuuuuaccucauuagcaucuuccugcaccugguccggauucccacacaucgccacguuaucggaaaaccuugccccaagccucauagacuuaaucacaugggcauuuguuccugcggccucuauaaacaccccggggugccggugaaguggaagcggugaggacuaguaauaaggaaacuguaugaaugucugugggcaggaagugaagagauccuucuguaaagguuuuuggaauuaugucugcugaauaauaaacuuuuuugaaauaauaaaucugguagaaaaaugagaucucaaaggcucuuuucagagccaccaaaaaaaaaaaaaaaaaaaaaaaaaaaaaaaaaaaaaaaaaaaaaaaaaaaaaaaaaaaaaaaaagaauu

SEQ ID NO: 25682 - RNA, 1778 nt, Artificial Sequence
  mRNA product Design b-4 (hSL-A64-N5) comprising derived and/or modified sequence from LASV(Lassa virus/H.sapiens-wt/NGA/2018/ISTH_0959;Clade II)__AVV65099__GPCmut3 (opt5)
aggagagucccgcagucggcguccagcggcucugcuuguucgugugugugucguugcaggccuuauucaagcuuaccaugggccagaucauuaccuucuuucaagaggugccccacgucaucgaagagguuaugaacauugugcugaucgcccucagccugcuugcuauucugaaggggaucuacaauguggucacaugcggacucuucggccugguguccuuucuucugcucugugggagaucuugcagcacgaccuauaaaggaguuuacgaacugcagacacuggagcucgacauggccucccugaacaugaccaugccucuuucuuguacaaagaauaacagccaucacuauaucauggugggcaaugaaaccgggcuggagcucacacugaccaacacguccauuaucaaucauaaauucugcaaccuuucugaugcgcacaagaaaaaucuguacgaccaugcucucaugagcauuaucuccaccuuucaccugagcauuccgaacuucaaucaguaugaggccaugucuugugauuuuaacggaggcaagaucuccguccaguacaaucugagccacgccuaugcuauugacgccgcuaaccauugcggcacaaucgccaauggggugcuccaaaccuucaugcggauggcguggggaggcucuuacaucgcccuggauuccgggaagggaagcugggacuguauuaugacaucuuaccaguaucuuaucauucagaacaccacgugggaagaucacugccaguuuucccgccccagcccuaucggcuaccuggggcuccugucccaaagaacacgggacauuuauaucucucgcagacggcgcggaaccuucacauggacccuuagcgauuccgagggcaacgaaacccccggcggguacugucugacaagauggaugcucaucgaggcugagcugaaaugcuuuggaaauacggccguugcuaaguguaacgaaaaacaugacgaggaguucugcgauaugcugcggcucuuugacuucaauaagcaggccauucgcagacugaaaaccccugcgcagaugagcauccagcuuauuaacaaggccgugaaugcucugaucaacgaucaacucauuaugaagaaucaucugcgggacaucaugggcauccccuauugcaacuacucuaaauauuguuaccuuaaucacacagucaccgggaagacaucccugccucgcugcugucucgugagcaacggaucuuaccugaaugaaacccacuucagcgacgauauugaacagcaggccgacaacaugaucacggagcugcuccaaaaagaguauauugauagacagggcaagacaccgcuggggcuuguggaccuguuugucuucuccaccucuuuuuaccucaucagcauuuuccugcaccugguuaaaauccccacccaucggcacgugauuggaaagccuugccccaaaccucaucgccuuaaucacaugggcaucuguuccugcggccucuauaagcaccccggggugccggucaaguggaaaagaugaggacuaguaauaaggaaacuguaugaaugucugugggcaggaagugaagagauccuucuguaaagguuuuuggaauuaugucugcugaauaauaaacuuuuuugaaauaauaaaucugguagaaaaaugagaucucaaaggcucuuuucagagccaccaaaaaaaaaaaaaaaaaaaaaaaaaaaaaaaaaaaaaaaaaaaaaaaaaaaaaaaaaaaaaaaaagaauu

SEQ ID NO: 25683 - RNA, 1778 nt, Artificial Sequence
  mRNA product Design b-4 (hSL-A64-N5) comprising derived and/or modified sequence from LASV(LASV003-NIG-2008;Clade II)__AIT17580__GPCmut3 (opt5)
aggagagucccgcagucggcguccagcggcucugcuuguucgugugugugucguugcaggccuuauucaagcuuaccaugggccagaucauuaccuucuuucaagaggugccccacgucaucgaagagguuaugaacauugugcugaucgcccucagccugcuugcuauucugaaggggaucuacaauguggccacaugcggacucuucggccuggucuccuuucuucugcucugugggagaucuugcagcacgaccuauaaaggaguguacgaacugcagacacuggagcucgacauggcgucccugaacaugaccaugccucuuucuuguacaaagaauaacagccaucacuauaucaugguuggcaaugaaaccgggcuggagcucacacugaccaacacguccauuaucaaucauaaauucugcaaccuuucugaugcucacaagaaaaaucuguacgaccaugcccucaugagcauuaucuccaccuuucaccugagcauuccgaacuucaaucaguaugaggccaugucuugugauuuuaacggaggcaagaucuccgugcaguacaaucugagccacacauaugcugucgacgccgcuaaccauugcggcaccauugccaauggggugcuccaaacauucaugcggauggcguggggaggcucuuacaucgcccuggauuccgggaagggaagcugggacuguaucaugaccucuuaccaguaucuuauuauccagaacacgacaugggaagaucacugccaguuuucccgccccagcccuauuggcuaccuggggcuccugucccaaagaacccgggacaucuauauuucucgcagacggcgcggaacauucaccuggacccuuagcgauuccgagagcaacgaaacacccggcggcuacugucugacgagauggaugcucaucgaggcugagcugaaaugcuuugggaauaccgccguugcuaaguguaacgaaaaacaugacgaggaguucugcgauaugcugcggcucuuugacuucaauaagcaggccauccgcagacugaaagcgccugcccagaugucuauucagcuuaucaacaaggcugugaaugcccugauuaacgaucaacucaucaugaagaaucaucugcgggacauuaugggaauccccuauugcaacuacuccaaauauuguuaccuuaaucacacagucaccggccgcacaagccugccuagaugcugucucgugucuaacgggagcuaccugaaugaaacccacuucuccgacgauaucgaacagcaggcugacaacaugauuacggagcugcuccaaaaggaguauauggaucggcagggaaaaacaccgcugggccuuguggaccuguuugucuucucuaccagcuuuuaccucaucuccauuuuccugcaccugguuaagauccccacccaucgccacgugauugggaaaccuugccccaagccucauagacuuaaucacaugggaaucuguagcugcggccucuauaaacaccccggcgugccggucaaguggaagcggugaggacuaguaauaaggaaacuguaugaaugucugugggcaggaagugaagagauccuucuguaaagguuuuuggaauuaugucugcugaauaauaaacuuuuuugaaauaauaaaucugguagaaaaaugagaucucaaaggcucuuuucagagccaccaaaaaaaaaaaaaaaaaaaaaaaaaaaaaaaaaaaaaaaaaaaaaaaaaaaaaaaaaaaaaaaaagaauu

SEQ ID NO: 25684 - RNA, 1778 nt, Artificial Sequence
  mRNA product Design b-4 (hSL-A64-N5) comprising derived and/or modified sequence from LASV(LASV035-NIG-2009;Clade II)__AIT17588__GPCmut3 (opt5)
aggagagucccgcagucggcguccagcggcucugcuuguucgugugugugucguugcaggccuuauucaagcuuaccaugggccagaucauuaccuucuuucaagaggugccccacgucaucgaagagguuaugaacauugugcugaucgcccucagccugcuugcuauucugaaggggaucuacaauguggccacaugcggacucuucggccuggucuccuuucuucugcucugugggagaucuugcagcacgaccuauaaaggaguguacgaacugcagacacuggagcucgacauggcgucccugaacaugaccaugccucuuucuuguacaaagaauaacagccaucacuauaucaugguuggcaaugaaaccgggcuggagcucacacugaccaacacguccauuaucaaucauaaauucugcaaccuuucugaugcucacaagaaaaaucuguacgaccaugcccucaugagcauuaucuccaccuuucaccugagcauuccgaacuucaaucaguaugaggccaugucuugugauuuuaacggaggcaagaucuccgugcaguacaaucugagccacgcuuaugccgucgacgcugccaaccauugcggcacaauugcgaauggggugcuccaaaccuucaugcggauggccuggggaggcucuuacaucgcucuggauuccgggaagggaagcugggacuguaucaugacaucuuaccaguaucuuauuauccagaacaccacgugggaagaucacugccaguuuucccgccccagcccuauuggcuaccuggggcuccugucccaaagaacacgggacaucuauauuucucgcagacggcgcggaaccuucacauggacccuuagcgauuccgagggcaacgaaacccccggcggguacugucugacaagauggaugcucaucgaggccgagcugaaaugcuuuggaaauacggcuguugccaaguguaacgaaaaacaugacgaggaguucugcgauaugcugcggcucuuugacuucaauaagcaggcgauccgcagacugaaagccccugcucagaugagcauucagcuuaucaacaaggccgugaaugcucugauuaacgaucaacucaucaugaagaaucaucugcgggacauuaugggcauccccuauugcaacuacucuaaauauuguuaccuuaaucacaccgucacagggaagaccucccugccucgcugcugucucgugagcaacggaucuuaccugaaugaaacacacuucagcgacgauaucgaacagcaggccgacaacaugauuaccgagcugcuccaaaaagaguauaucgauagacagggcaagacgccgcuggggcuuguggaccuguuugucuucuccacaucuuuuuaccucauuagcaucuuccugcaccugguuaaaauucccacccaucggcacgugaucggaaagccuugccccaaaccucaucgccuuaaucacaugggcauuuguuccugcggccucuauaagcaccccggggugccggucaaguggaaaagaugaggacuaguaauaaggaaacuguaugaaugucugugggcaggaagugaagagauccuucuguaaagguuuuuggaauuaugucugcugaauaauaaacuuuuuugaaauaauaaaucugguagaaaaaugagaucucaaaggcucuuuucagagccaccaaaaaaaaaaaaaaaaaaaaaaaaaaaaaaaaaaaaaaaaaaaaaaaaaaaaaaaaaaaaaaaaagaauu

SEQ ID NO: 25685 - RNA, 1778 nt, Artificial Sequence
  mRNA product Design b-4 (hSL-A64-N5) comprising derived and/or modified sequence from LASV(LASV1000-NIG-2009;Clade II)__AIT17782__GPCmut3 (opt5)
aggagagucccgcagucggcguccagcggcucugcuuguucgugugugugucguugcaggccuuauucaagcuuaccaugggccagaucauuaccuucuuucaagaggugccccacgucaucgaagagguuaugaacauugugcugaucgcccucagccugcuugcuauucugaaggggaucuacaauguggccacaugcggacucuucggccuggucuccuuucuucugcucugugggagaucuugcagcacgaccuauaaaggaguguacgaacugcagacacuggagcucgacauggcgucccugaacaugaccaugccucuuucuuguacaaagaauaacagccaucacuauaucaugguuggcaaugaaaccgggcuggagcucacacugaccaacacguccauuaucaaucauaaauucugcaaccuuucugaugcucacaagaaaaaucuguacgaccaugcccucaugagcauuaucuccaccuuucaccugagcauuccgaacuucaaucaguaugaggccaugucuugugauuuuaacggaggcaagaucuccgugcaguacaaucugagccacacauaugcugucgacgccgcuaaccauugcggcaccauugccaauggggugcuccaaacauucaugcggauggcguggggaggcucuuacaucgcccuggauuccgggaagggaagcugggacuguaucaugaccucuuaccaguaucuuauuauccagaacacgacaugggaagaucacugccaguuuucccgccccagcccuauuggcuaccuggggcuccugucccaaagaacccgggacaucuauauuucucgcagacggcgcggaacauucaccuggacccuuagcgauuccgagggcaacgaaacacccggcggguacugucugacgagauggaugcucaucgaggcugagcugaaaugcuuuggaaauaccgccguugcuaaguguaacgaaaaacaugacgaggaguucugcgauaugcugcggcucuuugacuucaauaagcaggccaucaaacgccugaagaccccugcgcagaugagcauucagcuuaucaacaaggccgugaaugcucugauuaacgaucaacucaucaugaaaaaucaccugagagacauuaugggcauccccuauugcaacuacucuaaguauuguuaccuuaaucacacagucacagggaaaaccucccugccucggugcugucucgugagcaacggaucuuaccugaaugaaacgcauuucagcgacgauaucgaacagcaggccgacaacaugauuacagagcugcuccaaaaggaguauaucgaucgccagggcaaaaccccgcuggggcuuguggaccuguuugucuucuccaccucuuuuuaccucauuagcaucuuccugcaccugguuaagauucccacacauagacacguggugggaaaaccuugccccaagccucaucggcuuaaucacaugggcaucuguuccugcggccucuauaagcaccccggggucccggugaaauggaagcgcugaggacuaguaauaaggaaacuguaugaaugucugugggcaggaagugaagagauccuucuguaaagguuuuuggaauuaugucugcugaauaauaaacuuuuuugaaauaauaaaucugguagaaaaaugagaucucaaaggcucuuuucagagccaccaaaaaaaaaaaaaaaaaaaaaaaaaaaaaaaaaaaaaaaaaaaaaaaaaaaaaaaaaaaaaaaaagaauu

SEQ ID NO: 25686 - RNA, 1778 nt, Artificial Sequence
  mRNA product Design b-4 (hSL-A64-N5) comprising derived and/or modified sequence from LASV(LASV221-NIG-2010;Clade II)__AIT17624__GPCmut3 (opt5)
aggagagucccgcagucggcguccagcggcucugcuuguucgugugugugucguugcaggccuuauucaagcuuaccaugggccagaucauuaccuucuuucaagaggugccccacgucaucgaagagguuaugaacauugugcugaucgcccucagccugcuugcuauucugaaggggaucuacaauguggccacaugcggacucuucggccuggucuccuuucuucugcucugugggagaucuugcagcacgaccuauaaaggaguguacgaacugcagacacuggagcucgacauggcgucccugaacaugaccaugccucuuucuuguacaaagaauaacagccaucacuauaucaugguuggcaaugaaaccgggcuggagcucacacugaccaacacguccauuaucaaucauaaauucugcaaccuuucugaugcucacaagaaaaaucuguacgaccaugcccucaugagcauuaucuccaccuuucaccugagcauuccgaacuucaaucaguaugaggccaugucuugugauuuuaacggaggcaagaucuccgugcaguacaaucugagccacacauaugcuauugacgccgcuaaccauugcggcaccaucgccaaugggguccuccaaacauucaugcggauggcguggggaggcucuuacaucgcccuggauuccgggaagggaagcugggacuguauuaugaccucuuaccaguaucuuaucauucagaacacgacaugggaagaucacugccaguuuucccgccccagcccuaucggcuaccuggggcuccugucccaaagaacccgggacauuuauaucucucgcagacggcgcggaacauucaccuggacccuuagcgauuccgagggcaacgaaacacccggcggguacugucugacgagauggaugcucaucgaggcugagcugaaaugcuuuggaaauaccgccguggcuaaguguaacgaaaaacaugacgaggaguucugcgauaugcugcggcucuuugacuucaauaagcaggccauucgcagacugaaaaccccugcgcagaugagcauccagcuuauuaacaaggccguuaaugcucugaucaacgaucaacucauuaugaagaaucaucugcgggacaucaugggcauccccuauugcaacuacucuaaauauuguuaccuuaaucacacagugacagggaagaccucccugccucgcugcugucucgucagcaacggaucuuaccugaaugaaacgcacuucagcgacgauauugaacagcaggccgacaacaugaucacagagaugcugcaaaaagaguauauggauagacagggcaagaccccgcucgggcugguggaccuuuuuguguucuccaccucuuuuuaccugauuagcaucuuccuccaccuggucaaaauucccacacaucggcacguuaucggaaagccuugccccaaaccucaucgccugaaucacaugggcauuuguuccugcggccuuuauaagcaccccggggugccggugaaguggaaaagaugaggacuaguaauaaggaaacuguaugaaugucugugggcaggaagugaagagauccuucuguaaagguuuuuggaauuaugucugcugaauaauaaacuuuuuugaaauaauaaaucugguagaaaaaugagaucucaaaggcucuuuucagagccaccaaaaaaaaaaaaaaaaaaaaaaaaaaaaaaaaaaaaaaaaaaaaaaaaaaaaaaaaaaaaaaaaagaauu

SEQ ID NO: 25687 - RNA, 1778 nt, Artificial Sequence
  mRNA product Design b-4 (hSL-A64-N5) comprising derived and/or modified sequence from LASV(LASV237-NIG-2010;Clade II)__AIT17638__GPCmut3 (opt5)
aggagagucccgcagucggcguccagcggcucugcuuguucgugugugugucguugcaggccuuauucaagcuuaccaugggccagaucauuaccuucuuucaagaggugccccacgucaucgaagagguuaugaacauugugcugaucgcccucagccugcuugcuauucugaaggggaucuacaauguggccacaugcggacucuucggccuggucuccuuucuucugcucugugggagaucuugcagcacgaccuauaaaggaguguacgaacugcagacacuggagcucgacauggcgucccugaacaugaccaugccucuuucuuguacaaagaauaacagccaucacuauaucaugguuggcaaugaaaccgggcuggagcucacacugaccaacacguccauuaucaaucauaaauucugcaaccuuucugaugcucacaagaaagaccuguacgaucaugcccucaugagcauuaucuccaccuuucaccugagcauuccgaauuucaaccaguaugaggccaugucuugugacuuuaauggaggcaagaucuccgugcaguacaaccugagccacacauaugcugucgaugccgcuaaucauugcggcaccauugccaacggggugcuccaaacauucaugcggauggcguggggaggcucuuacaucgcccuggacuccgggaagggaagcugggauuguaucaugaccucuuaccaguaucuuauuauccagaauacgacaugggaagaccacugccaguuuucccgccccagcccuauuggcuaccuggggcuccugucccaaagaacccgggauaucuauauuucucgcagacggcgcggaacauucaccuggacccuuagcgacuccgagggcaacgaaacacccggcggguacugucugacgagauggaugcucaucgaggcugagcugaaaugcuuuggaaacaccgccguugcuaaguguaaugaaaaacaugaugaggaguucugcgacaugcugcggcucuuugauuucaacaagcaggccauccgcagacugaaaaccccugcgcagaugagcauucagcuuaucaauaaggccgugaacgcucugauuaaugaccaacucaucaugaagaaccaucugcgggacauuaugggcauccccuauugcaauuacucuaaauauuguuaccuuaaccacacagucacagggaagaccucccugccucgcugcugucucgugagcaauggaucuuaccugaacgaaacgcacuucagcgaugacaucgaacagcaggccgauaauaugauuacagagcugcuccaaaaagaguauauggacagacagggcaagaccccgcuggggcuuguggaucuguuugucuucuccaccucuuuuuaccucaucagcauuuuccugcaccugaucaaaauucccacacaucggcacaucaccggaaagccuugccccaaaccucaucgccuuaaccacaugggcauuuguuccugcggccucuauaagcaccccgggguuccggugaaguggaaaagaugaggacuaguaauaaggaaacuguaugaaugucugugggcaggaagugaagagauccuucuguaaagguuuuuggaauuaugucugcugaauaauaaacuuuuuugaaauaauaaaucugguagaaaaaugagaucucaaaggcucuuuucagagccaccaaaaaaaaaaaaaaaaaaaaaaaaaaaaaaaaaaaaaaaaaaaaaaaaaaaaaaaaaaaaaaaaagaauu

SEQ ID NO: 25688 - RNA, 1778 nt, Artificial Sequence
  mRNA product Design b-4 (hSL-A64-N5) comprising derived and/or modified sequence from LASV(LASV253-NIG-2011;Clade II)__AIT17670__GPCmut3 (opt5)
aggagagucccgcagucggcguccagcggcucugcuuguucgugugugugucguugcaggccuuauucaagcuuaccaugggccagaucauuaccuucuuucaagaggugccccacgucaucgaagagguuaugaacauugugcugaucgcccucagccugcuugcuauucugaaggggaucuacaauguggccacaugcggacucuucggccuggucuccuuucuucugcucugugggagaucuugcagcacgaccuauaaaggaguguacgaacugcagacacuggagcucgacauggcgucccugaacaugaccaugccucuuucuuguacaaagaauaacagccaucacuauaucaugguuggcaaugaaaccgggcuggagcucacacugaccaacacguccauuaucaaucauaaauucugcaaccuuucugaugcucacaagaaaaaucuguacgaccaugcccucaugagcauuaucuccaccuuucaccugagcauuccgaacuucaaucaguaugaggccaugucuugugauuuuaacggaggcaagaucuccgugcaguacaaucugagccacacauaugcugucgacgccgcuaaccauugcggcaccauugccaauggggugcuccaaacauucaugcggauggcguggggaggcucuuacaucgcccuggauuccgggaagggaagcugggacuguaucaugaccucuuaccaguaucuuauuauccagaacacgacaugggaagaucacugccaguuuucccgccccagcccuauuggcuaccuggggcuccugucccaaagaacccgggacaucuauauuucucgcagacggcgcggaacauucaccuggacccuuagcgauuccgagggcaacgaaacacccggcggguacugucugacgagauggaugcucaucgaggcugagcugaaaugcuuuggaaauaccgccguugcuaaguguaacgaaaaacaugacgaggaguucugcgauaugcugcggcucuuugacuucaauaagcaggccauccgcagacugaaagcgccugcccagaugagcauucagcuuaucaacaaggcugugaaugcccugauuaacgaucaacucaucaugaagaaucaucugcgggacauuaugggcauccccuauugcaacuacucuaaauauuguuaccuuaaucacacagucaccgggcgcacaucccugccuagaugcugucucgugagcaacggaucuuaccugaaugaaacccacuucagcgacgauaucgaacagcaggcugacaacaugauuacggagcugcuccaaaaggaguauaucgaucggcagggcaaaacaccgcuggggcuuguggaccuguuugucuucuccaccucuuuuuaccucauuagcaucuuccugcaccugguuaagauucccacccaucgccacaucauuggaaaaccuugccccaagccucauagacuuaaucacaugggcaucuguuccugcggccucuauaaacaccccggggugccggugaaguggaagcggugaggacuaguaauaaggaaacuguaugaaugucugugggcaggaagugaagagauccuucuguaaagguuuuuggaauuaugucugcugaauaauaaacuuuuuugaaauaauaaaucugguagaaaaaugagaucucaaaggcucuuuucagagccaccaaaaaaaaaaaaaaaaaaaaaaaaaaaaaaaaaaaaaaaaaaaaaaaaaaaaaaaaaaaaaaaaagaauu

SEQ ID NO: 25689 - RNA, 1778 nt, Artificial Sequence
  mRNA product Design b-4 (hSL-A64-N5) comprising derived and/or modified sequence from LASV(LASV254-NIG-2011;Clade II)__AIT17674__GPCmut3 (opt5)
aggagagucccgcagucggcguccagcggcucugcuuguucgugugugugucguugcaggccuuauucaagcuuaccaugggccagaucauuaccuucuuucaagaggugccccacgucaucgaagagguuaugaacauugugcugaucgcccucagccugcuugcuauucugaaggggaucuacaauguggccacaugcggacucuucggccuggucuccuuucuucugcucugugggagaucuugcagcacgaccuauaaaggaguguacgaacugcagacacuggagcucgacaugaccaaccugaauaugacaaugccucuuuccuguaccaagaacaauucucaucacuauaucaugguuggcaacgaaacagggcuggagcucacccugacgaauaccagcauuaucaaccauaaauucugcaaucuuuccgaugcgcacaagaaaaaccuguacaaucaugcucucaugucuauuaucagcacauuucaccuguccauuccgaacuucaaucaguaugaggccaugagcugugacuuuaacggaggcaagaucucugugcaguacaaucugucccacagcuaugccgucgaugcugccaaccauugcggcaccauugcuaacggggugcuccaaacauucaugcggauggccuggggaggcucuuacaucgcgcuggacuccgggaagggaaauugggauuguaucaugaccagcuaccaguaucuuauuauccagaacacgacaugggaagaccacugccaguuuucucgccccuccccuauuggcuaccuggggcuccugagccaaagaacccgggauaucuauauuucccgcagacggcgcggaacauucaccuggacccuuucugacagcgagggcaaugaaacacccggcggguacugucugacgagauggaugcucaucgaggccgagcugaaaugcuuuggaaacaccgcuguugccaaguguaaugaaaaacaugaugaggaguucugcgacaugcugcggcucuuugauuucaacaagcaggcuauccgcagacugaaaaccccugcccaggcgaauauucagcuuaucaacaaggccgugaaugcucugauuaacgaccaacucaucaugaagaaucaucugcgggauauuaugggcauccccuauugcaacuacuccaaauauuguuaccuuaaucacacagucacagggaagaccagccugccucgcugcugucucgugucuaacggauccuaccugaaugaaacgcacuucagcgacgacaucgaacagcaggccgauaacaugauuacagagcugcuccaaaaagaguauauggacagacagggcaagaccccgcuggggcuuguggaucuguuugucuucucuaccagcuuuuaccucaucuccauuuuccugcaccugguuaaaauccccacacaucggcacgugauuggaaagccuugccccaaaccucaucgccuuaaccacaugggcaucuguucuugcggccucuauaagcaccccggggugccggucaaguggaaaagaugaggacuaguaauaaggaaacuguaugaaugucugugggcaggaagugaagagauccuucuguaaagguuuuuggaauuaugucugcugaauaauaaacuuuuuugaaauaauaaaucugguagaaaaaugagaucucaaaggcucuuuucagagccaccaaaaaaaaaaaaaaaaaaaaaaaaaaaaaaaaaaaaaaaaaaaaaaaaaaaaaaaaaaaaaaaaagaauu

SEQ ID NO: 25690 - RNA, 1778 nt, Artificial Sequence
  mRNA product Design b-4 (hSL-A64-N5) comprising derived and/or modified sequence from LASV(Nig08-A19;Clade III)__ADU56618__GPCmut3 (opt5)
aggagagucccgcagucggcguccagcggcucugcuuguucgugugugugucguugcaggccuuauucaagcuuaccaugggccagaucgugaccuucuuucaagaggucccccacguuauugaagaggugaugaacaucgugcugauugcccucagcauccuggcuauucuuaaggggcuguacaauaucgccacaugcggacucaucggccuggucacguuccuucugcucuccgggagaucuuguagcaugaccuauaaaggaguguacgaacugcagacacuggagcucaacaugaauacccugaacaugacaaugccucuuuccugcaccaagaauaacucucaucacuauauuaugguuggcaaugaaacagggcuggagcucacccugacgaacaccagccuucugcaucacaaauuuuguaaucucuccgacgcgcauaagaaaaaccuguacgaucacacacugaugucuaucauuagcaccuuccaccucuccaucccgaauuuuaaccaguaugaggcuaugagcugcgacuucaauggaggcaagauuacagugcaguacaaccugucucauuccuaugccaucgaugccgcuaaucacuguggcaccgucgccaacggggugcuucaaacguuuaugcggauggcuuggggaggcagcuacauugcccuggacucugggcgcggaaagugggauugcaucaugacauccuaccaguaucucaucauucagaacaccacaugggaagaccauugucaguucagcagacccucuccuaucggcuaccuggggcuucugucccaacggacccgcgauauuuauaucagcagacggcgcagaggaaccuuuacauggacgcucuccgacucugagggcaaugaaacccccggcggguacugccugacacgguggaugcugauugaggcggagcucaaauguuucggaaacaccgccguugcuaagugcaaugaaaaacacgaugaggaauuuugugacaugcugcgccuuuucgauuuuaacaagcaggccaucagacggcugaaagcuccugcccagaugagcauccagcucauuaauaaggcggugaacgcccugaucaaugaccaacuuauuaugaagaaccaucugcgcgauaucaugggcauucccuauugcaauuacuccaaauauugcuaccucaaccacacaagcaccgggagaacgucucugccucgguguugccuggucuccaauggaagcuaccucaacgagacacacuucucugacgacaucgaacagcaggcugauaauaugaucaccgagaugcugcaaaaggaguaucuugaccgccagggcaaaaccccgcuggggcucguggaucuguucguguuuagcacauccuucuaccugauuucuaucuuucuucaucucgucaagauucccacccacagacauaucguuggaaaaccuugucccaagccucaccggcugaaccacaugggcauuugcagcuguggccuguauaaacagcccggggugccggugagauggaagcgcugaggacuaguaauaaggaaacuguaugaaugucugugggcaggaagugaagagauccuucuguaaagguuuuuggaauuaugucugcugaauaauaaacuuuuuugaaauaauaaaucugguagaaaaaugagaucucaaaggcucuuuucagagccaccaaaaaaaaaaaaaaaaaaaaaaaaaaaaaaaaaaaaaaaaaaaaaaaaaaaaaaaaaaaaaaaaagaauu

SEQ ID NO: 25691 - RNA, 1781 nt, Artificial Sequence
  mRNA product Design b-4 (hSL-A64-N5) comprising derived and/or modified sequence from LASV(G1180-SLE-2010;Clade IV)__AIT17168__GPCmut3 (opt5)
aggagagucccgcagucggcguccagcggcucugcuuguucgugugugugucguugcaggccuuauucaagcuuaccaugggccagaucgugaccuucuuucaagaggucccccacguuauugaagaggugaugaacaucgugcugauugcccucagcauccuggcuguccuuaaggggcuguacaauuucgccacaugcggacucgugggccugcuuacguuucugcuccugugugggagauccugcaccgcgucucgguauaaaggaguuuacgaacugcagacacucgagcugaacauggaaacccuuaauaugacaaugccucugagcuguaccaagaacaauucccaucacuauauuauggugggcaacgagacagggcucgagcugacccuuacgaauaccucuaucaucaaccauaaauucugcaaucugagcgacgcucacaagaaaaaccucuacgaucaugcccugauguccauuaucucuacauuucaccugagcauuccgaauuucaaccaguaugaagccauguccugugacuuuaauggaggcaagaucagcguccaguacaaccucucucacuccuaugcuggcgaugccgcuaaucauugcgggaccguggccaacggaguucugcaaacauucaugcgcauggcguggggcgggagcuacauugcccuugacucuggacacggcuccugggauuguaucaugaccagcuaccaguaucugauuauccagaacacgacaugggaggaccauugccaguuuucuagacccuccccuaucggguaccucggacugcuuagccaacggacccgcgauauuuauaucuccagacggcgcagaggcacauucaccuggacccugucugacagcgaaggcaaggauacacccgggggauacugucucacgcgguggaugcugauugaggcugagcugaaaugcuuuggcaauaccgccguggcuaaguguaacgaaaaacacgacgaggaguucugcgauaugcuccgccuguuugacuucaauaagcaggccauccagagacuuaaagcgccugcccagauguccauucaacugaucaacaaggcugucaaugcccucaucaacgaucagcugauuaugaagaaucaccuucgggacaucauggggauucccuauugcaacuacagcaaauauuguuaccugaaucauacaaccacaggaaagaccucucucccuaaaugcugucugguguccaacggcagcuaccugaaugaaacgcacuucucugacgauaucgaacagcaagcugacaacaugauuacagagaugcuccagaaggaguauauggaacgccaggggaaaaccccgcugggacuuguggaucuguuugucuucagcaccuccuuuuaccucaucucuaucuuccugcaucugguuaagauucccacacacagacauaucgugggcaaaagcugcccuaagccccaccggcuuaaucacaugggcauuuguuccugcgggcucuauaagcagccuggagugcccgucaaauggaagcgcugaggacuaguaauaaggaaacuguaugaaugucugugggcaggaagugaagagauccuucuguaaagguuuuuggaauuaugucugcugaauaauaaacuuuuuugaaauaauaaaucugguagaaaaaugagaucucaaaggcucuuuucagagccaccaaaaaaaaaaaaaaaaaaaaaaaaaaaaaaaaaaaaaaaaaaaaaaaaaaaaaaaaaaaaaaaaagaauu

SEQ ID NO: 25692 - RNA, 1781 nt, Artificial Sequence
  mRNA product Design b-4 (hSL-A64-N5) comprising derived and/or modified sequence from LASV(G1442-SLE-2011;Clade IV)__AIT17180__GPCmut3 (opt5)
aggagagucccgcagucggcguccagcggcucugcuuguucgugugugugucguugcaggccuuauucaagcuuaccaugggccagaucgugaccuucuuucaagaggucccccacguuauugaagaggugaugaacaucgugcugauugcccucagcauccuggcuguccuuaaggggcuguacaauguggccacaugcggacucauuggccugguuacguuccuucugcucugugggagauccugcaccacaacccuguauaaaggaguguacgaacugcagacacucgagcugaacauggaaacccuuaauaugacaaugccucugucuuguaccaagaacaauagccaucacuauauccgggucggcaacgagacggggcucgagcugacccuuacaaauaccuccaucauuaaccauaaauuuugcaaucugucugacgcgcacaagaaaaaccucuacgaucaugcucugaugagcaucauuuccacauuccaccugucuaucccgaauuuuaaccaguaugaagccaugagcugugacuucaauggaggcaagauuuccgugcaguacaaccucagccacucuuaugccggcgaugcugccaaucauugcgggaccguugcuaacggagugcugcaaacguuuaugcgcauggccuggggcggguccuacaucgcgcuugacagcggaagaggcaacugggauuguauuaugacaucuuaccaguaucugaucauccagaauaccacaugggacgaucacugccaguucucccggcccagcccuauuggguaccucggacugcuuucucaacgcaccagagacgucuauaucucccggcgcagacggggcaccuuuacauggacgcugagcgauuccgagggcaaggacacccccgggggauacugucucacacgcuggaugcugauugaagccgagcugaaaugcuucggcaacaccgcuguggccaaguguaaugagaaacaugaugaagaguuuugcgacaugcucagacuguucgauuuuaacaagcaggcuauccagcggcuuaaagccccugcgcagaugucuauucaacugaucaauaaggccgugaacgcucucaucaaugaccagcugauuaugaagaaccaccuucgcgacaucauggggauucccuauugcaauuacagcaaauauuguuaccugaacaauacagccaccggaaagacgucccucccuaaaugcugucugaucagcaacggcucuuaccugaaugaaacacacuucuccgaugacauugagcaggaagcugauaacaugaucaccgagaugcuccaaaaggaguauauggaaagacaggggaaaaccccgcugggacuugucgaccuguucguuuuuagcacaucuuucuaccucaucagcauuuuucugcaucuggugaagauccccacccaccggcauauugugggcaaauccugcccuaagccccaccgccuuaaucauaugggcaucuguucuugcgggcucuauaagcagccuggaguccccgugagauggaaacggugaggacuaguaauaaggaaacuguaugaaugucugugggcaggaagugaagagauccuucuguaaagguuuuuggaauuaugucugcugaauaauaaacuuuuuugaaauaauaaaucugguagaaaaaugagaucucaaaggcucuuuucagagccaccaaaaaaaaaaaaaaaaaaaaaaaaaaaaaaaaaaaaaaaaaaaaaaaaaaaaaaaaaaaaaaaaagaauu

SEQ ID NO: 25693 - RNA, 1781 nt, Artificial Sequence
  mRNA product Design b-4 (hSL-A64-N5) comprising derived and/or modified sequence from LASV(G3010-SLE-2013;Clade IV)__AIT17344__GPCmut3 (opt5)
aggagagucccgcagucggcguccagcggcucugcuuguucgugugugugucguugcaggccuuauucaagcuuaccaugggccagaucgugaccuucuuucaagaggucccccacguuauugaagaggugaugaacaucgugcugauugcccucagcauccuggcuguccuuaaggggcuguacaauuucgccacaugcggacucgugggccugguuacguuucuucugcucugugggagauccugcaccacaucucuguauaaaggaguguacgaacugcagacccucgagcugaacauggaaacacuuaauaugaccaugccucugagcuguacaaagaacaauucccaucacuauauuauggucggcaacgagaccgggcucgagcugacgcuuaccaauacaucuaucaucaaccauaaauucugcaaucugagcgacgcgcacaagaaaaaccucuacaaucaugcucugauguccauuaucucuaccuuucaccugagcauuccgaacuucaaucaguaugaagccauguccugugauuuuaacggaggcaagaucagcgugcaguacaaucucucucacuccuaugccggcgacgcugccagccauugcgggacaguugcuaacggagugcugcaaaccuucaugcggauggccuggggcgggucuuacauugcgcuugauuccggauacggcaagugggacuguaucaugacgagcuaucaguaccugauuauccagaacacaaccugggaggaucacugccaguuuucucgccccuccccuaucggguaucucggacugcuuagccaaagaacacgggacauuuacaucucccgcagacggcgcggcaccuucaccuggacacugucugauagcgaaggcaaagacacgcccgggggauauugucucaccagauggaugcugauugaggccgagcugaagugcuuuggcaauacagcugucgccaaauguaacgaaaagcaugaugaggaguucugcgacaugcuccggcuguuugauuucaauaaacaggcuauccagcgccuuaagaccccugcccagauguccauucaacugaucaacaaggcggugaaugcccucaucaacgaccagcugauuaugaaaaaucaccuuagagauaucauggggauucccuacugcaacuauagcaaguacuguuaccugaaucacacaaccacgggaaaaacaucucucccuaagugcugucugguguccaacggcagcuaucugaaugaaacccauuucucugacgacaucgaacagcaagcugauaacaugauuaccgagaugcuccagaaagaguacauggaacggcaggggaagacaccgcugggacuugucgaccuguuuguuuucagcaccuccuuuuaucucaucucuaucuuccugcaccuggugaaaauucccacacaucgccacaucgugggcaagagcugcccuaagccccauagacuuaaucacaugggcauuuguuccugcgggcucuacaaacagccuggaguccccgugcgguggaagcgcugaggacuaguaauaaggaaacuguaugaaugucugugggcaggaagugaagagauccuucuguaaagguuuuuggaauuaugucugcugaauaauaaacuuuuuugaaauaauaaaucugguagaaaaaugagaucucaaaggcucuuuucagagccaccaaaaaaaaaaaaaaaaaaaaaaaaaaaaaaaaaaaaaaaaaaaaaaaaaaaaaaaaaaaaaaaaagaauu

SEQ ID NO: 25694 - RNA, 1781 nt, Artificial Sequence
  mRNA product Design b-4 (hSL-A64-N5) comprising derived and/or modified sequence from LASV(G502-SLE-2009;Clade IV)__AIT17126__GPCmut3 (opt5)
aggagagucccgcagucggcguccagcggcucugcuuguucgugugugugucguugcaggccuuauucaagcuuaccaugggccagaucgugaccuucuuucaagaggucccccacguuauugaagaggugaugaacaucgugcugauugcccucagcauccuggcuguccuuaaggggcuguacaauuucgccacaugcggacucgugggccugcuuacguuucugcuccugugugggagauccugcaccacaggacuguauaaaggcguuuacgaacuccagacccuggagcuuaacauggaaacacugaauaugaccaugccucucucuuguacaaagaacaauagccaucacuauauuaugguggggaacgagaccggacuggagcuuacgcugaccaauacauccaucaucaaccauaaauucugcaaucucucugacgcgcacaagaaaaaccuguacgaucaugcucugaugagcauuaucuccaccuuucaccucucuauuccgaauuucaaccaguaugaagccaugagcugugacuuuaauggcggcaagaucuccguccaguacaaccugagccacucuuaugccggggaugcugccgaccauugcggaacaguggcuaauggcguucuucaaaccuucaugcggauggccuggggaggguccuacauugcgcuggauagcggccgcgggagaugggacuguaucaugacgucuuaccaguaucucauuauccagaacacaaccugggaggaucacugccaguuuucccggcccagcccuaucggauaccugggccuucugucucaacgcacaagagacauuuauaucucccggcgcagacggggcaccuucaccuggacacucagcgauuccgaagggaaggacacgcccggaggcuacugucugacccgcuggaugcugauugaggccgagcucaaaugcuuugggaacacagcuguggccaaguguaaugaaaaacaugaugaggaguucugcgacaugcugagacuuuuugauuucaacaagcaggcuauccagcggcugaaagccccugcgcagaugucuauucaacucaucaauaaggccgucaacgcucugaucaaugaccagcuugugaugaagaaccaucugcgcgacauuaugggaauccccuauugcaauuacagcagauauuguuaccucaaccacaccacaaccggccggacgucccugccuaaaugcugucuggugagcaaugggucuuaccucaacgaaacacacuucuccgaugacauugaacagcaagccgauaauaugaucaccgagaugcugcagaaggaguauauggaacgccagggaaaaaccccgcuuggccuggucgaccucuuuguuuucagcacaucuuuuuaccugauuagcaucuuccugcaccuugugaagauccccacccauagacacauugugggcaaauccugcccuaagccccaucggcucaaccacauggggaucuguucuugcggacuguauaaacagccuggcguccccgugaaguggaagagaugaggacuaguaauaaggaaacuguaugaaugucugugggcaggaagugaagagauccuucuguaaagguuuuuggaauuaugucugcugaauaauaaacuuuuuugaaauaauaaaucugguagaaaaaugagaucucaaaggcucuuuucagagccaccaaaaaaaaaaaaaaaaaaaaaaaaaaaaaaaaaaaaaaaaaaaaaaaaaaaaaaaaaaaaaaaaagaauu

SEQ ID NO: 25695 - RNA, 1781 nt, Artificial Sequence
  mRNA product Design b-4 (hSL-A64-N5) comprising derived and/or modified sequence from LASV(G733-SLE-2010;Clade IV)__AIT17154__GPCmut3 (opt5)
aggagagucccgcagucggcguccagcggcucugcuuguucgugugugugucguugcaggccuuauucaagcuuaccaugggccagaucgugaccuucuuucaagaggucccccacguuauugaagaggugaugaacaucgugcugauugcccucagcauccuggcuguccuuaaggggcuguacaauuucgccacaugcggaauugugggccucguuuccuuucugcuucugugugggagaucuugcacgaccagccucuauaaaggaguguacgaacugcagacacuggagcucaacauggaaacccugaauaugacaaugccucuuuccuguaccaagaacaauucucaucacuauaucauggucggcaacgagacagggcuggagcucacccugacgaauaccagcaucauuaaccauaaauucugcaaucuuuccgacgcgcacaagaaaaaccuguacgaucaugcucucaugucuaucauuagcacauuucaccuguccaucccgaauuucaaccaguaugaagccaugagcugugacuuuaauggaggcaagauuucugugcaguacaaccugucccacagcuaugccggcgaugcugccaaucauugcgggaccaucgcuaacggaguucuccaaacauucaugcggauggccuggggcgggucuuacauugcgcuggacuccggacgcgauagaugggacuguaucaugaccagcuaccaguaucuuaucauucagaacacgacaugggaggaucacugccaguuuucucggcccuccccuaucggcuaccuggggcuccugagccaacgcaccagagacauuuauaucucccggcgcagacggggaacauucaccuggacccuuucugauagcgaaggcaaggacacacccggcggguacugucugacgcgcuggaugcucauugaggccgagcugaaaugcuuuggaaauaccgcuguggccaaguguaacgaaaaacaugaugaggaguucugcgacaugcugagacucuuugauuucaauaagcaggcuauccagcggcugaaagccccugcgcagauguccauccaacuuauuaacaaggccgucaaugcucugaucaacgaccagcucauuaugaagaaucaucugcgcgacaucaugggcauucccuauugcaacuacagcaaauauuguuaccuuaaucacacaaccacagggaagaccucucugccuaaaugcugucucguguccaacggaagcuaccugaaugaaacgcacuucucugaugacaucgaacagcaagccgauaacaugaucacagagaugcugcagaaggaguauauggaaagacagggcaaaaccccgcucgggcugguggaccuuuuugucuucagcaccuccuuuuaccugauuucuaucuuccuccaccugguuaagauucccacacaucggcacguggugggaaaaagcugcccuaagccccaucgccugaaucacaugggcaucuguuccugcggccuuuaugggcagccuggaguccccgugaaguggaaaagaugaggacuaguaauaaggaaacuguaugaaugucugugggcaggaagugaagagauccuucuguaaagguuuuuggaauuaugucugcugaauaauaaacuuuuuugaaauaauaaaucugguagaaaaaugagaucucaaaggcucuuuucagagccaccaaaaaaaaaaaaaaaaaaaaaaaaaaaaaaaaaaaaaaaaaaaaaaaaaaaaaaaaaaaaaaaaagaauu

SEQ ID NO: 25696 - RNA, 1781 nt, Artificial Sequence
  mRNA product Design b-4 (hSL-A64-N5) comprising derived and/or modified sequence from MOPV/LASV reassortant(IGS-1;Clade IV)__AFY05576__GPCmut3 (opt5)
aggagagucccgcagucggcguccagcggcucugcuuguucgugugugugucguugcaggccuuauucaagcuuaccaugggccagaucgugaccuucuuucaagaggucccccacguuauugaagaggugaugaacaucgugcugauugcccucagcguccuggcugugcuuaaggggcuguacaauuucgccacaugcggacucguuggccuggugacguuucuucugcucugugggagauccugcaccacaucucuguauaaaggagucuacgaacugcagacccucgagcugaacauggaaacacuuaauaugaccaugccucugagcuguacaaagaacaauucccaucacuauaucauggugggcaacgagaccgggcucgagcugacgcuuaccaauacaucuauuaucaaccauaaauucugcaaucugagcgacgcgcacaagaaaaaccucuacgaucaugcucugauguccaucauuucuaccuuucaccugagcaucccgaauuucaaccaguaugaagccauguccugugacuuuaauggaggcaagauuagcguucaguacaaccucucucacuccuaugccggcgaugcugccaaucauugcgggacaguggcuaacggaguccugcaaaccuucaugcggauggccuggggcgggagcuacaucgcgcuugacucuggacgcggcaacugggauuguauuaugacguccuaccaguaucugaucauucagaauacaaccugggaggaccacugccaguuuagcagacccucuccuaucggguaccucggacugcuuucccaacggacacgcgauaucuauauuagcagacggcgcagaggcaccuucaccuggacacuguccgacucugaaggcgaggauacgcccgggggauacugucucacccgguggaugcugaucgaggccgaacugaagugcuuuggcaacacagcuguggccaaauguaaugagaagcaugacgaagaguucugcgauaugcuccgccuguuugacuucaacaaacaggcuauucagagacuuaaggccccugcgcagaugagcauccaacugauuaauaaagccgugaacgcucucaucaaugaucagcugaucaugaagaaccaccuucgggacauuauggggauccccuauugcaauuacuccaaguauuguuaccugaaccacaccacaaccggacgcacgagccucccuaaaugcugucuggucucuaauggcuccuaccugaacgaaacacauuucagcgacgauauugagcagcaagccgacaauaugaucaccgagaugcuccagaaggaauauauggagagacaggggaaaaccccgcugggacuuguugaucuguuuguguucucuaccagcuuuuaccucauuuccaucuuccugcaccuggugaagauccccacacaucggcacauugucggcaaaucuugcccuaagccccaucgccuuaaccacaugggcaucuguagcugcgggcucuauaaacagccuggagugcccguuaaguggaagagaugaggacuaguaauaaggaaacuguaugaaugucugugggcaggaagugaagagauccuucuguaaagguuuuuggaauuaugucugcugaauaauaaacuuuuuugaaauaauaaaucugguagaaaaaugagaucucaaaggcucuuuucagagccaccaaaaaaaaaaaaaaaaaaaaaaaaaaaaaaaaaaaaaaaaaaaaaaaaaaaaaaaaaaaaaaaaagaauu

SEQ ID NO: 25697 - RNA, 1781 nt, Artificial Sequence
  mRNA product Design b-4 (hSL-A64-N5) comprising derived and/or modified sequence from LASV(LM765-SLE-2012;Clade IV)__AIT17814__GPCmut3 (opt5)
aggagagucccgcagucggcguccagcggcucugcuuguucgugugugugucguugcaggccuuauucaagcuuaccaugggccagaucgugaccuucuuucaagaggucccccacguuauugaagaggugaugaacaucgugcugauugcccucagcauccuggcuguccuuaaggggcuguacaauuucgccacaugcggacucgugggccugguuacguuucuucugcucugugggagauccugcaccacaucucuguauaaaggaguguacgaacugcagacccucgagcugaacauggaaacacuuaauaugaccaugccucugagcuguacaaagaacaauucccaucacuauauuauggucggcaacgagaccgggcucgagcugacgcuuaccaauacaucuaucaucgaccauaaauucugcaaccugagcgaugcgcaccggaagaaucucuacgaccaugcucugauguccauuaucucuaccuuucaccugagcauuccgaacuucaaucaguaugaagccauguccugugauuuuaacggaggcaaaaucagcgugcaguacaaucucucucacuccuaugccaaggacgcugccgaucauugcggcacaguugcuaacggggugcugcaaaccuucaugcgcauggccuggggaggcagcuacauugcgcuugacucugggagaggacggugggauuguaucaugacguccuaccaguaucugauuauccagaauacaaccugggaggaccacugccaguuuagccgccccucuccuaucggcuaccucgggcugcuuucccaaagaacacgggauauuuauaucagccgcagacggcgcggaaccuucaccuggacacuguccgacucugaaggcaaggauacgcccggcggguacugucucaccagauggaugcugauugaggccgagcugaaaugcuuuggaaacacagcugucgccaaguguaacgaaaaacaugacgaggaguucugcgauaugcuccggcuguuugacuucaauaagcaggcuauccagcgccuuaaagccccugcgcagaugagcauucaacugaucaacaaggccgugaaugcucucaucaacgaccagcugauuaugaagaaucaccuuagagauaucaugggcauucccuauugcaacuacuccaaauauuguuaccugaaucacaccacaaccgggaagacgagccucccuaaaugcugucuggugucuaacggauccuaccugaaugaaacacauuucagcgacgauaucgaacagcaagccgacaacaugauuaccgagaugcuccagaaggaguauauggaacggcagggcaaaaccccgcuggggcuugucgaucuguuuguuuucucuaccagcuuuuaccucaucuccaucuuccugcaccuggugaagauucccacacaucgccacaucgugggaaaaccuugccccaagccucauagacuuaaucacaugggcauuuguucuugcggccucuauaagcagcccggggucccggugaaauggaagcggugaggacuaguaauaaggaaacuguaugaaugucugugggcaggaagugaagagauccuucuguaaagguuuuuggaauuaugucugcugaauaauaaacuuuuuugaaauaauaaaucugguagaaaaaugagaucucaaaggcucuuuucagagccaccaaaaaaaaaaaaaaaaaaaaaaaaaaaaaaaaaaaaaaaaaaaaaaaaaaaaaaaaaaaaaaaaagaauu

SEQ ID NO: 25698 - RNA, 1781 nt, Artificial Sequence
  mRNA product Design b-4 (hSL-A64-N5) comprising derived and/or modified sequence from LASV(LM776-SLE-2012;Clade IV)__AIT17824__GPCmut3 (opt5)
aggagagucccgcagucggcguccagcggcucugcuuguucgugugugugucguugcaggccuuauucaagcuuaccaugggccagaucgugaccuucuuucaagaggucccccacguuauugaagaggugaugaacaucgugcugauugcccucagcauccuggcuguccuuaaggggcuguacaauuucgccacaugcggacucgugggccugguuacguuucuucugcucugugggagauccugcaccacaucuguguauaaaggagucuacgaacugcagacccuggagcucaacauggaaacacugaauaugaccaugccucuuagcuguacaaagaacaauucccaucacuauauuauggugggcaacgagaccgggcuggagcucacgcugaccaauacaucuaucaucaaccauaaauucugcaaucuuagcgacgcgcacaagaaaaaccuguacgaucaugcucucauguccauuaucucuaccuuucaccugagcauuccgaauuucaaccaguaugaagccauguccugugacuuuaauggaggcaagaucagcguucaguacaaccugucucacuccuaugccggcgaugcugccaaucauugcgggacaguggcuaacggaguccuccaaaccuucaugcggauggccuggggcgggagcuacauugcgcuggacucuggacacggcaagugggauuguaucaugacguccuaccaguaucuuauuauccagaacacaaccugggaggaccauugccaguuuagccgccccucuccuaucggguaccugggacuccugucccaaagaacacgggauauuuauaucagccgcagacggcgcggcaccuucaccuggacacuuuccgacucugaaggcaaagauacgcccgggggauacugucugaccagauggaugcucauugaggccgagcugaagugcuuuggcaauacagcuguggccaaauguaacgaaaagcacgacgaggaguucugcgauaugcugcggcucuuugacuucaauaaacaggcuauccagcgccugaaggccccugcgcagaugagcauucaacuuaucaacaaggccgugaaugcucugaucaacgaucagcucauuaugaaaaaucaccugagagacaucauggggauucccuauugcaacuacuccaaguauuguuaccuuaaucauaccacaaccggaaaaacgagccugccuaagugcugucucgucucuaacggcuccuaccugaaugaaacacacuucagcgacgauaucgaacagcaagccgacaacaugauuaccgagaugcugcagaaagaguauauggaacggcaggggaagaccccgcucggacugguugaucuuuuuguguucucuaccagcuuuuaccugaucuccaucuuccuccaucuggugaaaauucccacacaccgccauaucgucggcaagucuugcccuaagccccacagacugaaucacaugggcauuuguagcugcgggcuuuauaaacagccuggagugcccguucgguggaagcgcugaggacuaguaauaaggaaacuguaugaaugucugugggcaggaagugaagagauccuucuguaaagguuuuuggaauuaugucugcugaauaauaaacuuuuuugaaauaauaaaucugguagaaaaaugagaucucaaaggcucuuuucagagccaccaaaaaaaaaaaaaaaaaaaaaaaaaaaaaaaaaaaaaaaaaaaaaaaaaaaaaaaaaaaaaaaaagaauu

SEQ ID NO: 25699 - RNA, 1781 nt, Artificial Sequence
  mRNA product Design b-4 (hSL-A64-N5) comprising derived and/or modified sequence from LASV(Mad39;Clade IV)__ANH09722__GPCmut3 (opt5)
aggagagucccgcagucggcguccagcggcucugcuuguucgugugugugucguugcaggccuuauucaagcuuaccaugggccagaucgugaccuucuuucaagaggucccccacguuauugaagaggugaugaacaucgugcugauugcccucagcauccuggcuguccuuaaggggcuguacaauguggccacaugcggacucauuggccugguuacguuccuucugcucugugggagauccugcaccacaacccuguauaaaggaguguacgaacugcaggcgcucgagcugaacauggaaacacuuaauaugaccaugccucugucuuguacaaagaacaauagccaucacuauauccgggucggcaacgagaccgggcucgagcugacgcuuaccaauacaucccugaucaaccauaaauuuugcaaucucucugacgcucacaagaaaaaccuguacgaucaugcccugaugagcauuaucuccaccuuccaccucucuauuccgaauuuuaaccaguaugaagccaugagcugugacuucaaugauggaaagaucuccgugcaguacaaccugagccacacauaugcuggcgacaccgccaaucauugcggcacgguugcuaacggggugcuucaaacauuuaugcgcauggccuggggaggcucuuacauugcgcuggauuccgggagaggaggcugggacuguaucaugaccagcuaccaguaucucauuauccagaacacaaccugggaggaucacugccaguucucucggcccuccccuaucggguaccugggacuucugagccaacgcaccagagacauuuauaucucucggcgcagacggggcacauuuacguggacccucuccgauagcgaaggcaaggacacacccgggggauacugucugacccgcuggaugcugauugaggccgagcucaaaugcuucggcaauacagcugucgccaaguguaacgaaaaacaugaugaggaauuuugcgacaugcugagacuuuucgauuuuaauaagcaggcuauccagcggcugaaagccccugcgcagauguccauucaacucaucaacaaggccgugaaugcucugaucaacgaccagcuuauuaugaagaaucaucugcgcgacaucauggggauucccuauugcaacuacucuaaauauuguuaccucaaucacaccgugacgggaaagacaagccugccuaaaugcugucuggucuccaacggcagcuaccucaaugagacccacuucucugaugacaucgaacagcaagccgauaacaugauuaccgagaugcugcagaaggaguauauggaaagacaggggaaaacaccgcuuggacugguugaccucuucguguuuuccaccagcuucuaccugaucucuaucuuucugcaccuugugaagauucccacacaucggcacgucgugggcaaaccuugccccaagccucaucgccucaaucacaugggcaucuguagcugcggguucuauaagcagcccggaguuccggugagauggaaacggugaggacuaguaauaaggaaacuguaugaaugucugugggcaggaagugaagagauccuucuguaaagguuuuuggaauuaugucugcugaauaauaaacuuuuuugaaauaauaaaucugguagaaaaaugagaucucaaaggcucuuuucagagccaccaaaaaaaaaaaaaaaaaaaaaaaaaaaaaaaaaaaaaaaaaaaaaaaaaaaaaaaaaaaaaaaaagaauu

SEQ ID NO: 25700 - RNA, 1781 nt, Artificial Sequence
  mRNA product Design b-4 (hSL-A64-N5) comprising derived and/or modified sequence from LASV(Z0947-SLE-2011;Clade IV)__AIT17840__GPCmut3 (opt5)
aggagagucccgcagucggcguccagcggcucugcuuguucgugugugugucguugcaggccuuauucaagcuuaccaugggccagaucgugaccuucuuucaagaggucccccacguuauugaagaggugaugaacaucgugcugauugcccucagcauccuggcuguccuuaaggggcuguacaauuucgccacaugcggacucgugggccugguuacguuucuucugcucugugggagauccugcaccauuucucuguauaaaggaguguacgaacugcagacacucgagcugaacauggaaacccuuaauaugacaaugccucugagcuguaccaagaacaauucccaucacuauaucauggucggcaacgagacagggcucgagcugacccuuacgaauaccucuaucauuaaccauaaauucugcaaucugagcgacgcgcacaagaaaaaccucuacgaucaugcucugauguccaucauuucuacauuucaccugagcaucccgaauuucaaccaguaugaagccauguccugugacuuuaauggaggcaagauuagcgugcaguacaaccucucucacuccuaugccggcgaugcugccaaucauugcgggaccguugcuaacggagugcugcaaacauucaugcggauggccuggggcgggagcuacaucgcgcuugacucuggacgcgauagaugggacuguauuaugaccuccuaccaguaucugaucauccagaacacgacaugggaggaucacugccaguuuagccggcccucuccuauuggcuaccucgggcugcuuucccaacgcaccagagacaucuauauuagccggcgcagacggggaacauucaccuggacccuguccgauucugaaggcaaggacacacccggcggguacugucucacgcgcuggaugcugaucgaggccgagcugaaaugcuuuggaaauaccgcugucgccaaguguaacgaaaaacaugaugaggaguucugcgacaugcucagacuguuugauuucaauaagcaggcuauucagcggcuuaaagccccugcgcagaugagcauccaacugaucaacaaggccgugaaugcucucauuaacgaccagcugaucaugaagaaucaccuucgcgacauuaugggcauccccuauugcaacuacuccaaauauuguuaccugaaucacacaaccacagggaagaccagccucccuaaaugcugucuggugucuaacggauccuaccugaaugaaacgcauuucagcgaugacauugaacagcaagccgauaacaugaucacagagaugcuccagaaggaguauauggaaagacagggcaaaaccccgcuggggcuugucgaccuguuuguuuucucuaccagcuuuuaccucaucuccauuuuccugcaccuggugaagauccccacacaucggcacauugugggaaaaccuugccccaagccucaucgccuuaaucacaugggcaucuguucuugcggccucuauaagcagcccggggucccggugaaauggaagagaugaggacuaguaauaaggaaacuguaugaaugucugugggcaggaagugaagagauccuucuguaaagguuuuuggaauuaugucugcugaauaauaaacuuuuuugaaauaauaaaucugguagaaaaaugagaucucaaaggcucuuuucagagccaccaaaaaaaaaaaaaaaaaaaaaaaaaaaaaaaaaaaaaaaaaaaaaaaaaaaaaaaaaaaaaaaaagaauu

SEQ ID NO: 25701 - RNA, 1812 nt, Artificial Sequence
  mRNA product Design b-4 (hSL-A100) comprising derived and/or modified sequence from LASV(Josiah;Clade IV)__NP_694870__GPCmut3 (opt1)
aggagagucccgcagucggcguccagcggcucugcuuguucgugugugugucguugcaggccuuauucaagcuuaccaugggccagaucgugaccuucuuccaggaggucccccacgugaucgaggaggugaugaacaucguccugaucgcccucagcgugcuggccgugcugaaggggcucuacaacuucgcgaccugcggccuggucgggcuggugacguuccuccugcugugcggccgcuccugcaccaccagccucuacaaggggguguacgagcugcagacccuggagcucaacauggagacgcugaacaugaccaugccgcuguccugcaccaagaacaacagccaccacuacaucauggucggcaacgagaccggccucgagcugacgcugaccaacaccuccaucaucaaccacaaguucugcaaccucagcgacgcccacaagaagaaccuguacgaccacgcccugauguccaucaucagcaccuuccaccucuccauccccaacuucaaccaguacgaggccaugagcugcgacuucaacgggggcaagaucuccgugcaguacaaccugagccacuccuacgccggggacgcggccaaccacugcggcacgguggccaacgggguccugcagaccuucaugcggauggccuggggcggcagcuacaucgcgcucgacuccgggcgcggcaacugggacugcaucaugaccagcuaccaguaccugaucauccagaacaccacgugggaggaccacugccaguucucccggcccagccccaucggguaccugggccuccugucccagcgcacccgggacaucuacaucagccgccggcgccggggcaccuucaccuggacgcugagcgacuccgaggggaaggacaccccgggcggguacugccugacccgcuggaugcucaucgaggccgagcugaagugcuucggcaacaccgccguggccaagugcaacgagaagcacgacgaggaguucugcgacaugcugcggcuguucgacuucaacaagcaggccauccagcgccugaaggcgcccgcccagaugagcauccagcugaucaacaaggccgugaacgcccucaucaacgaccagcugaucaugaagaaccaccuccgggacaucauggggauccccuacugcaacuacuccaaguacugcuaccucaaccacacgaccaccggccgcaccagccugcccaagugcugccuggucuccaacggcagcuaccucaacgagacgcacuucuccgacgacaucgagcagcaggccgacaacaugaucaccgagaugcugcagaaggaguacauggagcggcaggggaagacgccccugggccucguggaccuguucguguucagcaccuccuucuaccugaucagcaucuuccugcaccucgucaagaucccgacccaccgccacaucguggggaaguccugccccaagccccaccggcugaaccacaugggcaucugcagcugcgggcuguacaagcagcccggcgugccggucaaguggaagcgcugaggacuaguaauaaggaaacuguaugaaugucugugggcaggaagugaagagauccuucuguaaagguuuuuggaauuaugucugcugaauaauaaacuuuuuugaaauaauaaaucugguagaaaaaugagaucucaaaggcucuuuucagagccaccaaaaaaaaaaaaaaaaaaaaaaaaaaaaaaaaaaaaaaaaaaaaaaaaaaaaaaaaaaaaaaaaaaaaaaaaaaaaaaaaaaaaaaaaaaaaaaaaaaaaa

SEQ ID NO: 25702 - RNA, 1809 nt, Artificial Sequence
  mRNA product Design b-4 (hSL-A100) comprising derived and/or modified sequence from LASV(LP;Clade I)__AAF86701__GPCmut3 (opt1)
aggagagucccgcagucggcguccagcggcucugcuuguucgugugugugucguugcaggccuuauucaagcuuaccaugggccagaucaucaccuucuuccaggaggugccccacgucaucgaggaggugaugaacaucgugcugaucgcccucagccugcuggccauccucaaggggcuguacaacaucgcgaccugcggcaucaucgggcuggucgccuuccucuuccugugcggcaaguccugcagccugacgcucaagggcggguacgagcugcagacccuggagcucaacauggagacccugaacaugaccaugccgcuguccugcacgaagaacagcucccaccacuacauccgcgugggcaacgagaccgggcucgagcugacccugaccaacacgagcaucaucaaccacaaguucugcaaccucuccgacgcccacaagaagaaccuguacgaccacgcccugaugagcaucaucuccaccuuccaccucagcauccccaacuucaaccaguacgaggccauguccugcgacuucaacggcgggaagaucagcgugcaguacaaccugucccacagcuacgcgggcgacgccgccgagcacugcgggaccgucgccaacggcgugcugcagaccuucaugcggauggcguggggcgggcgcuacaucgcccucgacuccggcaaggggaacugggacugcaucaugacgagcuaccaguaccugaucauccagaacaccaccugggaggaccacugccaguucucccggcccagccccaucggcuaccugggccuccugucccagcgcacccgggacaucuacaucagccgccggcgccgggggacguucaccuggacccugagcgacuccgagggcaacgagacccccgggggcuacugccugacgcgcuggaugcucaucgaggccgagcugaagugcuucgggaacaccgccguggccaagugcaacgagaagcacgacgaggaguucugcgacaugcugcggcuguucgacuucaacaagcaggcgauccgccggcugaaggcccccgcccagaugagcauccagcugaucaacaaggccgucaacgcccucaucaacgaccagcugaucaugaagaaccaccuccgcgacaucaugggcauccccuacugcaacuacuccaaguacugcuaccucaaccacaccagcuccggccggaccagccugcccaagugcugccugaucuccaacgggagcuaccucaacgagacgcaguucuccgacgacaucgagcagcaggcggacaacaugaucaccgagaugcugcagaaggaguacaucgagcgccagggcaagaccccgcuggggcucguggacaucuucaucuucagcaccuccuucuaccugaucagcaucuuccugcaccugaucaagaucccgacgcaccggcacaucgugggcaagcccugccccaagccccaccgccucaaccacaugggggucugcuccugcggccuguacaagcacccgggcgugcccaccaaguggaagcggugaggacuaguaauaaggaaacuguaugaaugucugugggcaggaagugaagagauccuucuguaaagguuuuuggaauuaugucugcugaauaauaaacuuuuuugaaauaauaaaucugguagaaaaaugagaucucaaaggcucuuuucagagccaccaaaaaaaaaaaaaaaaaaaaaaaaaaaaaaaaaaaaaaaaaaaaaaaaaaaaaaaaaaaaaaaaaaaaaaaaaaaaaaaaaaaaaaaaaaaaaaaaaaaaa

SEQ ID NO: 25703 - RNA, 1809 nt, Artificial Sequence
  mRNA product Design b-4 (hSL-A100) comprising derived and/or modified sequence from LASV(803213;Clade II)__AAF86703__GPCmut3 (opt1)
aggagagucccgcagucggcguccagcggcucugcuuguucgugugugugucguugcaggccuuauucaagcuuaccaugggccagaucaucaccuucuuccaggaggugccccacgucaucgaggaggugaugaacaucgugcugaucgcccucagccugcuggccauccucaaggggaucuacaacgucgcgaccugcggccuguucgggcugaucuccuuccuccugcugugcggccgcagcugcuccgugacguacaaggggguguacgagcuccagacccuggagcugaacauggccaaccucaacaugaccaugccgcugagcugcaccaagaacaacucccaccacuacaucauggucggcaacgagacgggccuggagcucacccugaccaacaccagcaucaucaaccacaaguucugcaaccuguccgacgcccacaagaagaaccucuacgaccacgcccugaugagcaucaucuccacguuccaccugagcauccccaacuucaaccaguacgaggccauguccugcgacuucaacgggggcaagaucagcgugcaguacaaccucucccacagcuucgcgguggacgccgccaaccacugcgggaccaucgccaacggcguccugcagaccuucaugcggauggcguggggcggguccuacaucgcccuggacagcggcaaggggaacugggacugcaucaugaccuccuaccaguaccucaucauccagaacacgaccugggaggaccacugccaguucagccgccccucccccaucggcuaccuggggcugcucagccagcggacccgcgacaucuacaucagccggcgccgccggggcaccuucacguggacccucuccgacagcgagggcaacgaggcccccgggggcuacugccugacccgguggaugcugaucgaggccgagcucaagugcuucgggaacaccgccguggcgaagugcaacgagaagcacgacgaggaguucugcgacaugcugcgccuguucgacuucaacaagcaggccaucaagcggcucaagacgcccgcccagauguccauccagcugaucaacaaggccgugaacgcccugaucaacgaccagcucaucaugaagaaccaccuccgcgacaucaugggcauccccuacugcaacuacagccgguacugcuaccugaaccacaccgucaccgggaagaccucccugccccgcugcugccuggugagcaacggcuccuaccugaacgagacgcacuucagcgacgacaucgagcagcaggcggacaacaugaucaccgagaugcuccagaaggaguacauggaccggcagggcaagaccccgcuggggcugguggaccucuucgucuucuccaccagcuucuaccugaucuccaucuuccugcaccuggugaagaucccgacgcaccgccacaucgugggcaagcccugccccaagccccaccggcucaaccacauggggaucugcagcugcggccuguacaagcacccggggguccccgugaaguggaagcgcugaggacuaguaauaaggaaacuguaugaaugucugugggcaggaagugaagagauccuucuguaaagguuuuuggaauuaugucugcugaauaauaaacuuuuuugaaauaauaaaucugguagaaaaaugagaucucaaaggcucuuuucagagccaccaaaaaaaaaaaaaaaaaaaaaaaaaaaaaaaaaaaaaaaaaaaaaaaaaaaaaaaaaaaaaaaaaaaaaaaaaaaaaaaaaaaaaaaaaaaaaaaaaaaaa

SEQ ID NO: 25704 - RNA, 1809 nt, Artificial Sequence
  mRNA product Design b-4 (hSL-A100) comprising derived and/or modified sequence from LASV(GA391;Clade III)__CAA36645__GPCmut3 (opt1)
aggagagucccgcagucggcguccagcggcucugcuuguucgugugugugucguugcaggccuuauucaagcuuaccaugggccagaucgugaccuucuuccaggaggucccccacgugaucgaggaggugaugaacaucguccugaucgcccucagcauccuggccauccugaaggggcucuacaacguggcgaccugcggccugaucgggcuggugacguuccuccugcuguccggccgcagcugcucccucaucuacaaggggaccuacgagcugcagacccuggagcucaacauggagacccugaacaugacgaugccgcugagcugcaccaagaacaacucccaccacuacauccgggucggcaacgagaccggccucgagcugacccugacgaacaccagcauccucaaccacaaguucugcaaccuguccgacgcccacaagcgcaaccuguacgaccacagccucauguccaucaucagcaccuuccaccuguccauccccaacuucaaccaguacgaggccaugagcugcgacuucaacgggggcaagaucaccgugcaguacaaccugucccacagcuucgccguggacgccgcggggcacugcggcacgcucgccaacgggguccugcagaccuucaugcggauggccuggggcggcuccuacaucgcccuggacagcgggcgcggcaacugggacugcaucaugaccuccuaccaguaccucaucauccagaacaccacgugggacgaccacugccaguucagccggcccucccccaucggguaccugggccugcucagccagcgcacccgggacaucuacaucagccgccggcgccggggcaccuucaccuggacgcucuccgacagcgaggggaacgagaccccgggcggguacugccugacccgcuggaugcugaucgaggcggagcucaagugcuucggcaacaccgccguggccaagugcaacgagaagcacgacgaggaguucugcgacaugcugcggcuguucgacuucaacaagcaggccauccgccggcucaagacgcccgcccagauguccauccagcugaucaacaaggcggugaacgcccugaucaacgaccagcucaucaugaagaaccaccuccgcgacaucauggggauccccuacugcaacuacagccgguacugcuaccugaaccacaccuccaccggcaagaccagccugccccgcugcugccugaucuccaacggcagcuaccugaacgagacgaaguucuccgacgacaucgagcagcaggccgacaacaugaucaccgagaugcuccagaaggaguacaucgaccggcaggggaagacgccccugggccuggucgaccuguucguguucagcaccuccuucuaccucaucagcaucuuccugcaccuggugaagaucccgacccaccgccacaucgucgggaagcccugccccaagccccaccggcucaaccacaugggcaucugcuccugcgggcuguacaagcagccgggcgugcccgugcgcuggaagcggugaggacuaguaauaaggaaacuguaugaaugucugugggcaggaagugaagagauccuucuguaaagguuuuuggaauuaugucugcugaauaauaaacuuuuuugaaauaauaaaucugguagaaaaaugagaucucaaaggcucuuuucagagccaccaaaaaaaaaaaaaaaaaaaaaaaaaaaaaaaaaaaaaaaaaaaaaaaaaaaaaaaaaaaaaaaaaaaaaaaaaaaaaaaaaaaaaaaaaaaaaaaaaaaaa

SEQ ID NO: 25705 - RNA, 1812 nt, Artificial Sequence
  mRNA product Design b-4 (hSL-A100) comprising derived and/or modified sequence from LASV(AV;Clade V)__CCA30314__GPCmut3 (opt1)
aggagagucccgcagucggcguccagcggcucugcuuguucgugugugugucguugcaggccuuauucaagcuuaccaugggccagaucgugaccuucuuccaggaggucccccacgugaucgaggaggugaugaacaucguccugaucgcccucagcauccuggccgugcugaaggggcucuacaacaucgcgaccugcggccugaucgggcugaucacguuccuccugcugugcggccgcuccugcagcuccaaccucuacaaggggguguacgagcugcagagccuggaccucaacauggagacccugaacaugaccaugccgcuguccugcaccaagaacaacagccaccacuacauccgggucggcaacgacacgggccucgagcugacccugaccaacaccuccauccucaaccacaaguucugcaaccugagcgacgcccacaagaaggaccuguacgaccacgcccucauguccaucaucagcacguuccaccuguccauccccaacuucaaccaguacgaggccaugagcugcgacuucaacgggggcaagaucuccgugcaguacaaccugagccacuccuacgccaucgacgcggccaaccacugcgggaccguggccaacggcauccuccagaccuucaugcgcauggccuggggcgggagcuacaucgcgcuggacuccggccgggggaacugggacugcaucaugaccagcuaccaguaccugaucauccagaacacgaccugggagaaccacugccaguucucccgccccagccccaucggcuaccucgggcugcugagccagcggacccgcgacaucuacaucucccggcgccgccggggcaccuucacguggacccugagcgacuccgagggcaacgccacccccgggggcuacugccucacccgguggaugcugaucgaggccgagcugaagugcuucgggaacacggccgucgccaagugcaacgagaagcacgacgaggaguucugcgacaugcuccgccuguucgacuucaacaagcaggcgaucagccggcugaagucccccgcccagaugagcauccagcucaucaacaaggccgugaacgcccugaucaacgaccagcugaucaugaagaaccaccuccgcgacaucaugggcauccccuacugcaacuacuccaaguacugcuaccugaaccacaccaucaccgggaagaccagccugcccaagugcugccucguguccaacggcagcuaccugaacgagacgcacuucuccgacgacaucgagcagcaggccgacaacaugaucaccgagaugcugcagaaggaguacauggagcggcagggcaagaccccgcucgggcuggucgaccuguucguguucagcaccuccuucuaccugaucagcaucuuccuccgccuggugaagaucccgacgcaccggcacaucgucggcaagcccugccccaagccccaccgccugaaccacauggggaucugcuccugcggccucuacaagcagccgggggugcccgugcgguggaagcgcugaggacuaguaauaaggaaacuguaugaaugucugugggcaggaagugaagagauccuucuguaaagguuuuuggaauuaugucugcugaauaauaaacuuuuuugaaauaauaaaucugguagaaaaaugagaucucaaaggcucuuuucagagccaccaaaaaaaaaaaaaaaaaaaaaaaaaaaaaaaaaaaaaaaaaaaaaaaaaaaaaaaaaaaaaaaaaaaaaaaaaaaaaaaaaaaaaaaaaaaaaaaaaaaaa

SEQ ID NO: 25706 - RNA, 1809 nt, Artificial Sequence
  mRNA product Design b-4 (hSL-A100) comprising derived and/or modified sequence from LASV(Togo/2016/7082;Clade VI)__AMR44577__GPCmut3 (opt1)
aggagagucccgcagucggcguccagcggcucugcuuguucgugugugugucguugcaggccuuauucaagcuuaccaugggccagaucaucaccuucuuccaggaggugccccacgucaucgaggaggugaugaacaucgugcugaucgcccucagccugcuggccauccucaagggggucuacaacguggcgaccugcggcaucaucgggcuggugacguuccuguuccucugcggccgcuccugcagccugaucuacaagggguccuacgagcugcagacccucgagcugaacauggagacccugaacaugaccaugccgcucagcugcacgaagaacuccagccaccacuacauccgggucggcaacgagaccggccuggagcugacccucaccaacacguccaucaucaaccacaaguucugcaaccugagcgacgcccacaagcgcaaccuguacgaccacgcccucauguccauccugagcaccuuccaccuguccauccccaacuucaaccaguacgaggccaugagcugcgacuucaacgggggcaagaucuccgugcaguacaaccucagccacgccuacgcgguggacgccgccgagcacugcgggaccgucgccaacggcgugcugcagaccuucaugcggauggcguggggcggguccuacaucgcccuggacagcggccgcgggaacugggacugcaucaugacguccuaccaguaccucaucauccagaacaccaccugggaggaccacugccaguucagccggcccucccccaucggcuaccuggggcugcucagccagcgcacccgggacaucuacaucagccgccggcgccggggcacguucaccuggacccucuccgacagcgagggcaacgagacccccgggggcuacugccugacgcgcuggaugcugaucgaggccgagcucaagugcuucgggaacaccgccguggccaagugcaacgagaagcacgacgaggaguucugcgacaugcugcggcuguucgacuucaacaagcaggcgauccagcgccucaagucccccgcccagaugagcauccagcugaucaacaaggccgucaacgcccugaucaacgaccagcucaucaugaagaaccaccuccgggacaugaugggcauccccuacugcaacuacuccaaguacugcuaccugaaccacaccagcuccgggcgcaccagccugcccaagugcugccugguguccaacggcagcuaccugaacgagacgcacuucuccgacgacaucgagcagcaggccgacaacaugaucaccgagaugcuccagaaggaguacaucgaccggcagggcaagaccccgcuggggcugguggaccucuucgucuucagcaccuccuucuaccugaucagcaucuuccugcaccugaucaagaucccgacgcaccgccacaucgugggcaagcccugccccaagccccaccggcucaaccacauggggaucugcuccugcggccuguacaagcagccgggggugcccacccgcuggaagcggugaggacuaguaauaaggaaacuguaugaaugucugugggcaggaagugaagagauccuucuguaaagguuuuuggaauuaugucugcugaauaauaaacuuuuuugaaauaauaaaucugguagaaaaaugagaucucaaaggcucuuuucagagccaccaaaaaaaaaaaaaaaaaaaaaaaaaaaaaaaaaaaaaaaaaaaaaaaaaaaaaaaaaaaaaaaaaaaaaaaaaaaaaaaaaaaaaaaaaaaaaaaaaaaaa

SEQ ID NO: 25707 - RNA, 1809 nt, Artificial Sequence
  mRNA product Design b-4 (hSL-A100) comprising derived and/or modified sequence from LASV(KAK-428;Clade n.d. (VII))__ANH09740__GPCmut3 (opt1)
aggagagucccgcagucggcguccagcggcucugcuuguucgugugugugucguugcaggccuuauucaagcuuaccaugggccagaucgugaccuucuuccaggaggucccccacgugaucgaggaggugaugaacaucguccugaucgcccucagccugcuggccauccucaaggggcuguacaacuucgcgaccugcggcgugaucgggcugaucacguuccuccugcugugcggccgcuccugcagcgccaccuacaaggggcaguacgagcuccagacccuggagcugaacauggagucccucaacaugaccaugccgcugagcugcacgaagaacaacucccaccacuacauccgggccggcaacaacaccggccuggagcucacccugaccaacacgagcaucaucucccacaaguucugcaaccugagcgacgcccacaagaagaaccucuacgaccacacccugauguccaucaucaccaccuuccaccugagcauccccaacuucaaccaguacgaggccauguccugcgacuucaacgggggcaagaucagcauccaguacaaccucucccacagcuacgcgggggacgccgcccagcacugcggcacgguggccaacgggguccugcagaccuucaugcgcauggcguggggcggcuccuaccuggcccucgacagcgggcggcgcggcugggacugcaucaucuccagcuaccaguaccugaucauccagaacaccaccugggacgaccacugccaguucucccggcccagccccaucggguaccugggcuucgugagccagaagacgcgcgacaucuacaucucccggcgccgccggggcaccuucaccuggacccugagcgacuccgaggggcacgacaugccgggcggguacugccucacgcgguggaugcugaucgaggccgaccugaagugcuucggcaacaccgccguggccaagugcaacgagaagcacgacgaggaguucugcgacauguggcgccucuucgacuucaacaagcaggcgauccagcggcugaaggcccccgcccagaugaacauccagcugaucaacaaggccgucaacgcccucaucaacgaccagcugaugaugaagaaccaccuccgcgacaucauggggauccccuacugcaacuacagcaaguucugcuaccugaacaacaccaccacgggccggaccucccugccccgcugcugccugaucagcaacggcuccuaccucaacgagacccacuucagcgacgacaucgagcagcaggcggacaacaugaucaccgagaugcugcagaaggaguacauggaccggcaggggaagacgccccugggccucguggaccuguucguguucuccaccagcuucuaccugaucaccaucuuccuccaccuggucaagaucccgacccaccgccacaucguggggaagcccugccccaagccccaccggcugaaccacaugggcaucugcuccugcgggcuguacaagcagccgggcgugcccguccgcuggaagcggugaggacuaguaauaaggaaacuguaugaaugucugugggcaggaagugaagagauccuucuguaaagguuuuuggaauuaugucugcugaauaauaaacuuuuuugaaauaauaaaucugguagaaaaaugagaucucaaaggcucuuuucagagccaccaaaaaaaaaaaaaaaaaaaaaaaaaaaaaaaaaaaaaaaaaaaaaaaaaaaaaaaaaaaaaaaaaaaaaaaaaaaaaaaaaaaaaaaaaaaaaaaaaaaaa

SEQ ID NO: 25708 - RNA, 1809 nt, Artificial Sequence; identical to SEQ ID NO: 25702
  mRNA product Design b-4 (hSL-A100) comprising derived and/or modified sequence from LASV(Pinneo-NIG-1969;Clade I)__AIT17836__GPCmut3 (opt1)

SEQ ID NO: 25709 - RNA, 1809 nt, Artificial Sequence
  mRNA product Design b-4 (hSL-A100) comprising derived and/or modified sequence from LASV(ISTH0009-NIG-2011;Clade II)__AIT17404__GPCmut3 (opt1)
aggagagucccgcagucggcguccagcggcucugcuuguucgugugugugucguugcaggccuuauucaagcuuaccaugggccagaucaucaccuucuuccaggaggugccccacgucaucgaggaggugaugaacaucgugcugaucgcccucagccugcuggccauccucaaggggaucuacaacgucgcgaccugcggccuguucgggcugguguccuuccuccugcugugcggccgcagcugcuccacgaccuacaaggggguguacgagcuccagacccuggagcuggacauggccagccucaacaugaccaugccgcuguccugcacgaagaacaacagccaccacuacaucauggucggcaacgagaccggccuggagcucacccugaccaacacguccaucaucaaccacaaguucugcaaccugagcgacgcccacaagaagaaccucuacgaccacgcccugauguccaucaucagcaccuuccaccuguccauccccaacuucaaccaguacgaggccaugagcugcgacuucaacgggggcaagaucuccgugcaguacaaccucagccacgcguacgccguggacgccgccaaccacugcgggaccaucgcgaacggcguccugcagaccuucaugcggauggccuggggcggguccuacaucgcccuggacagcggcaagggguccugggacugcaucaugacgagcuaccaguaccucaucauccagaacaccaccugggaggaccacugccaguucucccgccccagccccaucggcuaccuggggcugcucagccagcggacccgcgacaucuacaucucccggcgccgccggggcacguucaccuggacccucagcgacuccgagggcaacgagacccccgggggcuacugccugacgcgguggaugcugaucgaggccgagcucaagugcuucgggaacaccgccguggcgaagugcaacgagaagcacgacgaggaguucugcgacaugcugcgccuguucgacuucaacaagcaggccauccggcgccucaagacccccgcccagaugagcauccagcugaucaacaaggccgugaacgcccugaucaacgaccagcucaucaugaagaaccaccuccgggacaucaugggcaucccguacugcaacuacuccaaguacugcuaccugaaccacaccgucacggggaagaccagccugccccgcugcugccugguguccaacggcagcuaccugaacgagacccacuucuccgacgacaucgagcagcaggcggacaacaugaucaccgagcuccugcagaaggaguacauggaccggcagggcaagacgccccuggggcucguggaccuguucgucuucagcaccuccuucuaccugaucagcaucuuccugcaccucaucaagaucccgacccaccgccacaucaccggcaagcccugccccaagccccaccggcugaaccacauggggaucugcuccugcggccuguacaagcacccgggggugcccgugaaguggaagcgcugaggacuaguaauaaggaaacuguaugaaugucugugggcaggaagugaagagauccuucuguaaagguuuuuggaauuaugucugcugaauaauaaacuuuuuugaaauaauaaaucugguagaaaaaugagaucucaaaggcucuuuucagagccaccaaaaaaaaaaaaaaaaaaaaaaaaaaaaaaaaaaaaaaaaaaaaaaaaaaaaaaaaaaaaaaaaaaaaaaaaaaaaaaaaaaaaaaaaaaaaaaaaaaaaa

SEQ ID NO: 25710 - RNA, 1809 nt, Artificial Sequence
  mRNA product Design b-4 (hSL-A100) comprising derived and/or modified sequence from LASV(ISTH2010-NIG-2012;Clade II)__AIT17482__GPCmut3 (opt1)
aggagagucccgcagucggcguccagcggcucugcuuguucgugugugugucguugcaggccuuauucaagcuuaccaugggccagaucaucaccuucuuccaggaggugccccacgucaucgaggaggugaugaacaucgugcugaucgcccucagccugcuggccauccucaaggggaucuacaacgucgcgaccugcggccuguucgggcugguguccuuccuccugcugugcggccgcagcugcuccacgaccuacaaggggguguacgagcuccagacccuggagcuggacauggccagccucaacaugaccaugccgcuguccugcacgaagaacaacagccaccacuacaucauggucggcaacgagaccggccuggagcucacccugaccaacacguccaucaucaaccacaaguucugcaaccugagcgacgcccacaagaagaaccucuacgaccacgcccugauguccaucaucagcaccuuccaccuguccauccccaacuucaaccaguacgaggccaugagcugcgacuucaacgggggcaagaucuccgugcaguacaaccucagccacgcguacgccguggacgccgccaaccacugcgggaccaucgcgaacggcguccugcagaccuucaugcggauggccuggggcggguccuacaucgcccuggacagcggcaagggguccugggacugcaucaugacgagcuaccaguaccucaucauccagaacaucaccugggaggaccacugccaguucucccgccccagccccaucggcuaccuggggcugcucagccagcggacccgcgacaucuacaucucccggcgccgccggggcaccuucacguggacccucagcgacuccgagggcaacgagacccccgggggcuacugccugacccgguggaugcugaucgaggccgagcucaagugcuucgggaacacggccguggcgaagugcaacgagaagcacgacgaggaguucugcgacaugcugcgccuguucgacuucaacaagcaggccauccggcgccucaagacccccgcccagaugagcauccagcugaucaacaaggccgugaacgcccugaucaacgaccagcucaucaugaagaaccaccuccgggacaucaugggcauccccuacugcaacuacuccaaguacugcuaccugaaccacaccgucaccgggaagacgagccugccccgcugcugccugguguccaacggcagcuaccugaacgagacccacuucuccgacgacaucgagcagcaggcggacaacaugaucaccgagcuccugcagaaggaguacaucgaccggcagggcaagaccccgcuggggcucguggaccuguucgucuucagcacguccuucuaccugaucagcaucuuccugcaccucgugaagaucccgacccaccgccacguggucggcaagcccugccccaagccccaccggcugaaccacauggggaucugcuccugcggccuguacaagcacccgggggugcccgugaaguggaagcgcugaggacuaguaauaaggaaacuguaugaaugucugugggcaggaagugaagagauccuucuguaaagguuuuuggaauuaugucugcugaauaauaaacuuuuuugaaauaauaaaucugguagaaaaaugagaucucaaaggcucuuuucagagccaccaaaaaaaaaaaaaaaaaaaaaaaaaaaaaaaaaaaaaaaaaaaaaaaaaaaaaaaaaaaaaaaaaaaaaaaaaaaaaaaaaaaaaaaaaaaaaaaaaaaaa

SEQ ID NO: 25711 - RNA, 1809 nt, Artificial Sequence
  mRNA product Design b-4 (hSL-A100) comprising derived and/or modified sequence from LASV(Lassa virus/H.sapiens-wt/NGA/2015/ISTH_0543;Clade II)__AVO03639__GPCmut3 (opt1)
aggagagucccgcagucggcguccagcggcucugcuuguucgugugugugucguugcaggccuuauucaagcuuaccaugggccagaucaucaccuucuuccaggaggugccccacgucaucgaggaggugaugaacaucgugcugaucgcccucagccugcuggccauccucaaggggaucuacaacgucgcgaccugcggccuguucgggcugguguccuuccuccugcugugcggccgcagcugcuccacgaccuacaaggggguguacgagcuccagacccuggagcuggacauggccaaccucaacaugaccaugccgcugagcugcacgaagaacaacucccaccacuacaucauggucggcaacgagaccggccuggagcucacccugaccaacacgagcaucaucaaccacaaguucugcaaccuguccgacgcccacaagaagaaccucuacgaccacgcccugaugagcaucaucuccaccuuccaccugagcauccccaacuucaaccaguacgaggccauguccugcgacuucaacgggggcaagaucagcgugcaguacaaccucucccacaccuacgcgguggacgccgccaaccacugcgggaccaucgccaacggcguccugcagacguucaugcggauggcguggggcgggagcuacaucgcccuggacuccggcaaggggagcugggacugcaucaugaccuccuaccaguaccucgugauccagaacaccaccugggaggaccacugccaguucagccgccccucccccaucggcuaccuggggcugcucagccagcggacgcgcgacaucuacaucagccggcgccgccggggcaccuucaccuggacccucuccgacagcgagggcaacgagacgcccgggggcuacugccugacccgguggaugcugaucgaggccgagcucaagugcuucgggaacaccgccguggccaagugcaacgagaagcacgacgaggaguucugcgacaugcugcgccuguucgacuucaacaagcaggcgauccggcgccucaagacccccgcccagauguccauccagcugaucaacaaggccgucaacgcccugaucaacgaccagcucaucaugaagaaccaccuccgggacaucaugggcauccccuacugcaacuacagcaaguacugcuaccugaaccacacggugaccgggaagaccucccugccccgcugcugccuggugagcaacggcuccuaccugaacgagacccacuucagcgacgacaucgagcagcaggccgacaacaugaucacggagcuccugcagaaggaguacaucgaccggcagggcaagaccccgcuggggcucgucgaccuguucguguucuccaccagcuucuaccugaucuccaucuuccugcaccucgugaagaucccgacccaccgccacaucacgggcaagcccugccccaagccccaccggcugaaccacauggggaucugcagcugcggccuguacaagcacccggggguccccgugaaguggaagcgcugaggacuaguaauaaggaaacuguaugaaugucugugggcaggaagugaagagauccuucuguaaagguuuuuggaauuaugucugcugaauaauaaacuuuuuugaaauaauaaaucugguagaaaaaugagaucucaaaggcucuuuucagagccaccaaaaaaaaaaaaaaaaaaaaaaaaaaaaaaaaaaaaaaaaaaaaaaaaaaaaaaaaaaaaaaaaaaaaaaaaaaaaaaaaaaaaaaaaaaaaaaaaaaaaa

SEQ ID NO: 25712 - RNA, 1809 nt, Artificial Sequence
  mRNA product Design b-4 (hSL-A100) comprising derived and/or modified sequence from LASV(Lassa virus/H.sapiens-wt/NGA/2016/ISTH_0009;Clade II)__AVO03571__GPCmut3 (opt1)
aggagagucccgcagucggcguccagcggcucugcuuguucgugugugugucguugcaggccuuauucaagcuuaccaugggccagaucaucaccuucuuccaggaggugccccacgucaucgaggaggugaugaacaucgugcugaucgcccucagccugcuggccauccucaaggggaucuacaacgucgcgaccugcggccugcuggggcucguguccuuccugcugcucugcggccgcagcugcuccacgaccuacaaggggguguacgagcugcagacccuggagcucgacauggccagccugaacaugaccaugccgcuguccugcacgaagaacaacagccaccacuacaucauggucggcaacgagaccggccucgagcugacccugaccaacacguccaucaucaaccacaaguucugcaaccucagcgacgcccacaagaagaaccuguacgaccacgcccugauguccaucaucagcaccuuccaccucuccauccccaacuucaaccaguacgaggccaugagcugcgacuucaacgggggccggaucuccgugcaguacaaccugagccacuccuacgcgguggacgccgccaaccacugcgggaccaucgccaacggcguccugcagaccuucaugcgcauggcguggggcgggagcuacaucgcccucgacuccggcaaggggagcugggacugcaucaugacguccuaccaguaccugaucauccagaacaccaccugggaggaccacugccaguucagccggcccagccccaucggcuaccuggggcuccugucccagcgcacccgggacaucuacaucagccgccggcgccggggcacguucaccuggacccuguccgacagcgagggcaacgagacccccgggggcuacugccugacgcgcuggaugcucaucgaggccgagcugaagugcuucgggaacaccgccguggccaagugcaacgagaagcacgacgaggaguucugcgacaugcugcggcuguucgacuucaacaagcaggcgauccgccggcugaagacccccgcccagauguccauccagcugaucaacaaggccgugaacgcccucaucaacgaccagcugaucaugaagaaccaccuccgcgacaucaugggcaucccguacugcaacuacagcaaguacugcuaccucaaccacaccgucacggggaagaccucccugccccggugcugccuggugagcaacggcuccuaccucaacgagacccacuucagcgacgacaucgagcagcaggccgacaacaugaucaccgagcugcugcagaaggaguacaucgaccgccagggcaagacgccccucgggcugguggaccuguucgucuucuccaccagcuucuaccugaucuccaucuuccuccaccuggugaagaucccgacccaccggcacaucaccggcaagcccugccccaagccccaccgccugaaccacauggggaucugcagcugcggccucuacaaccacccgggggugcccgucaaguggaagcggugaggacuaguaauaaggaaacuguaugaaugucugugggcaggaagugaagagauccuucuguaaagguuuuuggaauuaugucugcugaauaauaaacuuuuuugaaauaauaaaucugguagaaaaaugagaucucaaaggcucuuuucagagccaccaaaaaaaaaaaaaaaaaaaaaaaaaaaaaaaaaaaaaaaaaaaaaaaaaaaaaaaaaaaaaaaaaaaaaaaaaaaaaaaaaaaaaaaaaaaaaaaaaaaaa

SEQ ID NO: 25713 - RNA, 1809 nt, Artificial Sequence
  mRNA product Design b-4 (hSL-A100) comprising derived and/or modified sequence from LASV(Lassa virus/H.sapiens-wt/NGA/2016/ISTH_0017;Clade II)__AVO03567__GPCmut3 (opt1)
aggagagucccgcagucggcguccagcggcucugcuuguucgugugugugucguugcaggccuuauucaagcuuaccaugggccagaucaucaccuucuuccaggaggugccccacgucaucgaggaggugaugaacaucgugcugaucgcccucagccugcuggccauccucaaggggaucuacaacgucgcgaccugcggccuguucgggcugguguccuuccuccugcugugcggccgcagcugcuccacgaccuacaaggggguguacgagcuccagacccuggagcuggacauggccagccucaacaugaccaugccgcuguccugcacgaagaacaacagccaccacuacaucauggucggcaacgagaccggccuggagcucacccugaccaacacguccaucaucaaccacaaguucugcaaccugagcgacgcccacaagaagaaccucuacgaccacgcccugauguccaucaucagcaccuuccaccuguccauccccaacuucaaccaguacgaggccaugagcugcgacuucaacgggggcaagaucuccgugcaguacaaccucagccacaccuacgcgaucgacgccgccaaccacugcgggaccaucgccaacggcgugcugcagacguucaugcggauggcguggggcggguccuacaucgcccuggacagcggcaagggguccugggacugcaucaugaccagcuaccaguaccucaucauccagaacaccaccugggaggaccacugccaguucucccgccccagccccaucggcuaccuggggcugcucagccagcggacgcgcgacaucuacaucucccggcgccgccggggcaccuucaccuggacccucagcgacuccgagggcaacgagacgcccgggggcuacugccugacccgguggaugcugaucgaggccgagcucaagugcuucgggaacaccgccgucgccaagugcaacgagaagcacgacgaggaguucugcgacaugcugcgccuguucgacuucaacaagcaggcgauccggcgccucaagacccccgcccagaugagcauccagcugaucaacaaggccgugaacgcccugaucaacgaccagcucaucaugaagaaccaccuccgggacaucaugggcauccccuacugcaacuacuccaaguacugcuaccugaaccacacggugaccgggaagaccagccugccccgcugcugccuggucuccaacggcagcuaccugaacgagacccacuucuccgacgacaucgagcagcaggccgacaacaugaucacggagcuccugcagaaggaguacauggaccggcagggcaagaccccgcuggggcucguggaccuguucguguucagcaccuccuucuaccugaucagcaucuuccugcaccucguccgcaucccgacccaccggcacgugaucggcaagcccugccccaagccccaccgccugaaccacauggggaucugcuccugcggccuguacaagcacccgggggugcccgucaaguggaagcggugaggacuaguaauaaggaaacuguaugaaugucugugggcaggaagugaagagauccuucuguaaagguuuuuggaauuaugucugcugaauaauaaacuuuuuugaaauaauaaaucugguagaaaaaugagaucucaaaggcucuuuucagagccaccaaaaaaaaaaaaaaaaaaaaaaaaaaaaaaaaaaaaaaaaaaaaaaaaaaaaaaaaaaaaaaaaaaaaaaaaaaaaaaaaaaaaaaaaaaaaaaaaaaaaa

SEQ ID NO: 25714 - RNA, 1809 nt, Artificial Sequence
  mRNA product Design b-4 (hSL-A100) comprising derived and/or modified sequence from LASV(Lassa virus/H.sapiens-wt/NGA/2018/ISTH_0959;Clade II)__AVV65099__GPCmut3 (opt1)
aggagagucccgcagucggcguccagcggcucugcuuguucgugugugugucguugcaggccuuauucaagcuuaccaugggccagaucaucaccuucuuccaggaggugccccacgucaucgaggaggugaugaacaucgugcugaucgcccucagccugcuggccauccucaaggggaucuacaacgucgugaccugcggccuguucgggcugguguccuuccuccugcugugcggccgcagcugcuccacgaccuacaagggggucuacgagcuccagacccuggagcuggacauggcgagccucaacaugaccaugccgcuguccugcacgaagaacaacagccaccacuacaucauggugggcaacgagaccggccuggagcucacccugaccaacacguccaucaucaaccacaaguucugcaaccugagcgacgcccacaagaagaaccucuacgaccacgcccugauguccaucaucagcaccuuccaccuguccauccccaacuucaaccaguacgaggccaugagcugcgacuucaacgggggcaagaucuccgugcaguacaaccucagccacgccuacgcgaucgacgccgccaaccacugcgggaccaucgccaacggcguccugcagaccuucaugcggauggcguggggcggguccuacaucgcccuggacagcggcaagggguccugggacugcaucaugacgagcuaccaguaccucaucauccagaacaccaccugggaggaccacugccaguucucccgccccagccccaucggcuaccuggggcugcucagccagcggacccgcgacaucuacaucucccggcgccgccggggcacguucaccuggacccucagcgacuccgagggcaacgagacccccgggggcuacugccugacgcgguggaugcugaucgaggccgagcucaagugcuucgggaacaccgccguggccaagugcaacgagaagcacgacgaggaguucugcgacaugcugcgccuguucgacuucaacaagcaggcgauccggcgccucaagacccccgcccagaugagcauccagcugaucaacaaggccgugaacgcccugaucaacgaccagcucaucaugaagaaccaccuccgggacaucaugggcaucccguacugcaacuacuccaaguacugcuaccugaaccacaccgucacggggaagaccagccugccccgcugcugccugguguccaacggcagcuaccugaacgagacccacuucuccgacgacaucgagcagcaggccgacaacaugaucaccgagcuccugcagaaggaguacaucgaccggcagggcaagacgccccuggggcucguggaccuguucgucuucagcaccuccuucuaccugaucagcaucuuccugcaccucgugaagaucccgacccaccgccacgugaucggcaagcccugccccaagccccaccggcugaaccacauggggaucugcuccugcggccuguacaagcacccggggguccccgugaaguggaagcgcugaggacuaguaauaaggaaacuguaugaaugucugugggcaggaagugaagagauccuucuguaaagguuuuuggaauuaugucugcugaauaauaaacuuuuuugaaauaauaaaucugguagaaaaaugagaucucaaaggcucuuuucagagccaccaaaaaaaaaaaaaaaaaaaaaaaaaaaaaaaaaaaaaaaaaaaaaaaaaaaaaaaaaaaaaaaaaaaaaaaaaaaaaaaaaaaaaaaaaaaaaaaaaaaaa

SEQ ID NO: 25715 - RNA, 1809 nt, Artificial Sequence
  mRNA product Design b-4 (hSL-A100) comprising derived and/or modified sequence from LASV(LASV003-NIG-2008;Clade II)__AIT17580__GPCmut3 (opt1)
aggagagucccgcagucggcguccagcggcucugcuuguucgugugugugucguugcaggccuuauucaagcuuaccaugggccagaucaucaccuucuuccaggaggugccccacgucaucgaggaggugaugaacaucgugcugaucgcccucagccugcuggccauccucaaggggaucuacaacgucgcgaccugcggccuguucgggcugguguccuuccuccugcugugcggccgcagcugcuccacgaccuacaaggggguguacgagcuccagacccuggagcuggacauggccagccucaacaugaccaugccgcuguccugcacgaagaacaacagccaccacuacaucauggucggcaacgagaccggccuggagcucacccugaccaacacguccaucaucaaccacaaguucugcaaccugagcgacgcccacaagaagaaccucuacgaccacgcccugauguccaucaucagcaccuuccaccuguccauccccaacuucaaccaguacgaggccaugagcugcgacuucaacgggggcaagaucuccgugcaguacaaccucagccacaccuacgcgguggacgccgccaaccacugcgggaccaucgccaacggcguccugcagacguucaugcggauggcguggggcggguccuacaucgcccuggacagcggcaagggguccugggacugcaucaugaccagcuaccaguaccucaucauccagaacaccaccugggaggaccacugccaguucucccgccccagccccaucggcuaccuggggcugcucagccagcggacgcgcgacaucuacaucucccggcgccgccggggcaccuucaccuggacccucagcgacuccgagagcaacgagacgccgggcggguacugccugacccgguggaugcugaucgaggccgagcucaagugcuucggcaacaccgccguggccaagugcaacgagaagcacgacgaggaguucugcgacaugcugcgccuguucgacuucaacaagcaggcgauccggcgccucaaggcccccgcccagauguccauccagcugaucaacaaggccgugaacgcccugaucaacgaccagcucaucaugaagaaccaccuccgggacaucauggggauccccuacugcaacuacagcaaguacugcuaccugaaccacaccgucacgggccgcaccucccugccccggugcugccuggugagcaacggguccuaccugaacgagacccacuucagcgacgacaucgagcagcaggcggacaacaugaucaccgagcuccugcagaaggaguacauggaccgccagggcaagacgccccugggccucguggaccuguucgucuucuccaccagcuucuaccugaucuccaucuuccugcaccucgugaagaucccgacccaccggcacgugaucgggaagcccugccccaagccccaccgccugaaccacaugggcaucugcagcugcgggcuguacaagcacccgggcguccccgugaaguggaagcggugaggacuaguaauaaggaaacuguaugaaugucugugggcaggaagugaagagauccuucuguaaagguuuuuggaauuaugucugcugaauaauaaacuuuuuugaaauaauaaaucugguagaaaaaugagaucucaaaggcucuuuucagagccaccaaaaaaaaaaaaaaaaaaaaaaaaaaaaaaaaaaaaaaaaaaaaaaaaaaaaaaaaaaaaaaaaaaaaaaaaaaaaaaaaaaaaaaaaaaaaaaaaaaaaa

SEQ ID NO: 25716 - RNA, 1809 nt, Artificial Sequence
  mRNA product Design b-4 (hSL-A100) comprising derived and/or modified sequence from LASV(LASV035-NIG-2009;Clade II)__AIT17588__GPCmut3 (opt1)
aggagagucccgcagucggcguccagcggcucugcuuguucgugugugugucguugcaggccuuauucaagcuuaccaugggccagaucaucaccuucuuccaggaggugccccacgucaucgaggaggugaugaacaucgugcugaucgcccucagccugcuggccauccucaaggggaucuacaacgucgcgaccugcggccuguucgggcugguguccuuccuccugcugugcggccgcagcugcuccacgaccuacaaggggguguacgagcuccagacccuggagcuggacauggccagccucaacaugaccaugccgcuguccugcacgaagaacaacagccaccacuacaucauggucggcaacgagaccggccuggagcucacccugaccaacacguccaucaucaaccacaaguucugcaaccugagcgacgcccacaagaagaaccucuacgaccacgcccugauguccaucaucagcaccuuccaccuguccauccccaacuucaaccaguacgaggccaugagcugcgacuucaacgggggcaagaucuccgugcaguacaaccucagccacgcguacgccguggacgccgccaaccacugcgggaccaucgcgaacggcguccugcagaccuucaugcggauggccuggggcggguccuacaucgcccuggacagcggcaagggguccugggacugcaucaugacgagcuaccaguaccucaucauccagaacaccaccugggaggaccacugccaguucucccgccccagccccaucggcuaccuggggcugcucagccagcggacccgcgacaucuacaucucccggcgccgccggggcacguucaccuggacccucagcgacuccgagggcaacgagacccccgggggcuacugccugacgcgguggaugcugaucgaggccgagcucaagugcuucgggaacaccgccguggcgaagugcaacgagaagcacgacgaggaguucugcgacaugcugcgccuguucgacuucaacaagcaggccauccggcgccucaaggcccccgcccagaugagcauccagcugaucaacaaggccgugaacgcgcugaucaacgaccagcucaucaugaagaaccaccuccgggacaucaugggcauccccuacugcaacuacuccaaguacugcuaccugaaccacaccgucaccgggaagacgagccugccccgcugcugccugguguccaacggcagcuaccugaacgagacccacuucuccgacgacaucgagcagcaggccgacaacaugaucaccgagcuccugcagaaggaguacaucgaccggcagggcaagaccccgcuggggcucguggaccuguucgucuucagcacguccuucuaccugaucagcaucuuccugcaccucgugaagaucccgacccaccgccacgugaucggcaagcccugccccaagccccaccggcugaaccacauggggaucugcuccugcggccuguacaagcacccggggguccccgugaaguggaagcgcugaggacuaguaauaaggaaacuguaugaaugucugugggcaggaagugaagagauccuucuguaaagguuuuuggaauuaugucugcugaauaauaaacuuuuuugaaauaauaaaucugguagaaaaaugagaucucaaaggcucuuuucagagccaccaaaaaaaaaaaaaaaaaaaaaaaaaaaaaaaaaaaaaaaaaaaaaaaaaaaaaaaaaaaaaaaaaaaaaaaaaaaaaaaaaaaaaaaaaaaaaaaaaaaaa

SEQ ID NO: 25717 - RNA, 1809 nt, Artificial Sequence
  mRNA product Design b-4 (hSL-A100) comprising derived and/or modified sequence from LASV(LASV1000-NIG-2009;Clade II)__AIT17782__GPCmut3 (opt1)
aggagagucccgcagucggcguccagcggcucugcuuguucgugugugugucguugcaggccuuauucaagcuuaccaugggccagaucaucaccuucuuccaggaggugccccacgucaucgaggaggugaugaacaucgugcugaucgcccucagccugcuggccauccucaaggggaucuacaacgucgcgaccugcggccuguucgggcugguguccuuccuccugcugugcggccgcagcugcuccacgaccuacaaggggguguacgagcuccagacccuggagcuggacauggccagccucaacaugaccaugccgcuguccugcacgaagaacaacagccaccacuacaucauggucggcaacgagaccggccuggagcucacccugaccaacacguccaucaucaaccacaaguucugcaaccugagcgacgcccacaagaagaaccucuacgaccacgcccugauguccaucaucagcaccuuccaccuguccauccccaacuucaaccaguacgaggccaugagcugcgacuucaacgggggcaagaucuccgugcaguacaaccucagccacaccuacgcgguggacgccgccaaccacugcgggaccaucgccaacggcguccugcagacguucaugcggauggcguggggcggguccuacaucgcccuggacagcggcaagggguccugggacugcaucaugaccagcuaccaguaccucaucauccagaacaccaccugggaggaccacugccaguucucccgccccagccccaucggcuaccuggggcugcucagccagcggacgcgcgacaucuacaucucccggcgccgccggggcaccuucaccuggacccucagcgacuccgagggcaacgagacgcccgggggcuacugccugacccgguggaugcugaucgaggccgagcucaagugcuucgggaacaccgccguggccaagugcaacgagaagcacgacgaggaguucugcgacaugcugcgccuguucgacuucaacaagcaggcgaucaagcggcucaagacccccgcccagaugagcauccagcugaucaacaaggccgugaacgcccugaucaacgaccagcucaucaugaagaaccaccuccgcgacaucaugggcauccccuacugcaacuacuccaaguacugcuaccugaaccacacggucaccgggaagaccagccugccccggugcugccugguguccaacggcagcuaccugaacgagacccacuucuccgacgacaucgagcagcaggccgacaacaugaucacggagcuccugcagaaggaguacaucgaccgccagggcaagaccccgcuggggcucguggaccuguucgucuucagcaccuccuucuaccugaucagcaucuuccugcaccucgugaagaucccgacccaccggcacguggucggcaagcccugccccaagccccaccgccugaaccacauggggaucugcuccugcggccuguacaagcacccgggggugcccgugaaguggaagcggugaggacuaguaauaaggaaacuguaugaaugucugugggcaggaagugaagagauccuucuguaaagguuuuuggaauuaugucugcugaauaauaaacuuuuuugaaauaauaaaucugguagaaaaaugagaucucaaaggcucuuuucagagccaccaaaaaaaaaaaaaaaaaaaaaaaaaaaaaaaaaaaaaaaaaaaaaaaaaaaaaaaaaaaaaaaaaaaaaaaaaaaaaaaaaaaaaaaaaaaaaaaaaaaaa

SEQ ID NO: 25718 - RNA, 1809 nt, Artificial Sequence
  mRNA product Design b-4 (hSL-A100) comprising derived and/or modified sequence from LASV(LASV221-NIG-2010;Clade II)__AIT17624__GPCmut3 (opt1)
aggagagucccgcagucggcguccagcggcucugcuuguucgugugugugucguugcaggccuuauucaagcuuaccaugggccagaucaucaccuucuuccaggaggugccccacgucaucgaggaggugaugaacaucgugcugaucgcccucagccugcuggccauccucaaggggaucuacaacgucgcgaccugcggccuguucgggcugguguccuuccuccugcugugcggccgcagcugcuccacgaccuacaaggggguguacgagcuccagacccuggagcuggacauggccagccucaacaugaccaugccgcuguccugcacgaagaacaacagccaccacuacaucauggucggcaacgagaccggccuggagcucacccugaccaacacguccaucaucaaccacaaguucugcaaccugagcgacgcccacaagaagaaccucuacgaccacgcccugauguccaucaucagcaccuuccaccuguccauccccaacuucaaccaguacgaggccaugagcugcgacuucaacgggggcaagaucuccgugcaguacaaccucagccacaccuacgcgaucgacgccgccaaccacugcgggaccaucgccaacggcgugcugcagacguucaugcggauggcguggggcggguccuacaucgcccuggacagcggcaagggguccugggacugcaucaugaccagcuaccaguaccucaucauccagaacaccaccugggaggaccacugccaguucucccgccccagccccaucggcuaccuggggcugcucagccagcggacgcgcgacaucuacaucucccggcgccgccggggcaccuucaccuggacccucagcgacuccgagggcaacgagacgcccgggggcuacugccugacccgguggaugcugaucgaggccgagcucaagugcuucgggaacaccgccgucgccaagugcaacgagaagcacgacgaggaguucugcgacaugcugcgccuguucgacuucaacaagcaggcgauccggcgccucaagacccccgcccagaugagcauccagcugaucaacaaggccgugaacgcccugaucaacgaccagcucaucaugaagaaccaccuccgggacaucaugggcauccccuacugcaacuacuccaaguacugcuaccugaaccacacggugaccgggaagaccagccugccccgcugcugccuggucuccaacggcagcuaccugaacgagacccacuucuccgacgacaucgagcagcaggccgacaacaugaucacggagaugcuccagaaggaguacauggaccggcagggcaagaccccgcuggggcugguggaccucuucguguucagcaccuccuucuaccugaucagcaucuuccugcaccuggucaagaucccgacccaccgccacgugaucggcaagcccugccccaagccccaccggcucaaccacauggggaucugcuccugcggccuguacaagcacccgggggugcccgucaaguggaagcgcugaggacuaguaauaaggaaacuguaugaaugucugugggcaggaagugaagagauccuucuguaaagguuuuuggaauuaugucugcugaauaauaaacuuuuuugaaauaauaaaucugguagaaaaaugagaucucaaaggcucuuuucagagccaccaaaaaaaaaaaaaaaaaaaaaaaaaaaaaaaaaaaaaaaaaaaaaaaaaaaaaaaaaaaaaaaaaaaaaaaaaaaaaaaaaaaaaaaaaaaaaaaaaaaaa

SEQ ID NO: 25719 - RNA, 1809 nt, Artificial Sequence
  mRNA product Design b-4 (hSL-A100) comprising derived and/or modified sequence from LASV(LASV237-NIG-2010;Clade II)__AIT17638__GPCmut3 (opt1)
aggagagucccgcagucggcguccagcggcucugcuuguucgugugugugucguugcaggccuuauucaagcuuaccaugggccagaucaucaccuucuuccaggaggugccccacgucaucgaggaggugaugaacaucgugcugaucgcccucagccugcuggccauccucaaggggaucuacaacgucgcgaccugcggccuguucgggcugguguccuuccuccugcugugcggccgcagcugcuccacgaccuacaaggggguguacgagcuccagacccuggagcuggacauggccagccucaacaugaccaugccgcuguccugcacgaagaacaacagccaccacuacaucauggucggcaacgagaccggccuggagcucacccugaccaacacguccaucaucaaccacaaguucugcaaccugagcgacgcccacaagaaggaccucuacgaccacgcccugauguccaucaucagcaccuuccaccuguccauccccaacuucaaccaguacgaggccaugagcugcgacuucaacgggggcaagaucuccgugcaguacaaccucagccacaccuacgcgguggacgccgccaaccacugcgggaccaucgccaacggcguccugcagacguucaugcggauggcguggggcggguccuacaucgcccuggacagcggcaagggguccugggacugcaucaugaccagcuaccaguaccucaucauccagaacaccaccugggaggaccacugccaguucucccgccccagccccaucggcuaccuggggcugcucagccagcggacgcgcgacaucuacaucucccggcgccgccggggcaccuucaccuggacccucagcgacuccgagggcaacgagacgcccgggggcuacugccugacccgguggaugcugaucgaggccgagcucaagugcuucgggaacaccgccguggccaagugcaacgagaagcacgacgaggaguucugcgacaugcugcgccuguucgacuucaacaagcaggcgauccggcgccucaagacccccgcccagaugagcauccagcugaucaacaaggccgugaacgcccugaucaacgaccagcucaucaugaagaaccaccuccgggacaucaugggcauccccuacugcaacuacuccaaguacugcuaccugaaccacacggucaccgggaagaccagccugccccgcugcugccugguguccaacggcagcuaccugaacgagacccacuucuccgacgacaucgagcagcaggccgacaacaugaucacggagcuccugcagaaggaguacauggaccggcagggcaagaccccgcuggggcucguggaccuguucgucuucagcaccuccuucuaccugaucagcaucuuccugcaccucaucaagaucccgacccaccgccacaucacgggcaagcccugccccaagccccaccggcugaaccacauggggaucugcuccugcggccuguacaagcacccgggggugcccgugaaguggaagcgcugaggacuaguaauaaggaaacuguaugaaugucugugggcaggaagugaagagauccuucuguaaagguuuuuggaauuaugucugcugaauaauaaacuuuuuugaaauaauaaaucugguagaaaaaugagaucucaaaggcucuuuucagagccaccaaaaaaaaaaaaaaaaaaaaaaaaaaaaaaaaaaaaaaaaaaaaaaaaaaaaaaaaaaaaaaaaaaaaaaaaaaaaaaaaaaaaaaaaaaaaaaaaaaaaa

SEQ ID NO: 25720 - RNA, 1809 nt, Artificial Sequence
  mRNA product Design b-4 (hSL-A100) comprising derived and/or modified sequence from LASV(LASV253-NIG-2011;Clade II)__AIT17670__GPCmut3 (opt1)
aggagagucccgcagucggcguccagcggcucugcuuguucgugugugugucguugcaggccuuauucaagcuuaccaugggccagaucaucaccuucuuccaggaggugccccacgucaucgaggaggugaugaacaucgugcugaucgcccucagccugcuggccauccucaaggggaucuacaacgucgcgaccugcggccuguucgggcugguguccuuccuccugcugugcggccgcagcugcuccacgaccuacaaggggguguacgagcuccagacccuggagcuggacauggccagccucaacaugaccaugccgcuguccugcacgaagaacaacagccaccacuacaucauggucggcaacgagaccggccuggagcucacccugaccaacacguccaucaucaaccacaaguucugcaaccugagcgacgcccacaagaagaaccucuacgaccacgcccugauguccaucaucagcaccuuccaccuguccauccccaacuucaaccaguacgaggccaugagcugcgacuucaacgggggcaagaucuccgugcaguacaaccucagccacaccuacgcgguggacgccgccaaccacugcgggaccaucgccaacggcguccugcagacguucaugcggauggcguggggcggguccuacaucgcccuggacagcggcaagggguccugggacugcaucaugaccagcuaccaguaccucaucauccagaacaccaccugggaggaccacugccaguucucccgccccagccccaucggcuaccuggggcugcucagccagcggacgcgcgacaucuacaucucccggcgccgccggggcaccuucaccuggacccucagcgacuccgagggcaacgagacgcccgggggcuacugccugacccgguggaugcugaucgaggccgagcucaagugcuucgggaacaccgccguggccaagugcaacgagaagcacgacgaggaguucugcgacaugcugcgccuguucgacuucaacaagcaggcgauccggcgccucaaggcccccgcccagaugagcauccagcugaucaacaaggccgugaacgcccugaucaacgaccagcucaucaugaagaaccaccuccgggacaucaugggcaucccguacugcaacuacuccaaguacugcuaccugaaccacaccgucacggggcgcaccagccugccccggugcugccugguguccaacggcagcuaccugaacgagacccacuucuccgacgacaucgagcagcaggcggacaacaugaucaccgagcuccugcagaaggaguacaucgaccgccagggcaagacgccccuggggcucguggaccuguucgucuucagcaccuccuucuaccugaucagcaucuuccugcaccucgugaagaucccgacccaccggcacaucaucggcaagcccugccccaagccccaccgccugaaccacauggggaucugcuccugcggccuguacaagcacccgggggugcccgucaaguggaagcggugaggacuaguaauaaggaaacuguaugaaugucugugggcaggaagugaagagauccuucuguaaagguuuuuggaauuaugucugcugaauaauaaacuuuuuugaaauaauaaaucugguagaaaaaugagaucucaaaggcucuuuucagagccaccaaaaaaaaaaaaaaaaaaaaaaaaaaaaaaaaaaaaaaaaaaaaaaaaaaaaaaaaaaaaaaaaaaaaaaaaaaaaaaaaaaaaaaaaaaaaaaaaaaaaa

SEQ ID NO: 25721 - RNA, 1809 nt, Artificial Sequence
  mRNA product Design b-4 (hSL-A100) comprising derived and/or modified sequence from LASV(LASV254-NIG-2011;Clade II)__AIT17674__GPCmut3 (opt1)
aggagagucccgcagucggcguccagcggcucugcuuguucgugugugugucguugcaggccuuauucaagcuuaccaugggccagaucaucaccuucuuccaggaggugccccacgucaucgaggaggugaugaacaucgugcugaucgcccucagccugcuggccauccucaaggggaucuacaacgucgcgaccugcggccuguucgggcugguguccuuccuccugcugugcggccgcagcugcuccacgaccuacaaggggguguacgagcuccagacccuggagcuggacaugaccaaccucaacaugacgaugccgcugagcugcaccaagaacaacucccaccacuacaucauggucggcaacgagaccggccuggagcucacccugacgaacaccagcaucaucaaccacaaguucugcaaccuguccgacgcccacaagaagaaccucuacaaccacgcccugaugagcaucaucuccaccuuccaccugagcauccccaacuucaaccaguacgaggccauguccugcgacuucaacgggggcaagaucagcgugcaguacaaccucucccacagcuacgccguggacgcggccaaccacugcgggaccaucgccaacggcguccugcagacguucaugcggauggccuggggcggguccuacaucgcgcuggacagcggcaaggggaacugggacugcaucaugaccuccuaccaguaccucaucauccagaacaccaccugggaggaccacugccaguucagccgccccucccccaucggcuaccuggggcugcucagccagcggacgcgcgacaucuacaucagccggcgccgccggggcaccuucaccuggacccucuccgacagcgagggcaacgagacgcccgggggcuacugccugacccgguggaugcugaucgaggccgagcucaagugcuucgggaacaccgccguggccaagugcaacgagaagcacgacgaggaguucugcgacaugcugcgccuguucgacuucaacaagcaggccauccggcgccucaagacccccgcgcaggccaacauccagcugaucaacaaggccgugaacgcccugaucaacgaccagcucaucaugaagaaccaccuccgggacaucaugggcauccccuacugcaacuacuccaaguacugcuaccugaaccacacggucaccgggaagaccagccugccccgcugcugccugguguccaacggcagcuaccugaacgagacccacuucuccgacgacaucgagcagcaggccgacaacaugaucacggagcuccugcagaaggaguacauggaccggcagggcaagaccccgcuggggcucguggaccuguucgucuucagcaccuccuucuaccugaucagcaucuuccugcaccucgugaagaucccgacccaccgccacgugaucggcaagcccugccccaagccccaccggcugaaccacauggggaucugcuccugcggccuguacaagcacccggggguccccgugaaguggaagcgcugaggacuaguaauaaggaaacuguaugaaugucugugggcaggaagugaagagauccuucuguaaagguuuuuggaauuaugucugcugaauaauaaacuuuuuugaaauaauaaaucugguagaaaaaugagaucucaaaggcucuuuucagagccaccaaaaaaaaaaaaaaaaaaaaaaaaaaaaaaaaaaaaaaaaaaaaaaaaaaaaaaaaaaaaaaaaaaaaaaaaaaaaaaaaaaaaaaaaaaaaaaaaaaaaa

SEQ ID NO: 25722 - RNA, 1809 nt, Artificial Sequence
  mRNA product Design b-4 (hSL-A100) comprising derived and/or modified sequence from LASV(Nig08-A19;Clade III)__ADU56618__GPCmut3 (opt1)
aggagagucccgcagucggcguccagcggcucugcuuguucgugugugugucguugcaggccuuauucaagcuuaccaugggccagaucgugaccuucuuccaggaggucccccacgugaucgaggaggugaugaacaucguccugaucgcccucagcauccuggccauccugaaggggcucuacaacaucgcgaccugcggccugaucgggcuggugacguuccuccugcuguccggccgcagcugcuccaugaccuacaaggggguguacgagcuccagacccuggagcugaacaugaacacccucaacaugacgaugccgcugagcugcaccaagaacaacucccaccacuacaucauggucggcaacgagaccggccuggagcucacccugacgaacaccagccugcuccaccacaaguucugcaaccuguccgacgcccacaagaagaaccuguacgaccacacccucaugagcaucaucuccaccuuccaccugagcauccccaacuucaaccaguacgaggccauguccugcgacuucaacgggggcaagaucacggugcaguacaaccugagccacuccuacgccaucgacgccgcgaaccacugcgggaccguggccaacggcguccuccagaccuucaugcggauggccuggggcgggagcuacaucgcccuggacuccggccgcgggaagugggacugcaucaugaccagcuaccaguaccugaucauccagaacacgaccugggaggaccacugccaguucucccggcccagccccaucggcuaccucgggcugcugucccagcgcacccgggacaucuacaucagccgccggcgccggggcaccuucacguggacccugagcgacuccgagggcaacgagacccccgggggcuacugccucacccgcuggaugcugaucgaggcggagcugaagugcuucgggaacacggccguggccaagugcaacgagaagcacgacgaggaguucugcgacaugcuccggcuguucgacuucaacaagcaggccauccgccggcugaaggcccccgcgcagaugagcauccagcucaucaacaaggccgugaacgcccugaucaacgaccagcugaucaugaagaaccaccuccgcgacaucaugggcauccccuacugcaacuacuccaaguacugcuaccugaaccacaccagcaccgggcggaccucccugccccgcugcugccucgucagcaacggcuccuaccugaacgagacgcacuucagcgacgacaucgagcagcaggccgacaacaugaucaccgagaugcugcagaaggaguaccucgaccggcagggcaagaccccgcuggggcugguggaccuguucguguucuccaccagcuucuaccucaucuccaucuuccugcaccuggucaagaucccgacgcaccgccacaucgugggcaagcccugccccaagccccaccggcucaaccacauggggaucugcagcugcggccuguacaagcagccgggggugcccguccgcuggaagcggugaggacuaguaauaaggaaacuguaugaaugucugugggcaggaagugaagagauccuucuguaaagguuuuuggaauuaugucugcugaauaauaaacuuuuuugaaauaauaaaucugguagaaaaaugagaucucaaaggcucuuuucagagccaccaaaaaaaaaaaaaaaaaaaaaaaaaaaaaaaaaaaaaaaaaaaaaaaaaaaaaaaaaaaaaaaaaaaaaaaaaaaaaaaaaaaaaaaaaaaaaaaaaaaaa

SEQ ID NO: 25723 - RNA, 1812 nt, Artificial Sequence
  mRNA product Design b-4 (hSL-A100) comprising derived and/or modified sequence from LASV(G1180-SLE-2010;Clade IV)__AIT17168__GPCmut3 (opt1)
aggagagucccgcagucggcguccagcggcucugcuuguucgugugugugucguugcaggccuuauucaagcuuaccaugggccagaucgugaccuucuuccaggaggucccccacgugaucgaggaggugaugaacaucguccugaucgcccucagcauccuggccgugcugaaggggcucuacaacuucgcgaccugcggccugguggggcugcucaccuuccugcugcucugcggccgcuccugcaccgccagccgguacaagggggucuacgagcugcagacccuggagcucaacauggagacccugaacaugacgaugccgcuguccugcaccaagaacaacagccaccacuacaucauggugggcaacgagaccggccucgagcugacccugacgaacaccuccaucaucaaccacaaguucugcaaccucagcgacgcccacaagaagaaccuguacgaccacgcccugauguccaucaucagcaccuuccaccucuccauccccaacuucaaccaguacgaggccaugagcugcgacuucaacgggggcaagaucuccgugcaguacaaccugagccacuccuacgcgggggacgccgccaaccacugcggcaccgucgccaacggggugcugcagacguucaugcgcauggcguggggcggcagcuacaucgcccucgacuccgggcacggcagcugggacugcaucaugaccuccuaccaguaccugaucauccagaacaccaccugggaggaccacugccaguucagccggcccucccccaucggguaccugggccuccugagccagcgcacgcgggacaucuacaucagccgccggcgccggggcaccuucaccuggacccuguccgacagcgaggggaaggacacgccgggcggguacugccugacccgcuggaugcucaucgaggccgagcugaagugcuucggcaacaccgccguggccaagugcaacgagaagcacgacgaggaguucugcgacaugcugcggcuguucgacuucaacaagcaggcgauccagcgccugaaggcccccgcccagauguccauccagcugaucaacaaggccgucaacgcccucaucaacgaccagcugaucaugaagaaccaccuccgggacaucauggggauccccuacugcaacuacagcaaguacugcuaccucaaccacaccacgaccggcaagaccucccugcccaagugcugccuggugagcaacggcuccuaccucaacgagacccacuucagcgacgacaucgagcagcaggcggacaacaugaucacggagaugcugcagaaggaguacauggagcgccaggggaagacgccccugggccucguggaccuguucgucuucuccaccagcuucuaccugaucuccaucuuccugcaccucgugaagaucccgacccaccggcacaucgugggcaagagcugccccaagccccaccgccugaaccacauggggaucugcuccugcgggcuguacaagcagcccggcgucccggugaaguggaagcggugaggacuaguaauaaggaaacuguaugaaugucugugggcaggaagugaagagauccuucuguaaagguuuuuggaauuaugucugcugaauaauaaacuuuuuugaaauaauaaaucugguagaaaaaugagaucucaaaggcucuuuucagagccaccaaaaaaaaaaaaaaaaaaaaaaaaaaaaaaaaaaaaaaaaaaaaaaaaaaaaaaaaaaaaaaaaaaaaaaaaaaaaaaaaaaaaaaaaaaaaaaaaaaaaa

SEQ ID NO: 25724 - RNA, 1812 nt, Artificial Sequence
  mRNA product Design b-4 (hSL-A100) comprising derived and/or modified sequence from LASV(G1442-SLE-2011;Clade IV)__AIT17180__GPCmut3 (opt1)
aggagagucccgcagucggcguccagcggcucugcuuguucgugugugugucguugcaggccuuauucaagcuuaccaugggccagaucgugaccuucuuccaggaggucccccacgugaucgaggaggugaugaacaucguccugaucgcccucagcauccuggccgugcugaaggggcucuacaacguggcgaccugcggccugaucgggcuggucacguuccuccugcugugcggccgcuccugcaccaccacccucuacaaggggguguacgagcugcagacgcuggagcucaacauggagacccugaacaugaccaugccgcugagcugcaccaagaacaacucccaccacuacauccgggugggcaacgagacgggccucgagcugacccugaccaacaccagcaucaucaaccacaaguucugcaaccucuccgacgcccacaagaagaaccuguacgaccacgcccugaugagcaucaucuccacguuccaccucagcauccccaacuucaaccaguacgaggccauguccugcgacuucaacgggggcaagaucagcguccaguacaaccugucccacagcuacgccggggacgcggccaaccacugcggcaccguggccaacggggugcugcagaccuucaugcgcauggccuggggcggcuccuacaucgcgcucgacagcgggcggggcaacugggacugcaucaugaccuccuaccaguaccugaucauccagaacacgaccugggacgaccacugccaguucagccgccccucccccaucggguaccugggccuccugagccagcggacccgcgacgucuacaucucccggcgccgccggggcaccuucacguggacccugagcgacagcgaggggaaggacaccccgggcggguacugccugacccgguggaugcucaucgaggccgagcugaagugcuucggcaacacggccguggccaagugcaacgagaagcacgacgaggaguucugcgacaugcugcgccucuucgacuucaacaagcaggccauccagcggcugaaggcgcccgcccagauguccauccagcugaucaacaaggccgugaacgcccucaucaacgaccagcugaucaugaagaaccaccuccgcgacaucauggggauccccuacugcaacuacagcaaguacugcuaccugaacaacaccgccaccggcaagaccucccugcccaagugcugccugaucagcaacggcuccuaccucaacgagacgcacuucagcgacgacaucgagcaggaggcggacaacaugaucaccgagaugcugcagaaggaguacauggagcggcaggggaagacgccccugggccucgucgaccuguucguguucuccaccagcuucuaccugaucuccaucuuccugcaccucgugaagaucccgacccaccgccacaucgucggcaagagcugccccaagccccaccggcugaaccacauggggaucugcuccugcgggcuguacaagcagcccggcgugccggugcgcuggaagcggugaggacuaguaauaaggaaacuguaugaaugucugugggcaggaagugaagagauccuucuguaaagguuuuuggaauuaugucugcugaauaauaaacuuuuuugaaauaauaaaucugguagaaaaaugagaucucaaaggcucuuuucagagccaccaaaaaaaaaaaaaaaaaaaaaaaaaaaaaaaaaaaaaaaaaaaaaaaaaaaaaaaaaaaaaaaaaaaaaaaaaaaaaaaaaaaaaaaaaaaaaaaaaaaaa

SEQ ID NO: 25725 - RNA, 1812 nt, Artificial Sequence
  mRNA product Design b-4 (hSL-A100) comprising derived and/or modified sequence from LASV(G3010-SLE-2013;Clade IV)__AIT17344__GPCmut3 (opt1)
aggagagucccgcagucggcguccagcggcucugcuuguucgugugugugucguugcaggccuuauucaagcuuaccaugggccagaucgugaccuucuuccaggaggucccccacgugaucgaggaggugaugaacaucguccugaucgcccucagcauccuggccgugcugaaggggcucuacaacuucgcgaccugcggccugguggggcuggucacguuccuccugcugugcggccgcuccugcaccaccagccucuacaaggggguguacgagcugcagacccuggagcucaacauggagacgcugaacaugaccaugccgcuguccugcaccaagaacaacagccaccacuacaucauggugggcaacgagaccggccucgagcugacgcugaccaacaccuccaucaucaaccacaaguucugcaaccucagcgacgcccacaagaagaaccuguacaaccacgcccugauguccaucaucagcaccuuccaccucuccauccccaacuucaaccaguacgaggccaugagcugcgacuucaacgggggcaagaucuccguccaguacaaccugagccacuccuacgccggggacgcggccagccacugcggcacgguggccaacggggugcugcagaccuucaugcggauggccuggggcggcuccuacaucgcgcucgacagcggguacggcaagugggacugcaucaugaccuccuaccaguaccugaucauccagaacaccacgugggaggaccacugccaguucagccgccccucccccaucggguaccugggccuccugagccagcggacccgcgacaucuacaucagccggcgccgccggggcaccuucaccuggacgcuguccgacagcgaggggaaggacaccccgggcggguacugccugacccgguggaugcucaucgaggccgagcugaagugcuucggcaacaccgccgucgccaagugcaacgagaagcacgacgaggaguucugcgacaugcugcgccucuucgacuucaacaagcaggccauccagcggcugaagacgcccgcgcagauguccauccagcugaucaacaaggccgugaacgcccucaucaacgaccagcugaucaugaagaaccaccuccgcgacaucauggggauccccuacugcaacuacagcaaguacugcuaccugaaccacaccaccaccggcaagacgucccugcccaagugcugccuggugagcaacggcuccuaccucaacgagacccacuucagcgacgacaucgagcagcaggccgacaacaugaucaccgagaugcugcagaaggaguacauggagcggcaggggaagacgccccugggccucgucgaccuguucguguucuccaccagcuucuaccugaucuccaucuuccugcaccucgugaagaucccgacccaccgccacaucgucggcaagagcugccccaagccccaccggcugaaccacauggggaucugcuccugcgggcuguacaagcagcccggcgugccggugcgcuggaagcggugaggacuaguaauaaggaaacuguaugaaugucugugggcaggaagugaagagauccuucuguaaagguuuuuggaauuaugucugcugaauaauaaacuuuuuugaaauaauaaaucugguagaaaaaugagaucucaaaggcucuuuucagagccaccaaaaaaaaaaaaaaaaaaaaaaaaaaaaaaaaaaaaaaaaaaaaaaaaaaaaaaaaaaaaaaaaaaaaaaaaaaaaaaaaaaaaaaaaaaaaaaaaaaaaa

SEQ ID NO: 25726 - RNA, 1812 nt, Artificial Sequence
  mRNA product Design b-4 (hSL-A100) comprising derived and/or modified sequence from LASV(G502-SLE-2009;Clade IV)__AIT17126__GPCmut3 (opt1)
aggagagucccgcagucggcguccagcggcucugcuuguucgugugugugucguugcaggccuuauucaagcuuaccaugggccagaucgugaccuucuuccaggaggucccccacgugaucgaggaggugaugaacaucguccugaucgcccucagcauccuggccgugcugaaggggcucuacaacuucgcgaccugcggccugguggggcugcucacguuccugcugcucugcggccgcuccugcaccaccgggcuguacaagggcgucuacgagcugcagacccucgagcugaacauggagacgcugaacaugaccaugccgcucagcugcaccaagaacaacucccaccacuacaucauggugggcaacgagaccgggcuggagcugacgcucaccaacaccagcaucaucaaccacaaguucugcaaccuguccgacgcccacaagaagaaccuguacgaccacgcccucaugagcaucaucuccaccuuccaccugagcauccccaacuucaaccaguacgaggccauguccugcgacuucaacggcgggaagaucagcgugcaguacaaccugucccacagcuacgccggcgacgcggccgaccacugcgggacggucgccaacggcgugcuccagaccuucaugcggauggccuggggcggguccuacaucgcgcuggacagcggccgcgggcggugggacugcaucaugaccuccuaccaguaccugaucauccagaacaccacgugggaggaccacugccaguucagccgccccucccccaucggcuaccucggccugcugagccagcggacccgcgacaucuacaucucccggcgccgccgggggaccuucaccuggacgcugagcgacagcgagggcaaggacacccccgggggcuacugccucacccgguggaugcugaucgaggccgagcugaagugcuucgggaacaccgccguggccaagugcaacgagaagcacgacgaggaguucugcgacaugcuccgccuguucgacuucaacaagcaggccauccagcggcugaaggcgcccgcccagauguccauccagcucaucaacaaggccgucaacgcccugaucaacgaccagcuggugaugaagaaccaccuccgcgacaucaugggcauccccuacugcaacuacagccgguacugcuaccugaaccacacgaccaccggccgcaccucccugcccaagugcugccucgugagcaacggguccuaccugaacgagacgcacuucagcgacgacaucgagcagcaggccgacaacaugaucaccgagaugcugcagaaggaguacauggagcggcagggcaagaccccgcucgggcuggucgaccuguucguguucuccaccagcuucuaccugaucuccaucuuccuccaccuggugaagaucccgacgcaccgccacaucgucggcaagagcugccccaagccccaccggcugaaccacauggggaucugcuccugcggccucuacaagcagcccggcgugccggugaaguggaagcgcugaggacuaguaauaaggaaacuguaugaaugucugugggcaggaagugaagagauccuucuguaaagguuuuuggaauuaugucugcugaauaauaaacuuuuuugaaauaauaaaucugguagaaaaaugagaucucaaaggcucuuuucagagccaccaaaaaaaaaaaaaaaaaaaaaaaaaaaaaaaaaaaaaaaaaaaaaaaaaaaaaaaaaaaaaaaaaaaaaaaaaaaaaaaaaaaaaaaaaaaaaaaaaaaaa

SEQ ID NO: 25727 - RNA, 1812 nt, Artificial Sequence
  mRNA product Design b-4 (hSL-A100) comprising derived and/or modified sequence from LASV(G733-SLE-2010;Clade IV)__AIT17154__GPCmut3 (opt1)
aggagagucccgcagucggcguccagcggcucugcuuguucgugugugugucguugcaggccuuauucaagcuuaccaugggccagaucgugaccuucuuccaggaggucccccacgugaucgaggaggugaugaacaucguccugaucgcccucagcauccuggccgugcugaaggggcucuacaacuucgcgaccugcggcaucguggggcuggucuccuuccugcuccugugcggccgcagcugcacgaccucccuguacaaggggguguacgagcuccagacccuggagcugaacauggagacccucaacaugacgaugccgcugagcugcaccaagaacaacucccaccacuacaucauggugggcaacgagaccggccuggagcucacccugacgaacaccagcaucaucaaccacaaguucugcaaccuguccgacgcccacaagaagaaccucuacgaccacgcccugaugagcaucaucuccaccuuccaccugagcauccccaacuucaaccaguacgaggccauguccugcgacuucaacgggggcaagaucagcguccaguacaaccucucccacagcuacgccggggacgcggccaaccacugcggcaccaucgccaacggggugcugcagacguucaugcggauggccuggggcggcuccuacaucgcgcuggacagcgggcgcgaccggugggacugcaucaugaccuccuaccaguaccucaucauccagaacaccaccugggaggaccacugccaguucagccgccccucccccaucggcuaccuggggcugcucagccagcggacgcgcgacaucuacaucagccggcgccgccggggcaccuucaccuggacccucuccgacagcgagggcaaggacacgcccgggggcuacugccugacccgguggaugcugaucgaggccgagcucaagugcuucgggaacaccgccguggccaagugcaacgagaagcacgacgaggaguucugcgacaugcugcgccuguucgacuucaacaagcaggccauccagcggcucaaggcgcccgcccagauguccauccagcugaucaacaaggccgucaacgcccugaucaacgaccagcucaucaugaagaaccaccuccgcgacaucaugggcauccccuacugcaacuacagcaaguacugcuaccugaaccacaccacgaccgggaagaccucccugcccaagugcugccuggugagcaacggcuccuaccugaacgagacccacuucagcgacgacaucgagcagcaggccgacaacaugaucacggagaugcuccagaaggaguacauggagcggcagggcaagaccccgcuggggcugguggaccucuucgucuucuccaccagcuucuaccugaucuccaucuuccugcaccuggugaagaucccgacccaccgccacguggucggcaagagcugccccaagccccaccggcucaaccacauggggaucugcuccugcggccuguacgggcagcccggcgugccggugaaguggaagcgcugaggacuaguaauaaggaaacuguaugaaugucugugggcaggaagugaagagauccuucuguaaagguuuuuggaauuaugucugcugaauaauaaacuuuuuugaaauaauaaaucugguagaaaaaugagaucucaaaggcucuuuucagagccaccaaaaaaaaaaaaaaaaaaaaaaaaaaaaaaaaaaaaaaaaaaaaaaaaaaaaaaaaaaaaaaaaaaaaaaaaaaaaaaaaaaaaaaaaaaaaaaaaaaaaa

SEQ ID NO: 25728 - RNA, 1812 nt, Artificial Sequence
  mRNA product Design b-4 (hSL-A100) comprising derived and/or modified sequence from MOPV/LASV reassortant(IGS-1;Clade IV)__AFY05576__GPCmut3 (opt1)
aggagagucccgcagucggcguccagcggcucugcuuguucgugugugugucguugcaggccuuauucaagcuuaccaugggccagaucgugaccuucuuccaggaggucccccacgugaucgaggaggugaugaacaucguccugaucgcccucagcgugcuggccgugcugaaggggcucuacaacuucgcgaccugcggccuggucgggcuggugacguuccuccugcugugcggccgcuccugcaccaccagccucuacaaggggguguacgagcugcagacccuggagcucaacauggagacgcugaacaugaccaugccgcuguccugcaccaagaacaacagccaccacuacaucauggucggcaacgagaccggccucgagcugacgcugaccaacaccuccaucaucaaccacaaguucugcaaccucagcgacgcccacaagaagaaccuguacgaccacgcccugauguccaucaucagcaccuuccaccucuccauccccaacuucaaccaguacgaggccaugagcugcgacuucaacgggggcaagaucuccgugcaguacaaccugagccacuccuacgccggggacgcggccaaccacugcggcacgguggccaacgggguccugcagaccuucaugcggauggccuggggcggcagcuacaucgcgcucgacuccgggcgcggcaacugggacugcaucaugaccagcuaccaguaccugaucauccagaacaccacgugggaggaccacugccaguucucccggcccagccccaucggguaccugggccuccugucccagcgcacccgggacaucuacaucagccgccggcgccggggcaccuucaccuggacgcugagcgacuccgagggggaggacaccccgggcggguacugccugacccgcuggaugcucaucgaggccgagcugaagugcuucggcaacaccgccguggccaagugcaacgagaagcacgacgaggaguucugcgacaugcugcggcuguucgacuucaacaagcaggccauccagcgccugaaggcgcccgcccagaugagcauccagcugaucaacaaggccgugaacgcccucaucaacgaccagcugaucaugaagaaccaccuccgggacaucauggggauccccuacugcaacuacuccaaguacugcuaccucaaccacacgaccaccggccgcaccagccugcccaagugcugccuggucuccaacggcagcuaccucaacgagacgcacuucuccgacgacaucgagcagcaggccgacaacaugaucaccgagaugcugcagaaggaguacauggagcggcaggggaagacgccccugggccucguggaccuguucguguucagcaccuccuucuaccugaucagcaucuuccugcaccucgucaagaucccgacccaccgccacaucguggggaaguccugccccaagccccaccggcugaaccacaugggcaucugcagcugcgggcuguacaagcagcccggcgugccggucaaguggaagcgcugaggacuaguaauaaggaaacuguaugaaugucugugggcaggaagugaagagauccuucuguaaagguuuuuggaauuaugucugcugaauaauaaacuuuuuugaaauaauaaaucugguagaaaaaugagaucucaaaggcucuuuucagagccaccaaaaaaaaaaaaaaaaaaaaaaaaaaaaaaaaaaaaaaaaaaaaaaaaaaaaaaaaaaaaaaaaaaaaaaaaaaaaaaaaaaaaaaaaaaaaaaaaaaaaa

SEQ ID NO: 25729 - RNA, 1812 nt, Artificial Sequence
  mRNA product Design b-4 (hSL-A100) comprising derived and/or modified sequence from LASV(LM765-SLE-2012;Clade IV)__AIT17814__GPCmut3 (opt1)
aggagagucccgcagucggcguccagcggcucugcuuguucgugugugugucguugcaggccuuauucaagcuuaccaugggccagaucgugaccuucuuccaggaggucccccacgugaucgaggaggugaugaacaucguccugaucgcccucagcauccuggccgugcugaaggggcucuacaacuucgcgaccugcggccugguggggcuggucacguuccuccugcugugcggccgcuccugcaccaccagccucuacaaggggguguacgagcugcagacccuggagcucaacauggagacgcugaacaugaccaugccgcuguccugcaccaagaacaacagccaccacuacaucauggugggcaacgagaccggccucgagcugacgcugaccaacaccuccaucaucgaccacaaguucugcaaccucagcgacgcccaccggaagaaccuguacgaccacgcccugauguccaucaucagcaccuuccaccucuccauccccaacuucaaccaguacgaggccaugagcugcgacuucaacgggggcaagaucuccguccaguacaaccugagccacuccuacgccaaggacgcggccgaccacugcgggacgguggccaacggcgugcugcagaccuucaugcgcauggccuggggcgggagcuacaucgcgcucgacuccggccgggggcgcugggacugcaucaugaccagcuaccaguaccugaucauccagaacaccacgugggaggaccacugccaguucucccggcccagccccaucggcuaccuggggcuccugucccagcgcacccgggacaucuacaucagccgccggcgccggggcaccuucaccuggacgcugagcgacuccgagggcaaggacacccccgggggcuacugccugacccgcuggaugcucaucgaggccgagcugaagugcuucgggaacaccgccgucgccaagugcaacgagaagcacgacgaggaguucugcgacaugcugcggcuguucgacuucaacaagcaggccauccagcgccugaaggcgcccgcccagaugagcauccagcugaucaacaaggccgugaacgcccucaucaacgaccagcugaucaugaagaaccaccuccgggacaucaugggcauccccuacugcaacuacuccaaguacugcuaccucaaccacacgaccaccgggaagaccagccugcccaagugcugccugguguccaacggcagcuaccucaacgagacgcacuucuccgacgacaucgagcagcaggccgacaacaugaucaccgagaugcugcagaaggaguacauggagcgccagggcaagaccccgcuggggcucgucgaccuguucguguucagcaccuccuucuaccugaucagcaucuuccugcaccucgugaagaucccgacgcaccggcacaucgucggcaagcccugccccaagccccaccgccugaaccacauggggaucugcuccugcggccuguacaagcagccgggggugcccgugaaguggaagcggugaggacuaguaauaaggaaacuguaugaaugucugugggcaggaagugaagagauccuucuguaaagguuuuuggaauuaugucugcugaauaauaaacuuuuuugaaauaauaaaucugguagaaaaaugagaucucaaaggcucuuuucagagccaccaaaaaaaaaaaaaaaaaaaaaaaaaaaaaaaaaaaaaaaaaaaaaaaaaaaaaaaaaaaaaaaaaaaaaaaaaaaaaaaaaaaaaaaaaaaaaaaaaaaaa

SEQ ID NO: 25730 - RNA, 1812 nt, Artificial Sequence
  mRNA product Design b-4 (hSL-A100) comprising derived and/or modified sequence from LASV(LM776-SLE-2012;Clade IV)__AIT17824__GPCmut3 (opt1)
aggagagucccgcagucggcguccagcggcucugcuuguucgugugugugucguugcaggccuuauucaagcuuaccaugggccagaucgugaccuucuuccaggaggucccccacgugaucgaggaggugaugaacaucguccugaucgcccucagcauccuggccgugcugaaggggcucuacaacuucgcgaccugcggccugguggggcuggucacguuccuccugcugugcggccgcuccugcaccaccagcguguacaaggggguguacgagcuccagacccuggagcugaacauggagacgcucaacaugaccaugccgcuguccugcaccaagaacaacagccaccacuacaucauggucggcaacgagaccggccuggagcucacgcugaccaacaccuccaucaucaaccacaaguucugcaaccugagcgacgcccacaagaagaaccucuacgaccacgcccugauguccaucaucagcaccuuccaccuguccauccccaacuucaaccaguacgaggccaugagcugcgacuucaacgggggcaagaucuccgugcaguacaaccucagccacuccuacgccggggacgcggccaaccacugcggcacgguggccaacgggguccugcagaccuucaugcggauggccuggggcggcagcuacaucgcgcuggacuccgggcacggcaagugggacugcaucaugaccagcuaccaguaccucaucauccagaacaccacgugggaggaccacugccaguucucccgccccagccccaucggguaccugggccugcucucccagcggacccgcgacaucuacaucagccggcgccgccggggcaccuucaccuggacgcucagcgacuccgaggggaaggacaccccgggcggguacugccugacccgguggaugcugaucgaggccgagcucaagugcuucggcaacaccgccguggccaagugcaacgagaagcacgacgaggaguucugcgacaugcugcgccuguucgacuucaacaagcaggccauccagcggcucaaggcgcccgcccagaugagcauccagcugaucaacaaggccgugaacgcccugaucaacgaccagcucaucaugaagaaccaccuccgcgacaucauggggauccccuacugcaacuacuccaaguacugcuaccugaaccacacgaccaccggcaagaccagccugcccaagugcugccuggucuccaacggcagcuaccugaacgagacgcacuucuccgacgacaucgagcagcaggccgacaacaugaucaccgagaugcuccagaaggaguacauggagcggcaggggaagacgccccugggccugguggaccucuucguguucagcaccuccuucuaccugaucagcaucuuccugcaccuggucaagaucccgacccaccgccacaucguggggaaguccugccccaagccccaccggcucaaccacaugggcaucugcagcugcgggcuguacaagcagcccggcgugccgguccgcuggaagcggugaggacuaguaauaaggaaacuguaugaaugucugugggcaggaagugaagagauccuucuguaaagguuuuuggaauuaugucugcugaauaauaaacuuuuuugaaauaauaaaucugguagaaaaaugagaucucaaaggcucuuuucagagccaccaaaaaaaaaaaaaaaaaaaaaaaaaaaaaaaaaaaaaaaaaaaaaaaaaaaaaaaaaaaaaaaaaaaaaaaaaaaaaaaaaaaaaaaaaaaaaaaaaaaaa

SEQ ID NO: 25731 - RNA, 1812 nt, Artificial Sequence
  mRNA product Design b-4 (hSL-A100) comprising derived and/or modified sequence from LASV(Mad39;Clade IV)__ANH09722__GPCmut3 (opt1)
aggagagucccgcagucggcguccagcggcucugcuuguucgugugugugucguugcaggccuuauucaagcuuaccaugggccagaucgugaccuucuuccaggaggucccccacgugaucgaggaggugaugaacaucguccugaucgcccucagcauccuggccgugcugaaggggcucuacaacguggcgaccugcggccugaucgggcuggucacguuccuccugcugugcggccgcuccugcaccaccacccucuacaaggggguguacgagcugcaggcccuggagcucaacauggagacgcugaacaugaccaugccgcugagcugcaccaagaacaacucccaccacuacauccgggugggcaacgagaccggccucgagcugacgcugaccaacaccagccucaucaaccacaaguucugcaaccuguccgacgcccacaagaagaaccuguacgaccacgcccucaugagcaucaucuccaccuuccaccugagcauccccaacuucaaccaguacgaggccauguccugcgacuucaacgacgggaagaucagcguccaguacaaccugucccacacguacgcgggcgacaccgccaaccacugcgggaccguggccaacggcgugcuccagaccuucaugcgcauggccuggggcgggagcuacaucgcgcuggacuccggccgcgggggcugggacugcaucaugacgagcuaccaguaccugaucauccagaacaccaccugggaggaccacugccaguucucccggcccagccccaucggguaccucggccugcugucccagcggacccgcgacaucuacaucagccggcgccgccggggcacguucaccuggacccuguccgacagcgaggggaaggacaccccgggcggguacugccucacgcgguggaugcugaucgaggccgagcugaagugcuucggcaacaccgccgucgccaagugcaacgagaagcacgacgaggaguucugcgacaugcuccgccuguucgacuucaacaagcaggccauccagcggcugaaggcgcccgcccagaugagcauccagcucaucaacaaggccgugaacgcccugaucaacgaccagcugaucaugaagaaccaccuccgcgacaucauggggauccccuacugcaacuacuccaaguacugcuaccugaaccacaccgugaccggcaagacgagccugcccaagugcugccucgucuccaacggcagcuaccugaacgagacccacuucuccgacgacaucgagcagcaggccgacaacaugaucaccgagaugcugcagaaggaguacauggagcggcaggggaagacgccccucggccugguggaccuguucguguucagcaccuccuucuaccugaucagcaucuuccuccaccuggucaagaucccgacccaccgccacgugguggggaagcccugccccaagccccaccggcugaaccacaugggcaucugcuccugcggguucuacaagcagccgggcguccccgugcgcuggaagcggugaggacuaguaauaaggaaacuguaugaaugucugugggcaggaagugaagagauccuucuguaaagguuuuuggaauuaugucugcugaauaauaaacuuuuuugaaauaauaaaucugguagaaaaaugagaucucaaaggcucuuuucagagccaccaaaaaaaaaaaaaaaaaaaaaaaaaaaaaaaaaaaaaaaaaaaaaaaaaaaaaaaaaaaaaaaaaaaaaaaaaaaaaaaaaaaaaaaaaaaaaaaaaaaaa

SEQ ID NO: 25732 - RNA, 1812 nt, Artificial Sequence
  mRNA product Design b-4 (hSL-A100) comprising derived and/or modified sequence from LASV(Z0947-SLE-2011;Clade IV)__AIT17840__GPCmut3 (opt1)
aggagagucccgcagucggcguccagcggcucugcuuguucgugugugugucguugcaggccuuauucaagcuuaccaugggccagaucgugaccuucuuccaggaggucccccacgugaucgaggaggugaugaacaucguccugaucgcccucagcauccuggccgugcugaaggggcucuacaacuucgcgaccugcggccugguggggcuggucacguuccuccugcugugcggccgcuccugcaccaucagccucuacaaggggguguacgagcugcagacccuggagcucaacauggagacccugaacaugacgaugccgcuguccugcaccaagaacaacagccaccacuacaucauggugggcaacgagaccggccucgagcugacccugacgaacaccuccaucaucaaccacaaguucugcaaccucagcgacgcccacaagaagaaccuguacgaccacgcccugauguccaucaucagcaccuuccaccucuccauccccaacuucaaccaguacgaggccaugagcugcgacuucaacgggggcaagaucuccguccaguacaaccugagccacuccuacgccggggacgcggccaaccacugcggcaccguggccaacggggugcugcagacguucaugcggauggccuggggcggcagcuacaucgcgcucgacuccgggcgcgaccggugggacugcaucaugaccagcuaccaguaccugaucauccagaacaccaccugggaggaccacugccaguucucccgccccagccccaucggcuaccuggggcuccugucccagcggacgcgcgacaucuacaucagccggcgccgccggggcaccuucaccuggacccugagcgacuccgagggcaaggacacgcccgggggcuacugccugacccgguggaugcucaucgaggccgagcugaagugcuucgggaacaccgccgucgccaagugcaacgagaagcacgacgaggaguucugcgacaugcugcgccucuucgacuucaacaagcaggccauccagcggcugaaggcgcccgcccagaugagcauccagcugaucaacaaggccgugaacgcccucaucaacgaccagcugaucaugaagaaccaccuccgcgacaucaugggcauccccuacugcaacuacuccaaguacugcuaccugaaccacaccacgaccgggaagaccagccugcccaagugcugccugguguccaacggcagcuaccucaacgagacccacuucuccgacgacaucgagcagcaggccgacaacaugaucacggagaugcugcagaaggaguacauggagcggcagggcaagaccccgcuggggcucgucgaccuguucguguucagcaccuccuucuaccugaucagcaucuuccugcaccucgugaagaucccgacccaccgccacaucgucggcaagcccugccccaagccccaccggcugaaccacauggggaucugcuccugcggccuguacaagcagccgggggugcccgugaaguggaagcgcugaggacuaguaauaaggaaacuguaugaaugucugugggcaggaagugaagagauccuucuguaaagguuuuuggaauuaugucugcugaauaauaaacuuuuuugaaauaauaaaucugguagaaaaaugagaucucaaaggcucuuuucagagccaccaaaaaaaaaaaaaaaaaaaaaaaaaaaaaaaaaaaaaaaaaaaaaaaaaaaaaaaaaaaaaaaaaaaaaaaaaaaaaaaaaaaaaaaaaaaaaaaaaaaaa

SEQ ID NO: 25733 - RNA, 1812 nt, Artificial Sequence
  mRNA product Design b-4 (hSL-A100) comprising derived and/or modified sequence from LASV(Josiah;Clade IV)__NP_694870__GPCmut3 (opt1)
aggagagucccgcagucggcguccagcggcucugcuuguucgugugugugucguugcaggccuuauucaagcuuaccaugggccagaucgugaccuucuuccaggaggucccccacgugaucgaggaggugaugaacaucguccugaucgcccucagcgugcuggccgugcugaaggggcucuacaacuucgcgaccugcggccuggucgggcuggugacguuccuccugcugugcggccgcuccugcaccaccagccucuacaaggggguguacgagcugcagacccuggagcucaacauggagacgcugaacaugaccaugccgcuguccugcaccaagaacaacagccaccacuacaucauggucggcaacgagaccggccucgagcugacgcugaccaacaccuccaucaucaaccacaaguucugcaaccucagcgacgcccacaagaagaaccuguacgaccacgcccugauguccaucaucagcaccuuccaccucuccauccccaacuucaaccaguacgaggccaugagcugcgacuucaacgggggcaagaucuccgugcaguacaaccugagccacuccuacgccggggacgcggccaaccacugcggcacgguggccaacgggguccugcagaccuucaugcggauggccuggggcggcagcuacaucgcgcucgacuccgggcgcggcaacugggacugcaucaugaccagcuaccaguaccugaucauccagaacaccacgugggaggaccacugccaguucucccggcccagccccaucggguaccugggccuccugucccagcgcacccgggacaucuacaucagccgccggcgccggggcaccuucaccuggacgcugagcgacuccgaggggaaggacaccccgggcggguacugccucacccgcuggaugcugaucgaggccgagcugaagugcuucggcaacaccgccguggccaagugcaacgagaagcacgacgaggaguucugcgacaugcuccggcuguucgacuucaacaagcaggccauccagcgccugaaggcgcccgcccagaugagcauccagcucaucaacaaggccgugaacgcccugaucaacgaccagcugaucaugaagaaccaccuccgggacaucauggggauccccuacugcaacuacuccaaguacugcuaccugaaccacacgaccaccggccgcaccagccugcccaagugcugccucgucuccaacggcagcuaccugaacgagacgcacuucuccgacgacaucgagcagcaggccgacaacaugaucaccgagaugcugcagaaggaguacauggagcggcaggggaagaccccgcucggccugguggaccuguucguguucagcaccuccuucuaccugaucagcaucuuccuccaccuggucaagauccccacgcaccgccacaucguggggaaguccugccccaagccccaccggcugaaccacaugggcaucugcagcugcgggcucuacaagcagccgggcgugcccgucaaguggaagcgcugaggacuaguaauaaggaaacuguaugaaugucugugggcaggaagugaagagauccuucuguaaagguuuuuggaauuaugucugcugaauaauaaacuuuuuugaaauaauaaaucugguagaaaaaugagaucucaaaggcucuuuucagagccaccaaaaaaaaaaaaaaaaaaaaaaaaaaaaaaaaaaaaaaaaaaaaaaaaaaaaaaaaaaaaaaaaaaaaaaaaaaaaaaaaaaaaaaaaaaaaaaaaaaaaa

SEQ ID NO: 25734 - RNA, 1809 nt, Artificial Sequence
  mRNA product Design b-4 (hSL-A100) comprising derived and/or modified sequence from LASV(LP;Clade I)__AAF86701__GPCmut3 (opt1)
aggagagucccgcagucggcguccagcggcucugcuuguucgugugugugucguugcaggccuuauucaagcuuaccaugggccagaucaucaccuucuuccaggaggugccccacgucaucgaggaggugaugaacaucgugcugaucgcccucagccugcuggccauccucaaggggcuguacaacaucgcgaccugcggcaucaucgggcuggucgccuuccucuuccugugcggcaaguccugcagccugacgcucaagggcggguacgagcugcagacccuggagcucaacauggagacccugaacaugaccaugccgcuguccugcacgaagaacagcucccaccacuacauccgcgugggcaacgagaccgggcucgagcugacccugaccaacacgagcaucaucaaccacaaguucugcaaccucuccgacgcccacaagaagaaccuguacgaccacgcccugaugagcaucaucuccaccuuccaccucagcauccccaacuucaaccaguacgaggccauguccugcgacuucaacggcgggaagaucagcgugcaguacaaccugucccacagcuacgcgggcgacgccgccgagcacugcgggaccgucgccaacggcgugcugcagaccuucaugcggauggcguggggcgggcgcuacaucgcccucgacuccggcaaggggaacugggacugcaucaugacgagcuaccaguaccugaucauccagaacaccaccugggaggaccacugccaguucucccggcccagccccaucggcuaccugggccuccugucccagcgcacccgggacaucuacaucagccgccggcgccgggggacguucaccuggacccugagcgacuccgagggcaacgagacccccgggggcuacugccucacgcgcuggaugcugaucgaggccgagcugaagugcuucgggaacaccgccguggccaagugcaacgagaagcacgacgaggaguucugcgacaugcuccggcuguucgacuucaacaagcaggcgauccgccggcugaaggccccggcccagaugagcauccagcucaucaacaaggccgucaacgcccugaucaacgaccagcugaucaugaagaaccaccuccgcgacaucaugggcauccccuacugcaacuacuccaaguacugcuaccugaaccacaccagcuccggccggaccagccugcccaagugcugccucaucuccaacgggagcuaccugaacgagacgcaguucuccgacgacaucgagcagcaggcggacaacaugaucaccgagaugcugcagaaggaguacaucgagcgccagggcaagaccccgcucgggcugguggacaucuucaucuucagcaccuccuucuaccugaucagcaucuuccugcaccucaucaagauccccacgcaccggcacaucgugggcaagcccugccccaagccgcaccgccugaaccacaugggggucugcuccugcggccuguacaagcaccccggcgugcccaccaaguggaagcggugaggacuaguaauaaggaaacuguaugaaugucugugggcaggaagugaagagauccuucuguaaagguuuuuggaauuaugucugcugaauaauaaacuuuuuugaaauaauaaaucugguagaaaaaugagaucucaaaggcucuuuucagagccaccaaaaaaaaaaaaaaaaaaaaaaaaaaaaaaaaaaaaaaaaaaaaaaaaaaaaaaaaaaaaaaaaaaaaaaaaaaaaaaaaaaaaaaaaaaaaaaaaaaaaa

SEQ ID NO: 25735 - RNA, 1809 nt, Artificial Sequence
  mRNA product Design b-4 (hSL-A100) comprising derived and/or modified sequence from LASV(803213;Clade II)__AAF86703__GPCmut3 (opt1)
aggagagucccgcagucggcguccagcggcucugcuuguucgugugugugucguugcaggccuuauucaagcuuaccaugggccagaucaucaccuucuuccaggaggugccccacgucaucgaggaggugaugaacaucgugcugaucgcccucagccugcuggccauccucaaggggaucuacaacgucgcgaccugcggccuguucgggcugaucuccuuccuccugcugugcggccgcagcugcuccgugacguacaaggggguguacgagcuccagacccuggagcugaacauggccaaccucaacaugaccaugccgcugagcugcaccaagaacaacucccaccacuacaucauggucggcaacgagacgggccuggagcucacccugaccaacaccagcaucaucaaccacaaguucugcaaccuguccgacgcccacaagaagaaccucuacgaccacgcccugaugagcaucaucuccacguuccaccugagcauccccaacuucaaccaguacgaggccauguccugcgacuucaacgggggcaagaucagcgugcaguacaaccucucccacagcuucgcgguggacgccgccaaccacugcgggaccaucgccaacggcguccugcagaccuucaugcggauggcguggggcggguccuacaucgcccuggacagcggcaaggggaacugggacugcaucaugaccuccuaccaguaccucaucauccagaacacgaccugggaggaccacugccaguucagccgccccucccccaucggcuaccuggggcugcucagccagcggacccgcgacaucuacaucagccggcgccggcgcggcaccuucacguggacccuguccgacagcgagggcaacgaggcccccgggggcuacugccugacccgguggaugcucaucgaggccgagcugaagugcuucgggaacaccgccguggcgaagugcaacgagaagcacgacgaggaguucugcgacaugcugcgccucuucgacuucaacaagcaggccaucaagcggcugaagacgccggcccagauguccauccagcugaucaacaaggccgugaacgcccucaucaacgaccagcugaucaugaagaaccaccuccgcgacaucaugggcauccccuacugcaacuacagccgguacugcuaccugaaccacaccgucaccgggaagaccucccugccccgcugcugccuggugagcaacggcuccuaccucaacgagacgcacuucagcgacgacaucgagcagcaggcggacaacaugaucaccgagaugcugcagaaggaguacauggaccggcagggcaagaccccgcuggggcucguggaccuguucgucuucuccaccagcuucuaccugaucuccaucuuccugcaccucgugaagauccccacgcaccgccacaucgugggcaagcccugccccaagccgcaccggcugaaccacauggggaucugcagcugcggccuguacaagcaccccgggguccccgugaaguggaagcgcugaggacuaguaauaaggaaacuguaugaaugucugugggcaggaagugaagagauccuucuguaaagguuuuuggaauuaugucugcugaauaauaaacuuuuuugaaauaauaaaucugguagaaaaaugagaucucaaaggcucuuuucagagccaccaaaaaaaaaaaaaaaaaaaaaaaaaaaaaaaaaaaaaaaaaaaaaaaaaaaaaaaaaaaaaaaaaaaaaaaaaaaaaaaaaaaaaaaaaaaaaaaaaaaaa

SEQ ID NO: 25736 - RNA, 1809 nt, Artificial Sequence
  mRNA product Design b-4 (hSL-A100) comprising derived and/or modified sequence from LASV(GA391;Clade III)__CAA36645__GPCmut3 (opt1)
aggagagucccgcagucggcguccagcggcucugcuuguucgugugugugucguugcaggccuuauucaagcuuaccaugggccagaucgugaccuucuuccaggaggucccccacgugaucgaggaggugaugaacaucguccugaucgcccucagcauccuggccauccugaaggggcucuacaacguggcgaccugcggccugaucgggcuggugacguuccuccugcuguccggccgcagcugcucccucaucuacaaggggaccuacgagcugcagacccuggagcucaacauggagacccugaacaugacgaugccgcugagcugcaccaagaacaacucccaccacuacauccgggucggcaacgagaccggccucgagcugacccugacgaacaccagcauccucaaccacaaguucugcaaccuguccgacgcccacaagcgcaaccuguacgaccacagccucauguccaucaucagcaccuuccaccuguccauccccaacuucaaccaguacgaggccaugagcugcgacuucaacgggggcaagaucaccgugcaguacaaccugucccacagcuucgccguggacgccgcggggcacugcggcacgcucgccaacgggguccugcagaccuucaugcggauggccuggggcggcuccuacaucgcccuggacagcgggcgcggcaacugggacugcaucaugaccuccuaccaguaccucaucauccagaacaccacgugggacgaccacugccaguucagccggcccucccccaucggguaccugggccugcucagccagcgcacccgggacaucuacaucagccgccggcgccggggcaccuucaccuggacgcuguccgacagcgaggggaacgagaccccgggcggguacugccugacccgcuggaugcucaucgaggcggagcugaagugcuucggcaacaccgccguggccaagugcaacgagaagcacgacgaggaguucugcgacaugcugcggcuguucgacuucaacaagcaggccauccgccggcugaagacgcccgcccagauguccauccagcugaucaacaaggcggugaacgcccucaucaacgaccagcugaucaugaagaaccaccuccgcgacaucauggggauccccuacugcaacuacagccgguacugcuaccucaaccacaccuccaccggcaagaccagccugccccgcugcugccugaucuccaacggcagcuaccucaacgagacgaaguucuccgacgacaucgagcagcaggccgacaacaugaucaccgagaugcugcagaaggaguacaucgaccggcaggggaagaccccgcugggccuggucgaccucuucguguucagcaccuccuucuaccugaucagcaucuuccugcaccucgugaagauccccacgcaccgccacaucgucgggaagcccugccccaagccgcaccggcugaaccacaugggcaucugcuccugcgggcuguacaagcagcccggcgugcccgugcgcuggaagcgcugaggacuaguaauaaggaaacuguaugaaugucugugggcaggaagugaagagauccuucuguaaagguuuuuggaauuaugucugcugaauaauaaacuuuuuugaaauaauaaaucugguagaaaaaugagaucucaaaggcucuuuucagagccaccaaaaaaaaaaaaaaaaaaaaaaaaaaaaaaaaaaaaaaaaaaaaaaaaaaaaaaaaaaaaaaaaaaaaaaaaaaaaaaaaaaaaaaaaaaaaaaaaaaaaa

SEQ ID NO: 25737 - RNA, 1812 nt, Artificial Sequence
  mRNA product Design b-4 (hSL-A100) comprising derived and/or modified sequence from LASV(AV;Clade V)__CCA30314__GPCmut3 (opt1)
aggagagucccgcagucggcguccagcggcucugcuuguucgugugugugucguugcaggccuuauucaagcuuaccaugggccagaucgugaccuucuuccaggaggucccccacgugaucgaggaggugaugaacaucguccugaucgcccucagcauccuggccgugcugaaggggcucuacaacaucgcgaccugcggccugaucgggcugaucacguuccuccugcugugcggccgcuccugcagcuccaaccucuacaaggggguguacgagcugcagagccuggaccucaacauggagacccugaacaugaccaugccgcuguccugcaccaagaacaacagccaccacuacauccgggucggcaacgacacgggccucgagcugacccugaccaacaccuccauccucaaccacaaguucugcaaccugagcgacgcccacaagaaggaccuguacgaccacgcccucauguccaucaucagcacguuccaccuguccauccccaacuucaaccaguacgaggccaugagcugcgacuucaacgggggcaagaucuccgugcaguacaaccugagccacuccuacgccaucgacgcggccaaccacugcgggaccguggccaacggcauccuccagaccuucaugcgcauggccuggggcgggagcuacaucgcgcuggacuccggccgggggaacugggacugcaucaugaccagcuaccaguaccugaucauccagaacacgaccugggagaaccacugccaguucucccgccccagccccaucggcuaccucgggcugcugagccagcggacccgcgacaucuacaucucccggcgccggcgcggcaccuucacguggacccucagcgacuccgagggcaacgccacccccgggggcuacugccugacccgguggaugcugaucgaggccgagcucaagugcuucgggaacacggccgucgccaagugcaacgagaagcacgacgaggaguucugcgacaugcugcgccuguucgacuucaacaagcaggcgaucagccggcucaaguccccggcccagaugagcauccagcugaucaacaaggccgugaacgcccugaucaacgaccagcucaucaugaagaaccaccuccgcgacaucaugggcauccccuacugcaacuacuccaaguacugcuaccugaaccacaccaucaccgggaagaccagccugcccaagugcugccugguguccaacggcagcuaccugaacgagacgcacuucuccgacgacaucgagcagcaggccgacaacaugaucaccgagaugcuccagaaggaguacauggagcggcagggcaagaccccgcuggggcuggucgaccuguucguguucagcaccuccuucuaccucaucagcaucuuccugcgccuggugaagauccccacgcaccggcacaucgucggcaagcccugccccaagccgcaccgccucaaccacauggggaucugcuccugcggccuguacaagcagcccggggugcccgugcgguggaagcgcugaggacuaguaauaaggaaacuguaugaaugucugugggcaggaagugaagagauccuucuguaaagguuuuuggaauuaugucugcugaauaauaaacuuuuuugaaauaauaaaucugguagaaaaaugagaucucaaaggcucuuuucagagccaccaaaaaaaaaaaaaaaaaaaaaaaaaaaaaaaaaaaaaaaaaaaaaaaaaaaaaaaaaaaaaaaaaaaaaaaaaaaaaaaaaaaaaaaaaaaaaaaaaaaaa

SEQ ID NO: 25738 - RNA, 1809 nt, Artificial Sequence
  mRNA product Design b-4 (hSL-A100) comprising derived and/or modified sequence from LASV(Togo/2016/7082;Clade VI)__AMR44577__GPCmut3 (opt1)
aggagagucccgcagucggcguccagcggcucugcuuguucgugugugugucguugcaggccuuauucaagcuuaccaugggccagaucaucaccuucuuccaggaggugccccacgucaucgaggaggugaugaacaucgugcugaucgcccucagccugcuggccauccucaagggggucuacaacguggcgaccugcggcaucaucgggcuggugacguuccuguuccucugcggccgcuccugcagccugaucuacaagggguccuacgagcugcagacccucgagcugaacauggagacccugaacaugaccaugccgcucagcugcacgaagaacuccagccaccacuacauccgggucggcaacgagaccggccuggagcugacccucaccaacacguccaucaucaaccacaaguucugcaaccugagcgacgcccacaagcgcaaccuguacgaccacgcccucauguccauccugagcaccuuccaccuguccauccccaacuucaaccaguacgaggccaugagcugcgacuucaacgggggcaagaucuccgugcaguacaaccucagccacgccuacgcgguggacgccgccgagcacugcgggaccgucgccaacggcgugcugcagaccuucaugcggauggcguggggcggguccuacaucgcccuggacagcggccgcgggaacugggacugcaucaugacguccuaccaguaccucaucauccagaacaccaccugggaggaccacugccaguucagccggcccucccccaucggcuaccuggggcugcucagccagcgcacccgggacaucuacaucagccgccggcgccggggcacguucaccuggacccuguccgacagcgagggcaacgagacccccgggggcuacugccugacgcgcuggaugcucaucgaggccgagcugaagugcuucgggaacaccgccguggccaagugcaacgagaagcacgacgaggaguucugcgacaugcugcggcuguucgacuucaacaagcaggcgauccagcgccugaaguccccggcccagaugagcauccagcugaucaacaaggccgucaacgcccucaucaacgaccagcugaucaugaagaaccaccuccgggacaugaugggcauccccuacugcaacuacuccaaguacugcuaccucaaccacaccagcuccgggcgcaccagccugcccaagugcugccugguguccaacggcagcuaccucaacgagacgcacuucuccgacgacaucgagcagcaggccgacaacaugaucaccgagaugcugcagaaggaguacaucgaccggcagggcaagaccccgcuggggcucguggaccuguucgucuucagcaccuccuucuaccugaucagcaucuuccugcaccucaucaagauccccacgcaccgccacaucgugggcaagcccugccccaagccgcaccggcugaaccacauggggaucugcuccugcggccuguacaagcagcccggggugcccacccgcuggaagcggugaggacuaguaauaaggaaacuguaugaaugucugugggcaggaagugaagagauccuucuguaaagguuuuuggaauuaugucugcugaauaauaaacuuuuuugaaauaauaaaucugguagaaaaaugagaucucaaaggcucuuuucagagccaccaaaaaaaaaaaaaaaaaaaaaaaaaaaaaaaaaaaaaaaaaaaaaaaaaaaaaaaaaaaaaaaaaaaaaaaaaaaaaaaaaaaaaaaaaaaaaaaaaaaaa

SEQ ID NO: 25739 - RNA, 1809 nt, Artificial Sequence
  mRNA product Design b-4 (hSL-A100) comprising derived and/or modified sequence from LASV(KAK-428;Clade n.d. (VII))__ANH09740__GPCmut3 (opt1)
aggagagucccgcagucggcguccagcggcucugcuuguucgugugugugucguugcaggccuuauucaagcuuaccaugggccagaucgugaccuucuuccaggaggucccccacgugaucgaggaggugaugaacaucguccugaucgcccucagccugcuggccauccucaaggggcuguacaacuucgcgaccugcggcgugaucgggcugaucacguuccuccugcugugcggccgcuccugcagcgccaccuacaaggggcaguacgagcuccagacccuggagcugaacauggagucccucaacaugaccaugccgcugagcugcacgaagaacaacucccaccacuacauccgggccggcaacaacaccggccuggagcucacccugaccaacacgagcaucaucucccacaaguucugcaaccugagcgacgcccacaagaagaaccucuacgaccacacccugauguccaucaucaccaccuuccaccugagcauccccaacuucaaccaguacgaggccauguccugcgacuucaacgggggcaagaucagcauccaguacaaccucucccacagcuacgcgggggacgccgcccagcacugcggcacgguggccaacgggguccugcagaccuucaugcgcauggcguggggcggcuccuaccuggcccucgacagcgggcggcgcggcugggacugcaucaucuccagcuaccaguaccugaucauccagaacaccaccugggacgaccacugccaguucucccggcccagccccaucggguaccugggcuucgugagccagaagacgcgcgacaucuacaucucccggcgccggcgcggcaccuucaccuggacccucagcgacuccgaggggcacgacaugccgggcggguacugccugacgcgguggaugcugaucgaggccgaccucaagugcuucggcaacaccgccguggccaagugcaacgagaagcacgacgaggaguucugcgacauguggcgccuguucgacuucaacaagcaggcgauccagcggcugaaggcccccgcccagaugaacauccagcucaucaacaaggccgucaacgcccugaucaacgaccagcugaugaugaagaaccaccuccgcgacaucauggggauccccuacugcaacuacagcaaguucugcuaccugaacaacaccaccacgggccggaccucccugccccgcugcugccucaucagcaacggcuccuaccugaacgagacccacuucagcgacgacaucgagcagcaggcggacaacaugaucaccgagaugcugcagaaggaguacauggaccggcaggggaagacgccgcucggccugguggaccuguucguguucuccaccagcuucuaccucaucaccaucuuccugcaccuggucaagauccccacccaccgccacaucguggggaagcccugccccaagccgcaccggcugaaccacaugggcaucugcuccugcgggcucuacaagcagcccggcgugcccguccgcuggaagcggugaggacuaguaauaaggaaacuguaugaaugucugugggcaggaagugaagagauccuucuguaaagguuuuuggaauuaugucugcugaauaauaaacuuuuuugaaauaauaaaucugguagaaaaaugagaucucaaaggcucuuuucagagccaccaaaaaaaaaaaaaaaaaaaaaaaaaaaaaaaaaaaaaaaaaaaaaaaaaaaaaaaaaaaaaaaaaaaaaaaaaaaaaaaaaaaaaaaaaaaaaaaaaaaaa

SEQ ID NO: 25740 - RNA, 1809 nt, Artificial Sequence; identical to SEQ ID NO: 25734
  mRNA product Design b-4 (hSL-A100) comprising derived and/or modified sequence from LASV(Pinneo-NIG-1969;Clade I)__AIT17836__GPCmut3 (opt1)

SEQ ID NO: 25741 - RNA, 1809 nt, Artificial Sequence
  mRNA product Design b-4 (hSL-A100) comprising derived and/or modified sequence from LASV(ISTH0009-NIG-2011;Clade II)__AIT17404__GPCmut3 (opt1)
aggagagucccgcagucggcguccagcggcucugcuuguucgugugugugucguugcaggccuuauucaagcuuaccaugggccagaucaucaccuucuuccaggaggugccccacgucaucgaggaggugaugaacaucgugcugaucgcccucagccugcuggccauccucaaggggaucuacaacgucgcgaccugcggccuguucgggcugguguccuuccuccugcugugcggccgcagcugcuccacgaccuacaaggggguguacgagcuccagacccuggagcuggacauggccagccucaacaugaccaugccgcuguccugcacgaagaacaacagccaccacuacaucauggucggcaacgagaccggccuggagcucacccugaccaacacguccaucaucaaccacaaguucugcaaccugagcgacgcccacaagaagaaccucuacgaccacgcccugauguccaucaucagcaccuuccaccuguccauccccaacuucaaccaguacgaggccaugagcugcgacuucaacgggggcaagaucuccgugcaguacaaccucagccacgcguacgccguggacgccgccaaccacugcgggaccaucgcgaacggcguccugcagaccuucaugcggauggccuggggcggguccuacaucgcccuggacagcggcaagggguccugggacugcaucaugacgagcuaccaguaccucaucauccagaacaccaccugggaggaccacugccaguucucccgccccagccccaucggcuaccuggggcugcucagccagcggacccgcgacaucuacaucucccggcgccggcgcggcacguucaccuggacccugagcgacuccgagggcaacgagacccccgggggcuacugccugacgcgguggaugcucaucgaggccgagcugaagugcuucgggaacaccgccguggcgaagugcaacgagaagcacgacgaggaguucugcgacaugcugcgccucuucgacuucaacaagcaggccauccggcgccugaagaccccggcccagaugagcauccagcugaucaacaaggccgugaacgcccucaucaacgaccagcugaucaugaagaaccaccuccgggacaucaugggcauccccuacugcaacuacuccaaguacugcuaccugaaccacaccgucacggggaagaccagccugccccgcugcugccugguguccaacggcagcuaccucaacgagacccacuucuccgacgacaucgagcagcaggcggacaacaugaucaccgagcugcugcagaaggaguacauggaccggcagggcaagacgccgcucgggcugguggaccuguucgucuucagcaccuccuucuaccugaucagcaucuuccuccaccugaucaagauccccacccaccgccacaucaccggcaagcccugccccaagccgcaccggcugaaccacauggggaucugcuccugcggccucuacaagcaccccggggugcccgugaaguggaagcgcugaggacuaguaauaaggaaacuguaugaaugucugugggcaggaagugaagagauccuucuguaaagguuuuuggaauuaugucugcugaauaauaaacuuuuuugaaauaauaaaucugguagaaaaaugagaucucaaaggcucuuuucagagccaccaaaaaaaaaaaaaaaaaaaaaaaaaaaaaaaaaaaaaaaaaaaaaaaaaaaaaaaaaaaaaaaaaaaaaaaaaaaaaaaaaaaaaaaaaaaaaaaaaaaaa

SEQ ID NO: 25742 - RNA, 1809 nt, Artificial Sequence
  mRNA product Design b-4 (hSL-A100) comprising derived and/or modified sequence from LASV(ISTH2010-NIG-2012;Clade II)__AIT17482__GPCmut3 (opt1)
aggagagucccgcagucggcguccagcggcucugcuuguucgugugugugucguugcaggccuuauucaagcuuaccaugggccagaucaucaccuucuuccaggaggugccccacgucaucgaggaggugaugaacaucgugcugaucgcccucagccugcuggccauccucaaggggaucuacaacgucgcgaccugcggccuguucgggcugguguccuuccuccugcugugcggccgcagcugcuccacgaccuacaaggggguguacgagcuccagacccuggagcuggacauggccagccucaacaugaccaugccgcuguccugcacgaagaacaacagccaccacuacaucauggucggcaacgagaccggccuggagcucacccugaccaacacguccaucaucaaccacaaguucugcaaccugagcgacgcccacaagaagaaccucuacgaccacgcccugauguccaucaucagcaccuuccaccuguccauccccaacuucaaccaguacgaggccaugagcugcgacuucaacgggggcaagaucuccgugcaguacaaccucagccacgcguacgccguggacgccgccaaccacugcgggaccaucgcgaacggcguccugcagaccuucaugcggauggccuggggcggguccuacaucgcccuggacagcggcaagggguccugggacugcaucaugacgagcuaccaguaccucaucauccagaacaucaccugggaggaccacugccaguucucccgccccagccccaucggcuaccuggggcugcucagccagcggacccgcgacaucuacaucucccggcgccggcgcggcaccuucacguggacccugagcgacuccgagggcaacgagacccccgggggcuacugccugacccgguggaugcucaucgaggccgagcugaagugcuucgggaacacggccguggcgaagugcaacgagaagcacgacgaggaguucugcgacaugcugcgccucuucgacuucaacaagcaggccauccggcgccugaagaccccggcccagaugagcauccagcugaucaacaaggccgugaacgcccucaucaacgaccagcugaucaugaagaaccaccuccgggacaucaugggcauccccuacugcaacuacuccaaguacugcuaccugaaccacaccgucaccgggaagacgagccugccccgcugcugccugguguccaacggcagcuaccucaacgagacccacuucuccgacgacaucgagcagcaggcggacaacaugaucaccgagcugcugcagaaggaguacaucgaccggcagggcaagaccccgcucgggcugguggaccuguucgucuucagcacguccuucuaccugaucagcaucuuccuccaccuggugaagauccccacccaccgccacguggucggcaagcccugccccaagccgcaccggcugaaccacauggggaucugcuccugcggccucuacaagcaccccggggugcccgugaaguggaagcgcugaggacuaguaauaaggaaacuguaugaaugucugugggcaggaagugaagagauccuucuguaaagguuuuuggaauuaugucugcugaauaauaaacuuuuuugaaauaauaaaucugguagaaaaaugagaucucaaaggcucuuuucagagccaccaaaaaaaaaaaaaaaaaaaaaaaaaaaaaaaaaaaaaaaaaaaaaaaaaaaaaaaaaaaaaaaaaaaaaaaaaaaaaaaaaaaaaaaaaaaaaaaaaaaaa

SEQ ID NO: 25743 - RNA, 1809 nt, Artificial Sequence
  mRNA product Design b-4 (hSL-A100) comprising derived and/or modified sequence from LASV(Lassa virus/H.sapiens-wt/NGA/2015/ISTH_0543;Clade II)__AVO03639__GPCmut3 (opt1)
aggagagucccgcagucggcguccagcggcucugcuuguucgugugugugucguugcaggccuuauucaagcuuaccaugggccagaucaucaccuucuuccaggaggugccccacgucaucgaggaggugaugaacaucgugcugaucgcccucagccugcuggccauccucaaggggaucuacaacgucgcgaccugcggccuguucgggcugguguccuuccuccugcugugcggccgcagcugcuccacgaccuacaaggggguguacgagcuccagacccuggagcuggacauggccaaccucaacaugaccaugccgcugagcugcacgaagaacaacucccaccacuacaucauggucggcaacgagaccggccuggagcucacccugaccaacacgagcaucaucaaccacaaguucugcaaccuguccgacgcccacaagaagaaccucuacgaccacgcccugaugagcaucaucuccaccuuccaccugagcauccccaacuucaaccaguacgaggccauguccugcgacuucaacgggggcaagaucagcgugcaguacaaccucucccacaccuacgcgguggacgccgccaaccacugcgggaccaucgccaacggcguccugcagacguucaugcggauggcguggggcgggagcuacaucgcccuggacuccggcaaggggagcugggacugcaucaugaccuccuaccaguaccucgugauccagaacaccaccugggaggaccacugccaguucagccgccccucccccaucggcuaccuggggcugcucagccagcggacgcgcgacaucuacaucagccggcgccggcgcggcaccuucaccuggacccuguccgacagcgagggcaacgagacgcccgggggcuacugccugacccgguggaugcucaucgaggccgagcugaagugcuucgggaacaccgccguggccaagugcaacgagaagcacgacgaggaguucugcgacaugcugcgccucuucgacuucaacaagcaggcgauccggcgccugaagaccccggcccagauguccauccagcugaucaacaaggccgucaacgcccucaucaacgaccagcugaucaugaagaaccaccuccgggacaucaugggcauccccuacugcaacuacagcaaguacugcuaccugaaccacacggugaccgggaagaccucccugccccgcugcugccuggugagcaacggcuccuaccucaacgagacccacuucagcgacgacaucgagcagcaggccgacaacaugaucacggagcugcugcagaaggaguacaucgaccggcagggcaagaccccgcucgggcuggucgaccuguucguguucuccaccagcuucuaccugaucuccaucuuccuccaccuggugaagauccccacccaccgccacaucacgggcaagcccugccccaagccgcaccggcugaaccacauggggaucugcagcugcggccucuacaagcaccccgggguccccgugaaguggaagcgcugaggacuaguaauaaggaaacuguaugaaugucugugggcaggaagugaagagauccuucuguaaagguuuuuggaauuaugucugcugaauaauaaacuuuuuugaaauaauaaaucugguagaaaaaugagaucucaaaggcucuuuucagagccaccaaaaaaaaaaaaaaaaaaaaaaaaaaaaaaaaaaaaaaaaaaaaaaaaaaaaaaaaaaaaaaaaaaaaaaaaaaaaaaaaaaaaaaaaaaaaaaaaaaaaa

SEQ ID NO: 25744 - RNA, 1809 nt, Artificial Sequence
  mRNA product Design b-4 (hSL-A100) comprising derived and/or modified sequence from LASV(Lassa virus/H.sapiens-wt/NGA/2016/ISTH_0009;Clade II)__AVO03571__GPCmut3 (opt1)
aggagagucccgcagucggcguccagcggcucugcuuguucgugugugugucguugcaggccuuauucaagcuuaccaugggccagaucaucaccuucuuccaggaggugccccacgucaucgaggaggugaugaacaucgugcugaucgcccucagccugcuggccauccucaaggggaucuacaacgucgcgaccugcggccugcuggggcucguguccuuccugcugcucugcggccgcagcugcuccacgaccuacaaggggguguacgagcugcagacccuggagcucgacauggccagccugaacaugaccaugccgcuguccugcacgaagaacaacagccaccacuacaucauggucggcaacgagaccggccucgagcugacccugaccaacacguccaucaucaaccacaaguucugcaaccucagcgacgcccacaagaagaaccuguacgaccacgcccugauguccaucaucagcaccuuccaccucuccauccccaacuucaaccaguacgaggccaugagcugcgacuucaacgggggccggaucuccgugcaguacaaccugagccacuccuacgcgguggacgccgccaaccacugcgggaccaucgccaacggcguccugcagaccuucaugcgcauggcguggggcgggagcuacaucgcccucgacuccggcaaggggagcugggacugcaucaugacguccuaccaguaccugaucauccagaacaccaccugggaggaccacugccaguucagccggcccagccccaucggcuaccuggggcuccugucccagcgcacccgggacaucuacaucagccgccggcgccggggcacguucaccuggacccuguccgacagcgagggcaacgagacccccgggggcuacugccucacgcgcuggaugcugaucgaggccgagcugaagugcuucgggaacaccgccguggccaagugcaacgagaagcacgacgaggaguucugcgacaugcuccggcuguucgacuucaacaagcaggcgauccgccggcugaagaccccggcccagauguccauccagcucaucaacaaggccgugaacgcccugaucaacgaccagcugaucaugaagaaccaccuccgcgacaucaugggcauccccuacugcaacuacagcaaguacugcuaccugaaccacaccgucacggggaagaccucccugccccggugcugccucgugagcaacggcuccuaccugaacgagacccacuucagcgacgacaucgagcagcaggccgacaacaugaucaccgagcugcuccagaaggaguacaucgaccgccagggcaagacgccgcuggggcugguggaccuguucgucuucuccaccagcuucuaccucaucuccaucuuccugcaccuggugaagauccccacccaccggcacaucaccggcaagcccugccccaagccgcaccgccucaaccacauggggaucugcagcugcggccuguacaaccaccccggggugcccgucaaguggaagcggugaggacuaguaauaaggaaacuguaugaaugucugugggcaggaagugaagagauccuucuguaaagguuuuuggaauuaugucugcugaauaauaaacuuuuuugaaauaauaaaucugguagaaaaaugagaucucaaaggcucuuuucagagccaccaaaaaaaaaaaaaaaaaaaaaaaaaaaaaaaaaaaaaaaaaaaaaaaaaaaaaaaaaaaaaaaaaaaaaaaaaaaaaaaaaaaaaaaaaaaaaaaaaaaaa

SEQ ID NO: 25745 - RNA, 1809 nt, Artificial Sequence
  mRNA product Design b-4 (hSL-A100) comprising derived and/or modified sequence from LASV(Lassa virus/H.sapiens-wt/NGA/2016/ISTH_0017;Clade II)__AVO03567__GPCmut3 (opt1)
aggagagucccgcagucggcguccagcggcucugcuuguucgugugugugucguugcaggccuuauucaagcuuaccaugggccagaucaucaccuucuuccaggaggugccccacgucaucgaggaggugaugaacaucgugcugaucgcccucagccugcuggccauccucaaggggaucuacaacgucgcgaccugcggccuguucgggcugguguccuuccuccugcugugcggccgcagcugcuccacgaccuacaaggggguguacgagcuccagacccuggagcuggacauggccagccucaacaugaccaugccgcuguccugcacgaagaacaacagccaccacuacaucauggucggcaacgagaccggccuggagcucacccugaccaacacguccaucaucaaccacaaguucugcaaccugagcgacgcccacaagaagaaccucuacgaccacgcccugauguccaucaucagcaccuuccaccuguccauccccaacuucaaccaguacgaggccaugagcugcgacuucaacgggggcaagaucuccgugcaguacaaccucagccacaccuacgcgaucgacgccgccaaccacugcgggaccaucgccaacggcgugcugcagacguucaugcggauggcguggggcggguccuacaucgcccuggacagcggcaagggguccugggacugcaucaugaccagcuaccaguaccucaucauccagaacaccaccugggaggaccacugccaguucucccgccccagccccaucggcuaccuggggcugcucagccagcggacgcgcgacaucuacaucucccggcgccggcgcggcaccuucaccuggacccugagcgacuccgagggcaacgagacgcccgggggcuacugccugacccgguggaugcucaucgaggccgagcugaagugcuucgggaacaccgccgucgccaagugcaacgagaagcacgacgaggaguucugcgacaugcugcgccucuucgacuucaacaagcaggcgauccggcgccugaagaccccggcccagaugagcauccagcugaucaacaaggccgugaacgcccucaucaacgaccagcugaucaugaagaaccaccuccgggacaucaugggcauccccuacugcaacuacuccaaguacugcuaccugaaccacacggugaccgggaagaccagccugccccgcugcugccuggucuccaacggcagcuaccucaacgagacccacuucuccgacgacaucgagcagcaggccgacaacaugaucacggagcugcugcagaaggaguacauggaccggcagggcaagaccccgcucgggcugguggaccuguucguguucagcaccuccuucuaccugaucagcaucuuccuccaccugguccgcauccccacccaccggcacgugaucggcaagcccugccccaagccgcaccgccugaaccacauggggaucugcuccugcggccucuacaagcaccccggggugcccgucaaguggaagcggugaggacuaguaauaaggaaacuguaugaaugucugugggcaggaagugaagagauccuucuguaaagguuuuuggaauuaugucugcugaauaauaaacuuuuuugaaauaauaaaucugguagaaaaaugagaucucaaaggcucuuuucagagccaccaaaaaaaaaaaaaaaaaaaaaaaaaaaaaaaaaaaaaaaaaaaaaaaaaaaaaaaaaaaaaaaaaaaaaaaaaaaaaaaaaaaaaaaaaaaaaaaaaaaaa

SEQ ID NO: 25746 - RNA, 1809 nt, Artificial Sequence
  mRNA product Design b-4 (hSL-A100) comprising derived and/or modified sequence from LASV(Lassa virus/H.sapiens-wt/NGA/2018/ISTH_0959;Clade II)__AVV65099__GPCmut3 (opt1)
aggagagucccgcagucggcguccagcggcucugcuuguucgugugugugucguugcaggccuuauucaagcuuaccaugggccagaucaucaccuucuuccaggaggugccccacgucaucgaggaggugaugaacaucgugcugaucgcccucagccugcuggccauccucaaggggaucuacaacgucgugaccugcggccuguucgggcugguguccuuccuccugcugugcggccgcagcugcuccacgaccuacaagggggucuacgagcuccagacccuggagcuggacauggcgagccucaacaugaccaugccgcuguccugcacgaagaacaacagccaccacuacaucauggugggcaacgagaccggccuggagcucacccugaccaacacguccaucaucaaccacaaguucugcaaccugagcgacgcccacaagaagaaccucuacgaccacgcccugauguccaucaucagcaccuuccaccuguccauccccaacuucaaccaguacgaggccaugagcugcgacuucaacgggggcaagaucuccgugcaguacaaccucagccacgccuacgcgaucgacgccgccaaccacugcgggaccaucgccaacggcguccugcagaccuucaugcggauggcguggggcggguccuacaucgcccuggacagcggcaagggguccugggacugcaucaugacgagcuaccaguaccucaucauccagaacaccaccugggaggaccacugccaguucucccgccccagccccaucggcuaccuggggcugcucagccagcggacccgcgacaucuacaucucccggcgccggcgcggcacguucaccuggacccugagcgacuccgagggcaacgagacccccgggggcuacugccugacgcgguggaugcucaucgaggccgagcugaagugcuucgggaacaccgccguggccaagugcaacgagaagcacgacgaggaguucugcgacaugcugcgccucuucgacuucaacaagcaggcgauccggcgccugaagaccccggcccagaugagcauccagcugaucaacaaggccgugaacgcccucaucaacgaccagcugaucaugaagaaccaccuccgggacaucaugggcauccccuacugcaacuacuccaaguacugcuaccugaaccacaccgucacggggaagaccagccugccccgcugcugccugguguccaacggcagcuaccucaacgagacccacuucuccgacgacaucgagcagcaggccgacaacaugaucaccgagcugcugcagaaggaguacaucgaccggcagggcaagacgccgcucgggcugguggaccuguucgucuucagcaccuccuucuaccugaucagcaucuuccuccaccuggugaagauccccacccaccgccacgugaucggcaagcccugccccaagccgcaccggcugaaccacauggggaucugcuccugcggccucuacaagcaccccgggguccccgugaaguggaagcgcugaggacuaguaauaaggaaacuguaugaaugucugugggcaggaagugaagagauccuucuguaaagguuuuuggaauuaugucugcugaauaauaaacuuuuuugaaauaauaaaucugguagaaaaaugagaucucaaaggcucuuuucagagccaccaaaaaaaaaaaaaaaaaaaaaaaaaaaaaaaaaaaaaaaaaaaaaaaaaaaaaaaaaaaaaaaaaaaaaaaaaaaaaaaaaaaaaaaaaaaaaaaaaaaaa

SEQ ID NO: 25747 - RNA, 1809 nt, Artificial Sequence
  mRNA product Design b-4 (hSL-A100) comprising derived and/or modified sequence from LASV(LASV003-NIG-2008;Clade II)__AIT17580__GPCmut3 (opt1)
aggagagucccgcagucggcguccagcggcucugcuuguucgugugugugucguugcaggccuuauucaagcuuaccaugggccagaucaucaccuucuuccaggaggugccccacgucaucgaggaggugaugaacaucgugcugaucgcccucagccugcuggccauccucaaggggaucuacaacgucgcgaccugcggccuguucgggcugguguccuuccuccugcugugcggccgcagcugcuccacgaccuacaaggggguguacgagcuccagacccuggagcuggacauggccagccucaacaugaccaugccgcuguccugcacgaagaacaacagccaccacuacaucauggucggcaacgagaccggccuggagcucacccugaccaacacguccaucaucaaccacaaguucugcaaccugagcgacgcccacaagaagaaccucuacgaccacgcccugauguccaucaucagcaccuuccaccuguccauccccaacuucaaccaguacgaggccaugagcugcgacuucaacgggggcaagaucuccgugcaguacaaccucagccacaccuacgcgguggacgccgccaaccacugcgggaccaucgccaacggcguccugcagacguucaugcggauggcguggggcggguccuacaucgcccuggacagcggcaagggguccugggacugcaucaugaccagcuaccaguaccucaucauccagaacaccaccugggaggaccacugccaguucucccgccccagccccaucggcuaccuggggcugcucagccagcggacgcgcgacaucuacaucucccggcgccggcgcggcaccuucaccuggacccugagcgacuccgagagcaacgagacgccgggcggguacugccugacccgguggaugcucaucgaggccgagcugaagugcuucggcaacaccgccguggccaagugcaacgagaagcacgacgaggaguucugcgacaugcugcgccucuucgacuucaacaagcaggcgauccggcgccugaaggcccccgcccagauguccauccagcugaucaacaaggccgugaacgcccucaucaacgaccagcugaucaugaagaaccaccuccgggacaucauggggauccccuacugcaacuacagcaaguacugcuaccugaaccacaccgucacgggccgcaccucccugccccggugcugccuggugagcaacggguccuaccucaacgagacccacuucagcgacgacaucgagcagcaggcggacaacaugaucaccgagcugcugcagaaggaguacauggaccgccagggcaagacgccgcucggccugguggaccuguucgucuucuccaccagcuucuaccugaucuccaucuuccuccaccuggugaagauccccacccaccggcacgugaucgggaagcccugccccaagccgcaccgccugaaccacaugggcaucugcagcugcgggcucuacaagcaccccggcguccccgugaaguggaagcggugaggacuaguaauaaggaaacuguaugaaugucugugggcaggaagugaagagauccuucuguaaagguuuuuggaauuaugucugcugaauaauaaacuuuuuugaaauaauaaaucugguagaaaaaugagaucucaaaggcucuuuucagagccaccaaaaaaaaaaaaaaaaaaaaaaaaaaaaaaaaaaaaaaaaaaaaaaaaaaaaaaaaaaaaaaaaaaaaaaaaaaaaaaaaaaaaaaaaaaaaaaaaaaaaa

SEQ ID NO: 25748 - RNA, 1809 nt, Artificial Sequence
  mRNA product Design b-4 (hSL-A100) comprising derived and/or modified sequence from LASV(LASV035-NIG-2009;Clade II)__AIT17588__GPCmut3 (opt1)
aggagagucccgcagucggcguccagcggcucugcuuguucgugugugugucguugcaggccuuauucaagcuuaccaugggccagaucaucaccuucuuccaggaggugccccacgucaucgaggaggugaugaacaucgugcugaucgcccucagccugcuggccauccucaaggggaucuacaacgucgcgaccugcggccuguucgggcugguguccuuccuccugcugugcggccgcagcugcuccacgaccuacaaggggguguacgagcuccagacccuggagcuggacauggccagccucaacaugaccaugccgcuguccugcacgaagaacaacagccaccacuacaucauggucggcaacgagaccggccuggagcucacccugaccaacacguccaucaucaaccacaaguucugcaaccugagcgacgcccacaagaagaaccucuacgaccacgcccugauguccaucaucagcaccuuccaccuguccauccccaacuucaaccaguacgaggccaugagcugcgacuucaacgggggcaagaucuccgugcaguacaaccucagccacgcguacgccguggacgccgccaaccacugcgggaccaucgcgaacggcguccugcagaccuucaugcggauggccuggggcggguccuacaucgcccuggacagcggcaagggguccugggacugcaucaugacgagcuaccaguaccucaucauccagaacaccaccugggaggaccacugccaguucucccgccccagccccaucggcuaccuggggcugcucagccagcggacccgcgacaucuacaucucccggcgccggcgcggcacguucaccuggacccugagcgacuccgagggcaacgagacccccgggggcuacugccugacgcgguggaugcucaucgaggccgagcugaagugcuucgggaacaccgccguggcgaagugcaacgagaagcacgacgaggaguucugcgacaugcugcgccucuucgacuucaacaagcaggccauccggcgccugaaggccccggcccagaugagcauccagcugaucaacaaggccgugaacgcgcucaucaacgaccagcugaucaugaagaaccaccuccgggacaucaugggcauccccuacugcaacuacuccaaguacugcuaccugaaccacaccgucaccgggaagacgagccugccccgcugcugccugguguccaacggcagcuaccucaacgagacccacuucuccgacgacaucgagcagcaggccgacaacaugaucaccgagcugcugcagaaggaguacaucgaccggcagggcaagaccccgcucgggcugguggaccuguucgucuucagcacguccuucuaccugaucagcaucuuccuccaccuggugaagauccccacccaccgccacgugaucggcaagcccugccccaagccgcaccggcugaaccacauggggaucugcuccugcggccucuacaagcaccccgggguccccgugaaguggaagcgcugaggacuaguaauaaggaaacuguaugaaugucugugggcaggaagugaagagauccuucuguaaagguuuuuggaauuaugucugcugaauaauaaacuuuuuugaaauaauaaaucugguagaaaaaugagaucucaaaggcucuuuucagagccaccaaaaaaaaaaaaaaaaaaaaaaaaaaaaaaaaaaaaaaaaaaaaaaaaaaaaaaaaaaaaaaaaaaaaaaaaaaaaaaaaaaaaaaaaaaaaaaaaaaaaa

SEQ ID NO: 25749 - RNA, 1809 nt, Artificial Sequence
  mRNA product Design b-4 (hSL-A100) comprising derived and/or modified sequence from LASV(LASV1000-NIG-2009;Clade II)__AIT17782__GPCmut3 (opt1)
aggagagucccgcagucggcguccagcggcucugcuuguucgugugugugucguugcaggccuuauucaagcuuaccaugggccagaucaucaccuucuuccaggaggugccccacgucaucgaggaggugaugaacaucgugcugaucgcccucagccugcuggccauccucaaggggaucuacaacgucgcgaccugcggccuguucgggcugguguccuuccuccugcugugcggccgcagcugcuccacgaccuacaaggggguguacgagcuccagacccuggagcuggacauggccagccucaacaugaccaugccgcuguccugcacgaagaacaacagccaccacuacaucauggucggcaacgagaccggccuggagcucacccugaccaacacguccaucaucaaccacaaguucugcaaccugagcgacgcccacaagaagaaccucuacgaccacgcccugauguccaucaucagcaccuuccaccuguccauccccaacuucaaccaguacgaggccaugagcugcgacuucaacgggggcaagaucuccgugcaguacaaccucagccacaccuacgcgguggacgccgccaaccacugcgggaccaucgccaacggcguccugcagacguucaugcggauggcguggggcggguccuacaucgcccuggacagcggcaagggguccugggacugcaucaugaccagcuaccaguaccucaucauccagaacaccaccugggaggaccacugccaguucucccgccccagccccaucggcuaccuggggcugcucagccagcggacgcgcgacaucuacaucucccggcgccggcgcggcaccuucaccuggacccugagcgacuccgagggcaacgagacgcccgggggcuacugccugacccgguggaugcucaucgaggccgagcugaagugcuucgggaacaccgccguggccaagugcaacgagaagcacgacgaggaguucugcgacaugcugcgccucuucgacuucaacaagcaggcgaucaagcggcugaagaccccggcccagaugagcauccagcugaucaacaaggccgugaacgcccucaucaacgaccagcugaucaugaagaaccaccuccgcgacaucaugggcauccccuacugcaacuacuccaaguacugcuaccugaaccacacggucaccgggaagaccagccugccccggugcugccugguguccaacggcagcuaccucaacgagacccacuucuccgacgacaucgagcagcaggccgacaacaugaucacggagcugcugcagaaggaguacaucgaccgccagggcaagaccccgcucgggcugguggaccuguucgucuucagcaccuccuucuaccugaucagcaucuuccuccaccuggugaagauccccacccaccggcacguggucggcaagcccugccccaagccgcaccgccugaaccacauggggaucugcuccugcggccucuacaagcaccccggggugcccgugaaguggaagcggugaggacuaguaauaaggaaacuguaugaaugucugugggcaggaagugaagagauccuucuguaaagguuuuuggaauuaugucugcugaauaauaaacuuuuuugaaauaauaaaucugguagaaaaaugagaucucaaaggcucuuuucagagccaccaaaaaaaaaaaaaaaaaaaaaaaaaaaaaaaaaaaaaaaaaaaaaaaaaaaaaaaaaaaaaaaaaaaaaaaaaaaaaaaaaaaaaaaaaaaaaaaaaaaaa

SEQ ID NO: 25750 - RNA, 1809 nt, Artificial Sequence
  mRNA product Design b-4 (hSL-A100) comprising derived and/or modified sequence from LASV(LASV221-NIG-2010;Clade II)__AIT17624__GPCmut3 (opt1)
aggagagucccgcagucggcguccagcggcucugcuuguucgugugugugucguugcaggccuuauucaagcuuaccaugggccagaucaucaccuucuuccaggaggugccccacgucaucgaggaggugaugaacaucgugcugaucgcccucagccugcuggccauccucaaggggaucuacaacgucgcgaccugcggccuguucgggcugguguccuuccuccugcugugcggccgcagcugcuccacgaccuacaaggggguguacgagcuccagacccuggagcuggacauggccagccucaacaugaccaugccgcuguccugcacgaagaacaacagccaccacuacaucauggucggcaacgagaccggccuggagcucacccugaccaacacguccaucaucaaccacaaguucugcaaccugagcgacgcccacaagaagaaccucuacgaccacgcccugauguccaucaucagcaccuuccaccuguccauccccaacuucaaccaguacgaggccaugagcugcgacuucaacgggggcaagaucuccgugcaguacaaccucagccacaccuacgcgaucgacgccgccaaccacugcgggaccaucgccaacggcgugcugcagacguucaugcggauggcguggggcggguccuacaucgcccuggacagcggcaagggguccugggacugcaucaugaccagcuaccaguaccucaucauccagaacaccaccugggaggaccacugccaguucucccgccccagccccaucggcuaccuggggcugcucagccagcggacgcgcgacaucuacaucucccggcgccggcgcggcaccuucaccuggacccugagcgacuccgagggcaacgagacgcccgggggcuacugccugacccgguggaugcucaucgaggccgagcugaagugcuucgggaacaccgccgucgccaagugcaacgagaagcacgacgaggaguucugcgacaugcugcgccucuucgacuucaacaagcaggcgauccggcgccugaagaccccggcccagaugagcauccagcugaucaacaaggccgugaacgcccucaucaacgaccagcugaucaugaagaaccaccuccgggacaucaugggcauccccuacugcaacuacuccaaguacugcuaccugaaccacacggugaccgggaagaccagccugccccgcugcugccuggucuccaacggcagcuaccucaacgagacccacuucuccgacgacaucgagcagcaggccgacaacaugaucacggagaugcugcagaaggaguacauggaccggcagggcaagaccccgcuggggcucguggaccuguucguguucagcaccuccuucuaccugaucagcaucuuccugcaccucgucaagauccccacccaccgccacgugaucggcaagcccugccccaagccgcaccggcugaaccacauggggaucugcuccugcggccuguacaagcaccccggggugcccgucaaguggaagcgcugaggacuaguaauaaggaaacuguaugaaugucugugggcaggaagugaagagauccuucuguaaagguuuuuggaauuaugucugcugaauaauaaacuuuuuugaaauaauaaaucugguagaaaaaugagaucucaaaggcucuuuucagagccaccaaaaaaaaaaaaaaaaaaaaaaaaaaaaaaaaaaaaaaaaaaaaaaaaaaaaaaaaaaaaaaaaaaaaaaaaaaaaaaaaaaaaaaaaaaaaaaaaaaaaa

SEQ ID NO: 25751 - RNA, 1809 nt, Artificial Sequence
  mRNA product Design b-4 (hSL-A100) comprising derived and/or modified sequence from LASV(LASV237-NIG-2010;Clade II)__AIT17638__GPCmut3 (opt1)
aggagagucccgcagucggcguccagcggcucugcuuguucgugugugugucguugcaggccuuauucaagcuuaccaugggccagaucaucaccuucuuccaggaggugccccacgucaucgaggaggugaugaacaucgugcugaucgcccucagccugcuggccauccucaaggggaucuacaacgucgcgaccugcggccuguucgggcugguguccuuccuccugcugugcggccgcagcugcuccacgaccuacaaggggguguacgagcuccagacccuggagcuggacauggccagccucaacaugaccaugccgcuguccugcacgaagaacaacagccaccacuacaucauggucggcaacgagaccggccuggagcucacccugaccaacacguccaucaucaaccacaaguucugcaaccugagcgacgcccacaagaaggaccucuacgaccacgcccugauguccaucaucagcaccuuccaccuguccauccccaacuucaaccaguacgaggccaugagcugcgacuucaacgggggcaagaucuccgugcaguacaaccucagccacaccuacgcgguggacgccgccaaccacugcgggaccaucgccaacggcguccugcagacguucaugcggauggcguggggcggguccuacaucgcccuggacagcggcaagggguccugggacugcaucaugaccagcuaccaguaccucaucauccagaacaccaccugggaggaccacugccaguucucccgccccagccccaucggcuaccuggggcugcucagccagcggacgcgcgacaucuacaucucccggcgccggcgcggcaccuucaccuggacccugagcgacuccgagggcaacgagacgcccgggggcuacugccugacccgguggaugcucaucgaggccgagcugaagugcuucgggaacaccgccguggccaagugcaacgagaagcacgacgaggaguucugcgacaugcugcgccucuucgacuucaacaagcaggcgauccggcgccugaagaccccggcccagaugagcauccagcugaucaacaaggccgugaacgcccucaucaacgaccagcugaucaugaagaaccaccuccgggacaucaugggcauccccuacugcaacuacuccaaguacugcuaccugaaccacacggucaccgggaagaccagccugccccgcugcugccugguguccaacggcagcuaccucaacgagacccacuucuccgacgacaucgagcagcaggccgacaacaugaucacggagcugcugcagaaggaguacauggaccggcagggcaagaccccgcucgggcugguggaccuguucgucuucagcaccuccuucuaccugaucagcaucuuccuccaccugaucaagauccccacccaccgccacaucacgggcaagcccugccccaagccgcaccggcugaaccacauggggaucugcuccugcggccucuacaagcaccccggggugcccgugaaguggaagcgcugaggacuaguaauaaggaaacuguaugaaugucugugggcaggaagugaagagauccuucuguaaagguuuuuggaauuaugucugcugaauaauaaacuuuuuugaaauaauaaaucugguagaaaaaugagaucucaaaggcucuuuucagagccaccaaaaaaaaaaaaaaaaaaaaaaaaaaaaaaaaaaaaaaaaaaaaaaaaaaaaaaaaaaaaaaaaaaaaaaaaaaaaaaaaaaaaaaaaaaaaaaaaaaaaa

SEQ ID NO: 25752 - RNA, 1809 nt, Artificial Sequence
  mRNA product Design b-4 (hSL-A100) comprising derived and/or modified sequence from LASV(LASV253-NIG-2011;Clade II)__AIT17670__GPCmut3 (opt1)
aggagagucccgcagucggcguccagcggcucugcuuguucgugugugugucguugcaggccuuauucaagcuuaccaugggccagaucaucaccuucuuccaggaggugccccacgucaucgaggaggugaugaacaucgugcugaucgcccucagccugcuggccauccucaaggggaucuacaacgucgcgaccugcggccuguucgggcugguguccuuccuccugcugugcggccgcagcugcuccacgaccuacaaggggguguacgagcuccagacccuggagcuggacauggccagccucaacaugaccaugccgcuguccugcacgaagaacaacagccaccacuacaucauggucggcaacgagaccggccuggagcucacccugaccaacacguccaucaucaaccacaaguucugcaaccugagcgacgcccacaagaagaaccucuacgaccacgcccugauguccaucaucagcaccuuccaccuguccauccccaacuucaaccaguacgaggccaugagcugcgacuucaacgggggcaagaucuccgugcaguacaaccucagccacaccuacgcgguggacgccgccaaccacugcgggaccaucgccaacggcguccugcagacguucaugcggauggcguggggcggguccuacaucgcccuggacagcggcaagggguccugggacugcaucaugaccagcuaccaguaccucaucauccagaacaccaccugggaggaccacugccaguucucccgccccagccccaucggcuaccuggggcugcucagccagcggacgcgcgacaucuacaucucccggcgccggcgcggcaccuucaccuggacccugagcgacuccgagggcaacgagacgcccgggggcuacugccugacccgguggaugcucaucgaggccgagcugaagugcuucgggaacaccgccguggccaagugcaacgagaagcacgacgaggaguucugcgacaugcugcgccucuucgacuucaacaagcaggcgauccggcgccugaaggccccggcccagaugagcauccagcugaucaacaaggccgugaacgcccucaucaacgaccagcugaucaugaagaaccaccuccgggacaucaugggcauccccuacugcaacuacuccaaguacugcuaccugaaccacaccgucacggggcgcaccagccugccccggugcugccugguguccaacggcagcuaccucaacgagacccacuucuccgacgacaucgagcagcaggcggacaacaugaucaccgagcugcugcagaaggaguacaucgaccgccagggcaagacgccgcucgggcugguggaccuguucgucuucagcaccuccuucuaccugaucagcaucuuccuccaccuggugaagauccccacccaccggcacaucaucggcaagcccugccccaagccgcaccgccugaaccacauggggaucugcuccugcggccucuacaagcaccccggggugcccgucaaguggaagcggugaggacuaguaauaaggaaacuguaugaaugucugugggcaggaagugaagagauccuucuguaaagguuuuuggaauuaugucugcugaauaauaaacuuuuuugaaauaauaaaucugguagaaaaaugagaucucaaaggcucuuuucagagccaccaaaaaaaaaaaaaaaaaaaaaaaaaaaaaaaaaaaaaaaaaaaaaaaaaaaaaaaaaaaaaaaaaaaaaaaaaaaaaaaaaaaaaaaaaaaaaaaaaaaaa

SEQ ID NO: 25753 - RNA, 1809 nt, Artificial Sequence
  mRNA product Design b-4 (hSL-A100) comprising derived and/or modified sequence from LASV(LASV254-NIG-2011;Clade II)__AIT17674__GPCmut3 (opt1)
aggagagucccgcagucggcguccagcggcucugcuuguucgugugugugucguugcaggccuuauucaagcuuaccaugggccagaucaucaccuucuuccaggaggugccccacgucaucgaggaggugaugaacaucgugcugaucgcccucagccugcuggccauccucaaggggaucuacaacgucgcgaccugcggccuguucgggcugguguccuuccuccugcugugcggccgcagcugcuccacgaccuacaaggggguguacgagcuccagacccuggagcuggacaugaccaaccucaacaugacgaugccgcugagcugcaccaagaacaacucccaccacuacaucauggucggcaacgagaccggccuggagcucacccugacgaacaccagcaucaucaaccacaaguucugcaaccuguccgacgcccacaagaagaaccucuacaaccacgcccugaugagcaucaucuccaccuuccaccugagcauccccaacuucaaccaguacgaggccauguccugcgacuucaacgggggcaagaucagcgugcaguacaaccucucccacagcuacgccguggacgcggccaaccacugcgggaccaucgccaacggcguccugcagacguucaugcggauggccuggggcggguccuacaucgcgcuggacagcggcaaggggaacugggacugcaucaugaccuccuaccaguaccucaucauccagaacaccaccugggaggaccacugccaguucagccgccccucccccaucggcuaccuggggcugcucagccagcggacgcgcgacaucuacaucagccggcgccggcgcggcaccuucaccuggacccuguccgacagcgagggcaacgagacgcccgggggcuacugccugacccgguggaugcucaucgaggccgagcugaagugcuucgggaacaccgccguggccaagugcaacgagaagcacgacgaggaguucugcgacaugcugcgccucuucgacuucaacaagcaggccauccggcgccugaagaccccggcgcaggccaacauccagcugaucaacaaggccgugaacgcccucaucaacgaccagcugaucaugaagaaccaccuccgggacaucaugggcauccccuacugcaacuacuccaaguacugcuaccugaaccacacggucaccgggaagaccagccugccccgcugcugccugguguccaacggcagcuaccucaacgagacccacuucuccgacgacaucgagcagcaggccgacaacaugaucacggagcugcugcagaaggaguacauggaccggcagggcaagaccccgcucgggcugguggaccuguucgucuucagcaccuccuucuaccugaucagcaucuuccuccaccuggugaagauccccacccaccgccacgugaucggcaagcccugccccaagccgcaccggcugaaccacauggggaucugcuccugcggccucuacaagcaccccgggguccccgugaaguggaagcgcugaggacuaguaauaaggaaacuguaugaaugucugugggcaggaagugaagagauccuucuguaaagguuuuuggaauuaugucugcugaauaauaaacuuuuuugaaauaauaaaucugguagaaaaaugagaucucaaaggcucuuuucagagccaccaaaaaaaaaaaaaaaaaaaaaaaaaaaaaaaaaaaaaaaaaaaaaaaaaaaaaaaaaaaaaaaaaaaaaaaaaaaaaaaaaaaaaaaaaaaaaaaaaaaaa

SEQ ID NO: 25754 - RNA, 1809 nt, Artificial Sequence
  mRNA product Design b-4 (hSL-A100) comprising derived and/or modified sequence from LASV(Nig08-A19;Clade III)__ADU56618__GPCmut3 (opt1)
aggagagucccgcagucggcguccagcggcucugcuuguucgugugugugucguugcaggccuuauucaagcuuaccaugggccagaucgugaccuucuuccaggaggucccccacgugaucgaggaggugaugaacaucguccugaucgcccucagcauccuggccauccugaaggggcucuacaacaucgcgaccugcggccugaucgggcuggugacguuccuccugcuguccggccgcagcugcuccaugaccuacaaggggguguacgagcuccagacccuggagcugaacaugaacacccucaacaugacgaugccgcugagcugcaccaagaacaacucccaccacuacaucauggucggcaacgagaccggccuggagcucacccugacgaacaccagccugcuccaccacaaguucugcaaccuguccgacgcccacaagaagaaccuguacgaccacacccucaugagcaucaucuccaccuuccaccugagcauccccaacuucaaccaguacgaggccauguccugcgacuucaacgggggcaagaucacggugcaguacaaccugagccacuccuacgccaucgacgccgcgaaccacugcgggaccguggccaacggcguccuccagaccuucaugcggauggccuggggcgggagcuacaucgcccuggacuccggccgcgggaagugggacugcaucaugaccagcuaccaguaccugaucauccagaacacgaccugggaggaccacugccaguucucccggcccagccccaucggcuaccucgggcugcugucccagcgcacccgggacaucuacaucagccgccggcgccggggcaccuucacguggacccucagcgacuccgagggcaacgagacccccgggggcuacugccugacccgcuggaugcugaucgaggcggagcucaagugcuucgggaacacggccguggccaagugcaacgagaagcacgacgaggaguucugcgacaugcugcggcuguucgacuucaacaagcaggccauccgccggcucaaggccccggcgcagaugagcauccagcugaucaacaaggccgugaacgcccugaucaacgaccagcucaucaugaagaaccaccuccgcgacaucaugggcauccccuacugcaacuacuccaaguacugcuaccugaaccacaccagcaccgggcggaccucccugccccgcugcugccuggucagcaacggcuccuaccugaacgagacgcacuucagcgacgacaucgagcagcaggccgacaacaugaucaccgagaugcuccagaaggaguaccuggaccggcagggcaagaccccgcuggggcugguggaccucuucguguucuccaccagcuucuaccugaucuccaucuuccugcaccucgucaagauccccacgcaccgccacaucgugggcaagcccugccccaagccgcaccggcugaaccacauggggaucugcagcugcggccuguacaagcagcccggggugcccguccgcuggaagcggugaggacuaguaauaaggaaacuguaugaaugucugugggcaggaagugaagagauccuucuguaaagguuuuuggaauuaugucugcugaauaauaaacuuuuuugaaauaauaaaucugguagaaaaaugagaucucaaaggcucuuuucagagccaccaaaaaaaaaaaaaaaaaaaaaaaaaaaaaaaaaaaaaaaaaaaaaaaaaaaaaaaaaaaaaaaaaaaaaaaaaaaaaaaaaaaaaaaaaaaaaaaaaaaaa

SEQ ID NO: 25755 - RNA, 1812 nt, Artificial Sequence
  mRNA product Design b-4 (hSL-A100) comprising derived and/or modified sequence from LASV(G1180-SLE-2010;Clade IV)__AIT17168__GPCmut3 (opt1)
aggagagucccgcagucggcguccagcggcucugcuuguucgugugugugucguugcaggccuuauucaagcuuaccaugggccagaucgugaccuucuuccaggaggucccccacgugaucgaggaggugaugaacaucguccugaucgcccucagcauccuggccgugcugaaggggcucuacaacuucgcgaccugcggccugguggggcugcucacguuccugcugcucugcggccgcuccugcaccgccagccgguacaagggggucuacgagcugcagacccuggagcucaacauggagacccugaacaugacgaugccgcuguccugcaccaagaacaacagccaccacuacaucauggugggcaacgagaccggccucgagcugacccugacgaacaccuccaucaucaaccacaaguucugcaaccucagcgacgcccacaagaagaaccuguacgaccacgcccugauguccaucaucagcaccuuccaccucuccauccccaacuucaaccaguacgaggccaugagcugcgacuucaacgggggcaagaucuccgugcaguacaaccugagccacuccuacgcgggggacgccgccaaccacugcggcaccgucgccaacggggugcugcagacguucaugcgcauggcguggggcggcagcuacaucgcccucgacuccgggcacggcagcugggacugcaucaugaccuccuaccaguaccugaucauccagaacaccaccugggaggaccacugccaguucagccggcccucccccaucggguaccugggccuccugagccagcgcacgcgggacaucuacaucagccgccggcgccggggcaccuucaccuggacccuguccgacagcgaggggaaggacacgccgggcggguacugccucacccgcuggaugcugaucgaggccgagcugaagugcuucggcaacaccgccguggccaagugcaacgagaagcacgacgaggaguucugcgacaugcuccggcuguucgacuucaacaagcaggcgauccagcgccugaaggcccccgcccagauguccauccagcucaucaacaaggccgucaacgcccugaucaacgaccagcugaucaugaagaaccaccuccgggacaucauggggauccccuacugcaacuacagcaaguacugcuaccugaaccacaccacgaccggcaagaccucccugcccaagugcugccucgugagcaacggcuccuaccugaacgagacccacuucagcgacgacaucgagcagcaggcggacaacaugaucacggagaugcugcagaaggaguacauggagcgccaggggaagaccccgcucggccugguggaccuguucgucuucuccaccagcuucuaccugaucuccaucuuccuccaccuggugaagauccccacccaccggcacaucgugggcaagagcugccccaagccccaccgccugaaccacauggggaucugcuccugcgggcucuacaagcagccgggcguccccgugaaguggaagcggugaggacuaguaauaaggaaacuguaugaaugucugugggcaggaagugaagagauccuucuguaaagguuuuuggaauuaugucugcugaauaauaaacuuuuuugaaauaauaaaucugguagaaaaaugagaucucaaaggcucuuuucagagccaccaaaaaaaaaaaaaaaaaaaaaaaaaaaaaaaaaaaaaaaaaaaaaaaaaaaaaaaaaaaaaaaaaaaaaaaaaaaaaaaaaaaaaaaaaaaaaaaaaaaaa

SEQ ID NO: 25756 - RNA, 1812 nt, Artificial Sequence
  mRNA product Design b-4 (hSL-A100) comprising derived and/or modified sequence from LASV(G1442-SLE-2011;Clade IV)__AIT17180__GPCmut3 (opt1)
aggagagucccgcagucggcguccagcggcucugcuuguucgugugugugucguugcaggccuuauucaagcuuaccaugggccagaucgugaccuucuuccaggaggucccccacgugaucgaggaggugaugaacaucguccugaucgcccucagcauccuggccgugcugaaggggcucuacaacguggcgaccugcggccugaucgggcuggucacguuccuccugcugugcggccgcuccugcaccaccacccucuacaaggggguguacgagcugcagacgcuggagcucaacauggagacccugaacaugaccaugccgcugagcugcaccaagaacaacucccaccacuacauccgggugggcaacgagacgggccucgagcugacccugaccaacaccagcaucaucaaccacaaguucugcaaccucuccgacgcccacaagaagaaccuguacgaccacgcccugaugagcaucaucuccacguuccaccucagcauccccaacuucaaccaguacgaggccauguccugcgacuucaacgggggcaagaucagcguccaguacaaccugucccacagcuacgccggggacgcggccaaccacugcggcaccguggccaacggggugcugcagaccuucaugcgcauggccuggggcggcuccuacaucgcgcucgacagcgggcggggcaacugggacugcaucaugaccuccuaccaguaccugaucauccagaacacgaccugggacgaccacugccaguucagccgccccucccccaucggguaccugggccuccugagccagcggacccgcgacgucuacaucucccggcgccggcgcggcaccuucacguggacccugagcgacagcgaggggaaggacaccccgggcggguacugccucacccgguggaugcugaucgaggccgagcugaagugcuucggcaacacggccguggccaagugcaacgagaagcacgacgaggaguucugcgacaugcuccgccuguucgacuucaacaagcaggccauccagcggcugaaggcgcccgcccagauguccauccagcucaucaacaaggccgugaacgcccugaucaacgaccagcugaucaugaagaaccaccuccgcgacaucauggggauccccuacugcaacuacagcaaguacugcuaccugaacaacaccgccaccggcaagaccucccugcccaagugcugccucaucagcaacggcuccuaccugaacgagacgcacuucagcgacgacaucgagcaggaggcggacaacaugaucaccgagaugcugcagaaggaguacauggagcggcaggggaagaccccgcucggccuggucgaccuguucguguucuccaccagcuucuaccugaucuccaucuuccuccaccuggugaagauccccacgcaccgccacaucgucggcaagagcugccccaagccccaccggcugaaccacauggggaucugcuccugcgggcucuacaagcagccgggcgugcccgugcgcuggaagcggugaggacuaguaauaaggaaacuguaugaaugucugugggcaggaagugaagagauccuucuguaaagguuuuuggaauuaugucugcugaauaauaaacuuuuuugaaauaauaaaucugguagaaaaaugagaucucaaaggcucuuuucagagccaccaaaaaaaaaaaaaaaaaaaaaaaaaaaaaaaaaaaaaaaaaaaaaaaaaaaaaaaaaaaaaaaaaaaaaaaaaaaaaaaaaaaaaaaaaaaaaaaaaaaaa

SEQ ID NO: 25757 - RNA, 1812 nt, Artificial Sequence
  mRNA product Design b-4 (hSL-A100) comprising derived and/or modified sequence from LASV(G3010-SLE-2013;Clade IV)__AIT17344__GPCmut3 (opt1)
aggagagucccgcagucggcguccagcggcucugcuuguucgugugugugucguugcaggccuuauucaagcuuaccaugggccagaucgugaccuucuuccaggaggucccccacgugaucgaggaggugaugaacaucguccugaucgcccucagcauccuggccgugcugaaggggcucuacaacuucgcgaccugcggccugguggggcuggucacguuccuccugcugugcggccgcuccugcaccaccagccucuacaaggggguguacgagcugcagacccuggagcucaacauggagacgcugaacaugaccaugccgcuguccugcaccaagaacaacagccaccacuacaucauggugggcaacgagaccggccucgagcugacgcugaccaacaccuccaucaucaaccacaaguucugcaaccucagcgacgcccacaagaagaaccuguacaaccacgcccugauguccaucaucagcaccuuccaccucuccauccccaacuucaaccaguacgaggccaugagcugcgacuucaacgggggcaagaucuccguccaguacaaccugagccacuccuacgccggggacgcggccagccacugcggcacgguggccaacggggugcugcagaccuucaugcggauggccuggggcggcuccuacaucgcgcucgacagcggguacggcaagugggacugcaucaugaccuccuaccaguaccugaucauccagaacaccacgugggaggaccacugccaguucagccgccccucccccaucggguaccugggccuccugagccagcggacccgcgacaucuacaucagccggcgccggcgcggcaccuucaccuggacgcuguccgacagcgaggggaaggacaccccgggcggguacugccucacccgguggaugcugaucgaggccgagcugaagugcuucggcaacaccgccgucgccaagugcaacgagaagcacgacgaggaguucugcgacaugcuccgccuguucgacuucaacaagcaggccauccagcggcugaagacgcccgcgcagauguccauccagcucaucaacaaggccgugaacgcccugaucaacgaccagcugaucaugaagaaccaccuccgcgacaucauggggauccccuacugcaacuacagcaaguacugcuaccugaaccacaccaccaccggcaagacgucccugcccaagugcugccucgugagcaacggcuccuaccugaacgagacccacuucagcgacgacaucgagcagcaggccgacaacaugaucaccgagaugcugcagaaggaguacauggagcggcaggggaagaccccgcucggccuggucgaccuguucguguucuccacgagcuucuaccugaucuccaucuuccuccaccuggugaagauccccacccaccgccacaucgucggcaagagcugccccaagccccaccggcugaaccacauggggaucugcuccugcgggcucuacaagcagccgggcgugcccgugcgcuggaagcggugaggacuaguaauaaggaaacuguaugaaugucugugggcaggaagugaagagauccuucuguaaagguuuuuggaauuaugucugcugaauaauaaacuuuuuugaaauaauaaaucugguagaaaaaugagaucucaaaggcucuuuucagagccaccaaaaaaaaaaaaaaaaaaaaaaaaaaaaaaaaaaaaaaaaaaaaaaaaaaaaaaaaaaaaaaaaaaaaaaaaaaaaaaaaaaaaaaaaaaaaaaaaaaaaa

SEQ ID NO: 25758 - RNA, 1812 nt, Artificial Sequence
  mRNA product Design b-4 (hSL-A100) comprising derived and/or modified sequence from LASV(G502-SLE-2009;Clade IV)__AIT17126__GPCmut3 (opt1)
aggagagucccgcagucggcguccagcggcucugcuuguucgugugugugucguugcaggccuuauucaagcuuaccaugggccagaucgugaccuucuuccaggaggucccccacgugaucgaggaggugaugaacaucguccugaucgcccucagcauccuggccgugcugaaggggcucuacaacuucgcgaccugcggccugguggggcugcucacguuccugcugcucugcggccgcuccugcaccaccgggcuguacaagggcgucuacgagcugcagacccucgagcugaacauggagacgcugaacaugaccaugccgcucagcugcaccaagaacaacucccaccacuacaucauggugggcaacgagaccgggcuggagcugacgcucaccaacaccagcaucaucaaccacaaguucugcaaccuguccgacgcccacaagaagaaccuguacgaccacgcccucaugagcaucaucuccaccuuccaccugagcauccccaacuucaaccaguacgaggccauguccugcgacuucaacggcgggaagaucagcgugcaguacaaccugucccacagcuacgccggcgacgcggccgaccacugcgggacggucgccaacggcgugcuccagaccuucaugcggauggccuggggcggguccuacaucgcgcuggacagcggccgcgggcggugggacugcaucaugaccuccuaccaguaccugaucauccagaacaccacgugggaggaccacugccaguucagccgccccucccccaucggcuaccucggccugcugagccagcggacccgcgacaucuacaucucccggcgccggcgcgggaccuucaccuggacgcucagcgacagcgagggcaaggacacccccgggggcuacugccugacccgguggaugcugaucgaggccgagcucaagugcuucgggaacaccgccguggccaagugcaacgagaagcacgacgaggaguucugcgacaugcugcgccuguucgacuucaacaagcaggccauccagcggcucaaggcgccggcccagauguccauccagcugaucaacaaggccgucaacgcccugaucaacgaccagcucgugaugaagaaccaccuccgcgacaucaugggcauccccuacugcaacuacagccgguacugcuaccugaaccacacgaccaccggccgcaccucccugcccaagugcugccuggugagcaacggguccuaccugaacgagacgcacuucagcgacgacaucgagcagcaggccgacaacaugaucaccgagaugcuccagaaggaguacauggagcggcagggcaagaccccgcuggggcuggucgaccuguucguguucuccaccagcuucuaccucaucuccaucuuccugcaccuggugaagauccccacgcaccgccacaucgucggcaagagcugccccaagccccaccggcucaaccacauggggaucugcuccugcggccuguacaagcagccgggcgugcccgugaaguggaagcgcugaggacuaguaauaaggaaacuguaugaaugucugugggcaggaagugaagagauccuucuguaaagguuuuuggaauuaugucugcugaauaauaaacuuuuuugaaauaauaaaucugguagaaaaaugagaucucaaaggcucuuuucagagccaccaaaaaaaaaaaaaaaaaaaaaaaaaaaaaaaaaaaaaaaaaaaaaaaaaaaaaaaaaaaaaaaaaaaaaaaaaaaaaaaaaaaaaaaaaaaaaaaaaaaaa

SEQ ID NO: 25759 - RNA, 1812 nt, Artificial Sequence
  mRNA product Design b-4 (hSL-A100) comprising derived and/or modified sequence from LASV(G733-SLE-2010;Clade IV)__AIT17154__GPCmut3 (opt1)
aggagagucccgcagucggcguccagcggcucugcuuguucgugugugugucguugcaggccuuauucaagcuuaccaugggccagaucgugaccuucuuccaggaggucccccacgugaucgaggaggugaugaacaucguccugaucgcccucagcauccuggccgugcugaaggggcucuacaacuucgcgaccugcggcaucguggggcuggucuccuuccugcuccugugcggccgcagcugcacgaccucccuguacaaggggguguacgagcuccagacccuggagcugaacauggagacccucaacaugacgaugccgcugagcugcaccaagaacaacucccaccacuacaucauggugggcaacgagaccggccuggagcucacccugacgaacaccagcaucaucaaccacaaguucugcaaccuguccgacgcccacaagaagaaccucuacgaccacgcccugaugagcaucaucuccaccuuccaccugagcauccccaacuucaaccaguacgaggccauguccugcgacuucaacgggggcaagaucagcguccaguacaaccucucccacagcuacgccggggacgcggccaaccacugcggcaccaucgccaacggggugcugcagacguucaugcggauggccuggggcggcuccuacaucgcgcuggacagcgggcgcgaccggugggacugcaucaugaccuccuaccaguaccucaucauccagaacaccaccugggaggaccacugccaguucagccgccccucccccaucggcuaccuggggcugcucagccagcggacgcgcgacaucuacaucagccggcgccggcgcggcaccuucaccuggacccuguccgacagcgagggcaaggacacgcccgggggcuacugccugacccgguggaugcucaucgaggccgagcugaagugcuucgggaacaccgccguggccaagugcaacgagaagcacgacgaggaguucugcgacaugcugcgccucuucgacuucaacaagcaggccauccagcggcugaaggcgccggcccagauguccauccagcugaucaacaaggccgucaacgcccucaucaacgaccagcugaucaugaagaaccaccuccgcgacaucaugggcauccccuacugcaacuacagcaaguacugcuaccugaaccacaccacgaccgggaagaccucccugcccaagugcugccuggugagcaacggcuccuaccucaacgagacccacuucagcgacgacaucgagcagcaggccgacaacaugaucacggagaugcugcagaaggaguacauggagcggcagggcaagaccccgcuggggcucguggaccuguucgucuucuccaccagcuucuaccugaucuccaucuuccugcaccucgugaagauccccacccaccgccacguggucggcaagagcugccccaagccccaccggcugaaccacauggggaucugcuccugcggccuguacgggcagccgggcgugcccgugaaguggaagcgcugaggacuaguaauaaggaaacuguaugaaugucugugggcaggaagugaagagauccuucuguaaagguuuuuggaauuaugucugcugaauaauaaacuuuuuugaaauaauaaaucugguagaaaaaugagaucucaaaggcucuuuucagagccaccaaaaaaaaaaaaaaaaaaaaaaaaaaaaaaaaaaaaaaaaaaaaaaaaaaaaaaaaaaaaaaaaaaaaaaaaaaaaaaaaaaaaaaaaaaaaaaaaaaaaa

SEQ ID NO: 25760 - RNA, 1812 nt, Artificial Sequence
  mRNA product Design b-4 (hSL-A100) comprising derived and/or modified sequence from MOPV/LASV reassortant(IGS-1;Clade IV)__AFY05576__GPCmut3 (opt1)
aggagagucccgcagucggcguccagcggcucugcuuguucgugugugugucguugcaggccuuauucaagcuuaccaugggccagaucgugaccuucuuccaggaggucccccacgugaucgaggaggugaugaacaucguccugaucgcccucagcgugcuggccgugcugaaggggcucuacaacuucgcgaccugcggccuggucgggcuggugacguuccuccugcugugcggccgcuccugcaccaccagccucuacaaggggguguacgagcugcagacccuggagcucaacauggagacgcugaacaugaccaugccgcuguccugcaccaagaacaacagccaccacuacaucauggucggcaacgagaccggccucgagcugacgcugaccaacaccuccaucaucaaccacaaguucugcaaccucagcgacgcccacaagaagaaccuguacgaccacgcccugauguccaucaucagcaccuuccaccucuccauccccaacuucaaccaguacgaggccaugagcugcgacuucaacgggggcaagaucuccgugcaguacaaccugagccacuccuacgccggggacgcggccaaccacugcggcacgguggccaacgggguccugcagaccuucaugcggauggccuggggcggcagcuacaucgcgcucgacuccgggcgcggcaacugggacugcaucaugaccagcuaccaguaccugaucauccagaacaccacgugggaggaccacugccaguucucccggcccagccccaucggguaccugggccuccugucccagcgcacccgggacaucuacaucagccgccggcgccggggcaccuucaccuggacgcugagcgacuccgagggggaggacaccccgggcggguacugccucacccgcuggaugcugaucgaggccgagcugaagugcuucggcaacaccgccguggccaagugcaacgagaagcacgacgaggaguucugcgacaugcuccggcuguucgacuucaacaagcaggccauccagcgccugaaggcgcccgcccagaugagcauccagcucaucaacaaggccgugaacgcccugaucaacgaccagcugaucaugaagaaccaccuccgggacaucauggggauccccuacugcaacuacuccaaguacugcuaccugaaccacacgaccaccggccgcaccagccugcccaagugcugccucgucuccaacggcagcuaccugaacgagacgcacuucuccgacgacaucgagcagcaggccgacaacaugaucaccgagaugcugcagaaggaguacauggagcggcaggggaagaccccgcucggccugguggaccuguucguguucagcaccuccuucuaccugaucagcaucuuccuccaccuggucaagauccccacgcaccgccacaucguggggaaguccugccccaagccccaccggcugaaccacaugggcaucugcagcugcgggcucuacaagcagccgggcgugcccgucaaguggaagcgcugaggacuaguaauaaggaaacuguaugaaugucugugggcaggaagugaagagauccuucuguaaagguuuuuggaauuaugucugcugaauaauaaacuuuuuugaaauaauaaaucugguagaaaaaugagaucucaaaggcucuuuucagagccaccaaaaaaaaaaaaaaaaaaaaaaaaaaaaaaaaaaaaaaaaaaaaaaaaaaaaaaaaaaaaaaaaaaaaaaaaaaaaaaaaaaaaaaaaaaaaaaaaaaaaa

SEQ ID NO: 25761 - RNA, 1812 nt, Artificial Sequence
  mRNA product Design b-4 (hSL-A100) comprising derived and/or modified sequence from LASV(LM765-SLE-2012;Clade IV)__AIT17814__GPCmut3 (opt1)
aggagagucccgcagucggcguccagcggcucugcuuguucgugugugugucguugcaggccuuauucaagcuuaccaugggccagaucgugaccuucuuccaggaggucccccacgugaucgaggaggugaugaacaucguccugaucgcccucagcauccuggccgugcugaaggggcucuacaacuucgcgaccugcggccugguggggcuggucacguuccuccugcugugcggccgcuccugcaccaccagccucuacaaggggguguacgagcugcagacccuggagcucaacauggagacgcugaacaugaccaugccgcuguccugcaccaagaacaacagccaccacuacaucauggugggcaacgagaccggccucgagcugacgcugaccaacaccuccaucaucgaccacaaguucugcaaccucagcgacgcccaccggaagaaccuguacgaccacgcccugauguccaucaucagcaccuuccaccucuccauccccaacuucaaccaguacgaggccaugagcugcgacuucaacgggggcaagaucuccguccaguacaaccugagccacuccuacgccaaggacgcggccgaccacugcgggacgguggccaacggcgugcugcagaccuucaugcgcauggccuggggcgggagcuacaucgcgcucgacuccggccgggggcgcugggacugcaucaugaccagcuaccaguaccugaucauccagaacaccacgugggaggaccacugccaguucucccggcccagccccaucggcuaccuggggcuccugucccagcgcacccgggacaucuacaucagccgccggcgccggggcaccuucaccuggacgcugagcgacuccgagggcaaggacacccccgggggcuacugccucacccgcuggaugcugaucgaggccgagcugaagugcuucgggaacaccgccgucgccaagugcaacgagaagcacgacgaggaguucugcgacaugcuccggcuguucgacuucaacaagcaggccauccagcgccugaaggcgccggcccagaugagcauccagcucaucaacaaggccgugaacgcccugaucaacgaccagcugaucaugaagaaccaccuccgggacaucaugggcauccccuacugcaacuacuccaaguacugcuaccugaaccacacgaccaccgggaagaccagccugcccaagugcugccucguguccaacggcagcuaccugaacgagacgcacuucuccgacgacaucgagcagcaggccgacaacaugaucaccgagaugcugcagaaggaguacauggagcgccagggcaagaccccgcucgggcuggucgaccuguucguguucagcaccuccuucuaccugaucagcaucuuccuccaccuggugaagauccccacgcaccggcacaucgucggcaagcccugccccaagccgcaccgccugaaccacauggggaucugcuccugcggccucuacaagcagcccggggugcccgugaaguggaagcggugaggacuaguaauaaggaaacuguaugaaugucugugggcaggaagugaagagauccuucuguaaagguuuuuggaauuaugucugcugaauaauaaacuuuuuugaaauaauaaaucugguagaaaaaugagaucucaaaggcucuuuucagagccaccaaaaaaaaaaaaaaaaaaaaaaaaaaaaaaaaaaaaaaaaaaaaaaaaaaaaaaaaaaaaaaaaaaaaaaaaaaaaaaaaaaaaaaaaaaaaaaaaaaaaa

SEQ ID NO: 25762 - RNA, 1812 nt, Artificial Sequence
  mRNA product Design b-4 (hSL-A100) comprising derived and/or modified sequence from LASV(LM776-SLE-2012;Clade IV)__AIT17824__GPCmut3 (opt1)
aggagagucccgcagucggcguccagcggcucugcuuguucgugugugugucguugcaggccuuauucaagcuuaccaugggccagaucgugaccuucuuccaggaggucccccacgugaucgaggaggugaugaacaucguccugaucgcccucagcauccuggccgugcugaaggggcucuacaacuucgcgaccugcggccugguggggcuggucacguuccuccugcugugcggccgcuccugcaccaccagcguguacaaggggguguacgagcuccagacccuggagcugaacauggagacgcucaacaugaccaugccgcuguccugcaccaagaacaacagccaccacuacaucauggucggcaacgagaccggccuggagcucacgcugaccaacaccuccaucaucaaccacaaguucugcaaccugagcgacgcccacaagaagaaccucuacgaccacgcccugauguccaucaucagcaccuuccaccuguccauccccaacuucaaccaguacgaggccaugagcugcgacuucaacgggggcaagaucuccgugcaguacaaccucagccacuccuacgccggggacgcggccaaccacugcggcacgguggccaacgggguccugcagaccuucaugcggauggccuggggcggcagcuacaucgcgcuggacuccgggcacggcaagugggacugcaucaugaccagcuaccaguaccucaucauccagaacaccacgugggaggaccacugccaguucucccgccccagccccaucggguaccugggccugcucucccagcggacccgcgacaucuacaucagccggcgccggcgcggcaccuucaccuggacgcugagcgacuccgaggggaaggacaccccgggcggguacugccugacccgguggaugcucaucgaggccgagcugaagugcuucggcaacaccgccguggccaagugcaacgagaagcacgacgaggaguucugcgacaugcugcgccucuucgacuucaacaagcaggccauccagcggcugaaggcgcccgcccagaugagcauccagcugaucaacaaggccgugaacgcccucaucaacgaccagcugaucaugaagaaccaccuccgcgacaucauggggauccccuacugcaacuacuccaaguacugcuaccugaaccacacgaccaccggcaagaccagccugcccaagugcugccuggucuccaacggcagcuaccucaacgagacgcacuucuccgacgacaucgagcagcaggccgacaacaugaucaccgagaugcugcagaaggaguacauggagcggcaggggaagaccccgcugggccucguggaccuguucguguucagcaccuccuucuaccugaucagcaucuuccugcaccucgucaagauccccacgcaccgccacaucguggggaaguccugccccaagccccaccggcugaaccacaugggcaucugcagcugcgggcuguacaagcagccgggcgugcccguccgcuggaagcggugaggacuaguaauaaggaaacuguaugaaugucugugggcaggaagugaagagauccuucuguaaagguuuuuggaauuaugucugcugaauaauaaacuuuuuugaaauaauaaaucugguagaaaaaugagaucucaaaggcucuuuucagagccaccaaaaaaaaaaaaaaaaaaaaaaaaaaaaaaaaaaaaaaaaaaaaaaaaaaaaaaaaaaaaaaaaaaaaaaaaaaaaaaaaaaaaaaaaaaaaaaaaaaaaa

SEQ ID NO: 25763 - RNA, 1812 nt, Artificial Sequence
  mRNA product Design b-4 (hSL-A100) comprising derived and/or modified sequence from LASV(Mad39;Clade IV)__ANH09722__GPCmut3 (opt1)
aggagagucccgcagucggcguccagcggcucugcuuguucgugugugugucguugcaggccuuauucaagcuuaccaugggccagaucgugaccuucuuccaggaggucccccacgugaucgaggaggugaugaacaucguccugaucgcccucagcauccuggccgugcugaaggggcucuacaacguggcgaccugcggccugaucgggcuggucacguuccuccugcugugcggccgcuccugcaccaccacccucuacaaggggguguacgagcugcaggcccuggagcucaacauggagacgcugaacaugaccaugccgcugagcugcaccaagaacaacucccaccacuacauccgggugggcaacgagaccggccucgagcugacgcugaccaacaccagccucaucaaccacaaguucugcaaccuguccgacgcccacaagaagaaccuguacgaccacgcccucaugagcaucaucuccaccuuccaccugagcauccccaacuucaaccaguacgaggccauguccugcgacuucaacgacgggaagaucagcguccaguacaaccugucccacacguacgcgggcgacaccgccaaccacugcgggaccguggccaacggcgugcuccagaccuucaugcgcauggccuggggcgggagcuacaucgcgcuggacuccggccgcgggggcugggacugcaucaugacgagcuaccaguaccugaucauccagaacaccaccugggaggaccacugccaguucucccggcccagccccaucggguaccucggccugcugucccagcggacccgcgacaucuacaucagccggcgccggcgcggcacguucaccuggacccucuccgacagcgaggggaaggacaccccgggcggguacugccugacgcgguggaugcugaucgaggccgagcucaagugcuucggcaacaccgccgucgccaagugcaacgagaagcacgacgaggaguucugcgacaugcugcgccuguucgacuucaacaagcaggccauccagcggcucaaggcgcccgcccagaugagcauccagcugaucaacaaggccgugaacgcccugaucaacgaccagcucaucaugaagaaccaccuccgcgacaucauggggauccccuacugcaacuacuccaaguacugcuaccugaaccacaccgugaccggcaagacgagccugcccaagugcugccuggucuccaacggcagcuaccugaacgagacccacuucuccgacgacaucgagcagcaggccgacaacaugaucaccgagaugcuccagaaggaguacauggagcggcaggggaagaccccgcugggccugguggaccuguucguguucagcacguccuucuaccucaucagcaucuuccugcaccuggucaagauccccacccaccgccacgugguggggaagcccugccccaagccgcaccggcucaaccacaugggcaucugcuccugcggguucuacaagcagcccggcguccccgugcgcuggaagcggugaggacuaguaauaaggaaacuguaugaaugucugugggcaggaagugaagagauccuucuguaaagguuuuuggaauuaugucugcugaauaauaaacuuuuuugaaauaauaaaucugguagaaaaaugagaucucaaaggcucuuuucagagccaccaaaaaaaaaaaaaaaaaaaaaaaaaaaaaaaaaaaaaaaaaaaaaaaaaaaaaaaaaaaaaaaaaaaaaaaaaaaaaaaaaaaaaaaaaaaaaaaaaaaaa

SEQ ID NO: 25764 - RNA, 1812 nt, Artificial Sequence
  mRNA product Design b-4 (hSL-A100) comprising derived and/or modified sequence from LASV(Z0947-SLE-2011;Clade IV)__AIT17840__GPCmut3 (opt1)
aggagagucccgcagucggcguccagcggcucugcuuguucgugugugugucguugcaggccuuauucaagcuuaccaugggccagaucgugaccuucuuccaggaggucccccacgugaucgaggaggugaugaacaucguccugaucgcccucagcauccuggccgugcugaaggggcucuacaacuucgcgaccugcggccugguggggcuggucacguuccuccugcugugcggccgcuccugcaccaucagccucuacaaggggguguacgagcugcagacccuggagcucaacauggagacccugaacaugacgaugccgcuguccugcaccaagaacaacagccaccacuacaucauggugggcaacgagaccggccucgagcugacccugacgaacaccuccaucaucaaccacaaguucugcaaccucagcgacgcccacaagaagaaccuguacgaccacgcccugauguccaucaucagcaccuuccaccucuccauccccaacuucaaccaguacgaggccaugagcugcgacuucaacgggggcaagaucuccguccaguacaaccugagccacuccuacgccggggacgcggccaaccacugcggcaccguggccaacggggugcugcagacguucaugcggauggccuggggcggcagcuacaucgcgcucgacuccgggcgcgaccggugggacugcaucaugaccagcuaccaguaccugaucauccagaacaccaccugggaggaccacugccaguucucccgccccagccccaucggcuaccuggggcuccugucccagcggacgcgcgacaucuacaucagccggcgccggcgcggcaccuucaccuggacccugagcgacuccgagggcaaggacacgcccgggggcuacugccucacccgguggaugcugaucgaggccgagcugaagugcuucgggaacaccgccgucgccaagugcaacgagaagcacgacgaggaguucugcgacaugcuccgccuguucgacuucaacaagcaggccauccagcggcugaaggcgccggcccagaugagcauccagcucaucaacaaggccgugaacgcccugaucaacgaccagcugaucaugaagaaccaccuccgcgacaucaugggcauccccuacugcaacuacuccaaguacugcuaccugaaccacaccacgaccgggaagaccagccugcccaagugcugccucguguccaacggcagcuaccugaacgagacccacuucuccgacgacaucgagcagcaggccgacaacaugaucacggagaugcugcagaaggaguacauggagcggcagggcaagaccccgcucgggcuggucgaccuguucguguucagcaccuccuucuaccugaucagcaucuuccuccaccuggugaagauccccacccaccgccacaucgucggcaagcccugccccaagccgcaccggcugaaccacauggggaucugcuccugcggccucuacaagcagcccggggugcccgugaaguggaagcgcugaggacuaguaauaaggaaacuguaugaaugucugugggcaggaagugaagagauccuucuguaaagguuuuuggaauuaugucugcugaauaauaaacuuuuuugaaauaauaaaucugguagaaaaaugagaucucaaaggcucuuuucagagccaccaaaaaaaaaaaaaaaaaaaaaaaaaaaaaaaaaaaaaaaaaaaaaaaaaaaaaaaaaaaaaaaaaaaaaaaaaaaaaaaaaaaaaaaaaaaaaaaaaaaaa

SEQ ID NO: 25765 - RNA, 1812 nt, Artificial Sequence
  mRNA product Design b-4 (hSL-A100) comprising derived and/or modified sequence from LASV(Josiah;Clade IV)__NP_694870__GPCmut3 (opt4)
aggagagucccgcagucggcguccagcggcucugcuuguucgugugugugucguugcaggccuuauucaagcuuaccaugggccagaucgugaccuucuuccaggaggugccccacgugaucgaggaggugaugaacaucgugcugaucgcccugagcgugcuggccgugcugaagggccuguacaacuucgccaccugcggccuggugggccuggugaccuuccugcugcugugcggcagaagcugcaccaccagccuguacaagggcguguacgagcugcagacccuggagcugaacauggagacccugaacaugaccaugccccugagcugcaccaagaacaacagccaccacuacaucauggugggcaacgagaccggccuggagcugacccugaccaacaccagcaucaucaaccacaaguucugcaaccugagcgacgcccacaagaagaaccuguacgaccacgcccugaugagcaucaucagcaccuuccaccugagcauccccaacuucaaccaguacgaggccaugagcugcgacuucaacggcggcaagaucagcgugcaguacaaccugagccacagcuacgccggcgacgccgccaaccacugcggcaccguggccaacggcgugcugcagaccuucaugagaauggccuggggcggcagcuacaucgcccuggacagcggcagaggcaacugggacugcaucaugaccagcuaccaguaccugaucauccagaacaccaccugggaggaccacugccaguucagcagacccagccccaucggcuaccugggccugcugagccagagaaccagagacaucuacaucagcagaagaagaagaggcaccuucaccuggacccugagcgacagcgagggcaaggacacccccggcggcuacugccugaccagauggaugcugaucgaggccgagcugaagugcuucggcaacaccgccguggccaagugcaacgagaagcacgacgaggaguucugcgacaugcugagacuguucgacuucaacaagcaggccauccagagacugaaggcccccgcccagaugagcauccagcugaucaacaaggccgugaacgcccugaucaacgaccagcugaucaugaagaaccaccugagagacaucaugggcauccccuacugcaacuacagcaaguacugcuaccugaaccacaccaccaccggcagaaccagccugcccaagugcugccuggugagcaacggcagcuaccugaacgagacccacuucagcgacgacaucgagcagcaggccgacaacaugaucaccgagaugcugcagaaggaguacauggagagacagggcaagaccccccugggccugguggaccuguucguguucagcaccagcuucuaccugaucagcaucuuccugcaccuggugaagauccccacccacagacacaucgugggcaagagcugccccaagccccacagacugaaccacaugggcaucugcagcugcggccuguacaagcagcccggcgugcccgugaaguggaagagaugaggacuaguaauaaggaaacuguaugaaugucugugggcaggaagugaagagauccuucuguaaagguuuuuggaauuaugucugcugaauaauaaacuuuuuugaaauaauaaaucugguagaaaaaugagaucucaaaggcucuuuucagagccaccaaaaaaaaaaaaaaaaaaaaaaaaaaaaaaaaaaaaaaaaaaaaaaaaaaaaaaaaaaaaaaaaaaaaaaaaaaaaaaaaaaaaaaaaaaaaaaaaaaaaa

SEQ ID NO: 25766 - RNA, 1809 nt, Artificial Sequence
  mRNA product Design b-4 (hSL-A100) comprising derived and/or modified sequence from LASV(LP;Clade I)__AAF86701__GPCmut3 (opt4)
aggagagucccgcagucggcguccagcggcucugcuuguucgugugugugucguugcaggccuuauucaagcuuaccaugggccagaucaucaccuucuuccaggaggugccccacgugaucgaggaggugaugaacaucgugcugaucgcccugagccugcuggccauccugaagggccuguacaacaucgccaccugcggcaucaucggccugguggccuuccuguuccugugcggcaagagcugcagccugacccugaagggcggcuacgagcugcagacccuggagcugaacauggagacccugaacaugaccaugccccugagcugcaccaagaacagcagccaccacuacaucagagugggcaacgagaccggccuggagcugacccugaccaacaccagcaucaucaaccacaaguucugcaaccugagcgacgcccacaagaagaaccuguacgaccacgcccugaugagcaucaucagcaccuuccaccugagcauccccaacuucaaccaguacgaggccaugagcugcgacuucaacggcggcaagaucagcgugcaguacaaccugagccacagcuacgccggcgacgccgccgagcacugcggcaccguggccaacggcgugcugcagaccuucaugagaauggccuggggcggcagauacaucgcccuggacagcggcaagggcaacugggacugcaucaugaccagcuaccaguaccugaucauccagaacaccaccugggaggaccacugccaguucagcagacccagccccaucggcuaccugggccugcugagccagagaaccagagacaucuacaucagcagaagaagaagaggcaccuucaccuggacccugagcgacagcgagggcaacgagacccccggcggcuacugccugaccagauggaugcugaucgaggccgagcugaagugcuucggcaacaccgccguggccaagugcaacgagaagcacgacgaggaguucugcgacaugcugagacuguucgacuucaacaagcaggccaucagaagacugaaggcccccgcccagaugagcauccagcugaucaacaaggccgugaacgcccugaucaacgaccagcugaucaugaagaaccaccugagagacaucaugggcauccccuacugcaacuacagcaaguacugcuaccugaaccacaccagcagcggcagaaccagccugcccaagugcugccugaucagcaacggcagcuaccugaacgagacccaguucagcgacgacaucgagcagcaggccgacaacaugaucaccgagaugcugcagaaggaguacaucgagagacagggcaagaccccccugggccugguggacaucuucaucuucagcaccagcuucuaccugaucagcaucuuccugcaccugaucaagauccccacccacagacacaucgugggcaagcccugccccaagccccacagacugaaccacaugggcgugugcagcugcggccuguacaagcaccccggcgugcccaccaaguggaagagaugaggacuaguaauaaggaaacuguaugaaugucugugggcaggaagugaagagauccuucuguaaagguuuuuggaauuaugucugcugaauaauaaacuuuuuugaaauaauaaaucugguagaaaaaugagaucucaaaggcucuuuucagagccaccaaaaaaaaaaaaaaaaaaaaaaaaaaaaaaaaaaaaaaaaaaaaaaaaaaaaaaaaaaaaaaaaaaaaaaaaaaaaaaaaaaaaaaaaaaaaaaaaaaaaa

SEQ ID NO: 25767 - RNA, 1809 nt, Artificial Sequence
  mRNA product Design b-4 (hSL-A100) comprising derived and/or modified sequence from LASV(803213;Clade II)__AAF86703__GPCmut3 (opt4)
aggagagucccgcagucggcguccagcggcucugcuuguucgugugugugucguugcaggccuuauucaagcuuaccaugggccagaucaucaccuucuuccaggaggugccccacgugaucgaggaggugaugaacaucgugcugaucgcccugagccugcuggccauccugaagggcaucuacaacguggccaccugcggccuguucggccugaucagcuuccugcugcugugcggcagaagcugcagcgugaccuacaagggcguguacgagcugcagacccuggagcugaacauggccaaccugaacaugaccaugccccugagcugcaccaagaacaacagccaccacuacaucauggugggcaacgagaccggccuggagcugacccugaccaacaccagcaucaucaaccacaaguucugcaaccugagcgacgcccacaagaagaaccuguacgaccacgcccugaugagcaucaucagcaccuuccaccugagcauccccaacuucaaccaguacgaggccaugagcugcgacuucaacggcggcaagaucagcgugcaguacaaccugagccacagcuucgccguggacgccgccaaccacugcggcaccaucgccaacggcgugcugcagaccuucaugagaauggccuggggcggcagcuacaucgcccuggacagcggcaagggcaacugggacugcaucaugaccagcuaccaguaccugaucauccagaacaccaccugggaggaccacugccaguucagcagacccagccccaucggcuaccugggccugcugagccagagaaccagagacaucuacaucagcagaagaagaagaggcaccuucaccuggacccugagcgacagcgagggcaacgaggcccccggcggcuacugccugaccagauggaugcugaucgaggccgagcugaagugcuucggcaacaccgccguggccaagugcaacgagaagcacgacgaggaguucugcgacaugcugagacuguucgacuucaacaagcaggccaucaagagacugaagacccccgcccagaugagcauccagcugaucaacaaggccgugaacgcccugaucaacgaccagcugaucaugaagaaccaccugagagacaucaugggcauccccuacugcaacuacagcagauacugcuaccugaaccacaccgugaccggcaagaccagccugcccagaugcugccuggugagcaacggcagcuaccugaacgagacccacuucagcgacgacaucgagcagcaggccgacaacaugaucaccgagaugcugcagaaggaguacauggacagacagggcaagaccccccugggccugguggaccuguucguguucagcaccagcuucuaccugaucagcaucuuccugcaccuggugaagauccccacccacagacacaucgugggcaagcccugccccaagccccacagacugaaccacaugggcaucugcagcugcggccuguacaagcaccccggcgugcccgugaaguggaagagaugaggacuaguaauaaggaaacuguaugaaugucugugggcaggaagugaagagauccuucuguaaagguuuuuggaauuaugucugcugaauaauaaacuuuuuugaaauaauaaaucugguagaaaaaugagaucucaaaggcucuuuucagagccaccaaaaaaaaaaaaaaaaaaaaaaaaaaaaaaaaaaaaaaaaaaaaaaaaaaaaaaaaaaaaaaaaaaaaaaaaaaaaaaaaaaaaaaaaaaaaaaaaaaaaa

SEQ ID NO: 25768 - RNA, 1809 nt, Artificial Sequence
  mRNA product Design b-4 (hSL-A100) comprising derived and/or modified sequence from LASV(GA391;Clade III)__CAA36645__GPCmut3 (opt4)
aggagagucccgcagucggcguccagcggcucugcuuguucgugugugugucguugcaggccuuauucaagcuuaccaugggccagaucgugaccuucuuccaggaggugccccacgugaucgaggaggugaugaacaucgugcugaucgcccugagcauccuggccauccugaagggccuguacaacguggccaccugcggccugaucggccuggugaccuuccugcugcugagcggcagaagcugcagccugaucuacaagggcaccuacgagcugcagacccuggagcugaacauggagacccugaacaugaccaugccccugagcugcaccaagaacaacagccaccacuacaucagagugggcaacgagaccggccuggagcugacccugaccaacaccagcauccugaaccacaaguucugcaaccugagcgacgcccacaagagaaaccuguacgaccacagccugaugagcaucaucagcaccuuccaccugagcauccccaacuucaaccaguacgaggccaugagcugcgacuucaacggcggcaagaucaccgugcaguacaaccugagccacagcuucgccguggacgccgccggccacugcggcacccuggccaacggcgugcugcagaccuucaugagaauggccuggggcggcagcuacaucgcccuggacagcggcagaggcaacugggacugcaucaugaccagcuaccaguaccugaucauccagaacaccaccugggacgaccacugccaguucagcagacccagccccaucggcuaccugggccugcugagccagagaaccagagacaucuacaucagcagaagaagaagaggcaccuucaccuggacccugagcgacagcgagggcaacgagacccccggcggcuacugccugaccagauggaugcugaucgaggccgagcugaagugcuucggcaacaccgccguggccaagugcaacgagaagcacgacgaggaguucugcgacaugcugagacuguucgacuucaacaagcaggccaucagaagacugaagacccccgcccagaugagcauccagcugaucaacaaggccgugaacgcccugaucaacgaccagcugaucaugaagaaccaccugagagacaucaugggcauccccuacugcaacuacagcagauacugcuaccugaaccacaccagcaccggcaagaccagccugcccagaugcugccugaucagcaacggcagcuaccugaacgagaccaaguucagcgacgacaucgagcagcaggccgacaacaugaucaccgagaugcugcagaaggaguacaucgacagacagggcaagaccccccugggccugguggaccuguucguguucagcaccagcuucuaccugaucagcaucuuccugcaccuggugaagauccccacccacagacacaucgugggcaagcccugccccaagccccacagacugaaccacaugggcaucugcagcugcggccuguacaagcagcccggcgugcccgugagauggaagagaugaggacuaguaauaaggaaacuguaugaaugucugugggcaggaagugaagagauccuucuguaaagguuuuuggaauuaugucugcugaauaauaaacuuuuuugaaauaauaaaucugguagaaaaaugagaucucaaaggcucuuuucagagccaccaaaaaaaaaaaaaaaaaaaaaaaaaaaaaaaaaaaaaaaaaaaaaaaaaaaaaaaaaaaaaaaaaaaaaaaaaaaaaaaaaaaaaaaaaaaaaaaaaaaaa

SEQ ID NO: 25769 - RNA, 1812 nt, Artificial Sequence
  mRNA product Design b-4 (hSL-A100) comprising derived and/or modified sequence from LASV(AV;Clade V)__CCA30314__GPCmut3 (opt4)
aggagagucccgcagucggcguccagcggcucugcuuguucgugugugugucguugcaggccuuauucaagcuuaccaugggccagaucgugaccuucuuccaggaggugccccacgugaucgaggaggugaugaacaucgugcugaucgcccugagcauccuggccgugcugaagggccuguacaacaucgccaccugcggccugaucggccugaucaccuuccugcugcugugcggcagaagcugcagcagcaaccuguacaagggcguguacgagcugcagagccuggaccugaacauggagacccugaacaugaccaugccccugagcugcaccaagaacaacagccaccacuacaucagagugggcaacgacaccggccuggagcugacccugaccaacaccagcauccugaaccacaaguucugcaaccugagcgacgcccacaagaaggaccuguacgaccacgcccugaugagcaucaucagcaccuuccaccugagcauccccaacuucaaccaguacgaggccaugagcugcgacuucaacggcggcaagaucagcgugcaguacaaccugagccacagcuacgccaucgacgccgccaaccacugcggcaccguggccaacggcauccugcagaccuucaugagaauggccuggggcggcagcuacaucgcccuggacagcggcagaggcaacugggacugcaucaugaccagcuaccaguaccugaucauccagaacaccaccugggagaaccacugccaguucagcagacccagccccaucggcuaccugggccugcugagccagagaaccagagacaucuacaucagcagaagaagaagaggcaccuucaccuggacccugagcgacagcgagggcaacgccacccccggcggcuacugccugaccagauggaugcugaucgaggccgagcugaagugcuucggcaacaccgccguggccaagugcaacgagaagcacgacgaggaguucugcgacaugcugagacuguucgacuucaacaagcaggccaucagcagacugaagagccccgcccagaugagcauccagcugaucaacaaggccgugaacgcccugaucaacgaccagcugaucaugaagaaccaccugagagacaucaugggcauccccuacugcaacuacagcaaguacugcuaccugaaccacaccaucaccggcaagaccagccugcccaagugcugccuggugagcaacggcagcuaccugaacgagacccacuucagcgacgacaucgagcagcaggccgacaacaugaucaccgagaugcugcagaaggaguacauggagagacagggcaagaccccccugggccugguggaccuguucguguucagcaccagcuucuaccugaucagcaucuuccugagacuggugaagauccccacccacagacacaucgugggcaagcccugccccaagccccacagacugaaccacaugggcaucugcagcugcggccuguacaagcagcccggcgugcccgugagauggaagagaugaggacuaguaauaaggaaacuguaugaaugucugugggcaggaagugaagagauccuucuguaaagguuuuuggaauuaugucugcugaauaauaaacuuuuuugaaauaauaaaucugguagaaaaaugagaucucaaaggcucuuuucagagccaccaaaaaaaaaaaaaaaaaaaaaaaaaaaaaaaaaaaaaaaaaaaaaaaaaaaaaaaaaaaaaaaaaaaaaaaaaaaaaaaaaaaaaaaaaaaaaaaaaaaaa

SEQ ID NO: 25770 - RNA, 1809 nt, Artificial Sequence
  mRNA product Design b-4 (hSL-A100) comprising derived and/or modified sequence from LASV(Togo/2016/7082;Clade VI)__AMR44577__GPCmut3 (opt4)
aggagagucccgcagucggcguccagcggcucugcuuguucgugugugugucguugcaggccuuauucaagcuuaccaugggccagaucaucaccuucuuccaggaggugccccacgugaucgaggaggugaugaacaucgugcugaucgcccugagccugcuggccauccugaagggcguguacaacguggccaccugcggcaucaucggccuggugaccuuccuguuccugugcggcagaagcugcagccugaucuacaagggcagcuacgagcugcagacccuggagcugaacauggagacccugaacaugaccaugccccugagcugcaccaagaacagcagccaccacuacaucagagugggcaacgagaccggccuggagcugacccugaccaacaccagcaucaucaaccacaaguucugcaaccugagcgacgcccacaagagaaaccuguacgaccacgcccugaugagcauccugagcaccuuccaccugagcauccccaacuucaaccaguacgaggccaugagcugcgacuucaacggcggcaagaucagcgugcaguacaaccugagccacgccuacgccguggacgccgccgagcacugcggcaccguggccaacggcgugcugcagaccuucaugagaauggccuggggcggcagcuacaucgcccuggacagcggcagaggcaacugggacugcaucaugaccagcuaccaguaccugaucauccagaacaccaccugggaggaccacugccaguucagcagacccagccccaucggcuaccugggccugcugagccagagaaccagagacaucuacaucagcagaagaagaagaggcaccuucaccuggacccugagcgacagcgagggcaacgagacccccggcggcuacugccugaccagauggaugcugaucgaggccgagcugaagugcuucggcaacaccgccguggccaagugcaacgagaagcacgacgaggaguucugcgacaugcugagacuguucgacuucaacaagcaggccauccagagacugaagagccccgcccagaugagcauccagcugaucaacaaggccgugaacgcccugaucaacgaccagcugaucaugaagaaccaccugagagacaugaugggcauccccuacugcaacuacagcaaguacugcuaccugaaccacaccagcagcggcagaaccagccugcccaagugcugccuggugagcaacggcagcuaccugaacgagacccacuucagcgacgacaucgagcagcaggccgacaacaugaucaccgagaugcugcagaaggaguacaucgacagacagggcaagaccccccugggccugguggaccuguucguguucagcaccagcuucuaccugaucagcaucuuccugcaccugaucaagauccccacccacagacacaucgugggcaagcccugccccaagccccacagacugaaccacaugggcaucugcagcugcggccuguacaagcagcccggcgugcccaccagauggaagagaugaggacuaguaauaaggaaacuguaugaaugucugugggcaggaagugaagagauccuucuguaaagguuuuuggaauuaugucugcugaauaauaaacuuuuuugaaauaauaaaucugguagaaaaaugagaucucaaaggcucuuuucagagccaccaaaaaaaaaaaaaaaaaaaaaaaaaaaaaaaaaaaaaaaaaaaaaaaaaaaaaaaaaaaaaaaaaaaaaaaaaaaaaaaaaaaaaaaaaaaaaaaaaaaaa

SEQ ID NO: 25771 - RNA, 1809 nt, Artificial Sequence
  mRNA product Design b-4 (hSL-A100) comprising derived and/or modified sequence from LASV(KAK-428;Clade n.d. (VII))__ANH09740__GPCmut3 (opt4)
aggagagucccgcagucggcguccagcggcucugcuuguucgugugugugucguugcaggccuuauucaagcuuaccaugggccagaucgugaccuucuuccaggaggugccccacgugaucgaggaggugaugaacaucgugcugaucgcccugagccugcuggccauccugaagggccuguacaacuucgccaccugcggcgugaucggccugaucaccuuccugcugcugugcggcagaagcugcagcgccaccuacaagggccaguacgagcugcagacccuggagcugaacauggagagccugaacaugaccaugccccugagcugcaccaagaacaacagccaccacuacaucagagccggcaacaacaccggccuggagcugacccugaccaacaccagcaucaucagccacaaguucugcaaccugagcgacgcccacaagaagaaccuguacgaccacacccugaugagcaucaucaccaccuuccaccugagcauccccaacuucaaccaguacgaggccaugagcugcgacuucaacggcggcaagaucagcauccaguacaaccugagccacagcuacgccggcgacgccgcccagcacugcggcaccguggccaacggcgugcugcagaccuucaugagaauggccuggggcggcagcuaccuggcccuggacagcggcagaagaggcugggacugcaucaucagcagcuaccaguaccugaucauccagaacaccaccugggacgaccacugccaguucagcagacccagccccaucggcuaccugggcuucgugagccagaagaccagagacaucuacaucagcagaagaagaagaggcaccuucaccuggacccugagcgacagcgagggccacgacaugcccggcggcuacugccugaccagauggaugcugaucgaggccgaccugaagugcuucggcaacaccgccguggccaagugcaacgagaagcacgacgaggaguucugcgacauguggagacuguucgacuucaacaagcaggccauccagagacugaaggcccccgcccagaugaacauccagcugaucaacaaggccgugaacgcccugaucaacgaccagcugaugaugaagaaccaccugagagacaucaugggcauccccuacugcaacuacagcaaguucugcuaccugaacaacaccaccaccggcagaaccagccugcccagaugcugccugaucagcaacggcagcuaccugaacgagacccacuucagcgacgacaucgagcagcaggccgacaacaugaucaccgagaugcugcagaaggaguacauggacagacagggcaagaccccccugggccugguggaccuguucguguucagcaccagcuucuaccugaucaccaucuuccugcaccuggugaagauccccacccacagacacaucgugggcaagcccugccccaagccccacagacugaaccacaugggcaucugcagcugcggccuguacaagcagcccggcgugcccgugagauggaagagaugaggacuaguaauaaggaaacuguaugaaugucugugggcaggaagugaagagauccuucuguaaagguuuuuggaauuaugucugcugaauaauaaacuuuuuugaaauaauaaaucugguagaaaaaugagaucucaaaggcucuuuucagagccaccaaaaaaaaaaaaaaaaaaaaaaaaaaaaaaaaaaaaaaaaaaaaaaaaaaaaaaaaaaaaaaaaaaaaaaaaaaaaaaaaaaaaaaaaaaaaaaaaaaaaa

SEQ ID NO: 25772 - RNA, 1809 nt, Artificial Sequence; identical to SEQ ID NO: 25766
  mRNA product Design b-4 (hSL-A100) comprising derived and/or modified sequence from LASV(Pinneo-NIG-1969;Clade I)__AIT17836__GPCmut3 (opt4)

SEQ ID NO: 25773 - RNA, 1809 nt, Artificial Sequence
  mRNA product Design b-4 (hSL-A100) comprising derived and/or modified sequence from LASV(ISTH0009-NIG-2011;Clade II)__AIT17404__GPCmut3 (opt4)
aggagagucccgcagucggcguccagcggcucugcuuguucgugugugugucguugcaggccuuauucaagcuuaccaugggccagaucaucaccuucuuccaggaggugccccacgugaucgaggaggugaugaacaucgugcugaucgcccugagccugcuggccauccugaagggcaucuacaacguggccaccugcggccuguucggccuggugagcuuccugcugcugugcggcagaagcugcagcaccaccuacaagggcguguacgagcugcagacccuggagcuggacauggccagccugaacaugaccaugccccugagcugcaccaagaacaacagccaccacuacaucauggugggcaacgagaccggccuggagcugacccugaccaacaccagcaucaucaaccacaaguucugcaaccugagcgacgcccacaagaagaaccuguacgaccacgcccugaugagcaucaucagcaccuuccaccugagcauccccaacuucaaccaguacgaggccaugagcugcgacuucaacggcggcaagaucagcgugcaguacaaccugagccacgccuacgccguggacgccgccaaccacugcggcaccaucgccaacggcgugcugcagaccuucaugagaauggccuggggcggcagcuacaucgcccuggacagcggcaagggcagcugggacugcaucaugaccagcuaccaguaccugaucauccagaacaccaccugggaggaccacugccaguucagcagacccagccccaucggcuaccugggccugcugagccagagaaccagagacaucuacaucagcagaagaagaagaggcaccuucaccuggacccugagcgacagcgagggcaacgagacccccggcggcuacugccugaccagauggaugcugaucgaggccgagcugaagugcuucggcaacaccgccguggccaagugcaacgagaagcacgacgaggaguucugcgacaugcugagacuguucgacuucaacaagcaggccaucagaagacugaagacccccgcccagaugagcauccagcugaucaacaaggccgugaacgcccugaucaacgaccagcugaucaugaagaaccaccugagagacaucaugggcauccccuacugcaacuacagcaaguacugcuaccugaaccacaccgugaccggcaagaccagccugcccagaugcugccuggugagcaacggcagcuaccugaacgagacccacuucagcgacgacaucgagcagcaggccgacaacaugaucaccgagcugcugcagaaggaguacauggacagacagggcaagaccccccugggccugguggaccuguucguguucagcaccagcuucuaccugaucagcaucuuccugcaccugaucaagauccccacccacagacacaucaccggcaagcccugccccaagccccacagacugaaccacaugggcaucugcagcugcggccuguacaagcaccccggcgugcccgugaaguggaagagaugaggacuaguaauaaggaaacuguaugaaugucugugggcaggaagugaagagauccuucuguaaagguuuuuggaauuaugucugcugaauaauaaacuuuuuugaaauaauaaaucugguagaaaaaugagaucucaaaggcucuuuucagagccaccaaaaaaaaaaaaaaaaaaaaaaaaaaaaaaaaaaaaaaaaaaaaaaaaaaaaaaaaaaaaaaaaaaaaaaaaaaaaaaaaaaaaaaaaaaaaaaaaaaaaa

SEQ ID NO: 25774 - RNA, 1809 nt, Artificial Sequence
  mRNA product Design b-4 (hSL-A100) comprising derived and/or modified sequence from LASV(ISTH2010-NIG-2012;Clade II)__AIT17482__GPCmut3 (opt4)
aggagagucccgcagucggcguccagcggcucugcuuguucgugugugugucguugcaggccuuauucaagcuuaccaugggccagaucaucaccuucuuccaggaggugccccacgugaucgaggaggugaugaacaucgugcugaucgcccugagccugcuggccauccugaagggcaucuacaacguggccaccugcggccuguucggccuggugagcuuccugcugcugugcggcagaagcugcagcaccaccuacaagggcguguacgagcugcagacccuggagcuggacauggccagccugaacaugaccaugccccugagcugcaccaagaacaacagccaccacuacaucauggugggcaacgagaccggccuggagcugacccugaccaacaccagcaucaucaaccacaaguucugcaaccugagcgacgcccacaagaagaaccuguacgaccacgcccugaugagcaucaucagcaccuuccaccugagcauccccaacuucaaccaguacgaggccaugagcugcgacuucaacggcggcaagaucagcgugcaguacaaccugagccacgccuacgccguggacgccgccaaccacugcggcaccaucgccaacggcgugcugcagaccuucaugagaauggccuggggcggcagcuacaucgcccuggacagcggcaagggcagcugggacugcaucaugaccagcuaccaguaccugaucauccagaacaucaccugggaggaccacugccaguucagcagacccagccccaucggcuaccugggccugcugagccagagaaccagagacaucuacaucagcagaagaagaagaggcaccuucaccuggacccugagcgacagcgagggcaacgagacccccggcggcuacugccugaccagauggaugcugaucgaggccgagcugaagugcuucggcaacaccgccguggccaagugcaacgagaagcacgacgaggaguucugcgacaugcugagacuguucgacuucaacaagcaggccaucagaagacugaagacccccgcccagaugagcauccagcugaucaacaaggccgugaacgcccugaucaacgaccagcugaucaugaagaaccaccugagagacaucaugggcauccccuacugcaacuacagcaaguacugcuaccugaaccacaccgugaccggcaagaccagccugcccagaugcugccuggugagcaacggcagcuaccugaacgagacccacuucagcgacgacaucgagcagcaggccgacaacaugaucaccgagcugcugcagaaggaguacaucgacagacagggcaagaccccccugggccugguggaccuguucguguucagcaccagcuucuaccugaucagcaucuuccugcaccuggugaagauccccacccacagacacguggugggcaagcccugccccaagccccacagacugaaccacaugggcaucugcagcugcggccuguacaagcaccccggcgugcccgugaaguggaagagaugaggacuaguaauaaggaaacuguaugaaugucugugggcaggaagugaagagauccuucuguaaagguuuuuggaauuaugucugcugaauaauaaacuuuuuugaaauaauaaaucugguagaaaaaugagaucucaaaggcucuuuucagagccaccaaaaaaaaaaaaaaaaaaaaaaaaaaaaaaaaaaaaaaaaaaaaaaaaaaaaaaaaaaaaaaaaaaaaaaaaaaaaaaaaaaaaaaaaaaaaaaaaaaaaa

SEQ ID NO: 25775 - RNA, 1809 nt, Artificial Sequence
  mRNA product Design b-4 (hSL-A100) comprising derived and/or modified sequence from LASV(Lassa virus/H.sapiens-wt/NGA/2015/ISTH_0543;Clade II)__AVO03639__GPCmut3 (opt4)
aggagagucccgcagucggcguccagcggcucugcuuguucgugugugugucguugcaggccuuauucaagcuuaccaugggccagaucaucaccuucuuccaggaggugccccacgugaucgaggaggugaugaacaucgugcugaucgcccugagccugcuggccauccugaagggcaucuacaacguggccaccugcggccuguucggccuggugagcuuccugcugcugugcggcagaagcugcagcaccaccuacaagggcguguacgagcugcagacccuggagcuggacauggccaaccugaacaugaccaugccccugagcugcaccaagaacaacagccaccacuacaucauggugggcaacgagaccggccuggagcugacccugaccaacaccagcaucaucaaccacaaguucugcaaccugagcgacgcccacaagaagaaccuguacgaccacgcccugaugagcaucaucagcaccuuccaccugagcauccccaacuucaaccaguacgaggccaugagcugcgacuucaacggcggcaagaucagcgugcaguacaaccugagccacaccuacgccguggacgccgccaaccacugcggcaccaucgccaacggcgugcugcagaccuucaugagaauggccuggggcggcagcuacaucgcccuggacagcggcaagggcagcugggacugcaucaugaccagcuaccaguaccuggugauccagaacaccaccugggaggaccacugccaguucagcagacccagccccaucggcuaccugggccugcugagccagagaaccagagacaucuacaucagcagaagaagaagaggcaccuucaccuggacccugagcgacagcgagggcaacgagacccccggcggcuacugccugaccagauggaugcugaucgaggccgagcugaagugcuucggcaacaccgccguggccaagugcaacgagaagcacgacgaggaguucugcgacaugcugagacuguucgacuucaacaagcaggccaucagaagacugaagacccccgcccagaugagcauccagcugaucaacaaggccgugaacgcccugaucaacgaccagcugaucaugaagaaccaccugagagacaucaugggcauccccuacugcaacuacagcaaguacugcuaccugaaccacaccgugaccggcaagaccagccugcccagaugcugccuggugagcaacggcagcuaccugaacgagacccacuucagcgacgacaucgagcagcaggccgacaacaugaucaccgagcugcugcagaaggaguacaucgacagacagggcaagaccccccugggccugguggaccuguucguguucagcaccagcuucuaccugaucagcaucuuccugcaccuggugaagauccccacccacagacacaucaccggcaagcccugccccaagccccacagacugaaccacaugggcaucugcagcugcggccuguacaagcaccccggcgugcccgugaaguggaagagaugaggacuaguaauaaggaaacuguaugaaugucugugggcaggaagugaagagauccuucuguaaagguuuuuggaauuaugucugcugaauaauaaacuuuuuugaaauaauaaaucugguagaaaaaugagaucucaaaggcucuuuucagagccaccaaaaaaaaaaaaaaaaaaaaaaaaaaaaaaaaaaaaaaaaaaaaaaaaaaaaaaaaaaaaaaaaaaaaaaaaaaaaaaaaaaaaaaaaaaaaaaaaaaaaa

SEQ ID NO: 25776 - RNA, 1809 nt, Artificial Sequence
  mRNA product Design b-4 (hSL-A100) comprising derived and/or modified sequence from LASV(Lassa virus/H.sapiens-wt/NGA/2016/ISTH_0009;Clade II)__AVO03571__GPCmut3 (opt4)
aggagagucccgcagucggcguccagcggcucugcuuguucgugugugugucguugcaggccuuauucaagcuuaccaugggccagaucaucaccuucuuccaggaggugccccacgugaucgaggaggugaugaacaucgugcugaucgcccugagccugcuggccauccugaagggcaucuacaacguggccaccugcggccugcugggccuggugagcuuccugcugcugugcggcagaagcugcagcaccaccuacaagggcguguacgagcugcagacccuggagcuggacauggccagccugaacaugaccaugccccugagcugcaccaagaacaacagccaccacuacaucauggugggcaacgagaccggccuggagcugacccugaccaacaccagcaucaucaaccacaaguucugcaaccugagcgacgcccacaagaagaaccuguacgaccacgcccugaugagcaucaucagcaccuuccaccugagcauccccaacuucaaccaguacgaggccaugagcugcgacuucaacggcggcagaaucagcgugcaguacaaccugagccacagcuacgccguggacgccgccaaccacugcggcaccaucgccaacggcgugcugcagaccuucaugagaauggccuggggcggcagcuacaucgcccuggacagcggcaagggcagcugggacugcaucaugaccagcuaccaguaccugaucauccagaacaccaccugggaggaccacugccaguucagcagacccagccccaucggcuaccugggccugcugagccagagaaccagagacaucuacaucagcagaagaagaagaggcaccuucaccuggacccugagcgacagcgagggcaacgagacccccggcggcuacugccugaccagauggaugcugaucgaggccgagcugaagugcuucggcaacaccgccguggccaagugcaacgagaagcacgacgaggaguucugcgacaugcugagacuguucgacuucaacaagcaggccaucagaagacugaagacccccgcccagaugagcauccagcugaucaacaaggccgugaacgcccugaucaacgaccagcugaucaugaagaaccaccugagagacaucaugggcauccccuacugcaacuacagcaaguacugcuaccugaaccacaccgugaccggcaagaccagccugcccagaugcugccuggugagcaacggcagcuaccugaacgagacccacuucagcgacgacaucgagcagcaggccgacaacaugaucaccgagcugcugcagaaggaguacaucgacagacagggcaagaccccccugggccugguggaccuguucguguucagcaccagcuucuaccugaucagcaucuuccugcaccuggugaagauccccacccacagacacaucaccggcaagcccugccccaagccccacagacugaaccacaugggcaucugcagcugcggccuguacaaccaccccggcgugcccgugaaguggaagagaugaggacuaguaauaaggaaacuguaugaaugucugugggcaggaagugaagagauccuucuguaaagguuuuuggaauuaugucugcugaauaauaaacuuuuuugaaauaauaaaucugguagaaaaaugagaucucaaaggcucuuuucagagccaccaaaaaaaaaaaaaaaaaaaaaaaaaaaaaaaaaaaaaaaaaaaaaaaaaaaaaaaaaaaaaaaaaaaaaaaaaaaaaaaaaaaaaaaaaaaaaaaaaaaaa

SEQ ID NO: 25777 - RNA, 1809 nt, Artificial Sequence
  mRNA product Design b-4 (hSL-A100) comprising derived and/or modified sequence from LASV(Lassa virus/H.sapiens-wt/NGA/2016/ISTH_0017;Clade II)__AVO03567__GPCmut3 (opt4)
aggagagucccgcagucggcguccagcggcucugcuuguucgugugugugucguugcaggccuuauucaagcuuaccaugggccagaucaucaccuucuuccaggaggugccccacgugaucgaggaggugaugaacaucgugcugaucgcccugagccugcuggccauccugaagggcaucuacaacguggccaccugcggccuguucggccuggugagcuuccugcugcugugcggcagaagcugcagcaccaccuacaagggcguguacgagcugcagacccuggagcuggacauggccagccugaacaugaccaugccccugagcugcaccaagaacaacagccaccacuacaucauggugggcaacgagaccggccuggagcugacccugaccaacaccagcaucaucaaccacaaguucugcaaccugagcgacgcccacaagaagaaccuguacgaccacgcccugaugagcaucaucagcaccuuccaccugagcauccccaacuucaaccaguacgaggccaugagcugcgacuucaacggcggcaagaucagcgugcaguacaaccugagccacaccuacgccaucgacgccgccaaccacugcggcaccaucgccaacggcgugcugcagaccuucaugagaauggccuggggcggcagcuacaucgcccuggacagcggcaagggcagcugggacugcaucaugaccagcuaccaguaccugaucauccagaacaccaccugggaggaccacugccaguucagcagacccagccccaucggcuaccugggccugcugagccagagaaccagagacaucuacaucagcagaagaagaagaggcaccuucaccuggacccugagcgacagcgagggcaacgagacccccggcggcuacugccugaccagauggaugcugaucgaggccgagcugaagugcuucggcaacaccgccguggccaagugcaacgagaagcacgacgaggaguucugcgacaugcugagacuguucgacuucaacaagcaggccaucagaagacugaagacccccgcccagaugagcauccagcugaucaacaaggccgugaacgcccugaucaacgaccagcugaucaugaagaaccaccugagagacaucaugggcauccccuacugcaacuacagcaaguacugcuaccugaaccacaccgugaccggcaagaccagccugcccagaugcugccuggugagcaacggcagcuaccugaacgagacccacuucagcgacgacaucgagcagcaggccgacaacaugaucaccgagcugcugcagaaggaguacauggacagacagggcaagaccccccugggccugguggaccuguucguguucagcaccagcuucuaccugaucagcaucuuccugcaccuggugagaauccccacccacagacacgugaucggcaagcccugccccaagccccacagacugaaccacaugggcaucugcagcugcggccuguacaagcaccccggcgugcccgugaaguggaagagaugaggacuaguaauaaggaaacuguaugaaugucugugggcaggaagugaagagauccuucuguaaagguuuuuggaauuaugucugcugaauaauaaacuuuuuugaaauaauaaaucugguagaaaaaugagaucucaaaggcucuuuucagagccaccaaaaaaaaaaaaaaaaaaaaaaaaaaaaaaaaaaaaaaaaaaaaaaaaaaaaaaaaaaaaaaaaaaaaaaaaaaaaaaaaaaaaaaaaaaaaaaaaaaaaa

SEQ ID NO: 25778 - RNA, 1809 nt, Artificial Sequence
  mRNA product Design b-4 (hSL-A100) comprising derived and/or modified sequence from LASV(Lassa virus/H.sapiens-wt/NGA/2018/ISTH_0959;Clade II)__AVV65099__GPCmut3 (opt4)
aggagagucccgcagucggcguccagcggcucugcuuguucgugugugugucguugcaggccuuauucaagcuuaccaugggccagaucaucaccuucuuccaggaggugccccacgugaucgaggaggugaugaacaucgugcugaucgcccugagccugcuggccauccugaagggcaucuacaacguggugaccugcggccuguucggccuggugagcuuccugcugcugugcggcagaagcugcagcaccaccuacaagggcguguacgagcugcagacccuggagcuggacauggccagccugaacaugaccaugccccugagcugcaccaagaacaacagccaccacuacaucauggugggcaacgagaccggccuggagcugacccugaccaacaccagcaucaucaaccacaaguucugcaaccugagcgacgcccacaagaagaaccuguacgaccacgcccugaugagcaucaucagcaccuuccaccugagcauccccaacuucaaccaguacgaggccaugagcugcgacuucaacggcggcaagaucagcgugcaguacaaccugagccacgccuacgccaucgacgccgccaaccacugcggcaccaucgccaacggcgugcugcagaccuucaugagaauggccuggggcggcagcuacaucgcccuggacagcggcaagggcagcugggacugcaucaugaccagcuaccaguaccugaucauccagaacaccaccugggaggaccacugccaguucagcagacccagccccaucggcuaccugggccugcugagccagagaaccagagacaucuacaucagcagaagaagaagaggcaccuucaccuggacccugagcgacagcgagggcaacgagacccccggcggcuacugccugaccagauggaugcugaucgaggccgagcugaagugcuucggcaacaccgccguggccaagugcaacgagaagcacgacgaggaguucugcgacaugcugagacuguucgacuucaacaagcaggccaucagaagacugaagacccccgcccagaugagcauccagcugaucaacaaggccgugaacgcccugaucaacgaccagcugaucaugaagaaccaccugagagacaucaugggcauccccuacugcaacuacagcaaguacugcuaccugaaccacaccgugaccggcaagaccagccugcccagaugcugccuggugagcaacggcagcuaccugaacgagacccacuucagcgacgacaucgagcagcaggccgacaacaugaucaccgagcugcugcagaaggaguacaucgacagacagggcaagaccccccugggccugguggaccuguucguguucagcaccagcuucuaccugaucagcaucuuccugcaccuggugaagauccccacccacagacacgugaucggcaagcccugccccaagccccacagacugaaccacaugggcaucugcagcugcggccuguacaagcaccccggcgugcccgugaaguggaagagaugaggacuaguaauaaggaaacuguaugaaugucugugggcaggaagugaagagauccuucuguaaagguuuuuggaauuaugucugcugaauaauaaacuuuuuugaaauaauaaaucugguagaaaaaugagaucucaaaggcucuuuucagagccaccaaaaaaaaaaaaaaaaaaaaaaaaaaaaaaaaaaaaaaaaaaaaaaaaaaaaaaaaaaaaaaaaaaaaaaaaaaaaaaaaaaaaaaaaaaaaaaaaaaaaa

SEQ ID NO: 25779 - RNA, 1809 nt, Artificial Sequence
  mRNA product Design b-4 (hSL-A100) comprising derived and/or modified sequence from LASV(LASV003-NIG-2008;Clade II)__AIT17580__GPCmut3 (opt4)
aggagagucccgcagucggcguccagcggcucugcuuguucgugugugugucguugcaggccuuauucaagcuuaccaugggccagaucaucaccuucuuccaggaggugccccacgugaucgaggaggugaugaacaucgugcugaucgcccugagccugcuggccauccugaagggcaucuacaacguggccaccugcggccuguucggccuggugagcuuccugcugcugugcggcagaagcugcagcaccaccuacaagggcguguacgagcugcagacccuggagcuggacauggccagccugaacaugaccaugccccugagcugcaccaagaacaacagccaccacuacaucauggugggcaacgagaccggccuggagcugacccugaccaacaccagcaucaucaaccacaaguucugcaaccugagcgacgcccacaagaagaaccuguacgaccacgcccugaugagcaucaucagcaccuuccaccugagcauccccaacuucaaccaguacgaggccaugagcugcgacuucaacggcggcaagaucagcgugcaguacaaccugagccacaccuacgccguggacgccgccaaccacugcggcaccaucgccaacggcgugcugcagaccuucaugagaauggccuggggcggcagcuacaucgcccuggacagcggcaagggcagcugggacugcaucaugaccagcuaccaguaccugaucauccagaacaccaccugggaggaccacugccaguucagcagacccagccccaucggcuaccugggccugcugagccagagaaccagagacaucuacaucagcagaagaagaagaggcaccuucaccuggacccugagcgacagcgagagcaacgagacccccggcggcuacugccugaccagauggaugcugaucgaggccgagcugaagugcuucggcaacaccgccguggccaagugcaacgagaagcacgacgaggaguucugcgacaugcugagacuguucgacuucaacaagcaggccaucagaagacugaaggcccccgcccagaugagcauccagcugaucaacaaggccgugaacgcccugaucaacgaccagcugaucaugaagaaccaccugagagacaucaugggcauccccuacugcaacuacagcaaguacugcuaccugaaccacaccgugaccggcagaaccagccugcccagaugcugccuggugagcaacggcagcuaccugaacgagacccacuucagcgacgacaucgagcagcaggccgacaacaugaucaccgagcugcugcagaaggaguacauggacagacagggcaagaccccccugggccugguggaccuguucguguucagcaccagcuucuaccugaucagcaucuuccugcaccuggugaagauccccacccacagacacgugaucggcaagcccugccccaagccccacagacugaaccacaugggcaucugcagcugcggccuguacaagcaccccggcgugcccgugaaguggaagagaugaggacuaguaauaaggaaacuguaugaaugucugugggcaggaagugaagagauccuucuguaaagguuuuuggaauuaugucugcugaauaauaaacuuuuuugaaauaauaaaucugguagaaaaaugagaucucaaaggcucuuuucagagccaccaaaaaaaaaaaaaaaaaaaaaaaaaaaaaaaaaaaaaaaaaaaaaaaaaaaaaaaaaaaaaaaaaaaaaaaaaaaaaaaaaaaaaaaaaaaaaaaaaaaaa

SEQ ID NO: 25780 - RNA, 1809 nt, Artificial Sequence
  mRNA product Design b-4 (hSL-A100) comprising derived and/or modified sequence from LASV(LASV035-NIG-2009;Clade II)__AIT17588__GPCmut3 (opt4)
aggagagucccgcagucggcguccagcggcucugcuuguucgugugugugucguugcaggccuuauucaagcuuaccaugggccagaucaucaccuucuuccaggaggugccccacgugaucgaggaggugaugaacaucgugcugaucgcccugagccugcuggccauccugaagggcaucuacaacguggccaccugcggccuguucggccuggugagcuuccugcugcugugcggcagaagcugcagcaccaccuacaagggcguguacgagcugcagacccuggagcuggacauggccagccugaacaugaccaugccccugagcugcaccaagaacaacagccaccacuacaucauggugggcaacgagaccggccuggagcugacccugaccaacaccagcaucaucaaccacaaguucugcaaccugagcgacgcccacaagaagaaccuguacgaccacgcccugaugagcaucaucagcaccuuccaccugagcauccccaacuucaaccaguacgaggccaugagcugcgacuucaacggcggcaagaucagcgugcaguacaaccugagccacgccuacgccguggacgccgccaaccacugcggcaccaucgccaacggcgugcugcagaccuucaugagaauggccuggggcggcagcuacaucgcccuggacagcggcaagggcagcugggacugcaucaugaccagcuaccaguaccugaucauccagaacaccaccugggaggaccacugccaguucagcagacccagccccaucggcuaccugggccugcugagccagagaaccagagacaucuacaucagcagaagaagaagaggcaccuucaccuggacccugagcgacagcgagggcaacgagacccccggcggcuacugccugaccagauggaugcugaucgaggccgagcugaagugcuucggcaacaccgccguggccaagugcaacgagaagcacgacgaggaguucugcgacaugcugagacuguucgacuucaacaagcaggccaucagaagacugaaggcccccgcccagaugagcauccagcugaucaacaaggccgugaacgcccugaucaacgaccagcugaucaugaagaaccaccugagagacaucaugggcauccccuacugcaacuacagcaaguacugcuaccugaaccacaccgugaccggcaagaccagccugcccagaugcugccuggugagcaacggcagcuaccugaacgagacccacuucagcgacgacaucgagcagcaggccgacaacaugaucaccgagcugcugcagaaggaguacaucgacagacagggcaagaccccccugggccugguggaccuguucguguucagcaccagcuucuaccugaucagcaucuuccugcaccuggugaagauccccacccacagacacgugaucggcaagcccugccccaagccccacagacugaaccacaugggcaucugcagcugcggccuguacaagcaccccggcgugcccgugaaguggaagagaugaggacuaguaauaaggaaacuguaugaaugucugugggcaggaagugaagagauccuucuguaaagguuuuuggaauuaugucugcugaauaauaaacuuuuuugaaauaauaaaucugguagaaaaaugagaucucaaaggcucuuuucagagccaccaaaaaaaaaaaaaaaaaaaaaaaaaaaaaaaaaaaaaaaaaaaaaaaaaaaaaaaaaaaaaaaaaaaaaaaaaaaaaaaaaaaaaaaaaaaaaaaaaaaaa

SEQ ID NO: 25781 - RNA, 1809 nt, Artificial Sequence
  mRNA product Design b-4 (hSL-A100) comprising derived and/or modified sequence from LASV(LASV1000-NIG-2009;Clade II)__AIT17782__GPCmut3 (opt4)
aggagagucccgcagucggcguccagcggcucugcuuguucgugugugugucguugcaggccuuauucaagcuuaccaugggccagaucaucaccuucuuccaggaggugccccacgugaucgaggaggugaugaacaucgugcugaucgcccugagccugcuggccauccugaagggcaucuacaacguggccaccugcggccuguucggccuggugagcuuccugcugcugugcggcagaagcugcagcaccaccuacaagggcguguacgagcugcagacccuggagcuggacauggccagccugaacaugaccaugccccugagcugcaccaagaacaacagccaccacuacaucauggugggcaacgagaccggccuggagcugacccugaccaacaccagcaucaucaaccacaaguucugcaaccugagcgacgcccacaagaagaaccuguacgaccacgcccugaugagcaucaucagcaccuuccaccugagcauccccaacuucaaccaguacgaggccaugagcugcgacuucaacggcggcaagaucagcgugcaguacaaccugagccacaccuacgccguggacgccgccaaccacugcggcaccaucgccaacggcgugcugcagaccuucaugagaauggccuggggcggcagcuacaucgcccuggacagcggcaagggcagcugggacugcaucaugaccagcuaccaguaccugaucauccagaacaccaccugggaggaccacugccaguucagcagacccagccccaucggcuaccugggccugcugagccagagaaccagagacaucuacaucagcagaagaagaagaggcaccuucaccuggacccugagcgacagcgagggcaacgagacccccggcggcuacugccugaccagauggaugcugaucgaggccgagcugaagugcuucggcaacaccgccguggccaagugcaacgagaagcacgacgaggaguucugcgacaugcugagacuguucgacuucaacaagcaggccaucaagagacugaagacccccgcccagaugagcauccagcugaucaacaaggccgugaacgcccugaucaacgaccagcugaucaugaagaaccaccugagagacaucaugggcauccccuacugcaacuacagcaaguacugcuaccugaaccacaccgugaccggcaagaccagccugcccagaugcugccuggugagcaacggcagcuaccugaacgagacccacuucagcgacgacaucgagcagcaggccgacaacaugaucaccgagcugcugcagaaggaguacaucgacagacagggcaagaccccccugggccugguggaccuguucguguucagcaccagcuucuaccugaucagcaucuuccugcaccuggugaagauccccacccacagacacguggugggcaagcccugccccaagccccacagacugaaccacaugggcaucugcagcugcggccuguacaagcaccccggcgugcccgugaaguggaagagaugaggacuaguaauaaggaaacuguaugaaugucugugggcaggaagugaagagauccuucuguaaagguuuuuggaauuaugucugcugaauaauaaacuuuuuugaaauaauaaaucugguagaaaaaugagaucucaaaggcucuuuucagagccaccaaaaaaaaaaaaaaaaaaaaaaaaaaaaaaaaaaaaaaaaaaaaaaaaaaaaaaaaaaaaaaaaaaaaaaaaaaaaaaaaaaaaaaaaaaaaaaaaaaaaa

SEQ ID NO: 25782 - RNA, 1809 nt, Artificial Sequence
  mRNA product Design b-4 (hSL-A100) comprising derived and/or modified sequence from LASV(LASV221-NIG-2010;Clade II)__AIT17624__GPCmut3 (opt4)
aggagagucccgcagucggcguccagcggcucugcuuguucgugugugugucguugcaggccuuauucaagcuuaccaugggccagaucaucaccuucuuccaggaggugccccacgugaucgaggaggugaugaacaucgugcugaucgcccugagccugcuggccauccugaagggcaucuacaacguggccaccugcggccuguucggccuggugagcuuccugcugcugugcggcagaagcugcagcaccaccuacaagggcguguacgagcugcagacccuggagcuggacauggccagccugaacaugaccaugccccugagcugcaccaagaacaacagccaccacuacaucauggugggcaacgagaccggccuggagcugacccugaccaacaccagcaucaucaaccacaaguucugcaaccugagcgacgcccacaagaagaaccuguacgaccacgcccugaugagcaucaucagcaccuuccaccugagcauccccaacuucaaccaguacgaggccaugagcugcgacuucaacggcggcaagaucagcgugcaguacaaccugagccacaccuacgccaucgacgccgccaaccacugcggcaccaucgccaacggcgugcugcagaccuucaugagaauggccuggggcggcagcuacaucgcccuggacagcggcaagggcagcugggacugcaucaugaccagcuaccaguaccugaucauccagaacaccaccugggaggaccacugccaguucagcagacccagccccaucggcuaccugggccugcugagccagagaaccagagacaucuacaucagcagaagaagaagaggcaccuucaccuggacccugagcgacagcgagggcaacgagacccccggcggcuacugccugaccagauggaugcugaucgaggccgagcugaagugcuucggcaacaccgccguggccaagugcaacgagaagcacgacgaggaguucugcgacaugcugagacuguucgacuucaacaagcaggccaucagaagacugaagacccccgcccagaugagcauccagcugaucaacaaggccgugaacgcccugaucaacgaccagcugaucaugaagaaccaccugagagacaucaugggcauccccuacugcaacuacagcaaguacugcuaccugaaccacaccgugaccggcaagaccagccugcccagaugcugccuggugagcaacggcagcuaccugaacgagacccacuucagcgacgacaucgagcagcaggccgacaacaugaucaccgagaugcugcagaaggaguacauggacagacagggcaagaccccccugggccugguggaccuguucguguucagcaccagcuucuaccugaucagcaucuuccugcaccuggugaagauccccacccacagacacgugaucggcaagcccugccccaagccccacagacugaaccacaugggcaucugcagcugcggccuguacaagcaccccggcgugcccgugaaguggaagagaugaggacuaguaauaaggaaacuguaugaaugucugugggcaggaagugaagagauccuucuguaaagguuuuuggaauuaugucugcugaauaauaaacuuuuuugaaauaauaaaucugguagaaaaaugagaucucaaaggcucuuuucagagccaccaaaaaaaaaaaaaaaaaaaaaaaaaaaaaaaaaaaaaaaaaaaaaaaaaaaaaaaaaaaaaaaaaaaaaaaaaaaaaaaaaaaaaaaaaaaaaaaaaaaaa

SEQ ID NO: 25783 - RNA, 1809 nt, Artificial Sequence
  mRNA product Design b-4 (hSL-A100) comprising derived and/or modified sequence from LASV(LASV237-NIG-2010;Clade II)__AIT17638__GPCmut3 (opt4)
aggagagucccgcagucggcguccagcggcucugcuuguucgugugugugucguugcaggccuuauucaagcuuaccaugggccagaucaucaccuucuuccaggaggugccccacgugaucgaggaggugaugaacaucgugcugaucgcccugagccugcuggccauccugaagggcaucuacaacguggccaccugcggccuguucggccuggugagcuuccugcugcugugcggcagaagcugcagcaccaccuacaagggcguguacgagcugcagacccuggagcuggacauggccagccugaacaugaccaugccccugagcugcaccaagaacaacagccaccacuacaucauggugggcaacgagaccggccuggagcugacccugaccaacaccagcaucaucaaccacaaguucugcaaccugagcgacgcccacaagaaggaccuguacgaccacgcccugaugagcaucaucagcaccuuccaccugagcauccccaacuucaaccaguacgaggccaugagcugcgacuucaacggcggcaagaucagcgugcaguacaaccugagccacaccuacgccguggacgccgccaaccacugcggcaccaucgccaacggcgugcugcagaccuucaugagaauggccuggggcggcagcuacaucgcccuggacagcggcaagggcagcugggacugcaucaugaccagcuaccaguaccugaucauccagaacaccaccugggaggaccacugccaguucagcagacccagccccaucggcuaccugggccugcugagccagagaaccagagacaucuacaucagcagaagaagaagaggcaccuucaccuggacccugagcgacagcgagggcaacgagacccccggcggcuacugccugaccagauggaugcugaucgaggccgagcugaagugcuucggcaacaccgccguggccaagugcaacgagaagcacgacgaggaguucugcgacaugcugagacuguucgacuucaacaagcaggccaucagaagacugaagacccccgcccagaugagcauccagcugaucaacaaggccgugaacgcccugaucaacgaccagcugaucaugaagaaccaccugagagacaucaugggcauccccuacugcaacuacagcaaguacugcuaccugaaccacaccgugaccggcaagaccagccugcccagaugcugccuggugagcaacggcagcuaccugaacgagacccacuucagcgacgacaucgagcagcaggccgacaacaugaucaccgagcugcugcagaaggaguacauggacagacagggcaagaccccccugggccugguggaccuguucguguucagcaccagcuucuaccugaucagcaucuuccugcaccugaucaagauccccacccacagacacaucaccggcaagcccugccccaagccccacagacugaaccacaugggcaucugcagcugcggccuguacaagcaccccggcgugcccgugaaguggaagagaugaggacuaguaauaaggaaacuguaugaaugucugugggcaggaagugaagagauccuucuguaaagguuuuuggaauuaugucugcugaauaauaaacuuuuuugaaauaauaaaucugguagaaaaaugagaucucaaaggcucuuuucagagccaccaaaaaaaaaaaaaaaaaaaaaaaaaaaaaaaaaaaaaaaaaaaaaaaaaaaaaaaaaaaaaaaaaaaaaaaaaaaaaaaaaaaaaaaaaaaaaaaaaaaaa

SEQ ID NO: 25784 - RNA, 1809 nt, Artificial Sequence
  mRNA product Design b-4 (hSL-A100) comprising derived and/or modified sequence from LASV(LASV253-NIG-2011;Clade II)__AIT17670__GPCmut3 (opt4)
aggagagucccgcagucggcguccagcggcucugcuuguucgugugugugucguugcaggccuuauucaagcuuaccaugggccagaucaucaccuucuuccaggaggugccccacgugaucgaggaggugaugaacaucgugcugaucgcccugagccugcuggccauccugaagggcaucuacaacguggccaccugcggccuguucggccuggugagcuuccugcugcugugcggcagaagcugcagcaccaccuacaagggcguguacgagcugcagacccuggagcuggacauggccagccugaacaugaccaugccccugagcugcaccaagaacaacagccaccacuacaucauggugggcaacgagaccggccuggagcugacccugaccaacaccagcaucaucaaccacaaguucugcaaccugagcgacgcccacaagaagaaccuguacgaccacgcccugaugagcaucaucagcaccuuccaccugagcauccccaacuucaaccaguacgaggccaugagcugcgacuucaacggcggcaagaucagcgugcaguacaaccugagccacaccuacgccguggacgccgccaaccacugcggcaccaucgccaacggcgugcugcagaccuucaugagaauggccuggggcggcagcuacaucgcccuggacagcggcaagggcagcugggacugcaucaugaccagcuaccaguaccugaucauccagaacaccaccugggaggaccacugccaguucagcagacccagccccaucggcuaccugggccugcugagccagagaaccagagacaucuacaucagcagaagaagaagaggcaccuucaccuggacccugagcgacagcgagggcaacgagacccccggcggcuacugccugaccagauggaugcugaucgaggccgagcugaagugcuucggcaacaccgccguggccaagugcaacgagaagcacgacgaggaguucugcgacaugcugagacuguucgacuucaacaagcaggccaucagaagacugaaggcccccgcccagaugagcauccagcugaucaacaaggccgugaacgcccugaucaacgaccagcugaucaugaagaaccaccugagagacaucaugggcauccccuacugcaacuacagcaaguacugcuaccugaaccacaccgugaccggcagaaccagccugcccagaugcugccuggugagcaacggcagcuaccugaacgagacccacuucagcgacgacaucgagcagcaggccgacaacaugaucaccgagcugcugcagaaggaguacaucgacagacagggcaagaccccccugggccugguggaccuguucguguucagcaccagcuucuaccugaucagcaucuuccugcaccuggugaagauccccacccacagacacaucaucggcaagcccugccccaagccccacagacugaaccacaugggcaucugcagcugcggccuguacaagcaccccggcgugcccgugaaguggaagagaugaggacuaguaauaaggaaacuguaugaaugucugugggcaggaagugaagagauccuucuguaaagguuuuuggaauuaugucugcugaauaauaaacuuuuuugaaauaauaaaucugguagaaaaaugagaucucaaaggcucuuuucagagccaccaaaaaaaaaaaaaaaaaaaaaaaaaaaaaaaaaaaaaaaaaaaaaaaaaaaaaaaaaaaaaaaaaaaaaaaaaaaaaaaaaaaaaaaaaaaaaaaaaaaaa

SEQ ID NO: 25785 - RNA, 1809 nt, Artificial Sequence
  mRNA product Design b-4 (hSL-A100) comprising derived and/or modified sequence from LASV(LASV254-NIG-2011;Clade II)__AIT17674__GPCmut3 (opt4)
aggagagucccgcagucggcguccagcggcucugcuuguucgugugugugucguugcaggccuuauucaagcuuaccaugggccagaucaucaccuucuuccaggaggugccccacgugaucgaggaggugaugaacaucgugcugaucgcccugagccugcuggccauccugaagggcaucuacaacguggccaccugcggccuguucggccuggugagcuuccugcugcugugcggcagaagcugcagcaccaccuacaagggcguguacgagcugcagacccuggagcuggacaugaccaaccugaacaugaccaugccccugagcugcaccaagaacaacagccaccacuacaucauggugggcaacgagaccggccuggagcugacccugaccaacaccagcaucaucaaccacaaguucugcaaccugagcgacgcccacaagaagaaccuguacaaccacgcccugaugagcaucaucagcaccuuccaccugagcauccccaacuucaaccaguacgaggccaugagcugcgacuucaacggcggcaagaucagcgugcaguacaaccugagccacagcuacgccguggacgccgccaaccacugcggcaccaucgccaacggcgugcugcagaccuucaugagaauggccuggggcggcagcuacaucgcccuggacagcggcaagggcaacugggacugcaucaugaccagcuaccaguaccugaucauccagaacaccaccugggaggaccacugccaguucagcagacccagccccaucggcuaccugggccugcugagccagagaaccagagacaucuacaucagcagaagaagaagaggcaccuucaccuggacccugagcgacagcgagggcaacgagacccccggcggcuacugccugaccagauggaugcugaucgaggccgagcugaagugcuucggcaacaccgccguggccaagugcaacgagaagcacgacgaggaguucugcgacaugcugagacuguucgacuucaacaagcaggccaucagaagacugaagacccccgcccaggccaacauccagcugaucaacaaggccgugaacgcccugaucaacgaccagcugaucaugaagaaccaccugagagacaucaugggcauccccuacugcaacuacagcaaguacugcuaccugaaccacaccgugaccggcaagaccagccugcccagaugcugccuggugagcaacggcagcuaccugaacgagacccacuucagcgacgacaucgagcagcaggccgacaacaugaucaccgagcugcugcagaaggaguacauggacagacagggcaagaccccccugggccugguggaccuguucguguucagcaccagcuucuaccugaucagcaucuuccugcaccuggugaagauccccacccacagacacgugaucggcaagcccugccccaagccccacagacugaaccacaugggcaucugcagcugcggccuguacaagcaccccggcgugcccgugaaguggaagagaugaggacuaguaauaaggaaacuguaugaaugucugugggcaggaagugaagagauccuucuguaaagguuuuuggaauuaugucugcugaauaauaaacuuuuuugaaauaauaaaucugguagaaaaaugagaucucaaaggcucuuuucagagccaccaaaaaaaaaaaaaaaaaaaaaaaaaaaaaaaaaaaaaaaaaaaaaaaaaaaaaaaaaaaaaaaaaaaaaaaaaaaaaaaaaaaaaaaaaaaaaaaaaaaaa

SEQ ID NO: 25786 - RNA, 1809 nt, Artificial Sequence
  mRNA product Design b-4 (hSL-A100) comprising derived and/or modified sequence from LASV(Nig08-A19;Clade III)__ADU56618__GPCmut3 (opt4)
aggagagucccgcagucggcguccagcggcucugcuuguucgugugugugucguugcaggccuuauucaagcuuaccaugggccagaucgugaccuucuuccaggaggugccccacgugaucgaggaggugaugaacaucgugcugaucgcccugagcauccuggccauccugaagggccuguacaacaucgccaccugcggccugaucggccuggugaccuuccugcugcugagcggcagaagcugcagcaugaccuacaagggcguguacgagcugcagacccuggagcugaacaugaacacccugaacaugaccaugccccugagcugcaccaagaacaacagccaccacuacaucauggugggcaacgagaccggccuggagcugacccugaccaacaccagccugcugcaccacaaguucugcaaccugagcgacgcccacaagaagaaccuguacgaccacacccugaugagcaucaucagcaccuuccaccugagcauccccaacuucaaccaguacgaggccaugagcugcgacuucaacggcggcaagaucaccgugcaguacaaccugagccacagcuacgccaucgacgccgccaaccacugcggcaccguggccaacggcgugcugcagaccuucaugagaauggccuggggcggcagcuacaucgcccuggacagcggcagaggcaagugggacugcaucaugaccagcuaccaguaccugaucauccagaacaccaccugggaggaccacugccaguucagcagacccagccccaucggcuaccugggccugcugagccagagaaccagagacaucuacaucagcagaagaagaagaggcaccuucaccuggacccugagcgacagcgagggcaacgagacccccggcggcuacugccugaccagauggaugcugaucgaggccgagcugaagugcuucggcaacaccgccguggccaagugcaacgagaagcacgacgaggaguucugcgacaugcugagacuguucgacuucaacaagcaggccaucagaagacugaaggcccccgcccagaugagcauccagcugaucaacaaggccgugaacgcccugaucaacgaccagcugaucaugaagaaccaccugagagacaucaugggcauccccuacugcaacuacagcaaguacugcuaccugaaccacaccagcaccggcagaaccagccugcccagaugcugccuggugagcaacggcagcuaccugaacgagacccacuucagcgacgacaucgagcagcaggccgacaacaugaucaccgagaugcugcagaaggaguaccuggacagacagggcaagaccccccugggccugguggaccuguucguguucagcaccagcuucuaccugaucagcaucuuccugcaccuggugaagauccccacccacagacacaucgugggcaagcccugccccaagccccacagacugaaccacaugggcaucugcagcugcggccuguacaagcagcccggcgugcccgugagauggaagagaugaggacuaguaauaaggaaacuguaugaaugucugugggcaggaagugaagagauccuucuguaaagguuuuuggaauuaugucugcugaauaauaaacuuuuuugaaauaauaaaucugguagaaaaaugagaucucaaaggcucuuuucagagccaccaaaaaaaaaaaaaaaaaaaaaaaaaaaaaaaaaaaaaaaaaaaaaaaaaaaaaaaaaaaaaaaaaaaaaaaaaaaaaaaaaaaaaaaaaaaaaaaaaaaaa

SEQ ID NO: 25787 - RNA, 1812 nt, Artificial Sequence
  mRNA product Design b-4 (hSL-A100) comprising derived and/or modified sequence from LASV(G1180-SLE-2010;Clade IV)__AIT17168__GPCmut3 (opt4)
aggagagucccgcagucggcguccagcggcucugcuuguucgugugugugucguugcaggccuuauucaagcuuaccaugggccagaucgugaccuucuuccaggaggugccccacgugaucgaggaggugaugaacaucgugcugaucgcccugagcauccuggccgugcugaagggccuguacaacuucgccaccugcggccuggugggccugcugaccuuccugcugcugugcggcagaagcugcaccgccagcagauacaagggcguguacgagcugcagacccuggagcugaacauggagacccugaacaugaccaugccccugagcugcaccaagaacaacagccaccacuacaucauggugggcaacgagaccggccuggagcugacccugaccaacaccagcaucaucaaccacaaguucugcaaccugagcgacgcccacaagaagaaccuguacgaccacgcccugaugagcaucaucagcaccuuccaccugagcauccccaacuucaaccaguacgaggccaugagcugcgacuucaacggcggcaagaucagcgugcaguacaaccugagccacagcuacgccggcgacgccgccaaccacugcggcaccguggccaacggcgugcugcagaccuucaugagaauggccuggggcggcagcuacaucgcccuggacagcggccacggcagcugggacugcaucaugaccagcuaccaguaccugaucauccagaacaccaccugggaggaccacugccaguucagcagacccagccccaucggcuaccugggccugcugagccagagaaccagagacaucuacaucagcagaagaagaagaggcaccuucaccuggacccugagcgacagcgagggcaaggacacccccggcggcuacugccugaccagauggaugcugaucgaggccgagcugaagugcuucggcaacaccgccguggccaagugcaacgagaagcacgacgaggaguucugcgacaugcugagacuguucgacuucaacaagcaggccauccagagacugaaggcccccgcccagaugagcauccagcugaucaacaaggccgugaacgcccugaucaacgaccagcugaucaugaagaaccaccugagagacaucaugggcauccccuacugcaacuacagcaaguacugcuaccugaaccacaccaccaccggcaagaccagccugcccaagugcugccuggugagcaacggcagcuaccugaacgagacccacuucagcgacgacaucgagcagcaggccgacaacaugaucaccgagaugcugcagaaggaguacauggagagacagggcaagaccccccugggccugguggaccuguucguguucagcaccagcuucuaccugaucagcaucuuccugcaccuggugaagauccccacccacagacacaucgugggcaagagcugccccaagccccacagacugaaccacaugggcaucugcagcugcggccuguacaagcagcccggcgugcccgugaaguggaagagaugaggacuaguaauaaggaaacuguaugaaugucugugggcaggaagugaagagauccuucuguaaagguuuuuggaauuaugucugcugaauaauaaacuuuuuugaaauaauaaaucugguagaaaaaugagaucucaaaggcucuuuucagagccaccaaaaaaaaaaaaaaaaaaaaaaaaaaaaaaaaaaaaaaaaaaaaaaaaaaaaaaaaaaaaaaaaaaaaaaaaaaaaaaaaaaaaaaaaaaaaaaaaaaaaa

SEQ ID NO: 25788 - RNA, 1812 nt, Artificial Sequence
  mRNA product Design b-4 (hSL-A100) comprising derived and/or modified sequence from LASV(G1442-SLE-2011;Clade IV)__AIT17180__GPCmut3 (opt4)
aggagagucccgcagucggcguccagcggcucugcuuguucgugugugugucguugcaggccuuauucaagcuuaccaugggccagaucgugaccuucuuccaggaggugccccacgugaucgaggaggugaugaacaucgugcugaucgcccugagcauccuggccgugcugaagggccuguacaacguggccaccugcggccugaucggccuggugaccuuccugcugcugugcggcagaagcugcaccaccacccuguacaagggcguguacgagcugcagacccuggagcugaacauggagacccugaacaugaccaugccccugagcugcaccaagaacaacagccaccacuacaucagagugggcaacgagaccggccuggagcugacccugaccaacaccagcaucaucaaccacaaguucugcaaccugagcgacgcccacaagaagaaccuguacgaccacgcccugaugagcaucaucagcaccuuccaccugagcauccccaacuucaaccaguacgaggccaugagcugcgacuucaacggcggcaagaucagcgugcaguacaaccugagccacagcuacgccggcgacgccgccaaccacugcggcaccguggccaacggcgugcugcagaccuucaugagaauggccuggggcggcagcuacaucgcccuggacagcggcagaggcaacugggacugcaucaugaccagcuaccaguaccugaucauccagaacaccaccugggacgaccacugccaguucagcagacccagccccaucggcuaccugggccugcugagccagagaaccagagacguguacaucagcagaagaagaagaggcaccuucaccuggacccugagcgacagcgagggcaaggacacccccggcggcuacugccugaccagauggaugcugaucgaggccgagcugaagugcuucggcaacaccgccguggccaagugcaacgagaagcacgacgaggaguucugcgacaugcugagacuguucgacuucaacaagcaggccauccagagacugaaggcccccgcccagaugagcauccagcugaucaacaaggccgugaacgcccugaucaacgaccagcugaucaugaagaaccaccugagagacaucaugggcauccccuacugcaacuacagcaaguacugcuaccugaacaacaccgccaccggcaagaccagccugcccaagugcugccugaucagcaacggcagcuaccugaacgagacccacuucagcgacgacaucgagcaggaggccgacaacaugaucaccgagaugcugcagaaggaguacauggagagacagggcaagaccccccugggccugguggaccuguucguguucagcaccagcuucuaccugaucagcaucuuccugcaccuggugaagauccccacccacagacacaucgugggcaagagcugccccaagccccacagacugaaccacaugggcaucugcagcugcggccuguacaagcagcccggcgugcccgugagauggaagagaugaggacuaguaauaaggaaacuguaugaaugucugugggcaggaagugaagagauccuucuguaaagguuuuuggaauuaugucugcugaauaauaaacuuuuuugaaauaauaaaucugguagaaaaaugagaucucaaaggcucuuuucagagccaccaaaaaaaaaaaaaaaaaaaaaaaaaaaaaaaaaaaaaaaaaaaaaaaaaaaaaaaaaaaaaaaaaaaaaaaaaaaaaaaaaaaaaaaaaaaaaaaaaaaaa

SEQ ID NO: 25789 - RNA, 1812 nt, Artificial Sequence
  mRNA product Design b-4 (hSL-A100) comprising derived and/or modified sequence from LASV(G3010-SLE-2013;Clade IV)__AIT17344__GPCmut3 (opt4)
aggagagucccgcagucggcguccagcggcucugcuuguucgugugugugucguugcaggccuuauucaagcuuaccaugggccagaucgugaccuucuuccaggaggugccccacgugaucgaggaggugaugaacaucgugcugaucgcccugagcauccuggccgugcugaagggccuguacaacuucgccaccugcggccuggugggccuggugaccuuccugcugcugugcggcagaagcugcaccaccagccuguacaagggcguguacgagcugcagacccuggagcugaacauggagacccugaacaugaccaugccccugagcugcaccaagaacaacagccaccacuacaucauggugggcaacgagaccggccuggagcugacccugaccaacaccagcaucaucaaccacaaguucugcaaccugagcgacgcccacaagaagaaccuguacaaccacgcccugaugagcaucaucagcaccuuccaccugagcauccccaacuucaaccaguacgaggccaugagcugcgacuucaacggcggcaagaucagcgugcaguacaaccugagccacagcuacgccggcgacgccgccagccacugcggcaccguggccaacggcgugcugcagaccuucaugagaauggccuggggcggcagcuacaucgcccuggacagcggcuacggcaagugggacugcaucaugaccagcuaccaguaccugaucauccagaacaccaccugggaggaccacugccaguucagcagacccagccccaucggcuaccugggccugcugagccagagaaccagagacaucuacaucagcagaagaagaagaggcaccuucaccuggacccugagcgacagcgagggcaaggacacccccggcggcuacugccugaccagauggaugcugaucgaggccgagcugaagugcuucggcaacaccgccguggccaagugcaacgagaagcacgacgaggaguucugcgacaugcugagacuguucgacuucaacaagcaggccauccagagacugaagacccccgcccagaugagcauccagcugaucaacaaggccgugaacgcccugaucaacgaccagcugaucaugaagaaccaccugagagacaucaugggcauccccuacugcaacuacagcaaguacugcuaccugaaccacaccaccaccggcaagaccagccugcccaagugcugccuggugagcaacggcagcuaccugaacgagacccacuucagcgacgacaucgagcagcaggccgacaacaugaucaccgagaugcugcagaaggaguacauggagagacagggcaagaccccccugggccugguggaccuguucguguucagcaccagcuucuaccugaucagcaucuuccugcaccuggugaagauccccacccacagacacaucgugggcaagagcugccccaagccccacagacugaaccacaugggcaucugcagcugcggccuguacaagcagcccggcgugcccgugagauggaagagaugaggacuaguaauaaggaaacuguaugaaugucugugggcaggaagugaagagauccuucuguaaagguuuuuggaauuaugucugcugaauaauaaacuuuuuugaaauaauaaaucugguagaaaaaugagaucucaaaggcucuuuucagagccaccaaaaaaaaaaaaaaaaaaaaaaaaaaaaaaaaaaaaaaaaaaaaaaaaaaaaaaaaaaaaaaaaaaaaaaaaaaaaaaaaaaaaaaaaaaaaaaaaaaaaa

SEQ ID NO: 25790 - RNA, 1812 nt, Artificial Sequence
  mRNA product Design b-4 (hSL-A100) comprising derived and/or modified sequence from LASV(G502-SLE-2009;Clade IV)__AIT17126__GPCmut3 (opt4)
aggagagucccgcagucggcguccagcggcucugcuuguucgugugugugucguugcaggccuuauucaagcuuaccaugggccagaucgugaccuucuuccaggaggugccccacgugaucgaggaggugaugaacaucgugcugaucgcccugagcauccuggccgugcugaagggccuguacaacuucgccaccugcggccuggugggccugcugaccuuccugcugcugugcggcagaagcugcaccaccggccuguacaagggcguguacgagcugcagacccuggagcugaacauggagacccugaacaugaccaugccccugagcugcaccaagaacaacagccaccacuacaucauggugggcaacgagaccggccuggagcugacccugaccaacaccagcaucaucaaccacaaguucugcaaccugagcgacgcccacaagaagaaccuguacgaccacgcccugaugagcaucaucagcaccuuccaccugagcauccccaacuucaaccaguacgaggccaugagcugcgacuucaacggcggcaagaucagcgugcaguacaaccugagccacagcuacgccggcgacgccgccgaccacugcggcaccguggccaacggcgugcugcagaccuucaugagaauggccuggggcggcagcuacaucgcccuggacagcggcagaggcagaugggacugcaucaugaccagcuaccaguaccugaucauccagaacaccaccugggaggaccacugccaguucagcagacccagccccaucggcuaccugggccugcugagccagagaaccagagacaucuacaucagcagaagaagaagaggcaccuucaccuggacccugagcgacagcgagggcaaggacacccccggcggcuacugccugaccagauggaugcugaucgaggccgagcugaagugcuucggcaacaccgccguggccaagugcaacgagaagcacgacgaggaguucugcgacaugcugagacuguucgacuucaacaagcaggccauccagagacugaaggcccccgcccagaugagcauccagcugaucaacaaggccgugaacgcccugaucaacgaccagcuggugaugaagaaccaccugagagacaucaugggcauccccuacugcaacuacagcagauacugcuaccugaaccacaccaccaccggcagaaccagccugcccaagugcugccuggugagcaacggcagcuaccugaacgagacccacuucagcgacgacaucgagcagcaggccgacaacaugaucaccgagaugcugcagaaggaguacauggagagacagggcaagaccccccugggccugguggaccuguucguguucagcaccagcuucuaccugaucagcaucuuccugcaccuggugaagauccccacccacagacacaucgugggcaagagcugccccaagccccacagacugaaccacaugggcaucugcagcugcggccuguacaagcagcccggcgugcccgugaaguggaagagaugaggacuaguaauaaggaaacuguaugaaugucugugggcaggaagugaagagauccuucuguaaagguuuuuggaauuaugucugcugaauaauaaacuuuuuugaaauaauaaaucugguagaaaaaugagaucucaaaggcucuuuucagagccaccaaaaaaaaaaaaaaaaaaaaaaaaaaaaaaaaaaaaaaaaaaaaaaaaaaaaaaaaaaaaaaaaaaaaaaaaaaaaaaaaaaaaaaaaaaaaaaaaaaaaa

SEQ ID NO: 25791 - RNA, 1812 nt, Artificial Sequence
  mRNA product Design b-4 (hSL-A100) comprising derived and/or modified sequence from LASV(G733-SLE-2010;Clade IV)__AIT17154__GPCmut3 (opt4)
aggagagucccgcagucggcguccagcggcucugcuuguucgugugugugucguugcaggccuuauucaagcuuaccaugggccagaucgugaccuucuuccaggaggugccccacgugaucgaggaggugaugaacaucgugcugaucgcccugagcauccuggccgugcugaagggccuguacaacuucgccaccugcggcaucgugggccuggugagcuuccugcugcugugcggcagaagcugcaccaccagccuguacaagggcguguacgagcugcagacccuggagcugaacauggagacccugaacaugaccaugccccugagcugcaccaagaacaacagccaccacuacaucauggugggcaacgagaccggccuggagcugacccugaccaacaccagcaucaucaaccacaaguucugcaaccugagcgacgcccacaagaagaaccuguacgaccacgcccugaugagcaucaucagcaccuuccaccugagcauccccaacuucaaccaguacgaggccaugagcugcgacuucaacggcggcaagaucagcgugcaguacaaccugagccacagcuacgccggcgacgccgccaaccacugcggcaccaucgccaacggcgugcugcagaccuucaugagaauggccuggggcggcagcuacaucgcccuggacagcggcagagacagaugggacugcaucaugaccagcuaccaguaccugaucauccagaacaccaccugggaggaccacugccaguucagcagacccagccccaucggcuaccugggccugcugagccagagaaccagagacaucuacaucagcagaagaagaagaggcaccuucaccuggacccugagcgacagcgagggcaaggacacccccggcggcuacugccugaccagauggaugcugaucgaggccgagcugaagugcuucggcaacaccgccguggccaagugcaacgagaagcacgacgaggaguucugcgacaugcugagacuguucgacuucaacaagcaggccauccagagacugaaggcccccgcccagaugagcauccagcugaucaacaaggccgugaacgcccugaucaacgaccagcugaucaugaagaaccaccugagagacaucaugggcauccccuacugcaacuacagcaaguacugcuaccugaaccacaccaccaccggcaagaccagccugcccaagugcugccuggugagcaacggcagcuaccugaacgagacccacuucagcgacgacaucgagcagcaggccgacaacaugaucaccgagaugcugcagaaggaguacauggagagacagggcaagaccccccugggccugguggaccuguucguguucagcaccagcuucuaccugaucagcaucuuccugcaccuggugaagauccccacccacagacacguggugggcaagagcugccccaagccccacagacugaaccacaugggcaucugcagcugcggccuguacggccagcccggcgugcccgugaaguggaagagaugaggacuaguaauaaggaaacuguaugaaugucugugggcaggaagugaagagauccuucuguaaagguuuuuggaauuaugucugcugaauaauaaacuuuuuugaaauaauaaaucugguagaaaaaugagaucucaaaggcucuuuucagagccaccaaaaaaaaaaaaaaaaaaaaaaaaaaaaaaaaaaaaaaaaaaaaaaaaaaaaaaaaaaaaaaaaaaaaaaaaaaaaaaaaaaaaaaaaaaaaaaaaaaaaa

SEQ ID NO: 25792 - RNA, 1812 nt, Artificial Sequence
  mRNA product Design b-4 (hSL-A100) comprising derived and/or modified sequence from MOPV/LASV reassortant(IGS-1;Clade IV)__AFY05576__GPCmut3 (opt4)
aggagagucccgcagucggcguccagcggcucugcuuguucgugugugugucguugcaggccuuauucaagcuuaccaugggccagaucgugaccuucuuccaggaggugccccacgugaucgaggaggugaugaacaucgugcugaucgcccugagcgugcuggccgugcugaagggccuguacaacuucgccaccugcggccuggugggccuggugaccuuccugcugcugugcggcagaagcugcaccaccagccuguacaagggcguguacgagcugcagacccuggagcugaacauggagacccugaacaugaccaugccccugagcugcaccaagaacaacagccaccacuacaucauggugggcaacgagaccggccuggagcugacccugaccaacaccagcaucaucaaccacaaguucugcaaccugagcgacgcccacaagaagaaccuguacgaccacgcccugaugagcaucaucagcaccuuccaccugagcauccccaacuucaaccaguacgaggccaugagcugcgacuucaacggcggcaagaucagcgugcaguacaaccugagccacagcuacgccggcgacgccgccaaccacugcggcaccguggccaacggcgugcugcagaccuucaugagaauggccuggggcggcagcuacaucgcccuggacagcggcagaggcaacugggacugcaucaugaccagcuaccaguaccugaucauccagaacaccaccugggaggaccacugccaguucagcagacccagccccaucggcuaccugggccugcugagccagagaaccagagacaucuacaucagcagaagaagaagaggcaccuucaccuggacccugagcgacagcgagggcgaggacacccccggcggcuacugccugaccagauggaugcugaucgaggccgagcugaagugcuucggcaacaccgccguggccaagugcaacgagaagcacgacgaggaguucugcgacaugcugagacuguucgacuucaacaagcaggccauccagagacugaaggcccccgcccagaugagcauccagcugaucaacaaggccgugaacgcccugaucaacgaccagcugaucaugaagaaccaccugagagacaucaugggcauccccuacugcaacuacagcaaguacugcuaccugaaccacaccaccaccggcagaaccagccugcccaagugcugccuggugagcaacggcagcuaccugaacgagacccacuucagcgacgacaucgagcagcaggccgacaacaugaucaccgagaugcugcagaaggaguacauggagagacagggcaagaccccccugggccugguggaccuguucguguucagcaccagcuucuaccugaucagcaucuuccugcaccuggugaagauccccacccacagacacaucgugggcaagagcugccccaagccccacagacugaaccacaugggcaucugcagcugcggccuguacaagcagcccggcgugcccgugaaguggaagagaugaggacuaguaauaaggaaacuguaugaaugucugugggcaggaagugaagagauccuucuguaaagguuuuuggaauuaugucugcugaauaauaaacuuuuuugaaauaauaaaucugguagaaaaaugagaucucaaaggcucuuuucagagccaccaaaaaaaaaaaaaaaaaaaaaaaaaaaaaaaaaaaaaaaaaaaaaaaaaaaaaaaaaaaaaaaaaaaaaaaaaaaaaaaaaaaaaaaaaaaaaaaaaaaaa

SEQ ID NO: 25793 - RNA, 1812 nt, Artificial Sequence
  mRNA product Design b-4 (hSL-A100) comprising derived and/or modified sequence from LASV(LM765-SLE-2012;Clade IV)__AIT17814__GPCmut3 (opt4)
aggagagucccgcagucggcguccagcggcucugcuuguucgugugugugucguugcaggccuuauucaagcuuaccaugggccagaucgugaccuucuuccaggaggugccccacgugaucgaggaggugaugaacaucgugcugaucgcccugagcauccuggccgugcugaagggccuguacaacuucgccaccugcggccuggugggccuggugaccuuccugcugcugugcggcagaagcugcaccaccagccuguacaagggcguguacgagcugcagacccuggagcugaacauggagacccugaacaugaccaugccccugagcugcaccaagaacaacagccaccacuacaucauggugggcaacgagaccggccuggagcugacccugaccaacaccagcaucaucgaccacaaguucugcaaccugagcgacgcccacagaaagaaccuguacgaccacgcccugaugagcaucaucagcaccuuccaccugagcauccccaacuucaaccaguacgaggccaugagcugcgacuucaacggcggcaagaucagcgugcaguacaaccugagccacagcuacgccaaggacgccgccgaccacugcggcaccguggccaacggcgugcugcagaccuucaugagaauggccuggggcggcagcuacaucgcccuggacagcggcagaggcagaugggacugcaucaugaccagcuaccaguaccugaucauccagaacaccaccugggaggaccacugccaguucagcagacccagccccaucggcuaccugggccugcugagccagagaaccagagacaucuacaucagcagaagaagaagaggcaccuucaccuggacccugagcgacagcgagggcaaggacacccccggcggcuacugccugaccagauggaugcugaucgaggccgagcugaagugcuucggcaacaccgccguggccaagugcaacgagaagcacgacgaggaguucugcgacaugcugagacuguucgacuucaacaagcaggccauccagagacugaaggcccccgcccagaugagcauccagcugaucaacaaggccgugaacgcccugaucaacgaccagcugaucaugaagaaccaccugagagacaucaugggcauccccuacugcaacuacagcaaguacugcuaccugaaccacaccaccaccggcaagaccagccugcccaagugcugccuggugagcaacggcagcuaccugaacgagacccacuucagcgacgacaucgagcagcaggccgacaacaugaucaccgagaugcugcagaaggaguacauggagagacagggcaagaccccccugggccugguggaccuguucguguucagcaccagcuucuaccugaucagcaucuuccugcaccuggugaagauccccacccacagacacaucgugggcaagcccugccccaagccccacagacugaaccacaugggcaucugcagcugcggccuguacaagcagcccggcgugcccgugaaguggaagagaugaggacuaguaauaaggaaacuguaugaaugucugugggcaggaagugaagagauccuucuguaaagguuuuuggaauuaugucugcugaauaauaaacuuuuuugaaauaauaaaucugguagaaaaaugagaucucaaaggcucuuuucagagccaccaaaaaaaaaaaaaaaaaaaaaaaaaaaaaaaaaaaaaaaaaaaaaaaaaaaaaaaaaaaaaaaaaaaaaaaaaaaaaaaaaaaaaaaaaaaaaaaaaaaaa

SEQ ID NO: 25794 - RNA, 1812 nt, Artificial Sequence
  mRNA product Design b-4 (hSL-A100) comprising derived and/or modified sequence from LASV(LM776-SLE-2012;Clade IV)__AIT17824__GPCmut3 (opt4)
aggagagucccgcagucggcguccagcggcucugcuuguucgugugugugucguugcaggccuuauucaagcuuaccaugggccagaucgugaccuucuuccaggaggugccccacgugaucgaggaggugaugaacaucgugcugaucgcccugagcauccuggccgugcugaagggccuguacaacuucgccaccugcggccuggugggccuggugaccuuccugcugcugugcggcagaagcugcaccaccagcguguacaagggcguguacgagcugcagacccuggagcugaacauggagacccugaacaugaccaugccccugagcugcaccaagaacaacagccaccacuacaucauggugggcaacgagaccggccuggagcugacccugaccaacaccagcaucaucaaccacaaguucugcaaccugagcgacgcccacaagaagaaccuguacgaccacgcccugaugagcaucaucagcaccuuccaccugagcauccccaacuucaaccaguacgaggccaugagcugcgacuucaacggcggcaagaucagcgugcaguacaaccugagccacagcuacgccggcgacgccgccaaccacugcggcaccguggccaacggcgugcugcagaccuucaugagaauggccuggggcggcagcuacaucgcccuggacagcggccacggcaagugggacugcaucaugaccagcuaccaguaccugaucauccagaacaccaccugggaggaccacugccaguucagcagacccagccccaucggcuaccugggccugcugagccagagaaccagagacaucuacaucagcagaagaagaagaggcaccuucaccuggacccugagcgacagcgagggcaaggacacccccggcggcuacugccugaccagauggaugcugaucgaggccgagcugaagugcuucggcaacaccgccguggccaagugcaacgagaagcacgacgaggaguucugcgacaugcugagacuguucgacuucaacaagcaggccauccagagacugaaggcccccgcccagaugagcauccagcugaucaacaaggccgugaacgcccugaucaacgaccagcugaucaugaagaaccaccugagagacaucaugggcauccccuacugcaacuacagcaaguacugcuaccugaaccacaccaccaccggcaagaccagccugcccaagugcugccuggugagcaacggcagcuaccugaacgagacccacuucagcgacgacaucgagcagcaggccgacaacaugaucaccgagaugcugcagaaggaguacauggagagacagggcaagaccccccugggccugguggaccuguucguguucagcaccagcuucuaccugaucagcaucuuccugcaccuggugaagauccccacccacagacacaucgugggcaagagcugccccaagccccacagacugaaccacaugggcaucugcagcugcggccuguacaagcagcccggcgugcccgugagauggaagagaugaggacuaguaauaaggaaacuguaugaaugucugugggcaggaagugaagagauccuucuguaaagguuuuuggaauuaugucugcugaauaauaaacuuuuuugaaauaauaaaucugguagaaaaaugagaucucaaaggcucuuuucagagccaccaaaaaaaaaaaaaaaaaaaaaaaaaaaaaaaaaaaaaaaaaaaaaaaaaaaaaaaaaaaaaaaaaaaaaaaaaaaaaaaaaaaaaaaaaaaaaaaaaaaaa

SEQ ID NO: 25795 - RNA, 1812 nt, Artificial Sequence
  mRNA product Design b-4 (hSL-A100) comprising derived and/or modified sequence from LASV(Mad39;Clade IV)__ANH09722__GPCmut3 (opt4)
aggagagucccgcagucggcguccagcggcucugcuuguucgugugugugucguugcaggccuuauucaagcuuaccaugggccagaucgugaccuucuuccaggaggugccccacgugaucgaggaggugaugaacaucgugcugaucgcccugagcauccuggccgugcugaagggccuguacaacguggccaccugcggccugaucggccuggugaccuuccugcugcugugcggcagaagcugcaccaccacccuguacaagggcguguacgagcugcaggcccuggagcugaacauggagacccugaacaugaccaugccccugagcugcaccaagaacaacagccaccacuacaucagagugggcaacgagaccggccuggagcugacccugaccaacaccagccugaucaaccacaaguucugcaaccugagcgacgcccacaagaagaaccuguacgaccacgcccugaugagcaucaucagcaccuuccaccugagcauccccaacuucaaccaguacgaggccaugagcugcgacuucaacgacggcaagaucagcgugcaguacaaccugagccacaccuacgccggcgacaccgccaaccacugcggcaccguggccaacggcgugcugcagaccuucaugagaauggccuggggcggcagcuacaucgcccuggacagcggcagaggcggcugggacugcaucaugaccagcuaccaguaccugaucauccagaacaccaccugggaggaccacugccaguucagcagacccagccccaucggcuaccugggccugcugagccagagaaccagagacaucuacaucagcagaagaagaagaggcaccuucaccuggacccugagcgacagcgagggcaaggacacccccggcggcuacugccugaccagauggaugcugaucgaggccgagcugaagugcuucggcaacaccgccguggccaagugcaacgagaagcacgacgaggaguucugcgacaugcugagacuguucgacuucaacaagcaggccauccagagacugaaggcccccgcccagaugagcauccagcugaucaacaaggccgugaacgcccugaucaacgaccagcugaucaugaagaaccaccugagagacaucaugggcauccccuacugcaacuacagcaaguacugcuaccugaaccacaccgugaccggcaagaccagccugcccaagugcugccuggugagcaacggcagcuaccugaacgagacccacuucagcgacgacaucgagcagcaggccgacaacaugaucaccgagaugcugcagaaggaguacauggagagacagggcaagaccccccugggccugguggaccuguucguguucagcaccagcuucuaccugaucagcaucuuccugcaccuggugaagauccccacccacagacacguggugggcaagcccugccccaagccccacagacugaaccacaugggcaucugcagcugcggcuucuacaagcagcccggcgugcccgugagauggaagagaugaggacuaguaauaaggaaacuguaugaaugucugugggcaggaagugaagagauccuucuguaaagguuuuuggaauuaugucugcugaauaauaaacuuuuuugaaauaauaaaucugguagaaaaaugagaucucaaaggcucuuuucagagccaccaaaaaaaaaaaaaaaaaaaaaaaaaaaaaaaaaaaaaaaaaaaaaaaaaaaaaaaaaaaaaaaaaaaaaaaaaaaaaaaaaaaaaaaaaaaaaaaaaaaaa

SEQ ID NO: 25796 - RNA, 1812 nt, Artificial Sequence
  mRNA product Design b-4 (hSL-A100) comprising derived and/or modified sequence from LASV(Z0947-SLE-2011;Clade IV)__AIT17840__GPCmut3 (opt4)
aggagagucccgcagucggcguccagcggcucugcuuguucgugugugugucguugcaggccuuauucaagcuuaccaugggccagaucgugaccuucuuccaggaggugccccacgugaucgaggaggugaugaacaucgugcugaucgcccugagcauccuggccgugcugaagggccuguacaacuucgccaccugcggccuggugggccuggugaccuuccugcugcugugcggcagaagcugcaccaucagccuguacaagggcguguacgagcugcagacccuggagcugaacauggagacccugaacaugaccaugccccugagcugcaccaagaacaacagccaccacuacaucauggugggcaacgagaccggccuggagcugacccugaccaacaccagcaucaucaaccacaaguucugcaaccugagcgacgcccacaagaagaaccuguacgaccacgcccugaugagcaucaucagcaccuuccaccugagcauccccaacuucaaccaguacgaggccaugagcugcgacuucaacggcggcaagaucagcgugcaguacaaccugagccacagcuacgccggcgacgccgccaaccacugcggcaccguggccaacggcgugcugcagaccuucaugagaauggccuggggcggcagcuacaucgcccuggacagcggcagagacagaugggacugcaucaugaccagcuaccaguaccugaucauccagaacaccaccugggaggaccacugccaguucagcagacccagccccaucggcuaccugggccugcugagccagagaaccagagacaucuacaucagcagaagaagaagaggcaccuucaccuggacccugagcgacagcgagggcaaggacacccccggcggcuacugccugaccagauggaugcugaucgaggccgagcugaagugcuucggcaacaccgccguggccaagugcaacgagaagcacgacgaggaguucugcgacaugcugagacuguucgacuucaacaagcaggccauccagagacugaaggcccccgcccagaugagcauccagcugaucaacaaggccgugaacgcccugaucaacgaccagcugaucaugaagaaccaccugagagacaucaugggcauccccuacugcaacuacagcaaguacugcuaccugaaccacaccaccaccggcaagaccagccugcccaagugcugccuggugagcaacggcagcuaccugaacgagacccacuucagcgacgacaucgagcagcaggccgacaacaugaucaccgagaugcugcagaaggaguacauggagagacagggcaagaccccccugggccugguggaccuguucguguucagcaccagcuucuaccugaucagcaucuuccugcaccuggugaagauccccacccacagacacaucgugggcaagcccugccccaagccccacagacugaaccacaugggcaucugcagcugcggccuguacaagcagcccggcgugcccgugaaguggaagagaugaggacuaguaauaaggaaacuguaugaaugucugugggcaggaagugaagagauccuucuguaaagguuuuuggaauuaugucugcugaauaauaaacuuuuuugaaauaauaaaucugguagaaaaaugagaucucaaaggcucuuuucagagccaccaaaaaaaaaaaaaaaaaaaaaaaaaaaaaaaaaaaaaaaaaaaaaaaaaaaaaaaaaaaaaaaaaaaaaaaaaaaaaaaaaaaaaaaaaaaaaaaaaaaaa

SEQ ID NO: 25797 - RNA, 1812 nt, Artificial Sequence
  mRNA product Design b-4 (hSL-A100) comprising derived and/or modified sequence from LASV(Josiah;Clade IV)__NP_694870__GPCmut3 (opt5)
aggagagucccgcagucggcguccagcggcucugcuuguucgugugugugucguugcaggccuuauucaagcuuaccaugggccagaucgugaccuucuuucaagaggucccccacguuauugaagaggugaugaacaucgugcugauugcccucagcguccuggcugugcuuaaggggcuguacaauuucgccacaugcggacucguuggccuggugacguuucuucugcucugugggagauccugcaccacaucucuguauaaaggagucuacgaacugcagacccucgagcugaacauggaaacacuuaauaugaccaugccucugagcuguacaaagaacaauucccaucacuauaucauggugggcaacgagaccgggcucgagcugacgcuuaccaauacaucuauuaucaaccauaaauucugcaaucugagcgacgcgcacaagaaaaaccucuacgaucaugcucugauguccaucauuucuaccuuucaccugagcaucccgaauuucaaccaguaugaagccauguccugugacuuuaauggaggcaagauuagcguucaguacaaccucucucacuccuaugccggcgaugcugccaaucauugcgggacaguggcuaacggaguccugcaaaccuucaugcggauggccuggggcgggagcuacaucgcgcuugacucuggacgcggcaacugggauuguauuaugacguccuaccaguaucugaucauucagaauacaaccugggaggaccacugccaguuuagcagacccucuccuaucggguaccucggacugcuuucccaacggacacgcgauaucuauauuagcagacggcgcagaggcaccuucaccuggacacuguccgacucugaaggcaaggauacgcccgggggauacugucucacccgguggaugcugaucgaggccgagcugaaaugcuuuggcaacacagcuguggccaaguguaaugaaaaacaugacgaggaguucugcgauaugcuccgccuguuugacuucaacaagcaggcuauucagagacuuaaagccccugcgcagaugagcauccaacugauuaauaaggccgugaacgcucucaucaaugaucagcugaucaugaagaaccaccuucgggacauuauggggauccccuauugcaauuacuccaaauauuguuaccugaaccacaccacaaccggacgcacgagccucccuaagugcugucuggucucuaauggcuccuaccugaacgaaacacauuucagcgacgauauugaacagcaagccgacaauaugaucaccgagaugcuccagaaagaguauauggaaagacaggggaagaccccgcugggacuuguugaucuguuuguguucucuaccagcuuuuaccucauuuccaucuuccugcaccuggugaaaauccccacacaucggcacauugucggcaagucuugcccuaaaccccaucgccuuaaccacaugggcaucuguagcugcgggcucuauaagcagccuggagugcccguuaaguggaaaagaugaggacuaguaauaaggaaacuguaugaaugucugugggcaggaagugaagagauccuucuguaaagguuuuuggaauuaugucugcugaauaauaaacuuuuuugaaauaauaaaucugguagaaaaaugagaucucaaaggcucuuuucagagccaccaaaaaaaaaaaaaaaaaaaaaaaaaaaaaaaaaaaaaaaaaaaaaaaaaaaaaaaaaaaaaaaaaaaaaaaaaaaaaaaaaaaaaaaaaaaaaaaaaaaaa

SEQ ID NO: 25798 - RNA, 1809 nt, Artificial Sequence
  mRNA product Design b-4 (hSL-A100) comprising derived and/or modified sequence from LASV(LP;Clade I)__AAF86701__GPCmut3 (opt5)
aggagagucccgcagucggcguccagcggcucugcuuguucgugugugugucguugcaggccuuauucaagcuuaccaugggccagaucauuaccuucuuucaagaggugccccacgucaucgaagagguuaugaacauugugcugaucgcccucagccugcuugcuauucugaaggggcucuacaauaucgccacaugcggaaucauuggccugguggcguuccuuuuucugugugggaaauccugcucucucacgcugaagggaggcuaugaacugcagacccucgagcugaacauggaaacacuuaauaugaccaugccucugagcuguaccaaaaacuccucucaucacuacaucagagucgggaaugagacaggacucgagcugacacuuaccaacacgagcauuaucaaucauaaguucugcaaccuguccgacgcucacaaaaagaaucucuaugaucaugcccugaugucuauuaucagcaccuuucaccuguccauuccgaacuucaaucaguacgaagccaugagcugugacuuuaacggcggcaagaucucugugcaguauaaucucucccacagcuacgcuggggaugccgcugagcauugcggaacaguugccaacggcgugcugcaaaccuucaugcggauggcguggggagggcgcuauaucgcccuugacucuggcaaagggaauugggauuguauuaugacauccuaccaguaccugaucauucagaacaccacgugggaagaccacugccaguuuagcagacccucuccuaucggauaucucggccugcuuucccaacggacacgcgauauuuacaucagcagacggcgcagaggcaccuucacauggacccuguccgacucugaggggaacgagacccccggaggcuauugucucacacgguggaugcugaucgaagcugagcugaagugcuuugggaauacggccgucgcuaaauguaacgaaaagcaugaugaggaguucugcgacaugcuccgccuguuugauuucaauaaacaggccauuagacggcuuaaggcgccugcccagaugagcauccagcugauuaacaaggcugugaaugcccucaucaacgaccaacugauuaugaaaaaucaccuucgcgauaucaugggaauccccuacugcaacuauuccaaguacuguuaucugaaucacaccagcucuggcagaacaucccucccuaaaugcugucugauuagcaacgggucuuaccugaaugaaacccaguucagcgacgacaucgagcagcaagcugauaacaugauuacagaaaugcuccagaaggaguacaucgaacggcagggaaaaaccccgcugggccuuguugacauuuuuaucuucuccacgucuuuuuaucugauuagcaucuuccuccaucugaucaagauucccacacaccgccauaucgugggcaaaccuugccccaagccucacagacugaaucauaugggggucuguuccugcggacuuuacaagcaccccggcgugccgaccaaauggaagcggugaggacuaguaauaaggaaacuguaugaaugucugugggcaggaagugaagagauccuucuguaaagguuuuuggaauuaugucugcugaauaauaaacuuuuuugaaauaauaaaucugguagaaaaaugagaucucaaaggcucuuuucagagccaccaaaaaaaaaaaaaaaaaaaaaaaaaaaaaaaaaaaaaaaaaaaaaaaaaaaaaaaaaaaaaaaaaaaaaaaaaaaaaaaaaaaaaaaaaaaaaaaaaaaaa

SEQ ID NO: 25799 - RNA, 1809 nt, Artificial Sequence
  mRNA product Design b-4 (hSL-A100) comprising derived and/or modified sequence from LASV(803213;Clade II)__AAF86703__GPCmut3 (opt5)
aggagagucccgcagucggcguccagcggcucugcuuguucgugugugugucguugcaggccuuauucaagcuuaccaugggccagaucauuaccuucuuucaagaggugccccacgucaucgaagagguuaugaacauugugcugaucgcccucagccugcuugcuauucugaaggggaucuacaauguggccacaugcggacucuucggccugaucuccuuucuucugcucugugggagaucuugcagcgucacguauaaaggaguguacgaacugcagacccuggagcucaacauggcgaaucugaacaugacaaugccucuuuccuguaccaagaauaacucucaucacuauauuaugguuggcaaugaaacagggcuggagcucacccugacaaacaccagcaucauuaaucauaaauucugcaaccuuuccgacgcucacaagaaaaaucuguacgaucaugcccucaugucuaucauuagcacguuucaccuguccaucccgaacuucaaucaguaugaggccaugagcugugacuuuaacggaggcaagauuucugugcaguacaaucugucccacagcuucgcugucgaugccgcuaaccauugcggcaccaucgccaacggggugcuccaaacauuuaugcggauggcguggggaggcucuuauaucgcccuggacuccgggaagggaaauugggauuguauuaugaccagcuaccaguaccuuaucauucagaacacaaccugggaagaccacugccaguucucucgccccuccccuaucggcuaucuggggcuccugagccaaagaacgcgggauauuuacaucucccgcagacggcgcggaacauuuaccuggacacuuucugacagcgagggcaaugaagcucccggcggguauugucugaccagauggaugcucaucgaggccgagcugaaaugcuucggaaacaccgcuguugccaaguguaaugaaaaacaugaugaggaauuuugcgacaugcugcgccucuucgauuucaacaagcaggcgauuaaacggcugaagacgccugcccagauguccauccagcuuauuaauaaggcugugaacgcccugaucaaugaccaacucauuaugaaaaaccaccugagagauaucaugggcauccccuacugcaauuauagccgguacuguuaucuuaaccacacagucaccgggaagacaucucugccucgcugcugucucguguccaauggaagcuaccugaacgagacccauuuuucugacgacauugaacagcaggcugauaauaugaucacagagaugcugcaaaaagaguacauggacagacagggcaagaccccgcucgggcugguggaucuuuucgucuuuagcacguccuucuaucugauuucuaucuuucuccaccugguuaaaauucccacacaucggcacaucgugggaaagccuugccccaaaccucaucgccugaaccacaugggcauuuguagcugcggccuuuacaagcaccccggggugccggucaaguggaaaagaugaggacuaguaauaaggaaacuguaugaaugucugugggcaggaagugaagagauccuucuguaaagguuuuuggaauuaugucugcugaauaauaaacuuuuuugaaauaauaaaucugguagaaaaaugagaucucaaaggcucuuuucagagccaccaaaaaaaaaaaaaaaaaaaaaaaaaaaaaaaaaaaaaaaaaaaaaaaaaaaaaaaaaaaaaaaaaaaaaaaaaaaaaaaaaaaaaaaaaaaaaaaaaaaaa

SEQ ID NO: 25800 - RNA, 1809 nt, Artificial Sequence
  mRNA product Design b-4 (hSL-A100) comprising derived and/or modified sequence from LASV(GA391;Clade III)__CAA36645__GPCmut3 (opt5)
aggagagucccgcagucggcguccagcggcucugcuuguucgugugugugucguugcaggccuuauucaagcuuaccaugggccagaucgugaccuucuuucaagaggucccccacguuauugaagaggugaugaacaucgugcugauugcccucagcauccuggcuauucuuaaggggcuguacaaugucgccacaugcggacucaucggccuggugacguuccuucugcucuccgggagaucuuguagccugaucuauaaaggaaccuacgaacugcagacacucgagcugaacauggaaacccuuaauaugacaaugccucuguccugcaccaagaacaauucucaucacuauauucggguuggcaacgagacagggcucgagcugacccuuacgaauaccagcauccugaaccauaaauuuuguaaucucuccgacgcgcacaagcgcaaccuguacgaucauucucugaugagcauuaucuccacauuccaccucagcauuccgaauuuuaaccaguaugaagcuaugucuugcgacuucaauggaggcaaaaucaccgugcaguacaaccugucccacagcuuugccgucgaugccgcuggccauugugggacacuugccaauggagugcugcaaaccuucaugagaauggcuuggggcgggucuuauauugcccucgacuccggacggggcaacugggauugcaucaugacgagcuaccaguaccugaucauucagaacacaaccugggacgaucacugucaguuuucucgccccuccccuaucggguaucuuggacugcucagccaaagaacacgggacauuuacaucucccgcagacggcgcggcaccuucaccuggacacugucugauagcgagggcaaugaaacgcccgggggauauugccugaccagauggaugcucauugaggcggagcugaaguguuuuggcaacacagccguugcuaagugcaaugaaaaacaugacgaggaguucugugauaugcuucggcuguuugacuucaacaagcaggccauccgcagacucaaaaccccugcucagauguccauccagcugauuaauaaggccgugaacgcgcuuaucaaugaucaacugauuaugaaaaaccaccuccgggacaucauggggauucccuacugcaauuauagccgcuacugcuaucugaaccacacaucuaccggaaagacgucccugccuagauguugccucaucagcaauggcucuuaccugaacgaaacaaaguucagcgacgauaucgaacagcaggccgacaauaugauuaccgagaugcuucaaaaagaguacaucgaucggcaggggaagaccccgcugggacucgucgaccuguuuguguucuccacaucuuuuuaucugauuagcaucuuccuucaucucgugaaaauucccacccacagacauaucgucggcaagccuugucccaaaccucaccgccugaaccauaugggcauuugcuccugugggcuguacaagcagcccggaguuccggugcgguggaaaagaugaggacuaguaauaaggaaacuguaugaaugucugugggcaggaagugaagagauccuucuguaaagguuuuuggaauuaugucugcugaauaauaaacuuuuuugaaauaauaaaucugguagaaaaaugagaucucaaaggcucuuuucagagccaccaaaaaaaaaaaaaaaaaaaaaaaaaaaaaaaaaaaaaaaaaaaaaaaaaaaaaaaaaaaaaaaaaaaaaaaaaaaaaaaaaaaaaaaaaaaaaaaaaaaaa

SEQ ID NO: 25801 - RNA, 1812 nt, Artificial Sequence
  mRNA product Design b-4 (hSL-A100) comprising derived and/or modified sequence from LASV(AV;Clade V)__CCA30314__GPCmut3 (opt5)
aggagagucccgcagucggcguccagcggcucugcuuguucgugugugugucguugcaggccuuauucaagcuuaccaugggccagaucgugaccuucuuucaagaggucccccacguuauugaagaggugaugaacaucgugcugauugcccucagcauccuggcuguccuuaaggggcuguacaauauugccacaugcggacucaucggccugaucacguuccuucugcucugugggagauccugcucuagcaaccuguauaaaggaguguacgaacugcagucccucgaccugaauauggagacccuuaacaugacaaugccucugucuuguaccaagaauaacagccaucacuauauucggguuggcaaugauacagggcucgaacugacccuuacaaacaccuccauccugaaucauaaauuuugcaaccucucugacgcgcacaagaaagaucuguacgaccaugcucugaugagcauuaucuccacguuccaccucagcauuccgaauuuuaaccaguaugaggccaugucuugugauuucaauggaggcaagaucuccgugcaguacaaccugagccacucuuaugccauugacgcugccaaucauugcggcaccgucgcuaacgggauccuucaaacauuuaugcgcauggccuggggaggcuccuacaucgcgcuggauagcgggagaggaaacugggacuguauuaugaccucuuaccaguaucucaucauucagaauacaaccugggagaaccacugccaguucucccggcccagcccuaucggcuaccuggggcuucugucccaacgcacgagagauauuuauaucucucggcgcagacggggaacauuuaccuggacacucagcgacuccgaaggcaaugccacccccggcggguacugucugacccgcuggaugcugaucgaggcugaacucaagugcuucggaaacacagccguggcuaaauguaaugagaagcaugaugaggaauuuugcgacaugcugagacuuuucgauuuuaacaaacaggccauuagccggcugaagucuccugcgcagauguccauccagcucauuaauaaagccguuaacgcucugaucaaugaccaacuuauuaugaagaaccaucugcgcgacaucaugggcauccccuauugcaauuacagcaaguauuguuaccucaaccacacgauuaccgggaaaacaucucugccuaagugcugucuggugagcaauggauccuaccucaacgagacccacuucucugaugacaucgaacagcaggccgauaauaugauuacagagaugcugcaaaaagaauauauggagagacagggcaagaccccgcuugggcuggucgaccucuucguguuuagcacguccuucuaccugaucagcauuuuucugcggcuugugaaaauccccacacaccgccauauugucggaaagccuugccccaaaccucacagacucaaccauaugggcaucuguucuugcggccuguauaagcagcccgggguuccggugcgguggaagagaugaggacuaguaauaaggaaacuguaugaaugucugugggcaggaagugaagagauccuucuguaaagguuuuuggaauuaugucugcugaauaauaaacuuuuuugaaauaauaaaucugguagaaaaaugagaucucaaaggcucuuuucagagccaccaaaaaaaaaaaaaaaaaaaaaaaaaaaaaaaaaaaaaaaaaaaaaaaaaaaaaaaaaaaaaaaaaaaaaaaaaaaaaaaaaaaaaaaaaaaaaaaaaaaaa

SEQ ID NO: 25802 - RNA, 1809 nt, Artificial Sequence
  mRNA product Design b-4 (hSL-A100) comprising derived and/or modified sequence from LASV(Togo/2016/7082;Clade VI)__AMR44577__GPCmut3 (opt5)
aggagagucccgcagucggcguccagcggcucugcuuguucgugugugugucguugcaggccuuauucaagcuuaccaugggccagaucauuaccuucuuucaagaggugccccacgucaucgaagagguuaugaacauugugcugaucgcccucagccugcuugcuauucugaaggggguguacaaugucgccacaugcggaaucaucggccucgugacguuccuguuucuuugugggagauccugcucucugauuuauaaaggaagcuacgaacuccagacccuggagcugaacauggaaacacucaauaugaccaugccucuguccuguacaaagaacucuagccaucacuauauccggguuggcaaugagaccgggcuugagcugacacucaccaacacguccauuaucaaucauaaauucugcaaccugucugacgcgcacaagcgcaaucuuuacgaucaugcucugaugagcauucucuccaccuuucaccugagcaucccgaacuucaaucaguaugaagccaugucuugugacuuuaacggaggcaaaauuuccgugcaguacaaucugagccacgccuaugcugucgaugccgcugagcauugcggcacaguggccaacgggguucuccaaaccuucaugagaauggcguggggaggcucuuacaucgcccuggacuccgggcggggaaauugggauuguaucaugacaagcuaccaguaucuuauuauccagaacaccacgugggaagaccacugccaguuuucucgccccuccccuauuggcuaccuggggcuccugagccaaagaacacgggauaucuauauuucccgcagacggcgcggaaccuucacauggacccuuucugacagcgagggcaacgagacccccggcggguacugucugacaagauggaugcucaucgaagcugagcugaagugcuuuggaaauacggccguggcuaaguguaacgaaaaacaugaugaggaguucugcgacaugcugcggcucuuugauuucaauaagcaggccauccagcgccugaaauccccugcgcagaugagcauucaacuuaucaacaaggccgucaaugcucugauuaacgaccagcucaucaugaaaaaucaccugagagauaugaugggcauucccuauugcaacuacucuaaguauuguuaccuuaaucacaccuccagcgggcggacaucucugccuaagugcugucucgugagcaacggauccuaccugaaugaaacccauuucucugacgacaucgagcagcaagccgauaacaugaucacagaaaugcugcagaaagaguauauugaccgccagggcaagaccccgcucgggcugguggaucuuuuugucuucagcacguccuuuuaccugaucagcauuuuccuccaccugaucaaaauucccacacauagacacaucguuggaaagccuugccccaaaccucaucggcugaaucacaugggcauuuguucuugcggccuuuauaagcagcccggggugccgaccagauggaaacgcugaggacuaguaauaaggaaacuguaugaaugucugugggcaggaagugaagagauccuucuguaaagguuuuuggaauuaugucugcugaauaauaaacuuuuuugaaauaauaaaucugguagaaaaaugagaucucaaaggcucuuuucagagccaccaaaaaaaaaaaaaaaaaaaaaaaaaaaaaaaaaaaaaaaaaaaaaaaaaaaaaaaaaaaaaaaaaaaaaaaaaaaaaaaaaaaaaaaaaaaaaaaaaaaaa

SEQ ID NO: 25803 - RNA, 1809 nt, Artificial Sequence
  mRNA product Design b-4 (hSL-A100) comprising derived and/or modified sequence from LASV(KAK-428;Clade n.d. (VII))__ANH09740__GPCmut3 (opt5)
aggagagucccgcagucggcguccagcggcucugcuuguucgugugugugucguugcaggccuuauucaagcuuaccaugggccagaucgugaccuucuuucaagaggucccccacguuauugaagaggugaugaacaucgugcugauugcccucagccugcuugcuauccugaaggggcucuacaauuucgccacaugcggagucauuggccugaucacguuucuucugcucugugggagauccugcucugcgaccuauaaaggacaguacgaacugcagacacuggagcucaacauggaaagccugaauaugaccaugccucuuuccuguacaaagaacaauucucaucacuauauccgggcuggcaacaauaccgggcuggagcucacacugaccaacacgagcauuaucucccauaaauucugcaaucuuucugacgcccacaagaaaaaccuguacgaucauacccucaugagcauuaucacaaccuuucaccuguccauuccgaauuucaaccaguaugaggccaugagcugugacuuuaauggaggcaagaucucuauucaauacaaccugucccacagcuaugcuggcgaugccgcucagcauugcgggacaguggccaauggaguucuccagaccuucaugcgcauggcguggggcgggucuuaccuggcccuugacuccggaagacggggcugggauuguaucaucagcucuuaccaguaucugauuauccaaaacacgacaugggacgaucacugccaguuuucccgccccagcccuauuggguaccucggauucgugucccagaagaccagagacaucuauauuucucggcgcagacggggcacauuuaccuggacccugagcgauuccgaaggccaugacaugcccgggggauacugucuuacacgcuggaugcugaucgaggcugaucucaaaugcuucggcaacacggccgucgcuaaguguaaugaaaaacacgacgaggaguuuugcgauauguggagacuguucgacuucaacaagcaggccauccaacggcugaaagcgccugcccagaugaauauucagcucaucaacaaggcugugaaugcccugauuaacgaccaacuuaugaugaagaaucaucugcgcgauaucauggggauucccuauugcaacuacagcaaauuuuguuaucucaauaacaccacaaccggaagaacaucucugccucggugcugucuuaucuccaauggcagcuaccugaacgaaacccacuucucugacgauaucgagcagcaggcugacaauaugauuacggaaaugcuccagaaggaguacauggaucgccaagggaaaacaccgcugggacugguugaccucuuuguguucagcaccuccuuuuaucugaucaccauuuuccuucaccuggucaagauccccacacauagacacauugugggcaaaccuugccccaagccucaucggcucaaccacaugggcaucuguucuugcgggcuguacaaacagcccggagugccggucagauggaagcgcugaggacuaguaauaaggaaacuguaugaaugucugugggcaggaagugaagagauccuucuguaaagguuuuuggaauuaugucugcugaauaauaaacuuuuuugaaauaauaaaucugguagaaaaaugagaucucaaaggcucuuuucagagccaccaaaaaaaaaaaaaaaaaaaaaaaaaaaaaaaaaaaaaaaaaaaaaaaaaaaaaaaaaaaaaaaaaaaaaaaaaaaaaaaaaaaaaaaaaaaaaaaaaaaaa

SEQ ID NO: 25804 - RNA, 1809 nt, Artificial Sequence; identical to SEQ ID NO: 25798
  mRNA product Design b-4 (hSL-A100) comprising derived and/or modified sequence from LASV(Pinneo-NIG-1969;Clade I)__AIT17836__GPCmut3 (opt5)

SEQ ID NO: 25805 - RNA, 1809 nt, Artificial Sequence
  mRNA product Design b-4 (hSL-A100) comprising derived and/or modified sequence from LASV(ISTH0009-NIG-2011;Clade II)__AIT17404__GPCmut3 (opt5)
aggagagucccgcagucggcguccagcggcucugcuuguucgugugugugucguugcaggccuuauucaagcuuaccaugggccagaucauuaccuucuuucaagaggugccccacgucaucgaagagguuaugaacauugugcugaucgcccucagccugcuugcuauucugaaggggaucuacaauguggccacaugcggacucuucggccuggucuccuuucuucugcucugugggagaucuugcagcacgaccuauaaaggaguguacgaacugcagacacuggagcucgacauggcgucccugaacaugaccaugccucuuucuuguacaaagaauaacagccaucacuauaucaugguuggcaaugaaaccgggcuggagcucacacugaccaacacguccauuaucaaucauaaauucugcaaccuuucugaugcucacaagaaaaaucuguacgaccaugcccucaugagcauuaucuccaccuuucaccugagcauuccgaacuucaaucaguaugaggccaugucuugugauuuuaacggaggcaagaucuccgugcaguacaaucugagccacgcuuaugccgucgacgcugccaaccauugcggcacaauugcgaauggggugcuccaaaccuucaugcggauggccuggggaggcucuuacaucgcucuggauuccgggaagggaagcugggacuguaucaugacaucuuaccaguaucuuauuauccagaacaccacgugggaagaucacugccaguuuucccgccccagcccuauuggcuaccuggggcuccugucccaaagaacacgggacaucuauauuucucgcagacggcgcggaaccuucacauggacccuuagcgauuccgagggcaacgaaacccccggcggguacugucugacaagauggaugcucaucgaggccgagcugaaaugcuuuggaaauacggcuguugccaaguguaacgaaaaacaugacgaggaguucugcgauaugcugcggcucuuugacuucaauaagcaggcgauccgcagacugaaaaccccugcccagaugagcauucagcuuaucaacaaggcugugaaugcccugauuaacgaucaacucaucaugaagaaucaucugcgggacauuaugggcauccccuauugcaacuacucuaaauauuguuaccuuaaucacacagucaccgggaagacaucccugccucgcugcugucucgugagcaacggaucuuaccugaaugaaacccacuucagcgacgauaucgaacagcaggcugacaacaugauuacggagcugcuccaaaaagaguauauggauagacagggcaagacaccgcuggggcuuguggaccuguuugucuucuccaccucuuuuuaccucaucagcauuuuccugcaccugaucaaaauucccacccaucggcacaucacaggaaagccuugccccaaaccucaucgccuuaaucacaugggcauuuguuccugcggccucuauaagcaccccgggguuccggugaaguggaaaagaugaggacuaguaauaaggaaacuguaugaaugucugugggcaggaagugaagagauccuucuguaaagguuuuuggaauuaugucugcugaauaauaaacuuuuuugaaauaauaaaucugguagaaaaaugagaucucaaaggcucuuuucagagccaccaaaaaaaaaaaaaaaaaaaaaaaaaaaaaaaaaaaaaaaaaaaaaaaaaaaaaaaaaaaaaaaaaaaaaaaaaaaaaaaaaaaaaaaaaaaaaaaaaaaaa

SEQ ID NO: 25806 - RNA, 1809 nt, Artificial Sequence
  mRNA product Design b-4 (hSL-A100) comprising derived and/or modified sequence from LASV(ISTH2010-NIG-2012;Clade II)__AIT17482__GPCmut3 (opt5)
aggagagucccgcagucggcguccagcggcucugcuuguucgugugugugucguugcaggccuuauucaagcuuaccaugggccagaucauuaccuucuuucaagaggugccccacgucaucgaagagguuaugaacauugugcugaucgcccucagccugcuugcuauucugaaggggaucuacaauguggccacaugcggacucuucggccuggucuccuuucuucugcucugugggagaucuugcagcacgaccuauaaaggaguguacgaacugcagacacuggagcucgacauggcgucccugaacaugaccaugccucuuucuuguacaaagaauaacagccaucacuauaucaugguuggcaaugaaaccgggcuggagcucacacugaccaacacguccauuaucaaucauaaauucugcaaccuuucugaugcucacaagaaaaaucuguacgaccaugcccucaugagcauuaucuccaccuuucaccugagcauuccgaacuucaaucaguaugaggccaugucuugugauuuuaacggaggcaagaucuccgugcaguacaaucugagccacgcuuaugccgucgacgcugccaaccauugcggcacaauugcgaauggggugcuccaaaccuucaugcggauggccuggggaggcucuuacaucgcucuggauuccgggaagggaagcugggacuguaucaugacaucuuaccaguaucuuauuauccagaacauuaccugggaagaucacugccaguuuucccgccccagcccuaucggcuaccuggggcuccugucccaaagaacgcgggacauuuauaucucucgcagacggcgcggaacauucaccuggacacuuagcgauuccgagggcaacgaaacccccggcggguacugucugaccagauggaugcucaucgaggccgagcugaaaugcuuuggaaauacagcuguugccaaguguaacgaaaaacaugacgaggaguucugcgauaugcugcggcucuuugacuucaauaagcaggcgauucgcagacugaaaacgccugcccagaugagcauccagcuuauuaacaaggcugugaaugcccugaucaacgaucaacucauuaugaagaaucaucugcgggacaucaugggcauccccuauugcaacuacucuaaauauuguuaccuuaaucacaccgucacagggaagaccucccugccucgcugcugucucgugagcaacggaucuuaccugaaugaaacacacuucagcgacgauauugaacagcaggcugacaacaugaucaccgagcugcuccaaaaagaguauauugauagacagggcaagacgccgcuggggcuuguggaccuguuugucuucuccacaucuuuuuaccucaucagcauuuuccugcaccugguuaaaauccccacccaucggcacguggugggaaagccuugccccaaaccucaucgccuuaaucacaugggcauuuguuccugcggccucuauaagcaccccggggucccggugaaguggaaaagaugaggacuaguaauaaggaaacuguaugaaugucugugggcaggaagugaagagauccuucuguaaagguuuuuggaauuaugucugcugaauaauaaacuuuuuugaaauaauaaaucugguagaaaaaugagaucucaaaggcucuuuucagagccaccaaaaaaaaaaaaaaaaaaaaaaaaaaaaaaaaaaaaaaaaaaaaaaaaaaaaaaaaaaaaaaaaaaaaaaaaaaaaaaaaaaaaaaaaaaaaaaaaaaaaa

SEQ ID NO: 25807 - RNA, 1809 nt, Artificial Sequence
  mRNA product Design b-4 (hSL-A100) comprising derived and/or modified sequence from LASV(Lassa virus/H.sapiens-wt/NGA/2015/ISTH_0543;Clade II)__AVO03639__GPCmut3 (opt5)
aggagagucccgcagucggcguccagcggcucugcuuguucgugugugugucguugcaggccuuauucaagcuuaccaugggccagaucauuaccuucuuucaagaggugccccacgucaucgaagagguuaugaacauugugcugaucgcccucagccugcuugcuauucugaaggggaucuacaauguggccacaugcggacucuucggccuggucuccuuucuucugcucugugggagaucuugcagcacgaccuauaaaggaguguacgaacugcagacacuggagcucgacauggcgaaccugaauaugaccaugccucuuuccuguacaaagaacaauucucaucacuauaucaugguuggcaacgaaaccgggcuggagcucacacugaccaauacgagcauuaucaaccauaaauucugcaaucuuuccgaugcucacaagaaaaaccuguacgaccaugcccucaugucuauuaucagcaccuuucaccuguccauuccgaauuucaaccaguaugaggccaugagcugugauuuuaauggaggcaagaucucugugcaguacaaccugucccacacauaugcugucgacgccgcuaaucauugcggcaccauugccaacggggugcuccaaacauucaugcggauggcguggggaggcagcuacaucgcccuggauucugggaagggauccugggacuguaucaugaccagcuaccaguaucuuguuauucagaacacgacaugggaagaucacugccaguuuucucgccccuccccuaucggcuaccuggggcuccugagccaaagaacccgggacauuuauaucucccgcagacggcgcggaacauucaccuggacccuuucugauagcgagggcaaugaaacacccggcggguacugucugacgagauggaugcucauugaggcugagcugaaaugcuuuggaaacaccgccguggcuaaguguaaugaaaaacaugacgaggaguucugcgauaugcugcggcucuuugacuucaacaagcaggccauccgcagacugaaaaccccugcgcagauguccauccagcuuauuaauaaggccgucaacgcucugaucaaugaucaacucauuaugaagaaccaucugcgggacaucaugggcauucccuauugcaauuacagcaaauauuguuaccuuaaccacacagugacagggaagaccucucugccucgcugcugucucguguccaauggaagcuaccugaacgaaacgcacuucucugacgauaucgaacagcaggccgacaauaugaucacagagcugcuccaaaaagaguauauugauagacagggcaagaccccgcuggggcuugucgaccuguuuguuuucagcaccuccuuuuaccucaucucuauuuuccugcaccuggugaaaauccccacacaucggcacauuaccggaaagccuugccccaaaccucaucgccuuaaccacaugggcaucuguagcugcggccucuauaagcaccccggggugccggucaaguggaaaagaugaggacuaguaauaaggaaacuguaugaaugucugugggcaggaagugaagagauccuucuguaaagguuuuuggaauuaugucugcugaauaauaaacuuuuuugaaauaauaaaucugguagaaaaaugagaucucaaaggcucuuuucagagccaccaaaaaaaaaaaaaaaaaaaaaaaaaaaaaaaaaaaaaaaaaaaaaaaaaaaaaaaaaaaaaaaaaaaaaaaaaaaaaaaaaaaaaaaaaaaaaaaaaaaaa

SEQ ID NO: 25808 - RNA, 1809 nt, Artificial Sequence
  mRNA product Design b-4 (hSL-A100) comprising derived and/or modified sequence from LASV(Lassa virus/H.sapiens-wt/NGA/2016/ISTH_0009;Clade II)__AVO03571__GPCmut3 (opt5)
aggagagucccgcagucggcguccagcggcucugcuuguucgugugugugucguugcaggccuuauucaagcuuaccaugggccagaucauuaccuucuuucaagaggugccccacgucaucgaagagguuaugaacauugugcugaucgcccucagccugcuugcuauucugaaggggaucuacaauguggccacaugcggacuccugggccuugucuccuuccugcuccugugugggagaucuugcagcacgaccuauaaaggaguguacgaacugcagacacucgagcuggacauggcgucccuuaacaugaccaugccucugucuuguacaaagaauaacagccaucacuauaucaugguuggcaaugaaaccgggcucgagcugacacuuaccaacacguccauuaucaaucauaaauuuugcaaccugucugaugcucacaagaaaaaucucuacgaccaugcccugaugagcauuaucuccaccuuccaccugagcauuccgaacuuuaaucaguaugaggccaugucuugugauuucaacggaggccggaucuccgugcaguacaaucucagccacucuuaugcugucgacgccgcuaaccauugcggcacaauugccaauggggugcugcaaaccuuuaugcgcauggcguggggaggcuccuacaucgcccuugauagcgggaagggaucuugggacuguaucaugacauccuaccaguaucugauuauccagaacaccacgugggaagaucacugccaguucagcagacccuccccuauuggcuaccucgggcugcuuucucaacggacacgcgacaucuauauuagcagacggcgcagaggaaccuuuacauggacccuguccgauagcgagggcaacgaaacccccggcggguacugucucacacgguggaugcugaucgaggcugagcugaagugcuucggaaauacggccguugcuaaauguaacgaaaagcaugacgaggaauuuugcgauaugcuccgccuguucgacuuuaauaaacaggccaucagacggcuuaagaccccugcgcagaugucuauucagcugaucaacaaagccgugaaugcucucauuaacgaucaacugaucaugaagaaucaccuucgcgacauuaugggcauccccuauugcaacuacuccaaguauuguuaccugaaucacacagucaccgggaaaacaagccucccuagaugcugucuggugucuaacggaagcuaccugaaugagacccauuucuccgacgauaucgaacagcaggccgacaacaugauuacggagcuccugcaaaaggaguauaucgaucggcagggcaaaacaccgcuugggcugguggaccucuucgucuuuucuaccagcuucuaccugauuuccaucuuucugcaccuuguuaagauucccacccaucgccacaucacaggaaaaccuugccccaagccucauagacucaaucacaugggcauuuguagcugcggccuguauaaccaccccggggugccggugaaauggaagcggugaggacuaguaauaaggaaacuguaugaaugucugugggcaggaagugaagagauccuucuguaaagguuuuuggaauuaugucugcugaauaauaaacuuuuuugaaauaauaaaucugguagaaaaaugagaucucaaaggcucuuuucagagccaccaaaaaaaaaaaaaaaaaaaaaaaaaaaaaaaaaaaaaaaaaaaaaaaaaaaaaaaaaaaaaaaaaaaaaaaaaaaaaaaaaaaaaaaaaaaaaaaaaaaaa

SEQ ID NO: 25809 - RNA, 1809 nt, Artificial Sequence
  mRNA product Design b-4 (hSL-A100) comprising derived and/or modified sequence from LASV(Lassa virus/H.sapiens-wt/NGA/2016/ISTH_0017;Clade II)__AVO03567__GPCmut3 (opt5)
aggagagucccgcagucggcguccagcggcucugcuuguucgugugugugucguugcaggccuuauucaagcuuaccaugggccagaucauuaccuucuuucaagaggugccccacgucaucgaagagguuaugaacauugugcugaucgcccucagccugcuugcuauucugaaggggaucuacaauguggccacaugcggacucuucggccuggucuccuuucuucugcucugugggagaucuugcagcacgaccuauaaaggaguguacgaacugcagacacuggagcucgacauggcgucccugaacaugaccaugccucuuucuuguacaaagaauaacagccaucacuauaucaugguuggcaaugaaaccgggcuggagcucacacugaccaacacguccauuaucaaucauaaauucugcaaccuuucugaugcucacaagaaaaaucuguacgaccaugcccucaugagcauuaucuccaccuuucaccugagcauuccgaacuucaaucaguaugaggccaugucuugugauuuuaacggaggcaagaucuccgugcaguacaaucugagccacacauaugcuauugacgccgcuaaccauugcggcaccaucgccaaugggguccuccaaacauucaugcggauggcguggggaggcucuuacaucgcccuggauuccgggaagggaagcugggacuguauuaugaccucuuaccaguaucuuaucauucagaacacgacaugggaagaucacugccaguuuucccgccccagcccuaucggcuaccuggggcuccugucccaaagaacccgggacauuuauaucucucgcagacggcgcggaacauucaccuggacccuuagcgauuccgagggcaacgaaacacccggcggguacugucugacgagauggaugcucaucgaggcugagcugaaaugcuuuggaaauaccgccguggcuaaguguaacgaaaaacaugacgaggaguucugcgauaugcugcggcucuuugacuucaauaagcaggccauucgcagacugaaaaccccugcgcagaugagcauccagcuuauuaacaaggccguuaaugcucugaucaacgaucaacucauuaugaagaaucaucugcgggacaucaugggcauccccuauugcaacuacucuaaauauuguuaccuuaaucacacagugacagggaagaccucccugccucgcugcugucucgucagcaacggaucuuaccugaaugaaacgcacuucagcgacgauauugaacagcaggccgacaacaugaucacagagcugcuccaaaaagaguauauggauagacagggcaagaccccgcuggggcuuguggaccuguuuguguucuccaccucuuuuuaccucauuagcaucuuccugcaccugguccggauucccacacaucgccacguuaucggaaaaccuugccccaagccucauagacuuaaucacaugggcauuuguuccugcggccucuauaaacaccccggggugccggugaaguggaagcggugaggacuaguaauaaggaaacuguaugaaugucugugggcaggaagugaagagauccuucuguaaagguuuuuggaauuaugucugcugaauaauaaacuuuuuugaaauaauaaaucugguagaaaaaugagaucucaaaggcucuuuucagagccaccaaaaaaaaaaaaaaaaaaaaaaaaaaaaaaaaaaaaaaaaaaaaaaaaaaaaaaaaaaaaaaaaaaaaaaaaaaaaaaaaaaaaaaaaaaaaaaaaaaaaa

SEQ ID NO: 25810 - RNA, 1809 nt, Artificial Sequence
  mRNA product Design b-4 (hSL-A100) comprising derived and/or modified sequence from LASV(Lassa virus/H.sapiens-wt/NGA/2018/ISTH_0959;Clade II)__AVV65099__GPCmut3 (opt5)
aggagagucccgcagucggcguccagcggcucugcuuguucgugugugugucguugcaggccuuauucaagcuuaccaugggccagaucauuaccuucuuucaagaggugccccacgucaucgaagagguuaugaacauugugcugaucgcccucagccugcuugcuauucugaaggggaucuacaauguggucacaugcggacucuucggccugguguccuuucuucugcucugugggagaucuugcagcacgaccuauaaaggaguuuacgaacugcagacacuggagcucgacauggccucccugaacaugaccaugccucuuucuuguacaaagaauaacagccaucacuauaucauggugggcaaugaaaccgggcuggagcucacacugaccaacacguccauuaucaaucauaaauucugcaaccuuucugaugcgcacaagaaaaaucuguacgaccaugcucucaugagcauuaucuccaccuuucaccugagcauuccgaacuucaaucaguaugaggccaugucuugugauuuuaacggaggcaagaucuccguccaguacaaucugagccacgccuaugcuauugacgccgcuaaccauugcggcacaaucgccaauggggugcuccaaaccuucaugcggauggcguggggaggcucuuacaucgcccuggauuccgggaagggaagcugggacuguauuaugacaucuuaccaguaucuuaucauucagaacaccacgugggaagaucacugccaguuuucccgccccagcccuaucggcuaccuggggcuccugucccaaagaacacgggacauuuauaucucucgcagacggcgcggaaccuucacauggacccuuagcgauuccgagggcaacgaaacccccggcggguacugucugacaagauggaugcucaucgaggcugagcugaaaugcuuuggaaauacggccguugcuaaguguaacgaaaaacaugacgaggaguucugcgauaugcugcggcucuuugacuucaauaagcaggccauucgcagacugaaaaccccugcgcagaugagcauccagcuuauuaacaaggccgugaaugcucugaucaacgaucaacucauuaugaagaaucaucugcgggacaucaugggcauccccuauugcaacuacucuaaauauuguuaccuuaaucacacagucaccgggaagacaucccugccucgcugcugucucgugagcaacggaucuuaccugaaugaaacccacuucagcgacgauauugaacagcaggccgacaacaugaucacggagcugcuccaaaaagaguauauugauagacagggcaagacaccgcuggggcuuguggaccuguuugucuucuccaccucuuuuuaccucaucagcauuuuccugcaccugguuaaaauccccacccaucggcacgugauuggaaagccuugccccaaaccucaucgccuuaaucacaugggcaucuguuccugcggccucuauaagcaccccggggugccggucaaguggaaaagaugaggacuaguaauaaggaaacuguaugaaugucugugggcaggaagugaagagauccuucuguaaagguuuuuggaauuaugucugcugaauaauaaacuuuuuugaaauaauaaaucugguagaaaaaugagaucucaaaggcucuuuucagagccaccaaaaaaaaaaaaaaaaaaaaaaaaaaaaaaaaaaaaaaaaaaaaaaaaaaaaaaaaaaaaaaaaaaaaaaaaaaaaaaaaaaaaaaaaaaaaaaaaaaaaa

SEQ ID NO: 25811 - RNA, 1809 nt, Artificial Sequence
  mRNA product Design b-4 (hSL-A100) comprising derived and/or modified sequence from LASV(LASV003-NIG-2008;Clade II)__AIT17580__GPCmut3 (opt5)
aggagagucccgcagucggcguccagcggcucugcuuguucgugugugugucguugcaggccuuauucaagcuuaccaugggccagaucauuaccuucuuucaagaggugccccacgucaucgaagagguuaugaacauugugcugaucgcccucagccugcuugcuauucugaaggggaucuacaauguggccacaugcggacucuucggccuggucuccuuucuucugcucugugggagaucuugcagcacgaccuauaaaggaguguacgaacugcagacacuggagcucgacauggcgucccugaacaugaccaugccucuuucuuguacaaagaauaacagccaucacuauaucaugguuggcaaugaaaccgggcuggagcucacacugaccaacacguccauuaucaaucauaaauucugcaaccuuucugaugcucacaagaaaaaucuguacgaccaugcccucaugagcauuaucuccaccuuucaccugagcauuccgaacuucaaucaguaugaggccaugucuugugauuuuaacggaggcaagaucuccgugcaguacaaucugagccacacauaugcugucgacgccgcuaaccauugcggcaccauugccaauggggugcuccaaacauucaugcggauggcguggggaggcucuuacaucgcccuggauuccgggaagggaagcugggacuguaucaugaccucuuaccaguaucuuauuauccagaacacgacaugggaagaucacugccaguuuucccgccccagcccuauuggcuaccuggggcuccugucccaaagaacccgggacaucuauauuucucgcagacggcgcggaacauucaccuggacccuuagcgauuccgagagcaacgaaacacccggcggcuacugucugacgagauggaugcucaucgaggcugagcugaaaugcuuugggaauaccgccguugcuaaguguaacgaaaaacaugacgaggaguucugcgauaugcugcggcucuuugacuucaauaagcaggccauccgcagacugaaagcgccugcccagaugucuauucagcuuaucaacaaggcugugaaugcccugauuaacgaucaacucaucaugaagaaucaucugcgggacauuaugggaauccccuauugcaacuacuccaaauauuguuaccuuaaucacacagucaccggccgcacaagccugccuagaugcugucucgugucuaacgggagcuaccugaaugaaacccacuucuccgacgauaucgaacagcaggcugacaacaugauuacggagcugcuccaaaaggaguauauggaucggcagggaaaaacaccgcugggccuuguggaccuguuugucuucucuaccagcuuuuaccucaucuccauuuuccugcaccugguuaagauccccacccaucgccacgugauugggaaaccuugccccaagccucauagacuuaaucacaugggaaucuguagcugcggccucuauaaacaccccggcgugccggucaaguggaagcggugaggacuaguaauaaggaaacuguaugaaugucugugggcaggaagugaagagauccuucuguaaagguuuuuggaauuaugucugcugaauaauaaacuuuuuugaaauaauaaaucugguagaaaaaugagaucucaaaggcucuuuucagagccaccaaaaaaaaaaaaaaaaaaaaaaaaaaaaaaaaaaaaaaaaaaaaaaaaaaaaaaaaaaaaaaaaaaaaaaaaaaaaaaaaaaaaaaaaaaaaaaaaaaaaa

SEQ ID NO: 25812 - RNA, 1809 nt, Artificial Sequence
  mRNA product Design b-4 (hSL-A100) comprising derived and/or modified sequence from LASV(LASV035-NIG-2009;Clade II)__AIT17588__GPCmut3 (opt5)
aggagagucccgcagucggcguccagcggcucugcuuguucgugugugugucguugcaggccuuauucaagcuuaccaugggccagaucauuaccuucuuucaagaggugccccacgucaucgaagagguuaugaacauugugcugaucgcccucagccugcuugcuauucugaaggggaucuacaauguggccacaugcggacucuucggccuggucuccuuucuucugcucugugggagaucuugcagcacgaccuauaaaggaguguacgaacugcagacacuggagcucgacauggcgucccugaacaugaccaugccucuuucuuguacaaagaauaacagccaucacuauaucaugguuggcaaugaaaccgggcuggagcucacacugaccaacacguccauuaucaaucauaaauucugcaaccuuucugaugcucacaagaaaaaucuguacgaccaugcccucaugagcauuaucuccaccuuucaccugagcauuccgaacuucaaucaguaugaggccaugucuugugauuuuaacggaggcaagaucuccgugcaguacaaucugagccacgcuuaugccgucgacgcugccaaccauugcggcacaauugcgaauggggugcuccaaaccuucaugcggauggccuggggaggcucuuacaucgcucuggauuccgggaagggaagcugggacuguaucaugacaucuuaccaguaucuuauuauccagaacaccacgugggaagaucacugccaguuuucccgccccagcccuauuggcuaccuggggcuccugucccaaagaacacgggacaucuauauuucucgcagacggcgcggaaccuucacauggacccuuagcgauuccgagggcaacgaaacccccggcggguacugucugacaagauggaugcucaucgaggccgagcugaaaugcuuuggaaauacggcuguugccaaguguaacgaaaaacaugacgaggaguucugcgauaugcugcggcucuuugacuucaauaagcaggcgauccgcagacugaaagccccugcucagaugagcauucagcuuaucaacaaggccgugaaugcucugauuaacgaucaacucaucaugaagaaucaucugcgggacauuaugggcauccccuauugcaacuacucuaaauauuguuaccuuaaucacaccgucacagggaagaccucccugccucgcugcugucucgugagcaacggaucuuaccugaaugaaacacacuucagcgacgauaucgaacagcaggccgacaacaugauuaccgagcugcuccaaaaagaguauaucgauagacagggcaagacgccgcuggggcuuguggaccuguuugucuucuccacaucuuuuuaccucauuagcaucuuccugcaccugguuaaaauucccacccaucggcacgugaucggaaagccuugccccaaaccucaucgccuuaaucacaugggcauuuguuccugcggccucuauaagcaccccggggugccggucaaguggaaaagaugaggacuaguaauaaggaaacuguaugaaugucugugggcaggaagugaagagauccuucuguaaagguuuuuggaauuaugucugcugaauaauaaacuuuuuugaaauaauaaaucugguagaaaaaugagaucucaaaggcucuuuucagagccaccaaaaaaaaaaaaaaaaaaaaaaaaaaaaaaaaaaaaaaaaaaaaaaaaaaaaaaaaaaaaaaaaaaaaaaaaaaaaaaaaaaaaaaaaaaaaaaaaaaaaa

SEQ ID NO: 25813 - RNA, 1809 nt, Artificial Sequence
  mRNA product Design b-4 (hSL-A100) comprising derived and/or modified sequence from LASV(LASV1000-NIG-2009;Clade II)__AIT17782__GPCmut3 (opt5)
aggagagucccgcagucggcguccagcggcucugcuuguucgugugugugucguugcaggccuuauucaagcuuaccaugggccagaucauuaccuucuuucaagaggugccccacgucaucgaagagguuaugaacauugugcugaucgcccucagccugcuugcuauucugaaggggaucuacaauguggccacaugcggacucuucggccuggucuccuuucuucugcucugugggagaucuugcagcacgaccuauaaaggaguguacgaacugcagacacuggagcucgacauggcgucccugaacaugaccaugccucuuucuuguacaaagaauaacagccaucacuauaucaugguuggcaaugaaaccgggcuggagcucacacugaccaacacguccauuaucaaucauaaauucugcaaccuuucugaugcucacaagaaaaaucuguacgaccaugcccucaugagcauuaucuccaccuuucaccugagcauuccgaacuucaaucaguaugaggccaugucuugugauuuuaacggaggcaagaucuccgugcaguacaaucugagccacacauaugcugucgacgccgcuaaccauugcggcaccauugccaauggggugcuccaaacauucaugcggauggcguggggaggcucuuacaucgcccuggauuccgggaagggaagcugggacuguaucaugaccucuuaccaguaucuuauuauccagaacacgacaugggaagaucacugccaguuuucccgccccagcccuauuggcuaccuggggcuccugucccaaagaacccgggacaucuauauuucucgcagacggcgcggaacauucaccuggacccuuagcgauuccgagggcaacgaaacacccggcggguacugucugacgagauggaugcucaucgaggcugagcugaaaugcuuuggaaauaccgccguugcuaaguguaacgaaaaacaugacgaggaguucugcgauaugcugcggcucuuugacuucaauaagcaggccaucaaacgccugaagaccccugcgcagaugagcauucagcuuaucaacaaggccgugaaugcucugauuaacgaucaacucaucaugaaaaaucaccugagagacauuaugggcauccccuauugcaacuacucuaaguauuguuaccuuaaucacacagucacagggaaaaccucccugccucggugcugucucgugagcaacggaucuuaccugaaugaaacgcauuucagcgacgauaucgaacagcaggccgacaacaugauuacagagcugcuccaaaaggaguauaucgaucgccagggcaaaaccccgcuggggcuuguggaccuguuugucuucuccaccucuuuuuaccucauuagcaucuuccugcaccugguuaagauucccacacauagacacguggugggaaaaccuugccccaagccucaucggcuuaaucacaugggcaucuguuccugcggccucuauaagcaccccggggucccggugaaauggaagcgcugaggacuaguaauaaggaaacuguaugaaugucugugggcaggaagugaagagauccuucuguaaagguuuuuggaauuaugucugcugaauaauaaacuuuuuugaaauaauaaaucugguagaaaaaugagaucucaaaggcucuuuucagagccaccaaaaaaaaaaaaaaaaaaaaaaaaaaaaaaaaaaaaaaaaaaaaaaaaaaaaaaaaaaaaaaaaaaaaaaaaaaaaaaaaaaaaaaaaaaaaaaaaaaaaa

SEQ ID NO: 25814 - RNA, 1809 nt, Artificial Sequence
  mRNA product Design b-4 (hSL-A100) comprising derived and/or modified sequence from LASV(LASV221-NIG-2010;Clade II)__AIT17624__GPCmut3 (opt5)
aggagagucccgcagucggcguccagcggcucugcuuguucgugugugugucguugcaggccuuauucaagcuuaccaugggccagaucauuaccuucuuucaagaggugccccacgucaucgaagagguuaugaacauugugcugaucgcccucagccugcuugcuauucugaaggggaucuacaauguggccacaugcggacucuucggccuggucuccuuucuucugcucugugggagaucuugcagcacgaccuauaaaggaguguacgaacugcagacacuggagcucgacauggcgucccugaacaugaccaugccucuuucuuguacaaagaauaacagccaucacuauaucaugguuggcaaugaaaccgggcuggagcucacacugaccaacacguccauuaucaaucauaaauucugcaaccuuucugaugcucacaagaaaaaucuguacgaccaugcccucaugagcauuaucuccaccuuucaccugagcauuccgaacuucaaucaguaugaggccaugucuugugauuuuaacggaggcaagaucuccgugcaguacaaucugagccacacauaugcuauugacgccgcuaaccauugcggcaccaucgccaaugggguccuccaaacauucaugcggauggcguggggaggcucuuacaucgcccuggauuccgggaagggaagcugggacuguauuaugaccucuuaccaguaucuuaucauucagaacacgacaugggaagaucacugccaguuuucccgccccagcccuaucggcuaccuggggcuccugucccaaagaacccgggacauuuauaucucucgcagacggcgcggaacauucaccuggacccuuagcgauuccgagggcaacgaaacacccggcggguacugucugacgagauggaugcucaucgaggcugagcugaaaugcuuuggaaauaccgccguggcuaaguguaacgaaaaacaugacgaggaguucugcgauaugcugcggcucuuugacuucaauaagcaggccauucgcagacugaaaaccccugcgcagaugagcauccagcuuauuaacaaggccguuaaugcucugaucaacgaucaacucauuaugaagaaucaucugcgggacaucaugggcauccccuauugcaacuacucuaaauauuguuaccuuaaucacacagugacagggaagaccucccugccucgcugcugucucgucagcaacggaucuuaccugaaugaaacgcacuucagcgacgauauugaacagcaggccgacaacaugaucacagagaugcugcaaaaagaguauauggauagacagggcaagaccccgcucgggcugguggaccuuuuuguguucuccaccucuuuuuaccugauuagcaucuuccuccaccuggucaaaauucccacacaucggcacguuaucggaaagccuugccccaaaccucaucgccugaaucacaugggcauuuguuccugcggccuuuauaagcaccccggggugccggugaaguggaaaagaugaggacuaguaauaaggaaacuguaugaaugucugugggcaggaagugaagagauccuucuguaaagguuuuuggaauuaugucugcugaauaauaaacuuuuuugaaauaauaaaucugguagaaaaaugagaucucaaaggcucuuuucagagccaccaaaaaaaaaaaaaaaaaaaaaaaaaaaaaaaaaaaaaaaaaaaaaaaaaaaaaaaaaaaaaaaaaaaaaaaaaaaaaaaaaaaaaaaaaaaaaaaaaaaaa

SEQ ID NO: 25815 - RNA, 1809 nt, Artificial Sequence
  mRNA product Design b-4 (hSL-A100) comprising derived and/or modified sequence from LASV(LASV237-NIG-2010;Clade II)__AIT17638__GPCmut3 (opt5)
aggagagucccgcagucggcguccagcggcucugcuuguucgugugugugucguugcaggccuuauucaagcuuaccaugggccagaucauuaccuucuuucaagaggugccccacgucaucgaagagguuaugaacauugugcugaucgcccucagccugcuugcuauucugaaggggaucuacaauguggccacaugcggacucuucggccuggucuccuuucuucugcucugugggagaucuugcagcacgaccuauaaaggaguguacgaacugcagacacuggagcucgacauggcgucccugaacaugaccaugccucuuucuuguacaaagaauaacagccaucacuauaucaugguuggcaaugaaaccgggcuggagcucacacugaccaacacguccauuaucaaucauaaauucugcaaccuuucugaugcucacaagaaagaccuguacgaucaugcccucaugagcauuaucuccaccuuucaccugagcauuccgaauuucaaccaguaugaggccaugucuugugacuuuaauggaggcaagaucuccgugcaguacaaccugagccacacauaugcugucgaugccgcuaaucauugcggcaccauugccaacggggugcuccaaacauucaugcggauggcguggggaggcucuuacaucgcccuggacuccgggaagggaagcugggauuguaucaugaccucuuaccaguaucuuauuauccagaauacgacaugggaagaccacugccaguuuucccgccccagcccuauuggcuaccuggggcuccugucccaaagaacccgggauaucuauauuucucgcagacggcgcggaacauucaccuggacccuuagcgacuccgagggcaacgaaacacccggcggguacugucugacgagauggaugcucaucgaggcugagcugaaaugcuuuggaaacaccgccguugcuaaguguaaugaaaaacaugaugaggaguucugcgacaugcugcggcucuuugauuucaacaagcaggccauccgcagacugaaaaccccugcgcagaugagcauucagcuuaucaauaaggccgugaacgcucugauuaaugaccaacucaucaugaagaaccaucugcgggacauuaugggcauccccuauugcaauuacucuaaauauuguuaccuuaaccacacagucacagggaagaccucccugccucgcugcugucucgugagcaauggaucuuaccugaacgaaacgcacuucagcgaugacaucgaacagcaggccgauaauaugauuacagagcugcuccaaaaagaguauauggacagacagggcaagaccccgcuggggcuuguggaucuguuugucuucuccaccucuuuuuaccucaucagcauuuuccugcaccugaucaaaauucccacacaucggcacaucaccggaaagccuugccccaaaccucaucgccuuaaccacaugggcauuuguuccugcggccucuauaagcaccccgggguuccggugaaguggaaaagaugaggacuaguaauaaggaaacuguaugaaugucugugggcaggaagugaagagauccuucuguaaagguuuuuggaauuaugucugcugaauaauaaacuuuuuugaaauaauaaaucugguagaaaaaugagaucucaaaggcucuuuucagagccaccaaaaaaaaaaaaaaaaaaaaaaaaaaaaaaaaaaaaaaaaaaaaaaaaaaaaaaaaaaaaaaaaaaaaaaaaaaaaaaaaaaaaaaaaaaaaaaaaaaaaa

SEQ ID NO: 25816 - RNA, 1809 nt, Artificial Sequence
  mRNA product Design b-4 (hSL-A100) comprising derived and/or modified sequence from LASV(LASV253-NIG-2011;Clade II)__AIT17670__GPCmut3 (opt5)
aggagagucccgcagucggcguccagcggcucugcuuguucgugugugugucguugcaggccuuauucaagcuuaccaugggccagaucauuaccuucuuucaagaggugccccacgucaucgaagagguuaugaacauugugcugaucgcccucagccugcuugcuauucugaaggggaucuacaauguggccacaugcggacucuucggccuggucuccuuucuucugcucugugggagaucuugcagcacgaccuauaaaggaguguacgaacugcagacacuggagcucgacauggcgucccugaacaugaccaugccucuuucuuguacaaagaauaacagccaucacuauaucaugguuggcaaugaaaccgggcuggagcucacacugaccaacacguccauuaucaaucauaaauucugcaaccuuucugaugcucacaagaaaaaucuguacgaccaugcccucaugagcauuaucuccaccuuucaccugagcauuccgaacuucaaucaguaugaggccaugucuugugauuuuaacggaggcaagaucuccgugcaguacaaucugagccacacauaugcugucgacgccgcuaaccauugcggcaccauugccaauggggugcuccaaacauucaugcggauggcguggggaggcucuuacaucgcccuggauuccgggaagggaagcugggacuguaucaugaccucuuaccaguaucuuauuauccagaacacgacaugggaagaucacugccaguuuucccgccccagcccuauuggcuaccuggggcuccugucccaaagaacccgggacaucuauauuucucgcagacggcgcggaacauucaccuggacccuuagcgauuccgagggcaacgaaacacccggcggguacugucugacgagauggaugcucaucgaggcugagcugaaaugcuuuggaaauaccgccguugcuaaguguaacgaaaaacaugacgaggaguucugcgauaugcugcggcucuuugacuucaauaagcaggccauccgcagacugaaagcgccugcccagaugagcauucagcuuaucaacaaggcugugaaugcccugauuaacgaucaacucaucaugaagaaucaucugcgggacauuaugggcauccccuauugcaacuacucuaaauauuguuaccuuaaucacacagucaccgggcgcacaucccugccuagaugcugucucgugagcaacggaucuuaccugaaugaaacccacuucagcgacgauaucgaacagcaggcugacaacaugauuacggagcugcuccaaaaggaguauaucgaucggcagggcaaaacaccgcuggggcuuguggaccuguuugucuucuccaccucuuuuuaccucauuagcaucuuccugcaccugguuaagauucccacccaucgccacaucauuggaaaaccuugccccaagccucauagacuuaaucacaugggcaucuguuccugcggccucuauaaacaccccggggugccggugaaguggaagcggugaggacuaguaauaaggaaacuguaugaaugucugugggcaggaagugaagagauccuucuguaaagguuuuuggaauuaugucugcugaauaauaaacuuuuuugaaauaauaaaucugguagaaaaaugagaucucaaaggcucuuuucagagccaccaaaaaaaaaaaaaaaaaaaaaaaaaaaaaaaaaaaaaaaaaaaaaaaaaaaaaaaaaaaaaaaaaaaaaaaaaaaaaaaaaaaaaaaaaaaaaaaaaaaaa

SEQ ID NO: 25817 - RNA, 1809 nt, Artificial Sequence
  mRNA product Design b-4 (hSL-A100) comprising derived and/or modified sequence from LASV(LASV254-NIG-2011;Clade II)__AIT17674__GPCmut3 (opt5)
aggagagucccgcagucggcguccagcggcucugcuuguucgugugugugucguugcaggccuuauucaagcuuaccaugggccagaucauuaccuucuuucaagaggugccccacgucaucgaagagguuaugaacauugugcugaucgcccucagccugcuugcuauucugaaggggaucuacaauguggccacaugcggacucuucggccuggucuccuuucuucugcucugugggagaucuugcagcacgaccuauaaaggaguguacgaacugcagacacuggagcucgacaugaccaaccugaauaugacaaugccucuuuccuguaccaagaacaauucucaucacuauaucaugguuggcaacgaaacagggcuggagcucacccugacgaauaccagcauuaucaaccauaaauucugcaaucuuuccgaugcgcacaagaaaaaccuguacaaucaugcucucaugucuauuaucagcacauuucaccuguccauuccgaacuucaaucaguaugaggccaugagcugugacuuuaacggaggcaagaucucugugcaguacaaucugucccacagcuaugccgucgaugcugccaaccauugcggcaccauugcuaacggggugcuccaaacauucaugcggauggccuggggaggcucuuacaucgcgcuggacuccgggaagggaaauugggauuguaucaugaccagcuaccaguaucuuauuauccagaacacgacaugggaagaccacugccaguuuucucgccccuccccuauuggcuaccuggggcuccugagccaaagaacccgggauaucuauauuucccgcagacggcgcggaacauucaccuggacccuuucugacagcgagggcaaugaaacacccggcggguacugucugacgagauggaugcucaucgaggccgagcugaaaugcuuuggaaacaccgcuguugccaaguguaaugaaaaacaugaugaggaguucugcgacaugcugcggcucuuugauuucaacaagcaggcuauccgcagacugaaaaccccugcccaggcgaauauucagcuuaucaacaaggccgugaaugcucugauuaacgaccaacucaucaugaagaaucaucugcgggauauuaugggcauccccuauugcaacuacuccaaauauuguuaccuuaaucacacagucacagggaagaccagccugccucgcugcugucucgugucuaacggauccuaccugaaugaaacgcacuucagcgacgacaucgaacagcaggccgauaacaugauuacagagcugcuccaaaaagaguauauggacagacagggcaagaccccgcuggggcuuguggaucuguuugucuucucuaccagcuuuuaccucaucuccauuuuccugcaccugguuaaaauccccacacaucggcacgugauuggaaagccuugccccaaaccucaucgccuuaaccacaugggcaucuguucuugcggccucuauaagcaccccggggugccggucaaguggaaaagaugaggacuaguaauaaggaaacuguaugaaugucugugggcaggaagugaagagauccuucuguaaagguuuuuggaauuaugucugcugaauaauaaacuuuuuugaaauaauaaaucugguagaaaaaugagaucucaaaggcucuuuucagagccaccaaaaaaaaaaaaaaaaaaaaaaaaaaaaaaaaaaaaaaaaaaaaaaaaaaaaaaaaaaaaaaaaaaaaaaaaaaaaaaaaaaaaaaaaaaaaaaaaaaaaa

SEQ ID NO: 25818 - RNA, 1809 nt, Artificial Sequence
  mRNA product Design b-4 (hSL-A100) comprising derived and/or modified sequence from LASV(Nig08-A19;Clade III)__ADU56618__GPCmut3 (opt5)
aggagagucccgcagucggcguccagcggcucugcuuguucgugugugugucguugcaggccuuauucaagcuuaccaugggccagaucgugaccuucuuucaagaggucccccacguuauugaagaggugaugaacaucgugcugauugcccucagcauccuggcuauucuuaaggggcuguacaauaucgccacaugcggacucaucggccuggucacguuccuucugcucuccgggagaucuuguagcaugaccuauaaaggaguguacgaacugcagacacuggagcucaacaugaauacccugaacaugacaaugccucuuuccugcaccaagaauaacucucaucacuauauuaugguuggcaaugaaacagggcuggagcucacccugacgaacaccagccuucugcaucacaaauuuuguaaucucuccgacgcgcauaagaaaaaccuguacgaucacacacugaugucuaucauuagcaccuuccaccucuccaucccgaauuuuaaccaguaugaggcuaugagcugcgacuucaauggaggcaagauuacagugcaguacaaccugucucauuccuaugccaucgaugccgcuaaucacuguggcaccgucgccaacggggugcuucaaacguuuaugcggauggcuuggggaggcagcuacauugcccuggacucugggcgcggaaagugggauugcaucaugacauccuaccaguaucucaucauucagaacaccacaugggaagaccauugucaguucagcagacccucuccuaucggcuaccuggggcuucugucccaacggacccgcgauauuuauaucagcagacggcgcagaggaaccuuuacauggacgcucuccgacucugagggcaaugaaacccccggcggguacugccugacacgguggaugcugauugaggcggagcucaaauguuucggaaacaccgccguugcuaagugcaaugaaaaacacgaugaggaauuuugugacaugcugcgccuuuucgauuuuaacaagcaggccaucagacggcugaaagcuccugcccagaugagcauccagcucauuaauaaggcggugaacgcccugaucaaugaccaacuuauuaugaagaaccaucugcgcgauaucaugggcauucccuauugcaauuacuccaaauauugcuaccucaaccacacaagcaccgggagaacgucucugccucgguguugccuggucuccaauggaagcuaccucaacgagacacacuucucugacgacaucgaacagcaggcugauaauaugaucaccgagaugcugcaaaaggaguaucuugaccgccagggcaaaaccccgcuggggcucguggaucuguucguguuuagcacauccuucuaccugauuucuaucuuucuucaucucgucaagauucccacccacagacauaucguuggaaaaccuugucccaagccucaccggcugaaccacaugggcauuugcagcuguggccuguauaaacagcccggggugccggugagauggaagcgcugaggacuaguaauaaggaaacuguaugaaugucugugggcaggaagugaagagauccuucuguaaagguuuuuggaauuaugucugcugaauaauaaacuuuuuugaaauaauaaaucugguagaaaaaugagaucucaaaggcucuuuucagagccaccaaaaaaaaaaaaaaaaaaaaaaaaaaaaaaaaaaaaaaaaaaaaaaaaaaaaaaaaaaaaaaaaaaaaaaaaaaaaaaaaaaaaaaaaaaaaaaaaaaaaa

SEQ ID NO: 25819 - RNA, 1812 nt, Artificial Sequence
  mRNA product Design b-4 (hSL-A100) comprising derived and/or modified sequence from LASV(G1180-SLE-2010;Clade IV)__AIT17168__GPCmut3 (opt5)
aggagagucccgcagucggcguccagcggcucugcuuguucgugugugugucguugcaggccuuauucaagcuuaccaugggccagaucgugaccuucuuucaagaggucccccacguuauugaagaggugaugaacaucgugcugauugcccucagcauccuggcuguccuuaaggggcuguacaauuucgccacaugcggacucgugggccugcuuacguuucugcuccugugugggagauccugcaccgcgucucgguauaaaggaguuuacgaacugcagacacucgagcugaacauggaaacccuuaauaugacaaugccucugagcuguaccaagaacaauucccaucacuauauuauggugggcaacgagacagggcucgagcugacccuuacgaauaccucuaucaucaaccauaaauucugcaaucugagcgacgcucacaagaaaaaccucuacgaucaugcccugauguccauuaucucuacauuucaccugagcauuccgaauuucaaccaguaugaagccauguccugugacuuuaauggaggcaagaucagcguccaguacaaccucucucacuccuaugcuggcgaugccgcuaaucauugcgggaccguggccaacggaguucugcaaacauucaugcgcauggcguggggcgggagcuacauugcccuugacucuggacacggcuccugggauuguaucaugaccagcuaccaguaucugauuauccagaacacgacaugggaggaccauugccaguuuucuagacccuccccuaucggguaccucggacugcuuagccaacggacccgcgauauuuauaucuccagacggcgcagaggcacauucaccuggacccugucugacagcgaaggcaaggauacacccgggggauacugucucacgcgguggaugcugauugaggcugagcugaaaugcuuuggcaauaccgccguggcuaaguguaacgaaaaacacgacgaggaguucugcgauaugcuccgccuguuugacuucaauaagcaggccauccagagacuuaaagcgccugcccagauguccauucaacugaucaacaaggcugucaaugcccucaucaacgaucagcugauuaugaagaaucaccuucgggacaucauggggauucccuauugcaacuacagcaaauauuguuaccugaaucauacaaccacaggaaagaccucucucccuaaaugcugucugguguccaacggcagcuaccugaaugaaacgcacuucucugacgauaucgaacagcaagcugacaacaugauuacagagaugcuccagaaggaguauauggaacgccaggggaaaaccccgcugggacuuguggaucuguuugucuucagcaccuccuuuuaccucaucucuaucuuccugcaucugguuaagauucccacacacagacauaucgugggcaaaagcugcccuaagccccaccggcuuaaucacaugggcauuuguuccugcgggcucuauaagcagccuggagugcccgucaaauggaagcgcugaggacuaguaauaaggaaacuguaugaaugucugugggcaggaagugaagagauccuucuguaaagguuuuuggaauuaugucugcugaauaauaaacuuuuuugaaauaauaaaucugguagaaaaaugagaucucaaaggcucuuuucagagccaccaaaaaaaaaaaaaaaaaaaaaaaaaaaaaaaaaaaaaaaaaaaaaaaaaaaaaaaaaaaaaaaaaaaaaaaaaaaaaaaaaaaaaaaaaaaaaaaaaaaaa

SEQ ID NO: 25820 - RNA, 1812 nt, Artificial Sequence
  mRNA product Design b-4 (hSL-A100) comprising derived and/or modified sequence from LASV(G1442-SLE-2011;Clade IV)__AIT17180__GPCmut3 (opt5)
aggagagucccgcagucggcguccagcggcucugcuuguucgugugugugucguugcaggccuuauucaagcuuaccaugggccagaucgugaccuucuuucaagaggucccccacguuauugaagaggugaugaacaucgugcugauugcccucagcauccuggcuguccuuaaggggcuguacaauguggccacaugcggacucauuggccugguuacguuccuucugcucugugggagauccugcaccacaacccuguauaaaggaguguacgaacugcagacacucgagcugaacauggaaacccuuaauaugacaaugccucugucuuguaccaagaacaauagccaucacuauauccgggucggcaacgagacggggcucgagcugacccuuacaaauaccuccaucauuaaccauaaauuuugcaaucugucugacgcgcacaagaaaaaccucuacgaucaugcucugaugagcaucauuuccacauuccaccugucuaucccgaauuuuaaccaguaugaagccaugagcugugacuucaauggaggcaagauuuccgugcaguacaaccucagccacucuuaugccggcgaugcugccaaucauugcgggaccguugcuaacggagugcugcaaacguuuaugcgcauggccuggggcggguccuacaucgcgcuugacagcggaagaggcaacugggauuguauuaugacaucuuaccaguaucugaucauccagaauaccacaugggacgaucacugccaguucucccggcccagcccuauuggguaccucggacugcuuucucaacgcaccagagacgucuauaucucccggcgcagacggggcaccuuuacauggacgcugagcgauuccgagggcaaggacacccccgggggauacugucucacacgcuggaugcugauugaagccgagcugaaaugcuucggcaacaccgcuguggccaaguguaaugagaaacaugaugaagaguuuugcgacaugcucagacuguucgauuuuaacaagcaggcuauccagcggcuuaaagccccugcgcagaugucuauucaacugaucaauaaggccgugaacgcucucaucaaugaccagcugauuaugaagaaccaccuucgcgacaucauggggauucccuauugcaauuacagcaaauauuguuaccugaacaauacagccaccggaaagacgucccucccuaaaugcugucugaucagcaacggcucuuaccugaaugaaacacacuucuccgaugacauugagcaggaagcugauaacaugaucaccgagaugcuccaaaaggaguauauggaaagacaggggaaaaccccgcugggacuugucgaccuguucguuuuuagcacaucuuucuaccucaucagcauuuuucugcaucuggugaagauccccacccaccggcauauugugggcaaauccugcccuaagccccaccgccuuaaucauaugggcaucuguucuugcgggcucuauaagcagccuggaguccccgugagauggaaacggugaggacuaguaauaaggaaacuguaugaaugucugugggcaggaagugaagagauccuucuguaaagguuuuuggaauuaugucugcugaauaauaaacuuuuuugaaauaauaaaucugguagaaaaaugagaucucaaaggcucuuuucagagccaccaaaaaaaaaaaaaaaaaaaaaaaaaaaaaaaaaaaaaaaaaaaaaaaaaaaaaaaaaaaaaaaaaaaaaaaaaaaaaaaaaaaaaaaaaaaaaaaaaaaaa

SEQ ID NO: 25821 - RNA, 1812 nt, Artificial Sequence
  mRNA product Design b-4 (hSL-A100) comprising derived and/or modified sequence from LASV(G3010-SLE-2013;Clade IV)__AIT17344__GPCmut3 (opt5)
aggagagucccgcagucggcguccagcggcucugcuuguucgugugugugucguugcaggccuuauucaagcuuaccaugggccagaucgugaccuucuuucaagaggucccccacguuauugaagaggugaugaacaucgugcugauugcccucagcauccuggcuguccuuaaggggcuguacaauuucgccacaugcggacucgugggccugguuacguuucuucugcucugugggagauccugcaccacaucucuguauaaaggaguguacgaacugcagacccucgagcugaacauggaaacacuuaauaugaccaugccucugagcuguacaaagaacaauucccaucacuauauuauggucggcaacgagaccgggcucgagcugacgcuuaccaauacaucuaucaucaaccauaaauucugcaaucugagcgacgcgcacaagaaaaaccucuacaaucaugcucugauguccauuaucucuaccuuucaccugagcauuccgaacuucaaucaguaugaagccauguccugugauuuuaacggaggcaagaucagcgugcaguacaaucucucucacuccuaugccggcgacgcugccagccauugcgggacaguugcuaacggagugcugcaaaccuucaugcggauggccuggggcgggucuuacauugcgcuugauuccggauacggcaagugggacuguaucaugacgagcuaucaguaccugauuauccagaacacaaccugggaggaucacugccaguuuucucgccccuccccuaucggguaucucggacugcuuagccaaagaacacgggacauuuacaucucccgcagacggcgcggcaccuucaccuggacacugucugauagcgaaggcaaagacacgcccgggggauauugucucaccagauggaugcugauugaggccgagcugaagugcuuuggcaauacagcugucgccaaauguaacgaaaagcaugaugaggaguucugcgacaugcuccggcuguuugauuucaauaaacaggcuauccagcgccuuaagaccccugcccagauguccauucaacugaucaacaaggcggugaaugcccucaucaacgaccagcugauuaugaaaaaucaccuuagagauaucauggggauucccuacugcaacuauagcaaguacuguuaccugaaucacacaaccacgggaaaaacaucucucccuaagugcugucugguguccaacggcagcuaucugaaugaaacccauuucucugacgacaucgaacagcaagcugauaacaugauuaccgagaugcuccagaaagaguacauggaacggcaggggaagacaccgcugggacuugucgaccuguuuguuuucagcaccuccuuuuaucucaucucuaucuuccugcaccuggugaaaauucccacacaucgccacaucgugggcaagagcugcccuaagccccauagacuuaaucacaugggcauuuguuccugcgggcucuacaaacagccuggaguccccgugcgguggaagcgcugaggacuaguaauaaggaaacuguaugaaugucugugggcaggaagugaagagauccuucuguaaagguuuuuggaauuaugucugcugaauaauaaacuuuuuugaaauaauaaaucugguagaaaaaugagaucucaaaggcucuuuucagagccaccaaaaaaaaaaaaaaaaaaaaaaaaaaaaaaaaaaaaaaaaaaaaaaaaaaaaaaaaaaaaaaaaaaaaaaaaaaaaaaaaaaaaaaaaaaaaaaaaaaaaa

SEQ ID NO: 25822 - RNA, 1812 nt, Artificial Sequence
  mRNA product Design b-4 (hSL-A100) comprising derived and/or modified sequence from LASV(G502-SLE-2009;Clade IV)__AIT17126__GPCmut3 (opt5)
aggagagucccgcagucggcguccagcggcucugcuuguucgugugugugucguugcaggccuuauucaagcuuaccaugggccagaucgugaccuucuuucaagaggucccccacguuauugaagaggugaugaacaucgugcugauugcccucagcauccuggcuguccuuaaggggcuguacaauuucgccacaugcggacucgugggccugcuuacguuucugcuccugugugggagauccugcaccacaggacuguauaaaggcguuuacgaacuccagacccuggagcuuaacauggaaacacugaauaugaccaugccucucucuuguacaaagaacaauagccaucacuauauuaugguggggaacgagaccggacuggagcuuacgcugaccaauacauccaucaucaaccauaaauucugcaaucucucugacgcgcacaagaaaaaccuguacgaucaugcucugaugagcauuaucuccaccuuucaccucucuauuccgaauuucaaccaguaugaagccaugagcugugacuuuaauggcggcaagaucuccguccaguacaaccugagccacucuuaugccggggaugcugccgaccauugcggaacaguggcuaauggcguucuucaaaccuucaugcggauggccuggggaggguccuacauugcgcuggauagcggccgcgggagaugggacuguaucaugacgucuuaccaguaucucauuauccagaacacaaccugggaggaucacugccaguuuucccggcccagcccuaucggauaccugggccuucugucucaacgcacaagagacauuuauaucucccggcgcagacggggcaccuucaccuggacacucagcgauuccgaagggaaggacacgcccggaggcuacugucugacccgcuggaugcugauugaggccgagcucaaaugcuuugggaacacagcuguggccaaguguaaugaaaaacaugaugaggaguucugcgacaugcugagacuuuuugauuucaacaagcaggcuauccagcggcugaaagccccugcgcagaugucuauucaacucaucaauaaggccgucaacgcucugaucaaugaccagcuugugaugaagaaccaucugcgcgacauuaugggaauccccuauugcaauuacagcagauauuguuaccucaaccacaccacaaccggccggacgucccugccuaaaugcugucuggugagcaaugggucuuaccucaacgaaacacacuucuccgaugacauugaacagcaagccgauaauaugaucaccgagaugcugcagaaggaguauauggaacgccagggaaaaaccccgcuuggccuggucgaccucuuuguuuucagcacaucuuuuuaccugauuagcaucuuccugcaccuugugaagauccccacccauagacacauugugggcaaauccugcccuaagccccaucggcucaaccacauggggaucuguucuugcggacuguauaaacagccuggcguccccgugaaguggaagagaugaggacuaguaauaaggaaacuguaugaaugucugugggcaggaagugaagagauccuucuguaaagguuuuuggaauuaugucugcugaauaauaaacuuuuuugaaauaauaaaucugguagaaaaaugagaucucaaaggcucuuuucagagccaccaaaaaaaaaaaaaaaaaaaaaaaaaaaaaaaaaaaaaaaaaaaaaaaaaaaaaaaaaaaaaaaaaaaaaaaaaaaaaaaaaaaaaaaaaaaaaaaaaaaaa

SEQ ID NO: 25823 - RNA, 1812 nt, Artificial Sequence
  mRNA product Design b-4 (hSL-A100) comprising derived and/or modified sequence from LASV(G733-SLE-2010;Clade IV)__AIT17154__GPCmut3 (opt5)
aggagagucccgcagucggcguccagcggcucugcuuguucgugugugugucguugcaggccuuauucaagcuuaccaugggccagaucgugaccuucuuucaagaggucccccacguuauugaagaggugaugaacaucgugcugauugcccucagcauccuggcuguccuuaaggggcuguacaauuucgccacaugcggaauugugggccucguuuccuuucugcuucugugugggagaucuugcacgaccagccucuauaaaggaguguacgaacugcagacacuggagcucaacauggaaacccugaauaugacaaugccucuuuccuguaccaagaacaauucucaucacuauaucauggucggcaacgagacagggcuggagcucacccugacgaauaccagcaucauuaaccauaaauucugcaaucuuuccgacgcgcacaagaaaaaccuguacgaucaugcucucaugucuaucauuagcacauuucaccuguccaucccgaauuucaaccaguaugaagccaugagcugugacuuuaauggaggcaagauuucugugcaguacaaccugucccacagcuaugccggcgaugcugccaaucauugcgggaccaucgcuaacggaguucuccaaacauucaugcggauggccuggggcgggucuuacauugcgcuggacuccggacgcgauagaugggacuguaucaugaccagcuaccaguaucuuaucauucagaacacgacaugggaggaucacugccaguuuucucggcccuccccuaucggcuaccuggggcuccugagccaacgcaccagagacauuuauaucucccggcgcagacggggaacauucaccuggacccuuucugauagcgaaggcaaggacacacccggcggguacugucugacgcgcuggaugcucauugaggccgagcugaaaugcuuuggaaauaccgcuguggccaaguguaacgaaaaacaugaugaggaguucugcgacaugcugagacucuuugauuucaauaagcaggcuauccagcggcugaaagccccugcgcagauguccauccaacuuauuaacaaggccgucaaugcucugaucaacgaccagcucauuaugaagaaucaucugcgcgacaucaugggcauucccuauugcaacuacagcaaauauuguuaccuuaaucacacaaccacagggaagaccucucugccuaaaugcugucucguguccaacggaagcuaccugaaugaaacgcacuucucugaugacaucgaacagcaagccgauaacaugaucacagagaugcugcagaaggaguauauggaaagacagggcaaaaccccgcucgggcugguggaccuuuuugucuucagcaccuccuuuuaccugauuucuaucuuccuccaccugguuaagauucccacacaucggcacguggugggaaaaagcugcccuaagccccaucgccugaaucacaugggcaucuguuccugcggccuuuaugggcagccuggaguccccgugaaguggaaaagaugaggacuaguaauaaggaaacuguaugaaugucugugggcaggaagugaagagauccuucuguaaagguuuuuggaauuaugucugcugaauaauaaacuuuuuugaaauaauaaaucugguagaaaaaugagaucucaaaggcucuuuucagagccaccaaaaaaaaaaaaaaaaaaaaaaaaaaaaaaaaaaaaaaaaaaaaaaaaaaaaaaaaaaaaaaaaaaaaaaaaaaaaaaaaaaaaaaaaaaaaaaaaaaaaa

SEQ ID NO: 25824 - RNA, 1812 nt, Artificial Sequence
  mRNA product Design b-4 (hSL-A100) comprising derived and/or modified sequence from MOPV/LASV reassortant(IGS-1;Clade IV)__AFY05576__GPCmut3 (opt5)
aggagagucccgcagucggcguccagcggcucugcuuguucgugugugugucguugcaggccuuauucaagcuuaccaugggccagaucgugaccuucuuucaagaggucccccacguuauugaagaggugaugaacaucgugcugauugcccucagcguccuggcugugcuuaaggggcuguacaauuucgccacaugcggacucguuggccuggugacguuucuucugcucugugggagauccugcaccacaucucuguauaaaggagucuacgaacugcagacccucgagcugaacauggaaacacuuaauaugaccaugccucugagcuguacaaagaacaauucccaucacuauaucauggugggcaacgagaccgggcucgagcugacgcuuaccaauacaucuauuaucaaccauaaauucugcaaucugagcgacgcgcacaagaaaaaccucuacgaucaugcucugauguccaucauuucuaccuuucaccugagcaucccgaauuucaaccaguaugaagccauguccugugacuuuaauggaggcaagauuagcguucaguacaaccucucucacuccuaugccggcgaugcugccaaucauugcgggacaguggcuaacggaguccugcaaaccuucaugcggauggccuggggcgggagcuacaucgcgcuugacucuggacgcggcaacugggauuguauuaugacguccuaccaguaucugaucauucagaauacaaccugggaggaccacugccaguuuagcagacccucuccuaucggguaccucggacugcuuucccaacggacacgcgauaucuauauuagcagacggcgcagaggcaccuucaccuggacacuguccgacucugaaggcgaggauacgcccgggggauacugucucacccgguggaugcugaucgaggccgaacugaagugcuuuggcaacacagcuguggccaaauguaaugagaagcaugacgaagaguucugcgauaugcuccgccuguuugacuucaacaaacaggcuauucagagacuuaaggccccugcgcagaugagcauccaacugauuaauaaagccgugaacgcucucaucaaugaucagcugaucaugaagaaccaccuucgggacauuauggggauccccuauugcaauuacuccaaguauuguuaccugaaccacaccacaaccggacgcacgagccucccuaaaugcugucuggucucuaauggcuccuaccugaacgaaacacauuucagcgacgauauugagcagcaagccgacaauaugaucaccgagaugcuccagaaggaauauauggagagacaggggaaaaccccgcugggacuuguugaucuguuuguguucucuaccagcuuuuaccucauuuccaucuuccugcaccuggugaagauccccacacaucggcacauugucggcaaaucuugcccuaagccccaucgccuuaaccacaugggcaucuguagcugcgggcucuauaaacagccuggagugcccguuaaguggaagagaugaggacuaguaauaaggaaacuguaugaaugucugugggcaggaagugaagagauccuucuguaaagguuuuuggaauuaugucugcugaauaauaaacuuuuuugaaauaauaaaucugguagaaaaaugagaucucaaaggcucuuuucagagccaccaaaaaaaaaaaaaaaaaaaaaaaaaaaaaaaaaaaaaaaaaaaaaaaaaaaaaaaaaaaaaaaaaaaaaaaaaaaaaaaaaaaaaaaaaaaaaaaaaaaaa

SEQ ID NO: 25825 - RNA, 1812 nt, Artificial Sequence
  mRNA product Design b-4 (hSL-A100) comprising derived and/or modified sequence from LASV(LM765-SLE-2012;Clade IV)__AIT17814__GPCmut3 (opt5)
aggagagucccgcagucggcguccagcggcucugcuuguucgugugugugucguugcaggccuuauucaagcuuaccaugggccagaucgugaccuucuuucaagaggucccccacguuauugaagaggugaugaacaucgugcugauugcccucagcauccuggcuguccuuaaggggcuguacaauuucgccacaugcggacucgugggccugguuacguuucuucugcucugugggagauccugcaccacaucucuguauaaaggaguguacgaacugcagacccucgagcugaacauggaaacacuuaauaugaccaugccucugagcuguacaaagaacaauucccaucacuauauuauggucggcaacgagaccgggcucgagcugacgcuuaccaauacaucuaucaucgaccauaaauucugcaaccugagcgaugcgcaccggaagaaucucuacgaccaugcucugauguccauuaucucuaccuuucaccugagcauuccgaacuucaaucaguaugaagccauguccugugauuuuaacggaggcaaaaucagcgugcaguacaaucucucucacuccuaugccaaggacgcugccgaucauugcggcacaguugcuaacggggugcugcaaaccuucaugcgcauggccuggggaggcagcuacauugcgcuugacucugggagaggacggugggauuguaucaugacguccuaccaguaucugauuauccagaauacaaccugggaggaccacugccaguuuagccgccccucuccuaucggcuaccucgggcugcuuucccaaagaacacgggauauuuauaucagccgcagacggcgcggaaccuucaccuggacacuguccgacucugaaggcaaggauacgcccggcggguacugucucaccagauggaugcugauugaggccgagcugaaaugcuuuggaaacacagcugucgccaaguguaacgaaaaacaugacgaggaguucugcgauaugcuccggcuguuugacuucaauaagcaggcuauccagcgccuuaaagccccugcgcagaugagcauucaacugaucaacaaggccgugaaugcucucaucaacgaccagcugauuaugaagaaucaccuuagagauaucaugggcauucccuauugcaacuacuccaaauauuguuaccugaaucacaccacaaccgggaagacgagccucccuaaaugcugucuggugucuaacggauccuaccugaaugaaacacauuucagcgacgauaucgaacagcaagccgacaacaugauuaccgagaugcuccagaaggaguauauggaacggcagggcaaaaccccgcuggggcuugucgaucuguuuguuuucucuaccagcuuuuaccucaucuccaucuuccugcaccuggugaagauucccacacaucgccacaucgugggaaaaccuugccccaagccucauagacuuaaucacaugggcauuuguucuugcggccucuauaagcagcccggggucccggugaaauggaagcggugaggacuaguaauaaggaaacuguaugaaugucugugggcaggaagugaagagauccuucuguaaagguuuuuggaauuaugucugcugaauaauaaacuuuuuugaaauaauaaaucugguagaaaaaugagaucucaaaggcucuuuucagagccaccaaaaaaaaaaaaaaaaaaaaaaaaaaaaaaaaaaaaaaaaaaaaaaaaaaaaaaaaaaaaaaaaaaaaaaaaaaaaaaaaaaaaaaaaaaaaaaaaaaaaa

SEQ ID NO: 25826 - RNA, 1812 nt, Artificial Sequence
  mRNA product Design b-4 (hSL-A100) comprising derived and/or modified sequence from LASV(LM776-SLE-2012;Clade IV)__AIT17824__GPCmut3 (opt5)
aggagagucccgcagucggcguccagcggcucugcuuguucgugugugugucguugcaggccuuauucaagcuuaccaugggccagaucgugaccuucuuucaagaggucccccacguuauugaagaggugaugaacaucgugcugauugcccucagcauccuggcuguccuuaaggggcuguacaauuucgccacaugcggacucgugggccugguuacguuucuucugcucugugggagauccugcaccacaucuguguauaaaggagucuacgaacugcagacccuggagcucaacauggaaacacugaauaugaccaugccucuuagcuguacaaagaacaauucccaucacuauauuauggugggcaacgagaccgggcuggagcucacgcugaccaauacaucuaucaucaaccauaaauucugcaaucuuagcgacgcgcacaagaaaaaccuguacgaucaugcucucauguccauuaucucuaccuuucaccugagcauuccgaauuucaaccaguaugaagccauguccugugacuuuaauggaggcaagaucagcguucaguacaaccugucucacuccuaugccggcgaugcugccaaucauugcgggacaguggcuaacggaguccuccaaaccuucaugcggauggccuggggcgggagcuacauugcgcuggacucuggacacggcaagugggauuguaucaugacguccuaccaguaucuuauuauccagaacacaaccugggaggaccauugccaguuuagccgccccucuccuaucggguaccugggacuccugucccaaagaacacgggauauuuauaucagccgcagacggcgcggcaccuucaccuggacacuuuccgacucugaaggcaaagauacgcccgggggauacugucugaccagauggaugcucauugaggccgagcugaagugcuuuggcaauacagcuguggccaaauguaacgaaaagcacgacgaggaguucugcgauaugcugcggcucuuugacuucaauaaacaggcuauccagcgccugaaggccccugcgcagaugagcauucaacuuaucaacaaggccgugaaugcucugaucaacgaucagcucauuaugaaaaaucaccugagagacaucauggggauucccuauugcaacuacuccaaguauuguuaccuuaaucauaccacaaccggaaaaacgagccugccuaagugcugucucgucucuaacggcuccuaccugaaugaaacacacuucagcgacgauaucgaacagcaagccgacaacaugauuaccgagaugcugcagaaagaguauauggaacggcaggggaagaccccgcucggacugguugaucuuuuuguguucucuaccagcuuuuaccugaucuccaucuuccuccaucuggugaaaauucccacacaccgccauaucgucggcaagucuugcccuaagccccacagacugaaucacaugggcauuuguagcugcgggcuuuauaaacagccuggagugcccguucgguggaagcgcugaggacuaguaauaaggaaacuguaugaaugucugugggcaggaagugaagagauccuucuguaaagguuuuuggaauuaugucugcugaauaauaaacuuuuuugaaauaauaaaucugguagaaaaaugagaucucaaaggcucuuuucagagccaccaaaaaaaaaaaaaaaaaaaaaaaaaaaaaaaaaaaaaaaaaaaaaaaaaaaaaaaaaaaaaaaaaaaaaaaaaaaaaaaaaaaaaaaaaaaaaaaaaaaaa

SEQ ID NO: 25827 - RNA, 1812 nt, Artificial Sequence
  mRNA product Design b-4 (hSL-A100) comprising derived and/or modified sequence from LASV(Mad39;Clade IV)__ANH09722__GPCmut3 (opt5)
aggagagucccgcagucggcguccagcggcucugcuuguucgugugugugucguugcaggccuuauucaagcuuaccaugggccagaucgugaccuucuuucaagaggucccccacguuauugaagaggugaugaacaucgugcugauugcccucagcauccuggcuguccuuaaggggcuguacaauguggccacaugcggacucauuggccugguuacguuccuucugcucugugggagauccugcaccacaacccuguauaaaggaguguacgaacugcaggcgcucgagcugaacauggaaacacuuaauaugaccaugccucugucuuguacaaagaacaauagccaucacuauauccgggucggcaacgagaccgggcucgagcugacgcuuaccaauacaucccugaucaaccauaaauuuugcaaucucucugacgcucacaagaaaaaccuguacgaucaugcccugaugagcauuaucuccaccuuccaccucucuauuccgaauuuuaaccaguaugaagccaugagcugugacuucaaugauggaaagaucuccgugcaguacaaccugagccacacauaugcuggcgacaccgccaaucauugcggcacgguugcuaacggggugcuucaaacauuuaugcgcauggccuggggaggcucuuacauugcgcuggauuccgggagaggaggcugggacuguaucaugaccagcuaccaguaucucauuauccagaacacaaccugggaggaucacugccaguucucucggcccuccccuaucggguaccugggacuucugagccaacgcaccagagacauuuauaucucucggcgcagacggggcacauuuacguggacccucuccgauagcgaaggcaaggacacacccgggggauacugucugacccgcuggaugcugauugaggccgagcucaaaugcuucggcaauacagcugucgccaaguguaacgaaaaacaugaugaggaauuuugcgacaugcugagacuuuucgauuuuaauaagcaggcuauccagcggcugaaagccccugcgcagauguccauucaacucaucaacaaggccgugaaugcucugaucaacgaccagcuuauuaugaagaaucaucugcgcgacaucauggggauucccuauugcaacuacucuaaauauuguuaccucaaucacaccgugacgggaaagacaagccugccuaaaugcugucuggucuccaacggcagcuaccucaaugagacccacuucucugaugacaucgaacagcaagccgauaacaugauuaccgagaugcugcagaaggaguauauggaaagacaggggaaaacaccgcuuggacugguugaccucuucguguuuuccaccagcuucuaccugaucucuaucuuucugcaccuugugaagauucccacacaucggcacgucgugggcaaaccuugccccaagccucaucgccucaaucacaugggcaucuguagcugcggguucuauaagcagcccggaguuccggugagauggaaacggugaggacuaguaauaaggaaacuguaugaaugucugugggcaggaagugaagagauccuucuguaaagguuuuuggaauuaugucugcugaauaauaaacuuuuuugaaauaauaaaucugguagaaaaaugagaucucaaaggcucuuuucagagccaccaaaaaaaaaaaaaaaaaaaaaaaaaaaaaaaaaaaaaaaaaaaaaaaaaaaaaaaaaaaaaaaaaaaaaaaaaaaaaaaaaaaaaaaaaaaaaaaaaaaaa

SEQ ID NO: 25828 - RNA, 1812 nt, Artificial Sequence
  mRNA product Design b-4 (hSL-A100) comprising derived and/or modified sequence from LASV(Z0947-SLE-2011;Clade IV)__AIT17840__GPCmut3 (opt5)
aggagagucccgcagucggcguccagcggcucugcuuguucgugugugugucguugcaggccuuauucaagcuuaccaugggccagaucgugaccuucuuucaagaggucccccacguuauugaagaggugaugaacaucgugcugauugcccucagcauccuggcuguccuuaaggggcuguacaauuucgccacaugcggacucgugggccugguuacguuucuucugcucugugggagauccugcaccauuucucuguauaaaggaguguacgaacugcagacacucgagcugaacauggaaacccuuaauaugacaaugccucugagcuguaccaagaacaauucccaucacuauaucauggucggcaacgagacagggcucgagcugacccuuacgaauaccucuaucauuaaccauaaauucugcaaucugagcgacgcgcacaagaaaaaccucuacgaucaugcucugauguccaucauuucuacauuucaccugagcaucccgaauuucaaccaguaugaagccauguccugugacuuuaauggaggcaagauuagcgugcaguacaaccucucucacuccuaugccggcgaugcugccaaucauugcgggaccguugcuaacggagugcugcaaacauucaugcggauggccuggggcgggagcuacaucgcgcuugacucuggacgcgauagaugggacuguauuaugaccuccuaccaguaucugaucauccagaacacgacaugggaggaucacugccaguuuagccggcccucuccuauuggcuaccucgggcugcuuucccaacgcaccagagacaucuauauuagccggcgcagacggggaacauucaccuggacccuguccgauucugaaggcaaggacacacccggcggguacugucucacgcgcuggaugcugaucgaggccgagcugaaaugcuuuggaaauaccgcugucgccaaguguaacgaaaaacaugaugaggaguucugcgacaugcucagacuguuugauuucaauaagcaggcuauucagcggcuuaaagccccugcgcagaugagcauccaacugaucaacaaggccgugaaugcucucauuaacgaccagcugaucaugaagaaucaccuucgcgacauuaugggcauccccuauugcaacuacuccaaauauuguuaccugaaucacacaaccacagggaagaccagccucccuaaaugcugucuggugucuaacggauccuaccugaaugaaacgcauuucagcgaugacauugaacagcaagccgauaacaugaucacagagaugcuccagaaggaguauauggaaagacagggcaaaaccccgcuggggcuugucgaccuguuuguuuucucuaccagcuuuuaccucaucuccauuuuccugcaccuggugaagauccccacacaucggcacauugugggaaaaccuugccccaagccucaucgccuuaaucacaugggcaucuguucuugcggccucuauaagcagcccggggucccggugaaauggaagagaugaggacuaguaauaaggaaacuguaugaaugucugugggcaggaagugaagagauccuucuguaaagguuuuuggaauuaugucugcugaauaauaaacuuuuuugaaauaauaaaucugguagaaaaaugagaucucaaaggcucuuuucagagccaccaaaaaaaaaaaaaaaaaaaaaaaaaaaaaaaaaaaaaaaaaaaaaaaaaaaaaaaaaaaaaaaaaaaaaaaaaaaaaaaaaaaaaaaaaaaaaaaaaaaaa

SEQ ID NO: 25829 - RNA, 1788 nt, Artificial Sequence
  mRNA product Design b-4 (A100) comprising derived and/or modified sequence from LASV(Josiah;Clade IV)__NP_694870__GPCmut3 (opt1)
aggagagucccgcagucggcguccagcggcucugcuuguucgugugugugucguugcaggccuuauucaagcuuaccaugggccagaucgugaccuucuuccaggaggucccccacgugaucgaggaggugaugaacaucguccugaucgcccucagcgugcuggccgugcugaaggggcucuacaacuucgcgaccugcggccuggucgggcuggugacguuccuccugcugugcggccgcuccugcaccaccagccucuacaaggggguguacgagcugcagacccuggagcucaacauggagacgcugaacaugaccaugccgcuguccugcaccaagaacaacagccaccacuacaucauggucggcaacgagaccggccucgagcugacgcugaccaacaccuccaucaucaaccacaaguucugcaaccucagcgacgcccacaagaagaaccuguacgaccacgcccugauguccaucaucagcaccuuccaccucuccauccccaacuucaaccaguacgaggccaugagcugcgacuucaacgggggcaagaucuccgugcaguacaaccugagccacuccuacgccggggacgcggccaaccacugcggcacgguggccaacgggguccugcagaccuucaugcggauggccuggggcggcagcuacaucgcgcucgacuccgggcgcggcaacugggacugcaucaugaccagcuaccaguaccugaucauccagaacaccacgugggaggaccacugccaguucucccggcccagccccaucggguaccugggccuccugucccagcgcacccgggacaucuacaucagccgccggcgccggggcaccuucaccuggacgcugagcgacuccgaggggaaggacaccccgggcggguacugccugacccgcuggaugcucaucgaggccgagcugaagugcuucggcaacaccgccguggccaagugcaacgagaagcacgacgaggaguucugcgacaugcugcggcuguucgacuucaacaagcaggccauccagcgccugaaggcgcccgcccagaugagcauccagcugaucaacaaggccgugaacgcccucaucaacgaccagcugaucaugaagaaccaccuccgggacaucauggggauccccuacugcaacuacuccaaguacugcuaccucaaccacacgaccaccggccgcaccagccugcccaagugcugccuggucuccaacggcagcuaccucaacgagacgcacuucuccgacgacaucgagcagcaggccgacaacaugaucaccgagaugcugcagaaggaguacauggagcggcaggggaagacgccccugggccucguggaccuguucguguucagcaccuccuucuaccugaucagcaucuuccugcaccucgucaagaucccgacccaccgccacaucguggggaaguccugccccaagccccaccggcugaaccacaugggcaucugcagcugcgggcuguacaagcagcccggcgugccggucaaguggaagcgcugaggacuaguaauaaggaaacuguaugaaugucugugggcaggaagugaagagauccuucuguaaagguuuuuggaauuaugucugcugaauaauaaacuuuuuugaaauaauaaaucugguagaaaaaugagaucuaaaaaaaaaaaaaaaaaaaaaaaaaaaaaaaaaaaaaaaaaaaaaaaaaaaaaaaaaaaaaaaaaaaaaaaaaaaaaaaaaaaaaaaaaaaaaaaaaaaa

SEQ ID NO: 25830 - RNA, 1785 nt, Artificial Sequence
  mRNA product Design b-4 (A100) comprising derived and/or modified sequence from LASV(LP;Clade I)__AAF86701__GPCmut3 (opt1)
aggagagucccgcagucggcguccagcggcucugcuuguucgugugugugucguugcaggccuuauucaagcuuaccaugggccagaucaucaccuucuuccaggaggugccccacgucaucgaggaggugaugaacaucgugcugaucgcccucagccugcuggccauccucaaggggcuguacaacaucgcgaccugcggcaucaucgggcuggucgccuuccucuuccugugcggcaaguccugcagccugacgcucaagggcggguacgagcugcagacccuggagcucaacauggagacccugaacaugaccaugccgcuguccugcacgaagaacagcucccaccacuacauccgcgugggcaacgagaccgggcucgagcugacccugaccaacacgagcaucaucaaccacaaguucugcaaccucuccgacgcccacaagaagaaccuguacgaccacgcccugaugagcaucaucuccaccuuccaccucagcauccccaacuucaaccaguacgaggccauguccugcgacuucaacggcgggaagaucagcgugcaguacaaccugucccacagcuacgcgggcgacgccgccgagcacugcgggaccgucgccaacggcgugcugcagaccuucaugcggauggcguggggcgggcgcuacaucgcccucgacuccggcaaggggaacugggacugcaucaugacgagcuaccaguaccugaucauccagaacaccaccugggaggaccacugccaguucucccggcccagccccaucggcuaccugggccuccugucccagcgcacccgggacaucuacaucagccgccggcgccgggggacguucaccuggacccugagcgacuccgagggcaacgagacccccgggggcuacugccugacgcgcuggaugcucaucgaggccgagcugaagugcuucgggaacaccgccguggccaagugcaacgagaagcacgacgaggaguucugcgacaugcugcggcuguucgacuucaacaagcaggcgauccgccggcugaaggcccccgcccagaugagcauccagcugaucaacaaggccgucaacgcccucaucaacgaccagcugaucaugaagaaccaccuccgcgacaucaugggcauccccuacugcaacuacuccaaguacugcuaccucaaccacaccagcuccggccggaccagccugcccaagugcugccugaucuccaacgggagcuaccucaacgagacgcaguucuccgacgacaucgagcagcaggcggacaacaugaucaccgagaugcugcagaaggaguacaucgagcgccagggcaagaccccgcuggggcucguggacaucuucaucuucagcaccuccuucuaccugaucagcaucuuccugcaccugaucaagaucccgacgcaccggcacaucgugggcaagcccugccccaagccccaccgccucaaccacaugggggucugcuccugcggccuguacaagcacccgggcgugcccaccaaguggaagcggugaggacuaguaauaaggaaacuguaugaaugucugugggcaggaagugaagagauccuucuguaaagguuuuuggaauuaugucugcugaauaauaaacuuuuuugaaauaauaaaucugguagaaaaaugagaucuaaaaaaaaaaaaaaaaaaaaaaaaaaaaaaaaaaaaaaaaaaaaaaaaaaaaaaaaaaaaaaaaaaaaaaaaaaaaaaaaaaaaaaaaaaaaaaaaaaaa

SEQ ID NO: 25831 - RNA, 1785 nt, Artificial Sequence
  mRNA product Design b-4 (A100) comprising derived and/or modified sequence from LASV(803213;Clade II)__AAF86703__GPCmut3 (opt1)
aggagagucccgcagucggcguccagcggcucugcuuguucgugugugugucguugcaggccuuauucaagcuuaccaugggccagaucaucaccuucuuccaggaggugccccacgucaucgaggaggugaugaacaucgugcugaucgcccucagccugcuggccauccucaaggggaucuacaacgucgcgaccugcggccuguucgggcugaucuccuuccuccugcugugcggccgcagcugcuccgugacguacaaggggguguacgagcuccagacccuggagcugaacauggccaaccucaacaugaccaugccgcugagcugcaccaagaacaacucccaccacuacaucauggucggcaacgagacgggccuggagcucacccugaccaacaccagcaucaucaaccacaaguucugcaaccuguccgacgcccacaagaagaaccucuacgaccacgcccugaugagcaucaucuccacguuccaccugagcauccccaacuucaaccaguacgaggccauguccugcgacuucaacgggggcaagaucagcgugcaguacaaccucucccacagcuucgcgguggacgccgccaaccacugcgggaccaucgccaacggcguccugcagaccuucaugcggauggcguggggcggguccuacaucgcccuggacagcggcaaggggaacugggacugcaucaugaccuccuaccaguaccucaucauccagaacacgaccugggaggaccacugccaguucagccgccccucccccaucggcuaccuggggcugcucagccagcggacccgcgacaucuacaucagccggcgccgccggggcaccuucacguggacccucuccgacagcgagggcaacgaggcccccgggggcuacugccugacccgguggaugcugaucgaggccgagcucaagugcuucgggaacaccgccguggcgaagugcaacgagaagcacgacgaggaguucugcgacaugcugcgccuguucgacuucaacaagcaggccaucaagcggcucaagacgcccgcccagauguccauccagcugaucaacaaggccgugaacgcccugaucaacgaccagcucaucaugaagaaccaccuccgcgacaucaugggcauccccuacugcaacuacagccgguacugcuaccugaaccacaccgucaccgggaagaccucccugccccgcugcugccuggugagcaacggcuccuaccugaacgagacgcacuucagcgacgacaucgagcagcaggcggacaacaugaucaccgagaugcuccagaaggaguacauggaccggcagggcaagaccccgcuggggcugguggaccucuucgucuucuccaccagcuucuaccugaucuccaucuuccugcaccuggugaagaucccgacgcaccgccacaucgugggcaagcccugccccaagccccaccggcucaaccacauggggaucugcagcugcggccuguacaagcacccggggguccccgugaaguggaagcgcugaggacuaguaauaaggaaacuguaugaaugucugugggcaggaagugaagagauccuucuguaaagguuuuuggaauuaugucugcugaauaauaaacuuuuuugaaauaauaaaucugguagaaaaaugagaucuaaaaaaaaaaaaaaaaaaaaaaaaaaaaaaaaaaaaaaaaaaaaaaaaaaaaaaaaaaaaaaaaaaaaaaaaaaaaaaaaaaaaaaaaaaaaaaaaaaaa

SEQ ID NO: 25832 - RNA, 1785 nt, Artificial Sequence
  mRNA product Design b-4 (A100) comprising derived and/or modified sequence from LASV(GA391;Clade III)__CAA36645__GPCmut3 (opt1)
aggagagucccgcagucggcguccagcggcucugcuuguucgugugugugucguugcaggccuuauucaagcuuaccaugggccagaucgugaccuucuuccaggaggucccccacgugaucgaggaggugaugaacaucguccugaucgcccucagcauccuggccauccugaaggggcucuacaacguggcgaccugcggccugaucgggcuggugacguuccuccugcuguccggccgcagcugcucccucaucuacaaggggaccuacgagcugcagacccuggagcucaacauggagacccugaacaugacgaugccgcugagcugcaccaagaacaacucccaccacuacauccgggucggcaacgagaccggccucgagcugacccugacgaacaccagcauccucaaccacaaguucugcaaccuguccgacgcccacaagcgcaaccuguacgaccacagccucauguccaucaucagcaccuuccaccuguccauccccaacuucaaccaguacgaggccaugagcugcgacuucaacgggggcaagaucaccgugcaguacaaccugucccacagcuucgccguggacgccgcggggcacugcggcacgcucgccaacgggguccugcagaccuucaugcggauggccuggggcggcuccuacaucgcccuggacagcgggcgcggcaacugggacugcaucaugaccuccuaccaguaccucaucauccagaacaccacgugggacgaccacugccaguucagccggcccucccccaucggguaccugggccugcucagccagcgcacccgggacaucuacaucagccgccggcgccggggcaccuucaccuggacgcucuccgacagcgaggggaacgagaccccgggcggguacugccugacccgcuggaugcugaucgaggcggagcucaagugcuucggcaacaccgccguggccaagugcaacgagaagcacgacgaggaguucugcgacaugcugcggcuguucgacuucaacaagcaggccauccgccggcucaagacgcccgcccagauguccauccagcugaucaacaaggcggugaacgcccugaucaacgaccagcucaucaugaagaaccaccuccgcgacaucauggggauccccuacugcaacuacagccgguacugcuaccugaaccacaccuccaccggcaagaccagccugccccgcugcugccugaucuccaacggcagcuaccugaacgagacgaaguucuccgacgacaucgagcagcaggccgacaacaugaucaccgagaugcuccagaaggaguacaucgaccggcaggggaagacgccccugggccuggucgaccuguucguguucagcaccuccuucuaccucaucagcaucuuccugcaccuggugaagaucccgacccaccgccacaucgucgggaagcccugccccaagccccaccggcucaaccacaugggcaucugcuccugcgggcuguacaagcagccgggcgugcccgugcgcuggaagcggugaggacuaguaauaaggaaacuguaugaaugucugugggcaggaagugaagagauccuucuguaaagguuuuuggaauuaugucugcugaauaauaaacuuuuuugaaauaauaaaucugguagaaaaaugagaucuaaaaaaaaaaaaaaaaaaaaaaaaaaaaaaaaaaaaaaaaaaaaaaaaaaaaaaaaaaaaaaaaaaaaaaaaaaaaaaaaaaaaaaaaaaaaaaaaaaaa

SEQ ID NO: 25833 - RNA, 1788 nt, Artificial Sequence
  mRNA product Design b-4 (A100) comprising derived and/or modified sequence from LASV(AV;Clade V)__CCA30314__GPCmut3 (opt1)
aggagagucccgcagucggcguccagcggcucugcuuguucgugugugugucguugcaggccuuauucaagcuuaccaugggccagaucgugaccuucuuccaggaggucccccacgugaucgaggaggugaugaacaucguccugaucgcccucagcauccuggccgugcugaaggggcucuacaacaucgcgaccugcggccugaucgggcugaucacguuccuccugcugugcggccgcuccugcagcuccaaccucuacaaggggguguacgagcugcagagccuggaccucaacauggagacccugaacaugaccaugccgcuguccugcaccaagaacaacagccaccacuacauccgggucggcaacgacacgggccucgagcugacccugaccaacaccuccauccucaaccacaaguucugcaaccugagcgacgcccacaagaaggaccuguacgaccacgcccucauguccaucaucagcacguuccaccuguccauccccaacuucaaccaguacgaggccaugagcugcgacuucaacgggggcaagaucuccgugcaguacaaccugagccacuccuacgccaucgacgcggccaaccacugcgggaccguggccaacggcauccuccagaccuucaugcgcauggccuggggcgggagcuacaucgcgcuggacuccggccgggggaacugggacugcaucaugaccagcuaccaguaccugaucauccagaacacgaccugggagaaccacugccaguucucccgccccagccccaucggcuaccucgggcugcugagccagcggacccgcgacaucuacaucucccggcgccgccggggcaccuucacguggacccugagcgacuccgagggcaacgccacccccgggggcuacugccucacccgguggaugcugaucgaggccgagcugaagugcuucgggaacacggccgucgccaagugcaacgagaagcacgacgaggaguucugcgacaugcuccgccuguucgacuucaacaagcaggcgaucagccggcugaagucccccgcccagaugagcauccagcucaucaacaaggccgugaacgcccugaucaacgaccagcugaucaugaagaaccaccuccgcgacaucaugggcauccccuacugcaacuacuccaaguacugcuaccugaaccacaccaucaccgggaagaccagccugcccaagugcugccucguguccaacggcagcuaccugaacgagacgcacuucuccgacgacaucgagcagcaggccgacaacaugaucaccgagaugcugcagaaggaguacauggagcggcagggcaagaccccgcucgggcuggucgaccuguucguguucagcaccuccuucuaccugaucagcaucuuccuccgccuggugaagaucccgacgcaccggcacaucgucggcaagcccugccccaagccccaccgccugaaccacauggggaucugcuccugcggccucuacaagcagccgggggugcccgugcgguggaagcgcugaggacuaguaauaaggaaacuguaugaaugucugugggcaggaagugaagagauccuucuguaaagguuuuuggaauuaugucugcugaauaauaaacuuuuuugaaauaauaaaucugguagaaaaaugagaucuaaaaaaaaaaaaaaaaaaaaaaaaaaaaaaaaaaaaaaaaaaaaaaaaaaaaaaaaaaaaaaaaaaaaaaaaaaaaaaaaaaaaaaaaaaaaaaaaaaaa

SEQ ID NO: 25834 - RNA, 1785 nt, Artificial Sequence
  mRNA product Design b-4 (A100) comprising derived and/or modified sequence from LASV(Togo/2016/7082;Clade VI)__AMR44577__GPCmut3 (opt1)
aggagagucccgcagucggcguccagcggcucugcuuguucgugugugugucguugcaggccuuauucaagcuuaccaugggccagaucaucaccuucuuccaggaggugccccacgucaucgaggaggugaugaacaucgugcugaucgcccucagccugcuggccauccucaagggggucuacaacguggcgaccugcggcaucaucgggcuggugacguuccuguuccucugcggccgcuccugcagccugaucuacaagggguccuacgagcugcagacccucgagcugaacauggagacccugaacaugaccaugccgcucagcugcacgaagaacuccagccaccacuacauccgggucggcaacgagaccggccuggagcugacccucaccaacacguccaucaucaaccacaaguucugcaaccugagcgacgcccacaagcgcaaccuguacgaccacgcccucauguccauccugagcaccuuccaccuguccauccccaacuucaaccaguacgaggccaugagcugcgacuucaacgggggcaagaucuccgugcaguacaaccucagccacgccuacgcgguggacgccgccgagcacugcgggaccgucgccaacggcgugcugcagaccuucaugcggauggcguggggcggguccuacaucgcccuggacagcggccgcgggaacugggacugcaucaugacguccuaccaguaccucaucauccagaacaccaccugggaggaccacugccaguucagccggcccucccccaucggcuaccuggggcugcucagccagcgcacccgggacaucuacaucagccgccggcgccggggcacguucaccuggacccucuccgacagcgagggcaacgagacccccgggggcuacugccugacgcgcuggaugcugaucgaggccgagcucaagugcuucgggaacaccgccguggccaagugcaacgagaagcacgacgaggaguucugcgacaugcugcggcuguucgacuucaacaagcaggcgauccagcgccucaagucccccgcccagaugagcauccagcugaucaacaaggccgucaacgcccugaucaacgaccagcucaucaugaagaaccaccuccgggacaugaugggcauccccuacugcaacuacuccaaguacugcuaccugaaccacaccagcuccgggcgcaccagccugcccaagugcugccugguguccaacggcagcuaccugaacgagacgcacuucuccgacgacaucgagcagcaggccgacaacaugaucaccgagaugcuccagaaggaguacaucgaccggcagggcaagaccccgcuggggcugguggaccucuucgucuucagcaccuccuucuaccugaucagcaucuuccugcaccugaucaagaucccgacgcaccgccacaucgugggcaagcccugccccaagccccaccggcucaaccacauggggaucugcuccugcggccuguacaagcagccgggggugcccacccgcuggaagcggugaggacuaguaauaaggaaacuguaugaaugucugugggcaggaagugaagagauccuucuguaaagguuuuuggaauuaugucugcugaauaauaaacuuuuuugaaauaauaaaucugguagaaaaaugagaucuaaaaaaaaaaaaaaaaaaaaaaaaaaaaaaaaaaaaaaaaaaaaaaaaaaaaaaaaaaaaaaaaaaaaaaaaaaaaaaaaaaaaaaaaaaaaaaaaaaaa

SEQ ID NO: 25835 - RNA, 1785 nt, Artificial Sequence
  mRNA product Design b-4 (A100) comprising derived and/or modified sequence from LASV(KAK-428;Clade n.d. (VII))__ANH09740__GPCmut3 (opt1)
aggagagucccgcagucggcguccagcggcucugcuuguucgugugugugucguugcaggccuuauucaagcuuaccaugggccagaucgugaccuucuuccaggaggucccccacgugaucgaggaggugaugaacaucguccugaucgcccucagccugcuggccauccucaaggggcuguacaacuucgcgaccugcggcgugaucgggcugaucacguuccuccugcugugcggccgcuccugcagcgccaccuacaaggggcaguacgagcuccagacccuggagcugaacauggagucccucaacaugaccaugccgcugagcugcacgaagaacaacucccaccacuacauccgggccggcaacaacaccggccuggagcucacccugaccaacacgagcaucaucucccacaaguucugcaaccugagcgacgcccacaagaagaaccucuacgaccacacccugauguccaucaucaccaccuuccaccugagcauccccaacuucaaccaguacgaggccauguccugcgacuucaacgggggcaagaucagcauccaguacaaccucucccacagcuacgcgggggacgccgcccagcacugcggcacgguggccaacgggguccugcagaccuucaugcgcauggcguggggcggcuccuaccuggcccucgacagcgggcggcgcggcugggacugcaucaucuccagcuaccaguaccugaucauccagaacaccaccugggacgaccacugccaguucucccggcccagccccaucggguaccugggcuucgugagccagaagacgcgcgacaucuacaucucccggcgccgccggggcaccuucaccuggacccugagcgacuccgaggggcacgacaugccgggcggguacugccucacgcgguggaugcugaucgaggccgaccugaagugcuucggcaacaccgccguggccaagugcaacgagaagcacgacgaggaguucugcgacauguggcgccucuucgacuucaacaagcaggcgauccagcggcugaaggcccccgcccagaugaacauccagcugaucaacaaggccgucaacgcccucaucaacgaccagcugaugaugaagaaccaccuccgcgacaucauggggauccccuacugcaacuacagcaaguucugcuaccugaacaacaccaccacgggccggaccucccugccccgcugcugccugaucagcaacggcuccuaccucaacgagacccacuucagcgacgacaucgagcagcaggcggacaacaugaucaccgagaugcugcagaaggaguacauggaccggcaggggaagacgccccugggccucguggaccuguucguguucuccaccagcuucuaccugaucaccaucuuccuccaccuggucaagaucccgacccaccgccacaucguggggaagcccugccccaagccccaccggcugaaccacaugggcaucugcuccugcgggcuguacaagcagccgggcgugcccguccgcuggaagcggugaggacuaguaauaaggaaacuguaugaaugucugugggcaggaagugaagagauccuucuguaaagguuuuuggaauuaugucugcugaauaauaaacuuuuuugaaauaauaaaucugguagaaaaaugagaucuaaaaaaaaaaaaaaaaaaaaaaaaaaaaaaaaaaaaaaaaaaaaaaaaaaaaaaaaaaaaaaaaaaaaaaaaaaaaaaaaaaaaaaaaaaaaaaaaaaaa

SEQ ID NO: 25836 - RNA, 1785 nt, Artificial Sequence; identical to SEQ ID NO: 25830
  mRNA product Design b-4 (A100) comprising derived and/or modified sequence from LASV(Pinneo-NIG-1969;Clade I)__AIT17836__GPCmut3 (opt1)

SEQ ID NO: 25837 - RNA, 1785 nt, Artificial Sequence
  mRNA product Design b-4 (A100) comprising derived and/or modified sequence from LASV(ISTH0009-NIG-2011;Clade II)__AIT17404__GPCmut3 (opt1)
aggagagucccgcagucggcguccagcggcucugcuuguucgugugugugucguugcaggccuuauucaagcuuaccaugggccagaucaucaccuucuuccaggaggugccccacgucaucgaggaggugaugaacaucgugcugaucgcccucagccugcuggccauccucaaggggaucuacaacgucgcgaccugcggccuguucgggcugguguccuuccuccugcugugcggccgcagcugcuccacgaccuacaaggggguguacgagcuccagacccuggagcuggacauggccagccucaacaugaccaugccgcuguccugcacgaagaacaacagccaccacuacaucauggucggcaacgagaccggccuggagcucacccugaccaacacguccaucaucaaccacaaguucugcaaccugagcgacgcccacaagaagaaccucuacgaccacgcccugauguccaucaucagcaccuuccaccuguccauccccaacuucaaccaguacgaggccaugagcugcgacuucaacgggggcaagaucuccgugcaguacaaccucagccacgcguacgccguggacgccgccaaccacugcgggaccaucgcgaacggcguccugcagaccuucaugcggauggccuggggcggguccuacaucgcccuggacagcggcaagggguccugggacugcaucaugacgagcuaccaguaccucaucauccagaacaccaccugggaggaccacugccaguucucccgccccagccccaucggcuaccuggggcugcucagccagcggacccgcgacaucuacaucucccggcgccgccggggcacguucaccuggacccucagcgacuccgagggcaacgagacccccgggggcuacugccugacgcgguggaugcugaucgaggccgagcucaagugcuucgggaacaccgccguggcgaagugcaacgagaagcacgacgaggaguucugcgacaugcugcgccuguucgacuucaacaagcaggccauccggcgccucaagacccccgcccagaugagcauccagcugaucaacaaggccgugaacgcccugaucaacgaccagcucaucaugaagaaccaccuccgggacaucaugggcaucccguacugcaacuacuccaaguacugcuaccugaaccacaccgucacggggaagaccagccugccccgcugcugccugguguccaacggcagcuaccugaacgagacccacuucuccgacgacaucgagcagcaggcggacaacaugaucaccgagcuccugcagaaggaguacauggaccggcagggcaagacgccccuggggcucguggaccuguucgucuucagcaccuccuucuaccugaucagcaucuuccugcaccucaucaagaucccgacccaccgccacaucaccggcaagcccugccccaagccccaccggcugaaccacauggggaucugcuccugcggccuguacaagcacccgggggugcccgugaaguggaagcgcugaggacuaguaauaaggaaacuguaugaaugucugugggcaggaagugaagagauccuucuguaaagguuuuuggaauuaugucugcugaauaauaaacuuuuuugaaauaauaaaucugguagaaaaaugagaucuaaaaaaaaaaaaaaaaaaaaaaaaaaaaaaaaaaaaaaaaaaaaaaaaaaaaaaaaaaaaaaaaaaaaaaaaaaaaaaaaaaaaaaaaaaaaaaaaaaaa

SEQ ID NO: 25838 - RNA, 1785 nt, Artificial Sequence
  mRNA product Design b-4 (A100) comprising derived and/or modified sequence from LASV(ISTH2010-NIG-2012;Clade II)__AIT17482__GPCmut3 (opt1)
aggagagucccgcagucggcguccagcggcucugcuuguucgugugugugucguugcaggccuuauucaagcuuaccaugggccagaucaucaccuucuuccaggaggugccccacgucaucgaggaggugaugaacaucgugcugaucgcccucagccugcuggccauccucaaggggaucuacaacgucgcgaccugcggccuguucgggcugguguccuuccuccugcugugcggccgcagcugcuccacgaccuacaaggggguguacgagcuccagacccuggagcuggacauggccagccucaacaugaccaugccgcuguccugcacgaagaacaacagccaccacuacaucauggucggcaacgagaccggccuggagcucacccugaccaacacguccaucaucaaccacaaguucugcaaccugagcgacgcccacaagaagaaccucuacgaccacgcccugauguccaucaucagcaccuuccaccuguccauccccaacuucaaccaguacgaggccaugagcugcgacuucaacgggggcaagaucuccgugcaguacaaccucagccacgcguacgccguggacgccgccaaccacugcgggaccaucgcgaacggcguccugcagaccuucaugcggauggccuggggcggguccuacaucgcccuggacagcggcaagggguccugggacugcaucaugacgagcuaccaguaccucaucauccagaacaucaccugggaggaccacugccaguucucccgccccagccccaucggcuaccuggggcugcucagccagcggacccgcgacaucuacaucucccggcgccgccggggcaccuucacguggacccucagcgacuccgagggcaacgagacccccgggggcuacugccugacccgguggaugcugaucgaggccgagcucaagugcuucgggaacacggccguggcgaagugcaacgagaagcacgacgaggaguucugcgacaugcugcgccuguucgacuucaacaagcaggccauccggcgccucaagacccccgcccagaugagcauccagcugaucaacaaggccgugaacgcccugaucaacgaccagcucaucaugaagaaccaccuccgggacaucaugggcauccccuacugcaacuacuccaaguacugcuaccugaaccacaccgucaccgggaagacgagccugccccgcugcugccugguguccaacggcagcuaccugaacgagacccacuucuccgacgacaucgagcagcaggcggacaacaugaucaccgagcuccugcagaaggaguacaucgaccggcagggcaagaccccgcuggggcucguggaccuguucgucuucagcacguccuucuaccugaucagcaucuuccugcaccucgugaagaucccgacccaccgccacguggucggcaagcccugccccaagccccaccggcugaaccacauggggaucugcuccugcggccuguacaagcacccgggggugcccgugaaguggaagcgcugaggacuaguaauaaggaaacuguaugaaugucugugggcaggaagugaagagauccuucuguaaagguuuuuggaauuaugucugcugaauaauaaacuuuuuugaaauaauaaaucugguagaaaaaugagaucuaaaaaaaaaaaaaaaaaaaaaaaaaaaaaaaaaaaaaaaaaaaaaaaaaaaaaaaaaaaaaaaaaaaaaaaaaaaaaaaaaaaaaaaaaaaaaaaaaaaa

SEQ ID NO: 25839 - RNA, 1785 nt, Artificial Sequence
  mRNA product Design b-4 (A100) comprising derived and/or modified sequence from LASV(Lassa virus/H.sapiens-wt/NGA/2015/ISTH_0543;Clade II)__AVO03639__GPCmut3 (opt1)
aggagagucccgcagucggcguccagcggcucugcuuguucgugugugugucguugcaggccuuauucaagcuuaccaugggccagaucaucaccuucuuccaggaggugccccacgucaucgaggaggugaugaacaucgugcugaucgcccucagccugcuggccauccucaaggggaucuacaacgucgcgaccugcggccuguucgggcugguguccuuccuccugcugugcggccgcagcugcuccacgaccuacaaggggguguacgagcuccagacccuggagcuggacauggccaaccucaacaugaccaugccgcugagcugcacgaagaacaacucccaccacuacaucauggucggcaacgagaccggccuggagcucacccugaccaacacgagcaucaucaaccacaaguucugcaaccuguccgacgcccacaagaagaaccucuacgaccacgcccugaugagcaucaucuccaccuuccaccugagcauccccaacuucaaccaguacgaggccauguccugcgacuucaacgggggcaagaucagcgugcaguacaaccucucccacaccuacgcgguggacgccgccaaccacugcgggaccaucgccaacggcguccugcagacguucaugcggauggcguggggcgggagcuacaucgcccuggacuccggcaaggggagcugggacugcaucaugaccuccuaccaguaccucgugauccagaacaccaccugggaggaccacugccaguucagccgccccucccccaucggcuaccuggggcugcucagccagcggacgcgcgacaucuacaucagccggcgccgccggggcaccuucaccuggacccucuccgacagcgagggcaacgagacgcccgggggcuacugccugacccgguggaugcugaucgaggccgagcucaagugcuucgggaacaccgccguggccaagugcaacgagaagcacgacgaggaguucugcgacaugcugcgccuguucgacuucaacaagcaggcgauccggcgccucaagacccccgcccagauguccauccagcugaucaacaaggccgucaacgcccugaucaacgaccagcucaucaugaagaaccaccuccgggacaucaugggcauccccuacugcaacuacagcaaguacugcuaccugaaccacacggugaccgggaagaccucccugccccgcugcugccuggugagcaacggcuccuaccugaacgagacccacuucagcgacgacaucgagcagcaggccgacaacaugaucacggagcuccugcagaaggaguacaucgaccggcagggcaagaccccgcuggggcucgucgaccuguucguguucuccaccagcuucuaccugaucuccaucuuccugcaccucgugaagaucccgacccaccgccacaucacgggcaagcccugccccaagccccaccggcugaaccacauggggaucugcagcugcggccuguacaagcacccggggguccccgugaaguggaagcgcugaggacuaguaauaaggaaacuguaugaaugucugugggcaggaagugaagagauccuucuguaaagguuuuuggaauuaugucugcugaauaauaaacuuuuuugaaauaauaaaucugguagaaaaaugagaucuaaaaaaaaaaaaaaaaaaaaaaaaaaaaaaaaaaaaaaaaaaaaaaaaaaaaaaaaaaaaaaaaaaaaaaaaaaaaaaaaaaaaaaaaaaaaaaaaaaaa

SEQ ID NO: 25840 - RNA, 1785 nt, Artificial Sequence
  mRNA product Design b-4 (A100) comprising derived and/or modified sequence from LASV(Lassa virus/H.sapiens-wt/NGA/2016/ISTH_0009;Clade II)__AVO03571__GPCmut3 (opt1)
aggagagucccgcagucggcguccagcggcucugcuuguucgugugugugucguugcaggccuuauucaagcuuaccaugggccagaucaucaccuucuuccaggaggugccccacgucaucgaggaggugaugaacaucgugcugaucgcccucagccugcuggccauccucaaggggaucuacaacgucgcgaccugcggccugcuggggcucguguccuuccugcugcucugcggccgcagcugcuccacgaccuacaaggggguguacgagcugcagacccuggagcucgacauggccagccugaacaugaccaugccgcuguccugcacgaagaacaacagccaccacuacaucauggucggcaacgagaccggccucgagcugacccugaccaacacguccaucaucaaccacaaguucugcaaccucagcgacgcccacaagaagaaccuguacgaccacgcccugauguccaucaucagcaccuuccaccucuccauccccaacuucaaccaguacgaggccaugagcugcgacuucaacgggggccggaucuccgugcaguacaaccugagccacuccuacgcgguggacgccgccaaccacugcgggaccaucgccaacggcguccugcagaccuucaugcgcauggcguggggcgggagcuacaucgcccucgacuccggcaaggggagcugggacugcaucaugacguccuaccaguaccugaucauccagaacaccaccugggaggaccacugccaguucagccggcccagccccaucggcuaccuggggcuccugucccagcgcacccgggacaucuacaucagccgccggcgccggggcacguucaccuggacccuguccgacagcgagggcaacgagacccccgggggcuacugccugacgcgcuggaugcucaucgaggccgagcugaagugcuucgggaacaccgccguggccaagugcaacgagaagcacgacgaggaguucugcgacaugcugcggcuguucgacuucaacaagcaggcgauccgccggcugaagacccccgcccagauguccauccagcugaucaacaaggccgugaacgcccucaucaacgaccagcugaucaugaagaaccaccuccgcgacaucaugggcaucccguacugcaacuacagcaaguacugcuaccucaaccacaccgucacggggaagaccucccugccccggugcugccuggugagcaacggcuccuaccucaacgagacccacuucagcgacgacaucgagcagcaggccgacaacaugaucaccgagcugcugcagaaggaguacaucgaccgccagggcaagacgccccucgggcugguggaccuguucgucuucuccaccagcuucuaccugaucuccaucuuccuccaccuggugaagaucccgacccaccggcacaucaccggcaagcccugccccaagccccaccgccugaaccacauggggaucugcagcugcggccucuacaaccacccgggggugcccgucaaguggaagcggugaggacuaguaauaaggaaacuguaugaaugucugugggcaggaagugaagagauccuucuguaaagguuuuuggaauuaugucugcugaauaauaaacuuuuuugaaauaauaaaucugguagaaaaaugagaucuaaaaaaaaaaaaaaaaaaaaaaaaaaaaaaaaaaaaaaaaaaaaaaaaaaaaaaaaaaaaaaaaaaaaaaaaaaaaaaaaaaaaaaaaaaaaaaaaaaaa

SEQ ID NO: 25841 - RNA, 1785 nt, Artificial Sequence
  mRNA product Design b-4 (A100) comprising derived and/or modified sequence from LASV(Lassa virus/H.sapiens-wt/NGA/2016/ISTH_0017;Clade II)__AVO03567__GPCmut3 (opt1)
aggagagucccgcagucggcguccagcggcucugcuuguucgugugugugucguugcaggccuuauucaagcuuaccaugggccagaucaucaccuucuuccaggaggugccccacgucaucgaggaggugaugaacaucgugcugaucgcccucagccugcuggccauccucaaggggaucuacaacgucgcgaccugcggccuguucgggcugguguccuuccuccugcugugcggccgcagcugcuccacgaccuacaaggggguguacgagcuccagacccuggagcuggacauggccagccucaacaugaccaugccgcuguccugcacgaagaacaacagccaccacuacaucauggucggcaacgagaccggccuggagcucacccugaccaacacguccaucaucaaccacaaguucugcaaccugagcgacgcccacaagaagaaccucuacgaccacgcccugauguccaucaucagcaccuuccaccuguccauccccaacuucaaccaguacgaggccaugagcugcgacuucaacgggggcaagaucuccgugcaguacaaccucagccacaccuacgcgaucgacgccgccaaccacugcgggaccaucgccaacggcgugcugcagacguucaugcggauggcguggggcggguccuacaucgcccuggacagcggcaagggguccugggacugcaucaugaccagcuaccaguaccucaucauccagaacaccaccugggaggaccacugccaguucucccgccccagccccaucggcuaccuggggcugcucagccagcggacgcgcgacaucuacaucucccggcgccgccggggcaccuucaccuggacccucagcgacuccgagggcaacgagacgcccgggggcuacugccugacccgguggaugcugaucgaggccgagcucaagugcuucgggaacaccgccgucgccaagugcaacgagaagcacgacgaggaguucugcgacaugcugcgccuguucgacuucaacaagcaggcgauccggcgccucaagacccccgcccagaugagcauccagcugaucaacaaggccgugaacgcccugaucaacgaccagcucaucaugaagaaccaccuccgggacaucaugggcauccccuacugcaacuacuccaaguacugcuaccugaaccacacggugaccgggaagaccagccugccccgcugcugccuggucuccaacggcagcuaccugaacgagacccacuucuccgacgacaucgagcagcaggccgacaacaugaucacggagcuccugcagaaggaguacauggaccggcagggcaagaccccgcuggggcucguggaccuguucguguucagcaccuccuucuaccugaucagcaucuuccugcaccucguccgcaucccgacccaccggcacgugaucggcaagcccugccccaagccccaccgccugaaccacauggggaucugcuccugcggccuguacaagcacccgggggugcccgucaaguggaagcggugaggacuaguaauaaggaaacuguaugaaugucugugggcaggaagugaagagauccuucuguaaagguuuuuggaauuaugucugcugaauaauaaacuuuuuugaaauaauaaaucugguagaaaaaugagaucuaaaaaaaaaaaaaaaaaaaaaaaaaaaaaaaaaaaaaaaaaaaaaaaaaaaaaaaaaaaaaaaaaaaaaaaaaaaaaaaaaaaaaaaaaaaaaaaaaaaa

SEQ ID NO: 25842 - RNA, 1785 nt, Artificial Sequence
  mRNA product Design b-4 (A100) comprising derived and/or modified sequence from LASV(Lassa virus/H.sapiens-wt/NGA/2018/ISTH_0959;Clade II)__AVV65099__GPCmut3 (opt1)
aggagagucccgcagucggcguccagcggcucugcuuguucgugugugugucguugcaggccuuauucaagcuuaccaugggccagaucaucaccuucuuccaggaggugccccacgucaucgaggaggugaugaacaucgugcugaucgcccucagccugcuggccauccucaaggggaucuacaacgucgugaccugcggccuguucgggcugguguccuuccuccugcugugcggccgcagcugcuccacgaccuacaagggggucuacgagcuccagacccuggagcuggacauggcgagccucaacaugaccaugccgcuguccugcacgaagaacaacagccaccacuacaucauggugggcaacgagaccggccuggagcucacccugaccaacacguccaucaucaaccacaaguucugcaaccugagcgacgcccacaagaagaaccucuacgaccacgcccugauguccaucaucagcaccuuccaccuguccauccccaacuucaaccaguacgaggccaugagcugcgacuucaacgggggcaagaucuccgugcaguacaaccucagccacgccuacgcgaucgacgccgccaaccacugcgggaccaucgccaacggcguccugcagaccuucaugcggauggcguggggcggguccuacaucgcccuggacagcggcaagggguccugggacugcaucaugacgagcuaccaguaccucaucauccagaacaccaccugggaggaccacugccaguucucccgccccagccccaucggcuaccuggggcugcucagccagcggacccgcgacaucuacaucucccggcgccgccggggcacguucaccuggacccucagcgacuccgagggcaacgagacccccgggggcuacugccugacgcgguggaugcugaucgaggccgagcucaagugcuucgggaacaccgccguggccaagugcaacgagaagcacgacgaggaguucugcgacaugcugcgccuguucgacuucaacaagcaggcgauccggcgccucaagacccccgcccagaugagcauccagcugaucaacaaggccgugaacgcccugaucaacgaccagcucaucaugaagaaccaccuccgggacaucaugggcaucccguacugcaacuacuccaaguacugcuaccugaaccacaccgucacggggaagaccagccugccccgcugcugccugguguccaacggcagcuaccugaacgagacccacuucuccgacgacaucgagcagcaggccgacaacaugaucaccgagcuccugcagaaggaguacaucgaccggcagggcaagacgccccuggggcucguggaccuguucgucuucagcaccuccuucuaccugaucagcaucuuccugcaccucgugaagaucccgacccaccgccacgugaucggcaagcccugccccaagccccaccggcugaaccacauggggaucugcuccugcggccuguacaagcacccggggguccccgugaaguggaagcgcugaggacuaguaauaaggaaacuguaugaaugucugugggcaggaagugaagagauccuucuguaaagguuuuuggaauuaugucugcugaauaauaaacuuuuuugaaauaauaaaucugguagaaaaaugagaucuaaaaaaaaaaaaaaaaaaaaaaaaaaaaaaaaaaaaaaaaaaaaaaaaaaaaaaaaaaaaaaaaaaaaaaaaaaaaaaaaaaaaaaaaaaaaaaaaaaaa

SEQ ID NO: 25843 - RNA, 1785 nt, Artificial Sequence
  mRNA product Design b-4 (A100) comprising derived and/or modified sequence from LASV(LASV003-NIG-2008;Clade II)__AIT17580__GPCmut3 (opt1)
aggagagucccgcagucggcguccagcggcucugcuuguucgugugugugucguugcaggccuuauucaagcuuaccaugggccagaucaucaccuucuuccaggaggugccccacgucaucgaggaggugaugaacaucgugcugaucgcccucagccugcuggccauccucaaggggaucuacaacgucgcgaccugcggccuguucgggcugguguccuuccuccugcugugcggccgcagcugcuccacgaccuacaaggggguguacgagcuccagacccuggagcuggacauggccagccucaacaugaccaugccgcuguccugcacgaagaacaacagccaccacuacaucauggucggcaacgagaccggccuggagcucacccugaccaacacguccaucaucaaccacaaguucugcaaccugagcgacgcccacaagaagaaccucuacgaccacgcccugauguccaucaucagcaccuuccaccuguccauccccaacuucaaccaguacgaggccaugagcugcgacuucaacgggggcaagaucuccgugcaguacaaccucagccacaccuacgcgguggacgccgccaaccacugcgggaccaucgccaacggcguccugcagacguucaugcggauggcguggggcggguccuacaucgcccuggacagcggcaagggguccugggacugcaucaugaccagcuaccaguaccucaucauccagaacaccaccugggaggaccacugccaguucucccgccccagccccaucggcuaccuggggcugcucagccagcggacgcgcgacaucuacaucucccggcgccgccggggcaccuucaccuggacccucagcgacuccgagagcaacgagacgccgggcggguacugccugacccgguggaugcugaucgaggccgagcucaagugcuucggcaacaccgccguggccaagugcaacgagaagcacgacgaggaguucugcgacaugcugcgccuguucgacuucaacaagcaggcgauccggcgccucaaggcccccgcccagauguccauccagcugaucaacaaggccgugaacgcccugaucaacgaccagcucaucaugaagaaccaccuccgggacaucauggggauccccuacugcaacuacagcaaguacugcuaccugaaccacaccgucacgggccgcaccucccugccccggugcugccuggugagcaacggguccuaccugaacgagacccacuucagcgacgacaucgagcagcaggcggacaacaugaucaccgagcuccugcagaaggaguacauggaccgccagggcaagacgccccugggccucguggaccuguucgucuucuccaccagcuucuaccugaucuccaucuuccugcaccucgugaagaucccgacccaccggcacgugaucgggaagcccugccccaagccccaccgccugaaccacaugggcaucugcagcugcgggcuguacaagcacccgggcguccccgugaaguggaagcggugaggacuaguaauaaggaaacuguaugaaugucugugggcaggaagugaagagauccuucuguaaagguuuuuggaauuaugucugcugaauaauaaacuuuuuugaaauaauaaaucugguagaaaaaugagaucuaaaaaaaaaaaaaaaaaaaaaaaaaaaaaaaaaaaaaaaaaaaaaaaaaaaaaaaaaaaaaaaaaaaaaaaaaaaaaaaaaaaaaaaaaaaaaaaaaaaa

SEQ ID NO: 25844 - RNA, 1785 nt, Artificial Sequence
  mRNA product Design b-4 (A100) comprising derived and/or modified sequence from LASV(LASV035-NIG-2009;Clade II)__AIT17588__GPCmut3 (opt1)
aggagagucccgcagucggcguccagcggcucugcuuguucgugugugugucguugcaggccuuauucaagcuuaccaugggccagaucaucaccuucuuccaggaggugccccacgucaucgaggaggugaugaacaucgugcugaucgcccucagccugcuggccauccucaaggggaucuacaacgucgcgaccugcggccuguucgggcugguguccuuccuccugcugugcggccgcagcugcuccacgaccuacaaggggguguacgagcuccagacccuggagcuggacauggccagccucaacaugaccaugccgcuguccugcacgaagaacaacagccaccacuacaucauggucggcaacgagaccggccuggagcucacccugaccaacacguccaucaucaaccacaaguucugcaaccugagcgacgcccacaagaagaaccucuacgaccacgcccugauguccaucaucagcaccuuccaccuguccauccccaacuucaaccaguacgaggccaugagcugcgacuucaacgggggcaagaucuccgugcaguacaaccucagccacgcguacgccguggacgccgccaaccacugcgggaccaucgcgaacggcguccugcagaccuucaugcggauggccuggggcggguccuacaucgcccuggacagcggcaagggguccugggacugcaucaugacgagcuaccaguaccucaucauccagaacaccaccugggaggaccacugccaguucucccgccccagccccaucggcuaccuggggcugcucagccagcggacccgcgacaucuacaucucccggcgccgccggggcacguucaccuggacccucagcgacuccgagggcaacgagacccccgggggcuacugccugacgcgguggaugcugaucgaggccgagcucaagugcuucgggaacaccgccguggcgaagugcaacgagaagcacgacgaggaguucugcgacaugcugcgccuguucgacuucaacaagcaggccauccggcgccucaaggcccccgcccagaugagcauccagcugaucaacaaggccgugaacgcgcugaucaacgaccagcucaucaugaagaaccaccuccgggacaucaugggcauccccuacugcaacuacuccaaguacugcuaccugaaccacaccgucaccgggaagacgagccugccccgcugcugccugguguccaacggcagcuaccugaacgagacccacuucuccgacgacaucgagcagcaggccgacaacaugaucaccgagcuccugcagaaggaguacaucgaccggcagggcaagaccccgcuggggcucguggaccuguucgucuucagcacguccuucuaccugaucagcaucuuccugcaccucgugaagaucccgacccaccgccacgugaucggcaagcccugccccaagccccaccggcugaaccacauggggaucugcuccugcggccuguacaagcacccggggguccccgugaaguggaagcgcugaggacuaguaauaaggaaacuguaugaaugucugugggcaggaagugaagagauccuucuguaaagguuuuuggaauuaugucugcugaauaauaaacuuuuuugaaauaauaaaucugguagaaaaaugagaucuaaaaaaaaaaaaaaaaaaaaaaaaaaaaaaaaaaaaaaaaaaaaaaaaaaaaaaaaaaaaaaaaaaaaaaaaaaaaaaaaaaaaaaaaaaaaaaaaaaaa

SEQ ID NO: 25845 - RNA, 1785 nt, Artificial Sequence
  mRNA product Design b-4 (A100) comprising derived and/or modified sequence from LASV(LASV1000-NIG-2009;Clade II)__AIT17782__GPCmut3 (opt1)
aggagagucccgcagucggcguccagcggcucugcuuguucgugugugugucguugcaggccuuauucaagcuuaccaugggccagaucaucaccuucuuccaggaggugccccacgucaucgaggaggugaugaacaucgugcugaucgcccucagccugcuggccauccucaaggggaucuacaacgucgcgaccugcggccuguucgggcugguguccuuccuccugcugugcggccgcagcugcuccacgaccuacaaggggguguacgagcuccagacccuggagcuggacauggccagccucaacaugaccaugccgcuguccugcacgaagaacaacagccaccacuacaucauggucggcaacgagaccggccuggagcucacccugaccaacacguccaucaucaaccacaaguucugcaaccugagcgacgcccacaagaagaaccucuacgaccacgcccugauguccaucaucagcaccuuccaccuguccauccccaacuucaaccaguacgaggccaugagcugcgacuucaacgggggcaagaucuccgugcaguacaaccucagccacaccuacgcgguggacgccgccaaccacugcgggaccaucgccaacggcguccugcagacguucaugcggauggcguggggcggguccuacaucgcccuggacagcggcaagggguccugggacugcaucaugaccagcuaccaguaccucaucauccagaacaccaccugggaggaccacugccaguucucccgccccagccccaucggcuaccuggggcugcucagccagcggacgcgcgacaucuacaucucccggcgccgccggggcaccuucaccuggacccucagcgacuccgagggcaacgagacgcccgggggcuacugccugacccgguggaugcugaucgaggccgagcucaagugcuucgggaacaccgccguggccaagugcaacgagaagcacgacgaggaguucugcgacaugcugcgccuguucgacuucaacaagcaggcgaucaagcggcucaagacccccgcccagaugagcauccagcugaucaacaaggccgugaacgcccugaucaacgaccagcucaucaugaagaaccaccuccgcgacaucaugggcauccccuacugcaacuacuccaaguacugcuaccugaaccacacggucaccgggaagaccagccugccccggugcugccugguguccaacggcagcuaccugaacgagacccacuucuccgacgacaucgagcagcaggccgacaacaugaucacggagcuccugcagaaggaguacaucgaccgccagggcaagaccccgcuggggcucguggaccuguucgucuucagcaccuccuucuaccugaucagcaucuuccugcaccucgugaagaucccgacccaccggcacguggucggcaagcccugccccaagccccaccgccugaaccacauggggaucugcuccugcggccuguacaagcacccgggggugcccgugaaguggaagcggugaggacuaguaauaaggaaacuguaugaaugucugugggcaggaagugaagagauccuucuguaaagguuuuuggaauuaugucugcugaauaauaaacuuuuuugaaauaauaaaucugguagaaaaaugagaucuaaaaaaaaaaaaaaaaaaaaaaaaaaaaaaaaaaaaaaaaaaaaaaaaaaaaaaaaaaaaaaaaaaaaaaaaaaaaaaaaaaaaaaaaaaaaaaaaaaaa

SEQ ID NO: 25846 - RNA, 1785 nt, Artificial Sequence
  mRNA product Design b-4 (A100) comprising derived and/or modified sequence from LASV(LASV221-NIG-2010;Clade II)__AIT17624__GPCmut3 (opt1)
aggagagucccgcagucggcguccagcggcucugcuuguucgugugugugucguugcaggccuuauucaagcuuaccaugggccagaucaucaccuucuuccaggaggugccccacgucaucgaggaggugaugaacaucgugcugaucgcccucagccugcuggccauccucaaggggaucuacaacgucgcgaccugcggccuguucgggcugguguccuuccuccugcugugcggccgcagcugcuccacgaccuacaaggggguguacgagcuccagacccuggagcuggacauggccagccucaacaugaccaugccgcuguccugcacgaagaacaacagccaccacuacaucauggucggcaacgagaccggccuggagcucacccugaccaacacguccaucaucaaccacaaguucugcaaccugagcgacgcccacaagaagaaccucuacgaccacgcccugauguccaucaucagcaccuuccaccuguccauccccaacuucaaccaguacgaggccaugagcugcgacuucaacgggggcaagaucuccgugcaguacaaccucagccacaccuacgcgaucgacgccgccaaccacugcgggaccaucgccaacggcgugcugcagacguucaugcggauggcguggggcggguccuacaucgcccuggacagcggcaagggguccugggacugcaucaugaccagcuaccaguaccucaucauccagaacaccaccugggaggaccacugccaguucucccgccccagccccaucggcuaccuggggcugcucagccagcggacgcgcgacaucuacaucucccggcgccgccggggcaccuucaccuggacccucagcgacuccgagggcaacgagacgcccgggggcuacugccugacccgguggaugcugaucgaggccgagcucaagugcuucgggaacaccgccgucgccaagugcaacgagaagcacgacgaggaguucugcgacaugcugcgccuguucgacuucaacaagcaggcgauccggcgccucaagacccccgcccagaugagcauccagcugaucaacaaggccgugaacgcccugaucaacgaccagcucaucaugaagaaccaccuccgggacaucaugggcauccccuacugcaacuacuccaaguacugcuaccugaaccacacggugaccgggaagaccagccugccccgcugcugccuggucuccaacggcagcuaccugaacgagacccacuucuccgacgacaucgagcagcaggccgacaacaugaucacggagaugcuccagaaggaguacauggaccggcagggcaagaccccgcuggggcugguggaccucuucguguucagcaccuccuucuaccugaucagcaucuuccugcaccuggucaagaucccgacccaccgccacgugaucggcaagcccugccccaagccccaccggcucaaccacauggggaucugcuccugcggccuguacaagcacccgggggugcccgucaaguggaagcgcugaggacuaguaauaaggaaacuguaugaaugucugugggcaggaagugaagagauccuucuguaaagguuuuuggaauuaugucugcugaauaauaaacuuuuuugaaauaauaaaucugguagaaaaaugagaucuaaaaaaaaaaaaaaaaaaaaaaaaaaaaaaaaaaaaaaaaaaaaaaaaaaaaaaaaaaaaaaaaaaaaaaaaaaaaaaaaaaaaaaaaaaaaaaaaaaaa

SEQ ID NO: 25847 - RNA, 1785 nt, Artificial Sequence
  mRNA product Design b-4 (A100) comprising derived and/or modified sequence from LASV(LASV237-NIG-2010;Clade II)__AIT17638__GPCmut3 (opt1)
aggagagucccgcagucggcguccagcggcucugcuuguucgugugugugucguugcaggccuuauucaagcuuaccaugggccagaucaucaccuucuuccaggaggugccccacgucaucgaggaggugaugaacaucgugcugaucgcccucagccugcuggccauccucaaggggaucuacaacgucgcgaccugcggccuguucgggcugguguccuuccuccugcugugcggccgcagcugcuccacgaccuacaaggggguguacgagcuccagacccuggagcuggacauggccagccucaacaugaccaugccgcuguccugcacgaagaacaacagccaccacuacaucauggucggcaacgagaccggccuggagcucacccugaccaacacguccaucaucaaccacaaguucugcaaccugagcgacgcccacaagaaggaccucuacgaccacgcccugauguccaucaucagcaccuuccaccuguccauccccaacuucaaccaguacgaggccaugagcugcgacuucaacgggggcaagaucuccgugcaguacaaccucagccacaccuacgcgguggacgccgccaaccacugcgggaccaucgccaacggcguccugcagacguucaugcggauggcguggggcggguccuacaucgcccuggacagcggcaagggguccugggacugcaucaugaccagcuaccaguaccucaucauccagaacaccaccugggaggaccacugccaguucucccgccccagccccaucggcuaccuggggcugcucagccagcggacgcgcgacaucuacaucucccggcgccgccggggcaccuucaccuggacccucagcgacuccgagggcaacgagacgcccgggggcuacugccugacccgguggaugcugaucgaggccgagcucaagugcuucgggaacaccgccguggccaagugcaacgagaagcacgacgaggaguucugcgacaugcugcgccuguucgacuucaacaagcaggcgauccggcgccucaagacccccgcccagaugagcauccagcugaucaacaaggccgugaacgcccugaucaacgaccagcucaucaugaagaaccaccuccgggacaucaugggcauccccuacugcaacuacuccaaguacugcuaccugaaccacacggucaccgggaagaccagccugccccgcugcugccugguguccaacggcagcuaccugaacgagacccacuucuccgacgacaucgagcagcaggccgacaacaugaucacggagcuccugcagaaggaguacauggaccggcagggcaagaccccgcuggggcucguggaccuguucgucuucagcaccuccuucuaccugaucagcaucuuccugcaccucaucaagaucccgacccaccgccacaucacgggcaagcccugccccaagccccaccggcugaaccacauggggaucugcuccugcggccuguacaagcacccgggggugcccgugaaguggaagcgcugaggacuaguaauaaggaaacuguaugaaugucugugggcaggaagugaagagauccuucuguaaagguuuuuggaauuaugucugcugaauaauaaacuuuuuugaaauaauaaaucugguagaaaaaugagaucuaaaaaaaaaaaaaaaaaaaaaaaaaaaaaaaaaaaaaaaaaaaaaaaaaaaaaaaaaaaaaaaaaaaaaaaaaaaaaaaaaaaaaaaaaaaaaaaaaaaa

SEQ ID NO: 25848 - RNA, 1785 nt, Artificial Sequence
  mRNA product Design b-4 (A100) comprising derived and/or modified sequence from LASV(LASV253-NIG-2011;Clade II)__AIT17670__GPCmut3 (opt1)
aggagagucccgcagucggcguccagcggcucugcuuguucgugugugugucguugcaggccuuauucaagcuuaccaugggccagaucaucaccuucuuccaggaggugccccacgucaucgaggaggugaugaacaucgugcugaucgcccucagccugcuggccauccucaaggggaucuacaacgucgcgaccugcggccuguucgggcugguguccuuccuccugcugugcggccgcagcugcuccacgaccuacaaggggguguacgagcuccagacccuggagcuggacauggccagccucaacaugaccaugccgcuguccugcacgaagaacaacagccaccacuacaucauggucggcaacgagaccggccuggagcucacccugaccaacacguccaucaucaaccacaaguucugcaaccugagcgacgcccacaagaagaaccucuacgaccacgcccugauguccaucaucagcaccuuccaccuguccauccccaacuucaaccaguacgaggccaugagcugcgacuucaacgggggcaagaucuccgugcaguacaaccucagccacaccuacgcgguggacgccgccaaccacugcgggaccaucgccaacggcguccugcagacguucaugcggauggcguggggcggguccuacaucgcccuggacagcggcaagggguccugggacugcaucaugaccagcuaccaguaccucaucauccagaacaccaccugggaggaccacugccaguucucccgccccagccccaucggcuaccuggggcugcucagccagcggacgcgcgacaucuacaucucccggcgccgccggggcaccuucaccuggacccucagcgacuccgagggcaacgagacgcccgggggcuacugccugacccgguggaugcugaucgaggccgagcucaagugcuucgggaacaccgccguggccaagugcaacgagaagcacgacgaggaguucugcgacaugcugcgccuguucgacuucaacaagcaggcgauccggcgccucaaggcccccgcccagaugagcauccagcugaucaacaaggccgugaacgcccugaucaacgaccagcucaucaugaagaaccaccuccgggacaucaugggcaucccguacugcaacuacuccaaguacugcuaccugaaccacaccgucacggggcgcaccagccugccccggugcugccugguguccaacggcagcuaccugaacgagacccacuucuccgacgacaucgagcagcaggcggacaacaugaucaccgagcuccugcagaaggaguacaucgaccgccagggcaagacgccccuggggcucguggaccuguucgucuucagcaccuccuucuaccugaucagcaucuuccugcaccucgugaagaucccgacccaccggcacaucaucggcaagcccugccccaagccccaccgccugaaccacauggggaucugcuccugcggccuguacaagcacccgggggugcccgucaaguggaagcggugaggacuaguaauaaggaaacuguaugaaugucugugggcaggaagugaagagauccuucuguaaagguuuuuggaauuaugucugcugaauaauaaacuuuuuugaaauaauaaaucugguagaaaaaugagaucuaaaaaaaaaaaaaaaaaaaaaaaaaaaaaaaaaaaaaaaaaaaaaaaaaaaaaaaaaaaaaaaaaaaaaaaaaaaaaaaaaaaaaaaaaaaaaaaaaaaa

SEQ ID NO: 25849 - RNA, 1785 nt, Artificial Sequence
  mRNA product Design b-4 (A100) comprising derived and/or modified sequence from LASV(LASV254-NIG-2011;Clade II)__AIT17674__GPCmut3 (opt1)
aggagagucccgcagucggcguccagcggcucugcuuguucgugugugugucguugcaggccuuauucaagcuuaccaugggccagaucaucaccuucuuccaggaggugccccacgucaucgaggaggugaugaacaucgugcugaucgcccucagccugcuggccauccucaaggggaucuacaacgucgcgaccugcggccuguucgggcugguguccuuccuccugcugugcggccgcagcugcuccacgaccuacaaggggguguacgagcuccagacccuggagcuggacaugaccaaccucaacaugacgaugccgcugagcugcaccaagaacaacucccaccacuacaucauggucggcaacgagaccggccuggagcucacccugacgaacaccagcaucaucaaccacaaguucugcaaccuguccgacgcccacaagaagaaccucuacaaccacgcccugaugagcaucaucuccaccuuccaccugagcauccccaacuucaaccaguacgaggccauguccugcgacuucaacgggggcaagaucagcgugcaguacaaccucucccacagcuacgccguggacgcggccaaccacugcgggaccaucgccaacggcguccugcagacguucaugcggauggccuggggcggguccuacaucgcgcuggacagcggcaaggggaacugggacugcaucaugaccuccuaccaguaccucaucauccagaacaccaccugggaggaccacugccaguucagccgccccucccccaucggcuaccuggggcugcucagccagcggacgcgcgacaucuacaucagccggcgccgccggggcaccuucaccuggacccucuccgacagcgagggcaacgagacgcccgggggcuacugccugacccgguggaugcugaucgaggccgagcucaagugcuucgggaacaccgccguggccaagugcaacgagaagcacgacgaggaguucugcgacaugcugcgccuguucgacuucaacaagcaggccauccggcgccucaagacccccgcgcaggccaacauccagcugaucaacaaggccgugaacgcccugaucaacgaccagcucaucaugaagaaccaccuccgggacaucaugggcauccccuacugcaacuacuccaaguacugcuaccugaaccacacggucaccgggaagaccagccugccccgcugcugccugguguccaacggcagcuaccugaacgagacccacuucuccgacgacaucgagcagcaggccgacaacaugaucacggagcuccugcagaaggaguacauggaccggcagggcaagaccccgcuggggcucguggaccuguucgucuucagcaccuccuucuaccugaucagcaucuuccugcaccucgugaagaucccgacccaccgccacgugaucggcaagcccugccccaagccccaccggcugaaccacauggggaucugcuccugcggccuguacaagcacccggggguccccgugaaguggaagcgcugaggacuaguaauaaggaaacuguaugaaugucugugggcaggaagugaagagauccuucuguaaagguuuuuggaauuaugucugcugaauaauaaacuuuuuugaaauaauaaaucugguagaaaaaugagaucuaaaaaaaaaaaaaaaaaaaaaaaaaaaaaaaaaaaaaaaaaaaaaaaaaaaaaaaaaaaaaaaaaaaaaaaaaaaaaaaaaaaaaaaaaaaaaaaaaaaa

SEQ ID NO: 25850 - RNA, 1785 nt, Artificial Sequence
  mRNA product Design b-4 (A100) comprising derived and/or modified sequence from LASV(Nig08-A19;Clade III)__ADU56618__GPCmut3 (opt1)
aggagagucccgcagucggcguccagcggcucugcuuguucgugugugugucguugcaggccuuauucaagcuuaccaugggccagaucgugaccuucuuccaggaggucccccacgugaucgaggaggugaugaacaucguccugaucgcccucagcauccuggccauccugaaggggcucuacaacaucgcgaccugcggccugaucgggcuggugacguuccuccugcuguccggccgcagcugcuccaugaccuacaaggggguguacgagcuccagacccuggagcugaacaugaacacccucaacaugacgaugccgcugagcugcaccaagaacaacucccaccacuacaucauggucggcaacgagaccggccuggagcucacccugacgaacaccagccugcuccaccacaaguucugcaaccuguccgacgcccacaagaagaaccuguacgaccacacccucaugagcaucaucuccaccuuccaccugagcauccccaacuucaaccaguacgaggccauguccugcgacuucaacgggggcaagaucacggugcaguacaaccugagccacuccuacgccaucgacgccgcgaaccacugcgggaccguggccaacggcguccuccagaccuucaugcggauggccuggggcgggagcuacaucgcccuggacuccggccgcgggaagugggacugcaucaugaccagcuaccaguaccugaucauccagaacacgaccugggaggaccacugccaguucucccggcccagccccaucggcuaccucgggcugcugucccagcgcacccgggacaucuacaucagccgccggcgccggggcaccuucacguggacccugagcgacuccgagggcaacgagacccccgggggcuacugccucacccgcuggaugcugaucgaggcggagcugaagugcuucgggaacacggccguggccaagugcaacgagaagcacgacgaggaguucugcgacaugcuccggcuguucgacuucaacaagcaggccauccgccggcugaaggcccccgcgcagaugagcauccagcucaucaacaaggccgugaacgcccugaucaacgaccagcugaucaugaagaaccaccuccgcgacaucaugggcauccccuacugcaacuacuccaaguacugcuaccugaaccacaccagcaccgggcggaccucccugccccgcugcugccucgucagcaacggcuccuaccugaacgagacgcacuucagcgacgacaucgagcagcaggccgacaacaugaucaccgagaugcugcagaaggaguaccucgaccggcagggcaagaccccgcuggggcugguggaccuguucguguucuccaccagcuucuaccucaucuccaucuuccugcaccuggucaagaucccgacgcaccgccacaucgugggcaagcccugccccaagccccaccggcucaaccacauggggaucugcagcugcggccuguacaagcagccgggggugcccguccgcuggaagcggugaggacuaguaauaaggaaacuguaugaaugucugugggcaggaagugaagagauccuucuguaaagguuuuuggaauuaugucugcugaauaauaaacuuuuuugaaauaauaaaucugguagaaaaaugagaucuaaaaaaaaaaaaaaaaaaaaaaaaaaaaaaaaaaaaaaaaaaaaaaaaaaaaaaaaaaaaaaaaaaaaaaaaaaaaaaaaaaaaaaaaaaaaaaaaaaaa

SEQ ID NO: 25851 - RNA, 1788 nt, Artificial Sequence
  mRNA product Design b-4 (A100) comprising derived and/or modified sequence from LASV(G1180-SLE-2010;Clade IV)__AIT17168__GPCmut3 (opt1)
aggagagucccgcagucggcguccagcggcucugcuuguucgugugugugucguugcaggccuuauucaagcuuaccaugggccagaucgugaccuucuuccaggaggucccccacgugaucgaggaggugaugaacaucguccugaucgcccucagcauccuggccgugcugaaggggcucuacaacuucgcgaccugcggccugguggggcugcucaccuuccugcugcucugcggccgcuccugcaccgccagccgguacaagggggucuacgagcugcagacccuggagcucaacauggagacccugaacaugacgaugccgcuguccugcaccaagaacaacagccaccacuacaucauggugggcaacgagaccggccucgagcugacccugacgaacaccuccaucaucaaccacaaguucugcaaccucagcgacgcccacaagaagaaccuguacgaccacgcccugauguccaucaucagcaccuuccaccucuccauccccaacuucaaccaguacgaggccaugagcugcgacuucaacgggggcaagaucuccgugcaguacaaccugagccacuccuacgcgggggacgccgccaaccacugcggcaccgucgccaacggggugcugcagacguucaugcgcauggcguggggcggcagcuacaucgcccucgacuccgggcacggcagcugggacugcaucaugaccuccuaccaguaccugaucauccagaacaccaccugggaggaccacugccaguucagccggcccucccccaucggguaccugggccuccugagccagcgcacgcgggacaucuacaucagccgccggcgccggggcaccuucaccuggacccuguccgacagcgaggggaaggacacgccgggcggguacugccugacccgcuggaugcucaucgaggccgagcugaagugcuucggcaacaccgccguggccaagugcaacgagaagcacgacgaggaguucugcgacaugcugcggcuguucgacuucaacaagcaggcgauccagcgccugaaggcccccgcccagauguccauccagcugaucaacaaggccgucaacgcccucaucaacgaccagcugaucaugaagaaccaccuccgggacaucauggggauccccuacugcaacuacagcaaguacugcuaccucaaccacaccacgaccggcaagaccucccugcccaagugcugccuggugagcaacggcuccuaccucaacgagacccacuucagcgacgacaucgagcagcaggcggacaacaugaucacggagaugcugcagaaggaguacauggagcgccaggggaagacgccccugggccucguggaccuguucgucuucuccaccagcuucuaccugaucuccaucuuccugcaccucgugaagaucccgacccaccggcacaucgugggcaagagcugccccaagccccaccgccugaaccacauggggaucugcuccugcgggcuguacaagcagcccggcgucccggugaaguggaagcggugaggacuaguaauaaggaaacuguaugaaugucugugggcaggaagugaagagauccuucuguaaagguuuuuggaauuaugucugcugaauaauaaacuuuuuugaaauaauaaaucugguagaaaaaugagaucuaaaaaaaaaaaaaaaaaaaaaaaaaaaaaaaaaaaaaaaaaaaaaaaaaaaaaaaaaaaaaaaaaaaaaaaaaaaaaaaaaaaaaaaaaaaaaaaaaaaa

SEQ ID NO: 25852 - RNA, 1788 nt, Artificial Sequence
  mRNA product Design b-4 (A100) comprising derived and/or modified sequence from LASV(G1442-SLE-2011;Clade IV)__AIT17180__GPCmut3 (opt1)
aggagagucccgcagucggcguccagcggcucugcuuguucgugugugugucguugcaggccuuauucaagcuuaccaugggccagaucgugaccuucuuccaggaggucccccacgugaucgaggaggugaugaacaucguccugaucgcccucagcauccuggccgugcugaaggggcucuacaacguggcgaccugcggccugaucgggcuggucacguuccuccugcugugcggccgcuccugcaccaccacccucuacaaggggguguacgagcugcagacgcuggagcucaacauggagacccugaacaugaccaugccgcugagcugcaccaagaacaacucccaccacuacauccgggugggcaacgagacgggccucgagcugacccugaccaacaccagcaucaucaaccacaaguucugcaaccucuccgacgcccacaagaagaaccuguacgaccacgcccugaugagcaucaucuccacguuccaccucagcauccccaacuucaaccaguacgaggccauguccugcgacuucaacgggggcaagaucagcguccaguacaaccugucccacagcuacgccggggacgcggccaaccacugcggcaccguggccaacggggugcugcagaccuucaugcgcauggccuggggcggcuccuacaucgcgcucgacagcgggcggggcaacugggacugcaucaugaccuccuaccaguaccugaucauccagaacacgaccugggacgaccacugccaguucagccgccccucccccaucggguaccugggccuccugagccagcggacccgcgacgucuacaucucccggcgccgccggggcaccuucacguggacccugagcgacagcgaggggaaggacaccccgggcggguacugccugacccgguggaugcucaucgaggccgagcugaagugcuucggcaacacggccguggccaagugcaacgagaagcacgacgaggaguucugcgacaugcugcgccucuucgacuucaacaagcaggccauccagcggcugaaggcgcccgcccagauguccauccagcugaucaacaaggccgugaacgcccucaucaacgaccagcugaucaugaagaaccaccuccgcgacaucauggggauccccuacugcaacuacagcaaguacugcuaccugaacaacaccgccaccggcaagaccucccugcccaagugcugccugaucagcaacggcuccuaccucaacgagacgcacuucagcgacgacaucgagcaggaggcggacaacaugaucaccgagaugcugcagaaggaguacauggagcggcaggggaagacgccccugggccucgucgaccuguucguguucuccaccagcuucuaccugaucuccaucuuccugcaccucgugaagaucccgacccaccgccacaucgucggcaagagcugccccaagccccaccggcugaaccacauggggaucugcuccugcgggcuguacaagcagcccggcgugccggugcgcuggaagcggugaggacuaguaauaaggaaacuguaugaaugucugugggcaggaagugaagagauccuucuguaaagguuuuuggaauuaugucugcugaauaauaaacuuuuuugaaauaauaaaucugguagaaaaaugagaucuaaaaaaaaaaaaaaaaaaaaaaaaaaaaaaaaaaaaaaaaaaaaaaaaaaaaaaaaaaaaaaaaaaaaaaaaaaaaaaaaaaaaaaaaaaaaaaaaaaaa

SEQ ID NO: 25853 - RNA, 1788 nt, Artificial Sequence
  mRNA product Design b-4 (A100) comprising derived and/or modified sequence from LASV(G3010-SLE-2013;Clade IV)__AIT17344__GPCmut3 (opt1)
aggagagucccgcagucggcguccagcggcucugcuuguucgugugugugucguugcaggccuuauucaagcuuaccaugggccagaucgugaccuucuuccaggaggucccccacgugaucgaggaggugaugaacaucguccugaucgcccucagcauccuggccgugcugaaggggcucuacaacuucgcgaccugcggccugguggggcuggucacguuccuccugcugugcggccgcuccugcaccaccagccucuacaaggggguguacgagcugcagacccuggagcucaacauggagacgcugaacaugaccaugccgcuguccugcaccaagaacaacagccaccacuacaucauggugggcaacgagaccggccucgagcugacgcugaccaacaccuccaucaucaaccacaaguucugcaaccucagcgacgcccacaagaagaaccuguacaaccacgcccugauguccaucaucagcaccuuccaccucuccauccccaacuucaaccaguacgaggccaugagcugcgacuucaacgggggcaagaucuccguccaguacaaccugagccacuccuacgccggggacgcggccagccacugcggcacgguggccaacggggugcugcagaccuucaugcggauggccuggggcggcuccuacaucgcgcucgacagcggguacggcaagugggacugcaucaugaccuccuaccaguaccugaucauccagaacaccacgugggaggaccacugccaguucagccgccccucccccaucggguaccugggccuccugagccagcggacccgcgacaucuacaucagccggcgccgccggggcaccuucaccuggacgcuguccgacagcgaggggaaggacaccccgggcggguacugccugacccgguggaugcucaucgaggccgagcugaagugcuucggcaacaccgccgucgccaagugcaacgagaagcacgacgaggaguucugcgacaugcugcgccucuucgacuucaacaagcaggccauccagcggcugaagacgcccgcgcagauguccauccagcugaucaacaaggccgugaacgcccucaucaacgaccagcugaucaugaagaaccaccuccgcgacaucauggggauccccuacugcaacuacagcaaguacugcuaccugaaccacaccaccaccggcaagacgucccugcccaagugcugccuggugagcaacggcuccuaccucaacgagacccacuucagcgacgacaucgagcagcaggccgacaacaugaucaccgagaugcugcagaaggaguacauggagcggcaggggaagacgccccugggccucgucgaccuguucguguucuccaccagcuucuaccugaucuccaucuuccugcaccucgugaagaucccgacccaccgccacaucgucggcaagagcugccccaagccccaccggcugaaccacauggggaucugcuccugcgggcuguacaagcagcccggcgugccggugcgcuggaagcggugaggacuaguaauaaggaaacuguaugaaugucugugggcaggaagugaagagauccuucuguaaagguuuuuggaauuaugucugcugaauaauaaacuuuuuugaaauaauaaaucugguagaaaaaugagaucuaaaaaaaaaaaaaaaaaaaaaaaaaaaaaaaaaaaaaaaaaaaaaaaaaaaaaaaaaaaaaaaaaaaaaaaaaaaaaaaaaaaaaaaaaaaaaaaaaaaa

SEQ ID NO: 25854 - RNA, 1788 nt, Artificial Sequence
  mRNA product Design b-4 (A100) comprising derived and/or modified sequence from LASV(G502-SLE-2009;Clade IV)__AIT17126__GPCmut3 (opt1)
aggagagucccgcagucggcguccagcggcucugcuuguucgugugugugucguugcaggccuuauucaagcuuaccaugggccagaucgugaccuucuuccaggaggucccccacgugaucgaggaggugaugaacaucguccugaucgcccucagcauccuggccgugcugaaggggcucuacaacuucgcgaccugcggccugguggggcugcucacguuccugcugcucugcggccgcuccugcaccaccgggcuguacaagggcgucuacgagcugcagacccucgagcugaacauggagacgcugaacaugaccaugccgcucagcugcaccaagaacaacucccaccacuacaucauggugggcaacgagaccgggcuggagcugacgcucaccaacaccagcaucaucaaccacaaguucugcaaccuguccgacgcccacaagaagaaccuguacgaccacgcccucaugagcaucaucuccaccuuccaccugagcauccccaacuucaaccaguacgaggccauguccugcgacuucaacggcgggaagaucagcgugcaguacaaccugucccacagcuacgccggcgacgcggccgaccacugcgggacggucgccaacggcgugcuccagaccuucaugcggauggccuggggcggguccuacaucgcgcuggacagcggccgcgggcggugggacugcaucaugaccuccuaccaguaccugaucauccagaacaccacgugggaggaccacugccaguucagccgccccucccccaucggcuaccucggccugcugagccagcggacccgcgacaucuacaucucccggcgccgccgggggaccuucaccuggacgcugagcgacagcgagggcaaggacacccccgggggcuacugccucacccgguggaugcugaucgaggccgagcugaagugcuucgggaacaccgccguggccaagugcaacgagaagcacgacgaggaguucugcgacaugcuccgccuguucgacuucaacaagcaggccauccagcggcugaaggcgcccgcccagauguccauccagcucaucaacaaggccgucaacgcccugaucaacgaccagcuggugaugaagaaccaccuccgcgacaucaugggcauccccuacugcaacuacagccgguacugcuaccugaaccacacgaccaccggccgcaccucccugcccaagugcugccucgugagcaacggguccuaccugaacgagacgcacuucagcgacgacaucgagcagcaggccgacaacaugaucaccgagaugcugcagaaggaguacauggagcggcagggcaagaccccgcucgggcuggucgaccuguucguguucuccaccagcuucuaccugaucuccaucuuccuccaccuggugaagaucccgacgcaccgccacaucgucggcaagagcugccccaagccccaccggcugaaccacauggggaucugcuccugcggccucuacaagcagcccggcgugccggugaaguggaagcgcugaggacuaguaauaaggaaacuguaugaaugucugugggcaggaagugaagagauccuucuguaaagguuuuuggaauuaugucugcugaauaauaaacuuuuuugaaauaauaaaucugguagaaaaaugagaucuaaaaaaaaaaaaaaaaaaaaaaaaaaaaaaaaaaaaaaaaaaaaaaaaaaaaaaaaaaaaaaaaaaaaaaaaaaaaaaaaaaaaaaaaaaaaaaaaaaaa

SEQ ID NO: 25855 - RNA, 1788 nt, Artificial Sequence
  mRNA product Design b-4 (A100) comprising derived and/or modified sequence from LASV(G733-SLE-2010;Clade IV)__AIT17154__GPCmut3 (opt1)
aggagagucccgcagucggcguccagcggcucugcuuguucgugugugugucguugcaggccuuauucaagcuuaccaugggccagaucgugaccuucuuccaggaggucccccacgugaucgaggaggugaugaacaucguccugaucgcccucagcauccuggccgugcugaaggggcucuacaacuucgcgaccugcggcaucguggggcuggucuccuuccugcuccugugcggccgcagcugcacgaccucccuguacaaggggguguacgagcuccagacccuggagcugaacauggagacccucaacaugacgaugccgcugagcugcaccaagaacaacucccaccacuacaucauggugggcaacgagaccggccuggagcucacccugacgaacaccagcaucaucaaccacaaguucugcaaccuguccgacgcccacaagaagaaccucuacgaccacgcccugaugagcaucaucuccaccuuccaccugagcauccccaacuucaaccaguacgaggccauguccugcgacuucaacgggggcaagaucagcguccaguacaaccucucccacagcuacgccggggacgcggccaaccacugcggcaccaucgccaacggggugcugcagacguucaugcggauggccuggggcggcuccuacaucgcgcuggacagcgggcgcgaccggugggacugcaucaugaccuccuaccaguaccucaucauccagaacaccaccugggaggaccacugccaguucagccgccccucccccaucggcuaccuggggcugcucagccagcggacgcgcgacaucuacaucagccggcgccgccggggcaccuucaccuggacccucuccgacagcgagggcaaggacacgcccgggggcuacugccugacccgguggaugcugaucgaggccgagcucaagugcuucgggaacaccgccguggccaagugcaacgagaagcacgacgaggaguucugcgacaugcugcgccuguucgacuucaacaagcaggccauccagcggcucaaggcgcccgcccagauguccauccagcugaucaacaaggccgucaacgcccugaucaacgaccagcucaucaugaagaaccaccuccgcgacaucaugggcauccccuacugcaacuacagcaaguacugcuaccugaaccacaccacgaccgggaagaccucccugcccaagugcugccuggugagcaacggcuccuaccugaacgagacccacuucagcgacgacaucgagcagcaggccgacaacaugaucacggagaugcuccagaaggaguacauggagcggcagggcaagaccccgcuggggcugguggaccucuucgucuucuccaccagcuucuaccugaucuccaucuuccugcaccuggugaagaucccgacccaccgccacguggucggcaagagcugccccaagccccaccggcucaaccacauggggaucugcuccugcggccuguacgggcagcccggcgugccggugaaguggaagcgcugaggacuaguaauaaggaaacuguaugaaugucugugggcaggaagugaagagauccuucuguaaagguuuuuggaauuaugucugcugaauaauaaacuuuuuugaaauaauaaaucugguagaaaaaugagaucuaaaaaaaaaaaaaaaaaaaaaaaaaaaaaaaaaaaaaaaaaaaaaaaaaaaaaaaaaaaaaaaaaaaaaaaaaaaaaaaaaaaaaaaaaaaaaaaaaaaa

SEQ ID NO: 25856 - RNA, 1788 nt, Artificial Sequence
  mRNA product Design b-4 (A100) comprising derived and/or modified sequence from MOPV/LASV reassortant(IGS-1;Clade IV)__AFY05576__GPCmut3 (opt1)
aggagagucccgcagucggcguccagcggcucugcuuguucgugugugugucguugcaggccuuauucaagcuuaccaugggccagaucgugaccuucuuccaggaggucccccacgugaucgaggaggugaugaacaucguccugaucgcccucagcgugcuggccgugcugaaggggcucuacaacuucgcgaccugcggccuggucgggcuggugacguuccuccugcugugcggccgcuccugcaccaccagccucuacaaggggguguacgagcugcagacccuggagcucaacauggagacgcugaacaugaccaugccgcuguccugcaccaagaacaacagccaccacuacaucauggucggcaacgagaccggccucgagcugacgcugaccaacaccuccaucaucaaccacaaguucugcaaccucagcgacgcccacaagaagaaccuguacgaccacgcccugauguccaucaucagcaccuuccaccucuccauccccaacuucaaccaguacgaggccaugagcugcgacuucaacgggggcaagaucuccgugcaguacaaccugagccacuccuacgccggggacgcggccaaccacugcggcacgguggccaacgggguccugcagaccuucaugcggauggccuggggcggcagcuacaucgcgcucgacuccgggcgcggcaacugggacugcaucaugaccagcuaccaguaccugaucauccagaacaccacgugggaggaccacugccaguucucccggcccagccccaucggguaccugggccuccugucccagcgcacccgggacaucuacaucagccgccggcgccggggcaccuucaccuggacgcugagcgacuccgagggggaggacaccccgggcggguacugccugacccgcuggaugcucaucgaggccgagcugaagugcuucggcaacaccgccguggccaagugcaacgagaagcacgacgaggaguucugcgacaugcugcggcuguucgacuucaacaagcaggccauccagcgccugaaggcgcccgcccagaugagcauccagcugaucaacaaggccgugaacgcccucaucaacgaccagcugaucaugaagaaccaccuccgggacaucauggggauccccuacugcaacuacuccaaguacugcuaccucaaccacacgaccaccggccgcaccagccugcccaagugcugccuggucuccaacggcagcuaccucaacgagacgcacuucuccgacgacaucgagcagcaggccgacaacaugaucaccgagaugcugcagaaggaguacauggagcggcaggggaagacgccccugggccucguggaccuguucguguucagcaccuccuucuaccugaucagcaucuuccugcaccucgucaagaucccgacccaccgccacaucguggggaaguccugccccaagccccaccggcugaaccacaugggcaucugcagcugcgggcuguacaagcagcccggcgugccggucaaguggaagcgcugaggacuaguaauaaggaaacuguaugaaugucugugggcaggaagugaagagauccuucuguaaagguuuuuggaauuaugucugcugaauaauaaacuuuuuugaaauaauaaaucugguagaaaaaugagaucuaaaaaaaaaaaaaaaaaaaaaaaaaaaaaaaaaaaaaaaaaaaaaaaaaaaaaaaaaaaaaaaaaaaaaaaaaaaaaaaaaaaaaaaaaaaaaaaaaaaa

SEQ ID NO: 25857 - RNA, 1788 nt, Artificial Sequence
  mRNA product Design b-4 (A100) comprising derived and/or modified sequence from LASV(LM765-SLE-2012;Clade IV)__AIT17814__GPCmut3 (opt1)
aggagagucccgcagucggcguccagcggcucugcuuguucgugugugugucguugcaggccuuauucaagcuuaccaugggccagaucgugaccuucuuccaggaggucccccacgugaucgaggaggugaugaacaucguccugaucgcccucagcauccuggccgugcugaaggggcucuacaacuucgcgaccugcggccugguggggcuggucacguuccuccugcugugcggccgcuccugcaccaccagccucuacaaggggguguacgagcugcagacccuggagcucaacauggagacgcugaacaugaccaugccgcuguccugcaccaagaacaacagccaccacuacaucauggugggcaacgagaccggccucgagcugacgcugaccaacaccuccaucaucgaccacaaguucugcaaccucagcgacgcccaccggaagaaccuguacgaccacgcccugauguccaucaucagcaccuuccaccucuccauccccaacuucaaccaguacgaggccaugagcugcgacuucaacgggggcaagaucuccguccaguacaaccugagccacuccuacgccaaggacgcggccgaccacugcgggacgguggccaacggcgugcugcagaccuucaugcgcauggccuggggcgggagcuacaucgcgcucgacuccggccgggggcgcugggacugcaucaugaccagcuaccaguaccugaucauccagaacaccacgugggaggaccacugccaguucucccggcccagccccaucggcuaccuggggcuccugucccagcgcacccgggacaucuacaucagccgccggcgccggggcaccuucaccuggacgcugagcgacuccgagggcaaggacacccccgggggcuacugccugacccgcuggaugcucaucgaggccgagcugaagugcuucgggaacaccgccgucgccaagugcaacgagaagcacgacgaggaguucugcgacaugcugcggcuguucgacuucaacaagcaggccauccagcgccugaaggcgcccgcccagaugagcauccagcugaucaacaaggccgugaacgcccucaucaacgaccagcugaucaugaagaaccaccuccgggacaucaugggcauccccuacugcaacuacuccaaguacugcuaccucaaccacacgaccaccgggaagaccagccugcccaagugcugccugguguccaacggcagcuaccucaacgagacgcacuucuccgacgacaucgagcagcaggccgacaacaugaucaccgagaugcugcagaaggaguacauggagcgccagggcaagaccccgcuggggcucgucgaccuguucguguucagcaccuccuucuaccugaucagcaucuuccugcaccucgugaagaucccgacgcaccggcacaucgucggcaagcccugccccaagccccaccgccugaaccacauggggaucugcuccugcggccuguacaagcagccgggggugcccgugaaguggaagcggugaggacuaguaauaaggaaacuguaugaaugucugugggcaggaagugaagagauccuucuguaaagguuuuuggaauuaugucugcugaauaauaaacuuuuuugaaauaauaaaucugguagaaaaaugagaucuaaaaaaaaaaaaaaaaaaaaaaaaaaaaaaaaaaaaaaaaaaaaaaaaaaaaaaaaaaaaaaaaaaaaaaaaaaaaaaaaaaaaaaaaaaaaaaaaaaaa

SEQ ID NO: 25858 - RNA, 1788 nt, Artificial Sequence
  mRNA product Design b-4 (A100) comprising derived and/or modified sequence from LASV(LM776-SLE-2012;Clade IV)__AIT17824__GPCmut3 (opt1)
aggagagucccgcagucggcguccagcggcucugcuuguucgugugugugucguugcaggccuuauucaagcuuaccaugggccagaucgugaccuucuuccaggaggucccccacgugaucgaggaggugaugaacaucguccugaucgcccucagcauccuggccgugcugaaggggcucuacaacuucgcgaccugcggccugguggggcuggucacguuccuccugcugugcggccgcuccugcaccaccagcguguacaaggggguguacgagcuccagacccuggagcugaacauggagacgcucaacaugaccaugccgcuguccugcaccaagaacaacagccaccacuacaucauggucggcaacgagaccggccuggagcucacgcugaccaacaccuccaucaucaaccacaaguucugcaaccugagcgacgcccacaagaagaaccucuacgaccacgcccugauguccaucaucagcaccuuccaccuguccauccccaacuucaaccaguacgaggccaugagcugcgacuucaacgggggcaagaucuccgugcaguacaaccucagccacuccuacgccggggacgcggccaaccacugcggcacgguggccaacgggguccugcagaccuucaugcggauggccuggggcggcagcuacaucgcgcuggacuccgggcacggcaagugggacugcaucaugaccagcuaccaguaccucaucauccagaacaccacgugggaggaccacugccaguucucccgccccagccccaucggguaccugggccugcucucccagcggacccgcgacaucuacaucagccggcgccgccggggcaccuucaccuggacgcucagcgacuccgaggggaaggacaccccgggcggguacugccugacccgguggaugcugaucgaggccgagcucaagugcuucggcaacaccgccguggccaagugcaacgagaagcacgacgaggaguucugcgacaugcugcgccuguucgacuucaacaagcaggccauccagcggcucaaggcgcccgcccagaugagcauccagcugaucaacaaggccgugaacgcccugaucaacgaccagcucaucaugaagaaccaccuccgcgacaucauggggauccccuacugcaacuacuccaaguacugcuaccugaaccacacgaccaccggcaagaccagccugcccaagugcugccuggucuccaacggcagcuaccugaacgagacgcacuucuccgacgacaucgagcagcaggccgacaacaugaucaccgagaugcuccagaaggaguacauggagcggcaggggaagacgccccugggccugguggaccucuucguguucagcaccuccuucuaccugaucagcaucuuccugcaccuggucaagaucccgacccaccgccacaucguggggaaguccugccccaagccccaccggcucaaccacaugggcaucugcagcugcgggcuguacaagcagcccggcgugccgguccgcuggaagcggugaggacuaguaauaaggaaacuguaugaaugucugugggcaggaagugaagagauccuucuguaaagguuuuuggaauuaugucugcugaauaauaaacuuuuuugaaauaauaaaucugguagaaaaaugagaucuaaaaaaaaaaaaaaaaaaaaaaaaaaaaaaaaaaaaaaaaaaaaaaaaaaaaaaaaaaaaaaaaaaaaaaaaaaaaaaaaaaaaaaaaaaaaaaaaaaaa

SEQ ID NO: 25859 - RNA, 1788 nt, Artificial Sequence
  mRNA product Design b-4 (A100) comprising derived and/or modified sequence from LASV(Mad39;Clade IV)__ANH09722__GPCmut3 (opt1)
aggagagucccgcagucggcguccagcggcucugcuuguucgugugugugucguugcaggccuuauucaagcuuaccaugggccagaucgugaccuucuuccaggaggucccccacgugaucgaggaggugaugaacaucguccugaucgcccucagcauccuggccgugcugaaggggcucuacaacguggcgaccugcggccugaucgggcuggucacguuccuccugcugugcggccgcuccugcaccaccacccucuacaaggggguguacgagcugcaggcccuggagcucaacauggagacgcugaacaugaccaugccgcugagcugcaccaagaacaacucccaccacuacauccgggugggcaacgagaccggccucgagcugacgcugaccaacaccagccucaucaaccacaaguucugcaaccuguccgacgcccacaagaagaaccuguacgaccacgcccucaugagcaucaucuccaccuuccaccugagcauccccaacuucaaccaguacgaggccauguccugcgacuucaacgacgggaagaucagcguccaguacaaccugucccacacguacgcgggcgacaccgccaaccacugcgggaccguggccaacggcgugcuccagaccuucaugcgcauggccuggggcgggagcuacaucgcgcuggacuccggccgcgggggcugggacugcaucaugacgagcuaccaguaccugaucauccagaacaccaccugggaggaccacugccaguucucccggcccagccccaucggguaccucggccugcugucccagcggacccgcgacaucuacaucagccggcgccgccggggcacguucaccuggacccuguccgacagcgaggggaaggacaccccgggcggguacugccucacgcgguggaugcugaucgaggccgagcugaagugcuucggcaacaccgccgucgccaagugcaacgagaagcacgacgaggaguucugcgacaugcuccgccuguucgacuucaacaagcaggccauccagcggcugaaggcgcccgcccagaugagcauccagcucaucaacaaggccgugaacgcccugaucaacgaccagcugaucaugaagaaccaccuccgcgacaucauggggauccccuacugcaacuacuccaaguacugcuaccugaaccacaccgugaccggcaagacgagccugcccaagugcugccucgucuccaacggcagcuaccugaacgagacccacuucuccgacgacaucgagcagcaggccgacaacaugaucaccgagaugcugcagaaggaguacauggagcggcaggggaagacgccccucggccugguggaccuguucguguucagcaccuccuucuaccugaucagcaucuuccuccaccuggucaagaucccgacccaccgccacgugguggggaagcccugccccaagccccaccggcugaaccacaugggcaucugcuccugcggguucuacaagcagccgggcguccccgugcgcuggaagcggugaggacuaguaauaaggaaacuguaugaaugucugugggcaggaagugaagagauccuucuguaaagguuuuuggaauuaugucugcugaauaauaaacuuuuuugaaauaauaaaucugguagaaaaaugagaucuaaaaaaaaaaaaaaaaaaaaaaaaaaaaaaaaaaaaaaaaaaaaaaaaaaaaaaaaaaaaaaaaaaaaaaaaaaaaaaaaaaaaaaaaaaaaaaaaaaaa

SEQ ID NO: 25860 - RNA, 1788 nt, Artificial Sequence
  mRNA product Design b-4 (A100) comprising derived and/or modified sequence from LASV(Z0947-SLE-2011;Clade IV)__AIT17840__GPCmut3 (opt1)
aggagagucccgcagucggcguccagcggcucugcuuguucgugugugugucguugcaggccuuauucaagcuuaccaugggccagaucgugaccuucuuccaggaggucccccacgugaucgaggaggugaugaacaucguccugaucgcccucagcauccuggccgugcugaaggggcucuacaacuucgcgaccugcggccugguggggcuggucacguuccuccugcugugcggccgcuccugcaccaucagccucuacaaggggguguacgagcugcagacccuggagcucaacauggagacccugaacaugacgaugccgcuguccugcaccaagaacaacagccaccacuacaucauggugggcaacgagaccggccucgagcugacccugacgaacaccuccaucaucaaccacaaguucugcaaccucagcgacgcccacaagaagaaccuguacgaccacgcccugauguccaucaucagcaccuuccaccucuccauccccaacuucaaccaguacgaggccaugagcugcgacuucaacgggggcaagaucuccguccaguacaaccugagccacuccuacgccggggacgcggccaaccacugcggcaccguggccaacggggugcugcagacguucaugcggauggccuggggcggcagcuacaucgcgcucgacuccgggcgcgaccggugggacugcaucaugaccagcuaccaguaccugaucauccagaacaccaccugggaggaccacugccaguucucccgccccagccccaucggcuaccuggggcuccugucccagcggacgcgcgacaucuacaucagccggcgccgccggggcaccuucaccuggacccugagcgacuccgagggcaaggacacgcccgggggcuacugccugacccgguggaugcucaucgaggccgagcugaagugcuucgggaacaccgccgucgccaagugcaacgagaagcacgacgaggaguucugcgacaugcugcgccucuucgacuucaacaagcaggccauccagcggcugaaggcgcccgcccagaugagcauccagcugaucaacaaggccgugaacgcccucaucaacgaccagcugaucaugaagaaccaccuccgcgacaucaugggcauccccuacugcaacuacuccaaguacugcuaccugaaccacaccacgaccgggaagaccagccugcccaagugcugccugguguccaacggcagcuaccucaacgagacccacuucuccgacgacaucgagcagcaggccgacaacaugaucacggagaugcugcagaaggaguacauggagcggcagggcaagaccccgcuggggcucgucgaccuguucguguucagcaccuccuucuaccugaucagcaucuuccugcaccucgugaagaucccgacccaccgccacaucgucggcaagcccugccccaagccccaccggcugaaccacauggggaucugcuccugcggccuguacaagcagccgggggugcccgugaaguggaagcgcugaggacuaguaauaaggaaacuguaugaaugucugugggcaggaagugaagagauccuucuguaaagguuuuuggaauuaugucugcugaauaauaaacuuuuuugaaauaauaaaucugguagaaaaaugagaucuaaaaaaaaaaaaaaaaaaaaaaaaaaaaaaaaaaaaaaaaaaaaaaaaaaaaaaaaaaaaaaaaaaaaaaaaaaaaaaaaaaaaaaaaaaaaaaaaaaaa

SEQ ID NO: 25861 - RNA, 1788 nt, Artificial Sequence
  mRNA product Design b-4 (A100) comprising derived and/or modified sequence from LASV(Josiah;Clade IV)__NP_694870__GPCmut3 (opt1)
aggagagucccgcagucggcguccagcggcucugcuuguucgugugugugucguugcaggccuuauucaagcuuaccaugggccagaucgugaccuucuuccaggaggucccccacgugaucgaggaggugaugaacaucguccugaucgcccucagcgugcuggccgugcugaaggggcucuacaacuucgcgaccugcggccuggucgggcuggugacguuccuccugcugugcggccgcuccugcaccaccagccucuacaaggggguguacgagcugcagacccuggagcucaacauggagacgcugaacaugaccaugccgcuguccugcaccaagaacaacagccaccacuacaucauggucggcaacgagaccggccucgagcugacgcugaccaacaccuccaucaucaaccacaaguucugcaaccucagcgacgcccacaagaagaaccuguacgaccacgcccugauguccaucaucagcaccuuccaccucuccauccccaacuucaaccaguacgaggccaugagcugcgacuucaacgggggcaagaucuccgugcaguacaaccugagccacuccuacgccggggacgcggccaaccacugcggcacgguggccaacgggguccugcagaccuucaugcggauggccuggggcggcagcuacaucgcgcucgacuccgggcgcggcaacugggacugcaucaugaccagcuaccaguaccugaucauccagaacaccacgugggaggaccacugccaguucucccggcccagccccaucggguaccugggccuccugucccagcgcacccgggacaucuacaucagccgccggcgccggggcaccuucaccuggacgcugagcgacuccgaggggaaggacaccccgggcggguacugccucacccgcuggaugcugaucgaggccgagcugaagugcuucggcaacaccgccguggccaagugcaacgagaagcacgacgaggaguucugcgacaugcuccggcuguucgacuucaacaagcaggccauccagcgccugaaggcgcccgcccagaugagcauccagcucaucaacaaggccgugaacgcccugaucaacgaccagcugaucaugaagaaccaccuccgggacaucauggggauccccuacugcaacuacuccaaguacugcuaccugaaccacacgaccaccggccgcaccagccugcccaagugcugccucgucuccaacggcagcuaccugaacgagacgcacuucuccgacgacaucgagcagcaggccgacaacaugaucaccgagaugcugcagaaggaguacauggagcggcaggggaagaccccgcucggccugguggaccuguucguguucagcaccuccuucuaccugaucagcaucuuccuccaccuggucaagauccccacgcaccgccacaucguggggaaguccugccccaagccccaccggcugaaccacaugggcaucugcagcugcgggcucuacaagcagccgggcgugcccgucaaguggaagcgcugaggacuaguaauaaggaaacuguaugaaugucugugggcaggaagugaagagauccuucuguaaagguuuuuggaauuaugucugcugaauaauaaacuuuuuugaaauaauaaaucugguagaaaaaugagaucuaaaaaaaaaaaaaaaaaaaaaaaaaaaaaaaaaaaaaaaaaaaaaaaaaaaaaaaaaaaaaaaaaaaaaaaaaaaaaaaaaaaaaaaaaaaaaaaaaaaa

SEQ ID NO: 25862 - RNA, 1785 nt, Artificial Sequence
  mRNA product Design b-4 (A100) comprising derived and/or modified sequence from LASV(LP;Clade I)__AAF86701__GPCmut3 (opt1)
aggagagucccgcagucggcguccagcggcucugcuuguucgugugugugucguugcaggccuuauucaagcuuaccaugggccagaucaucaccuucuuccaggaggugccccacgucaucgaggaggugaugaacaucgugcugaucgcccucagccugcuggccauccucaaggggcuguacaacaucgcgaccugcggcaucaucgggcuggucgccuuccucuuccugugcggcaaguccugcagccugacgcucaagggcggguacgagcugcagacccuggagcucaacauggagacccugaacaugaccaugccgcuguccugcacgaagaacagcucccaccacuacauccgcgugggcaacgagaccgggcucgagcugacccugaccaacacgagcaucaucaaccacaaguucugcaaccucuccgacgcccacaagaagaaccuguacgaccacgcccugaugagcaucaucuccaccuuccaccucagcauccccaacuucaaccaguacgaggccauguccugcgacuucaacggcgggaagaucagcgugcaguacaaccugucccacagcuacgcgggcgacgccgccgagcacugcgggaccgucgccaacggcgugcugcagaccuucaugcggauggcguggggcgggcgcuacaucgcccucgacuccggcaaggggaacugggacugcaucaugacgagcuaccaguaccugaucauccagaacaccaccugggaggaccacugccaguucucccggcccagccccaucggcuaccugggccuccugucccagcgcacccgggacaucuacaucagccgccggcgccgggggacguucaccuggacccugagcgacuccgagggcaacgagacccccgggggcuacugccucacgcgcuggaugcugaucgaggccgagcugaagugcuucgggaacaccgccguggccaagugcaacgagaagcacgacgaggaguucugcgacaugcuccggcuguucgacuucaacaagcaggcgauccgccggcugaaggccccggcccagaugagcauccagcucaucaacaaggccgucaacgcccugaucaacgaccagcugaucaugaagaaccaccuccgcgacaucaugggcauccccuacugcaacuacuccaaguacugcuaccugaaccacaccagcuccggccggaccagccugcccaagugcugccucaucuccaacgggagcuaccugaacgagacgcaguucuccgacgacaucgagcagcaggcggacaacaugaucaccgagaugcugcagaaggaguacaucgagcgccagggcaagaccccgcucgggcugguggacaucuucaucuucagcaccuccuucuaccugaucagcaucuuccugcaccucaucaagauccccacgcaccggcacaucgugggcaagcccugccccaagccgcaccgccugaaccacaugggggucugcuccugcggccuguacaagcaccccggcgugcccaccaaguggaagcggugaggacuaguaauaaggaaacuguaugaaugucugugggcaggaagugaagagauccuucuguaaagguuuuuggaauuaugucugcugaauaauaaacuuuuuugaaauaauaaaucugguagaaaaaugagaucuaaaaaaaaaaaaaaaaaaaaaaaaaaaaaaaaaaaaaaaaaaaaaaaaaaaaaaaaaaaaaaaaaaaaaaaaaaaaaaaaaaaaaaaaaaaaaaaaaaaa

SEQ ID NO: 25863 - RNA, 1785 nt, Artificial Sequence
  mRNA product Design b-4 (A100) comprising derived and/or modified sequence from LASV(803213;Clade II)__AAF86703__GPCmut3 (opt1)
aggagagucccgcagucggcguccagcggcucugcuuguucgugugugugucguugcaggccuuauucaagcuuaccaugggccagaucaucaccuucuuccaggaggugccccacgucaucgaggaggugaugaacaucgugcugaucgcccucagccugcuggccauccucaaggggaucuacaacgucgcgaccugcggccuguucgggcugaucuccuuccuccugcugugcggccgcagcugcuccgugacguacaaggggguguacgagcuccagacccuggagcugaacauggccaaccucaacaugaccaugccgcugagcugcaccaagaacaacucccaccacuacaucauggucggcaacgagacgggccuggagcucacccugaccaacaccagcaucaucaaccacaaguucugcaaccuguccgacgcccacaagaagaaccucuacgaccacgcccugaugagcaucaucuccacguuccaccugagcauccccaacuucaaccaguacgaggccauguccugcgacuucaacgggggcaagaucagcgugcaguacaaccucucccacagcuucgcgguggacgccgccaaccacugcgggaccaucgccaacggcguccugcagaccuucaugcggauggcguggggcggguccuacaucgcccuggacagcggcaaggggaacugggacugcaucaugaccuccuaccaguaccucaucauccagaacacgaccugggaggaccacugccaguucagccgccccucccccaucggcuaccuggggcugcucagccagcggacccgcgacaucuacaucagccggcgccggcgcggcaccuucacguggacccuguccgacagcgagggcaacgaggcccccgggggcuacugccugacccgguggaugcucaucgaggccgagcugaagugcuucgggaacaccgccguggcgaagugcaacgagaagcacgacgaggaguucugcgacaugcugcgccucuucgacuucaacaagcaggccaucaagcggcugaagacgccggcccagauguccauccagcugaucaacaaggccgugaacgcccucaucaacgaccagcugaucaugaagaaccaccuccgcgacaucaugggcauccccuacugcaacuacagccgguacugcuaccugaaccacaccgucaccgggaagaccucccugccccgcugcugccuggugagcaacggcuccuaccucaacgagacgcacuucagcgacgacaucgagcagcaggcggacaacaugaucaccgagaugcugcagaaggaguacauggaccggcagggcaagaccccgcuggggcucguggaccuguucgucuucuccaccagcuucuaccugaucuccaucuuccugcaccucgugaagauccccacgcaccgccacaucgugggcaagcccugccccaagccgcaccggcugaaccacauggggaucugcagcugcggccuguacaagcaccccgggguccccgugaaguggaagcgcugaggacuaguaauaaggaaacuguaugaaugucugugggcaggaagugaagagauccuucuguaaagguuuuuggaauuaugucugcugaauaauaaacuuuuuugaaauaauaaaucugguagaaaaaugagaucuaaaaaaaaaaaaaaaaaaaaaaaaaaaaaaaaaaaaaaaaaaaaaaaaaaaaaaaaaaaaaaaaaaaaaaaaaaaaaaaaaaaaaaaaaaaaaaaaaaaa

SEQ ID NO: 25864 - RNA, 1785 nt, Artificial Sequence
  mRNA product Design b-4 (A100) comprising derived and/or modified sequence from LASV(GA391;Clade III)__CAA36645__GPCmut3 (opt1)
aggagagucccgcagucggcguccagcggcucugcuuguucgugugugugucguugcaggccuuauucaagcuuaccaugggccagaucgugaccuucuuccaggaggucccccacgugaucgaggaggugaugaacaucguccugaucgcccucagcauccuggccauccugaaggggcucuacaacguggcgaccugcggccugaucgggcuggugacguuccuccugcuguccggccgcagcugcucccucaucuacaaggggaccuacgagcugcagacccuggagcucaacauggagacccugaacaugacgaugccgcugagcugcaccaagaacaacucccaccacuacauccgggucggcaacgagaccggccucgagcugacccugacgaacaccagcauccucaaccacaaguucugcaaccuguccgacgcccacaagcgcaaccuguacgaccacagccucauguccaucaucagcaccuuccaccuguccauccccaacuucaaccaguacgaggccaugagcugcgacuucaacgggggcaagaucaccgugcaguacaaccugucccacagcuucgccguggacgccgcggggcacugcggcacgcucgccaacgggguccugcagaccuucaugcggauggccuggggcggcuccuacaucgcccuggacagcgggcgcggcaacugggacugcaucaugaccuccuaccaguaccucaucauccagaacaccacgugggacgaccacugccaguucagccggcccucccccaucggguaccugggccugcucagccagcgcacccgggacaucuacaucagccgccggcgccggggcaccuucaccuggacgcuguccgacagcgaggggaacgagaccccgggcggguacugccugacccgcuggaugcucaucgaggcggagcugaagugcuucggcaacaccgccguggccaagugcaacgagaagcacgacgaggaguucugcgacaugcugcggcuguucgacuucaacaagcaggccauccgccggcugaagacgcccgcccagauguccauccagcugaucaacaaggcggugaacgcccucaucaacgaccagcugaucaugaagaaccaccuccgcgacaucauggggauccccuacugcaacuacagccgguacugcuaccucaaccacaccuccaccggcaagaccagccugccccgcugcugccugaucuccaacggcagcuaccucaacgagacgaaguucuccgacgacaucgagcagcaggccgacaacaugaucaccgagaugcugcagaaggaguacaucgaccggcaggggaagaccccgcugggccuggucgaccucuucguguucagcaccuccuucuaccugaucagcaucuuccugcaccucgugaagauccccacgcaccgccacaucgucgggaagcccugccccaagccgcaccggcugaaccacaugggcaucugcuccugcgggcuguacaagcagcccggcgugcccgugcgcuggaagcgcugaggacuaguaauaaggaaacuguaugaaugucugugggcaggaagugaagagauccuucuguaaagguuuuuggaauuaugucugcugaauaauaaacuuuuuugaaauaauaaaucugguagaaaaaugagaucuaaaaaaaaaaaaaaaaaaaaaaaaaaaaaaaaaaaaaaaaaaaaaaaaaaaaaaaaaaaaaaaaaaaaaaaaaaaaaaaaaaaaaaaaaaaaaaaaaaaa

SEQ ID NO: 25865 - RNA, 1788 nt, Artificial Sequence
  mRNA product Design b-4 (A100) comprising derived and/or modified sequence from LASV(AV;Clade V)__CCA30314__GPCmut3 (opt1)
aggagagucccgcagucggcguccagcggcucugcuuguucgugugugugucguugcaggccuuauucaagcuuaccaugggccagaucgugaccuucuuccaggaggucccccacgugaucgaggaggugaugaacaucguccugaucgcccucagcauccuggccgugcugaaggggcucuacaacaucgcgaccugcggccugaucgggcugaucacguuccuccugcugugcggccgcuccugcagcuccaaccucuacaaggggguguacgagcugcagagccuggaccucaacauggagacccugaacaugaccaugccgcuguccugcaccaagaacaacagccaccacuacauccgggucggcaacgacacgggccucgagcugacccugaccaacaccuccauccucaaccacaaguucugcaaccugagcgacgcccacaagaaggaccuguacgaccacgcccucauguccaucaucagcacguuccaccuguccauccccaacuucaaccaguacgaggccaugagcugcgacuucaacgggggcaagaucuccgugcaguacaaccugagccacuccuacgccaucgacgcggccaaccacugcgggaccguggccaacggcauccuccagaccuucaugcgcauggccuggggcgggagcuacaucgcgcuggacuccggccgggggaacugggacugcaucaugaccagcuaccaguaccugaucauccagaacacgaccugggagaaccacugccaguucucccgccccagccccaucggcuaccucgggcugcugagccagcggacccgcgacaucuacaucucccggcgccggcgcggcaccuucacguggacccucagcgacuccgagggcaacgccacccccgggggcuacugccugacccgguggaugcugaucgaggccgagcucaagugcuucgggaacacggccgucgccaagugcaacgagaagcacgacgaggaguucugcgacaugcugcgccuguucgacuucaacaagcaggcgaucagccggcucaaguccccggcccagaugagcauccagcugaucaacaaggccgugaacgcccugaucaacgaccagcucaucaugaagaaccaccuccgcgacaucaugggcauccccuacugcaacuacuccaaguacugcuaccugaaccacaccaucaccgggaagaccagccugcccaagugcugccugguguccaacggcagcuaccugaacgagacgcacuucuccgacgacaucgagcagcaggccgacaacaugaucaccgagaugcuccagaaggaguacauggagcggcagggcaagaccccgcuggggcuggucgaccuguucguguucagcaccuccuucuaccucaucagcaucuuccugcgccuggugaagauccccacgcaccggcacaucgucggcaagcccugccccaagccgcaccgccucaaccacauggggaucugcuccugcggccuguacaagcagcccggggugcccgugcgguggaagcgcugaggacuaguaauaaggaaacuguaugaaugucugugggcaggaagugaagagauccuucuguaaagguuuuuggaauuaugucugcugaauaauaaacuuuuuugaaauaauaaaucugguagaaaaaugagaucuaaaaaaaaaaaaaaaaaaaaaaaaaaaaaaaaaaaaaaaaaaaaaaaaaaaaaaaaaaaaaaaaaaaaaaaaaaaaaaaaaaaaaaaaaaaaaaaaaaaa

SEQ ID NO: 25866 - RNA, 1785 nt, Artificial Sequence
  mRNA product Design b-4 (A100) comprising derived and/or modified sequence from LASV(Togo/2016/7082;Clade VI)__AMR44577__GPCmut3 (opt1)
aggagagucccgcagucggcguccagcggcucugcuuguucgugugugugucguugcaggccuuauucaagcuuaccaugggccagaucaucaccuucuuccaggaggugccccacgucaucgaggaggugaugaacaucgugcugaucgcccucagccugcuggccauccucaagggggucuacaacguggcgaccugcggcaucaucgggcuggugacguuccuguuccucugcggccgcuccugcagccugaucuacaagggguccuacgagcugcagacccucgagcugaacauggagacccugaacaugaccaugccgcucagcugcacgaagaacuccagccaccacuacauccgggucggcaacgagaccggccuggagcugacccucaccaacacguccaucaucaaccacaaguucugcaaccugagcgacgcccacaagcgcaaccuguacgaccacgcccucauguccauccugagcaccuuccaccuguccauccccaacuucaaccaguacgaggccaugagcugcgacuucaacgggggcaagaucuccgugcaguacaaccucagccacgccuacgcgguggacgccgccgagcacugcgggaccgucgccaacggcgugcugcagaccuucaugcggauggcguggggcggguccuacaucgcccuggacagcggccgcgggaacugggacugcaucaugacguccuaccaguaccucaucauccagaacaccaccugggaggaccacugccaguucagccggcccucccccaucggcuaccuggggcugcucagccagcgcacccgggacaucuacaucagccgccggcgccggggcacguucaccuggacccuguccgacagcgagggcaacgagacccccgggggcuacugccugacgcgcuggaugcucaucgaggccgagcugaagugcuucgggaacaccgccguggccaagugcaacgagaagcacgacgaggaguucugcgacaugcugcggcuguucgacuucaacaagcaggcgauccagcgccugaaguccccggcccagaugagcauccagcugaucaacaaggccgucaacgcccucaucaacgaccagcugaucaugaagaaccaccuccgggacaugaugggcauccccuacugcaacuacuccaaguacugcuaccucaaccacaccagcuccgggcgcaccagccugcccaagugcugccugguguccaacggcagcuaccucaacgagacgcacuucuccgacgacaucgagcagcaggccgacaacaugaucaccgagaugcugcagaaggaguacaucgaccggcagggcaagaccccgcuggggcucguggaccuguucgucuucagcaccuccuucuaccugaucagcaucuuccugcaccucaucaagauccccacgcaccgccacaucgugggcaagcccugccccaagccgcaccggcugaaccacauggggaucugcuccugcggccuguacaagcagcccggggugcccacccgcuggaagcggugaggacuaguaauaaggaaacuguaugaaugucugugggcaggaagugaagagauccuucuguaaagguuuuuggaauuaugucugcugaauaauaaacuuuuuugaaauaauaaaucugguagaaaaaugagaucuaaaaaaaaaaaaaaaaaaaaaaaaaaaaaaaaaaaaaaaaaaaaaaaaaaaaaaaaaaaaaaaaaaaaaaaaaaaaaaaaaaaaaaaaaaaaaaaaaaaa

SEQ ID NO: 25867 - RNA, 1785 nt, Artificial Sequence
  mRNA product Design b-4 (A100) comprising derived and/or modified sequence from LASV(KAK-428;Clade n.d. (VII))__ANH09740__GPCmut3 (opt1)
aggagagucccgcagucggcguccagcggcucugcuuguucgugugugugucguugcaggccuuauucaagcuuaccaugggccagaucgugaccuucuuccaggaggucccccacgugaucgaggaggugaugaacaucguccugaucgcccucagccugcuggccauccucaaggggcuguacaacuucgcgaccugcggcgugaucgggcugaucacguuccuccugcugugcggccgcuccugcagcgccaccuacaaggggcaguacgagcuccagacccuggagcugaacauggagucccucaacaugaccaugccgcugagcugcacgaagaacaacucccaccacuacauccgggccggcaacaacaccggccuggagcucacccugaccaacacgagcaucaucucccacaaguucugcaaccugagcgacgcccacaagaagaaccucuacgaccacacccugauguccaucaucaccaccuuccaccugagcauccccaacuucaaccaguacgaggccauguccugcgacuucaacgggggcaagaucagcauccaguacaaccucucccacagcuacgcgggggacgccgcccagcacugcggcacgguggccaacgggguccugcagaccuucaugcgcauggcguggggcggcuccuaccuggcccucgacagcgggcggcgcggcugggacugcaucaucuccagcuaccaguaccugaucauccagaacaccaccugggacgaccacugccaguucucccggcccagccccaucggguaccugggcuucgugagccagaagacgcgcgacaucuacaucucccggcgccggcgcggcaccuucaccuggacccucagcgacuccgaggggcacgacaugccgggcggguacugccugacgcgguggaugcugaucgaggccgaccucaagugcuucggcaacaccgccguggccaagugcaacgagaagcacgacgaggaguucugcgacauguggcgccuguucgacuucaacaagcaggcgauccagcggcugaaggcccccgcccagaugaacauccagcucaucaacaaggccgucaacgcccugaucaacgaccagcugaugaugaagaaccaccuccgcgacaucauggggauccccuacugcaacuacagcaaguucugcuaccugaacaacaccaccacgggccggaccucccugccccgcugcugccucaucagcaacggcuccuaccugaacgagacccacuucagcgacgacaucgagcagcaggcggacaacaugaucaccgagaugcugcagaaggaguacauggaccggcaggggaagacgccgcucggccugguggaccuguucguguucuccaccagcuucuaccucaucaccaucuuccugcaccuggucaagauccccacccaccgccacaucguggggaagcccugccccaagccgcaccggcugaaccacaugggcaucugcuccugcgggcucuacaagcagcccggcgugcccguccgcuggaagcggugaggacuaguaauaaggaaacuguaugaaugucugugggcaggaagugaagagauccuucuguaaagguuuuuggaauuaugucugcugaauaauaaacuuuuuugaaauaauaaaucugguagaaaaaugagaucuaaaaaaaaaaaaaaaaaaaaaaaaaaaaaaaaaaaaaaaaaaaaaaaaaaaaaaaaaaaaaaaaaaaaaaaaaaaaaaaaaaaaaaaaaaaaaaaaaaaa

SEQ ID NO: 25868 - RNA, 1785 nt, Artificial Sequence; identical to SEQ ID NO: 25862
  mRNA product Design b-4 (A100) comprising derived and/or modified sequence from LASV(Pinneo-NIG-1969;Clade I)__AIT17836__GPCmut3 (opt1)

SEQ ID NO: 25869 - RNA, 1785 nt, Artificial Sequence
  mRNA product Design b-4 (A100) comprising derived and/or modified sequence from LASV(ISTH0009-NIG-2011;Clade II)__AIT17404__GPCmut3 (opt1)
aggagagucccgcagucggcguccagcggcucugcuuguucgugugugugucguugcaggccuuauucaagcuuaccaugggccagaucaucaccuucuuccaggaggugccccacgucaucgaggaggugaugaacaucgugcugaucgcccucagccugcuggccauccucaaggggaucuacaacgucgcgaccugcggccuguucgggcugguguccuuccuccugcugugcggccgcagcugcuccacgaccuacaaggggguguacgagcuccagacccuggagcuggacauggccagccucaacaugaccaugccgcuguccugcacgaagaacaacagccaccacuacaucauggucggcaacgagaccggccuggagcucacccugaccaacacguccaucaucaaccacaaguucugcaaccugagcgacgcccacaagaagaaccucuacgaccacgcccugauguccaucaucagcaccuuccaccuguccauccccaacuucaaccaguacgaggccaugagcugcgacuucaacgggggcaagaucuccgugcaguacaaccucagccacgcguacgccguggacgccgccaaccacugcgggaccaucgcgaacggcguccugcagaccuucaugcggauggccuggggcggguccuacaucgcccuggacagcggcaagggguccugggacugcaucaugacgagcuaccaguaccucaucauccagaacaccaccugggaggaccacugccaguucucccgccccagccccaucggcuaccuggggcugcucagccagcggacccgcgacaucuacaucucccggcgccggcgcggcacguucaccuggacccugagcgacuccgagggcaacgagacccccgggggcuacugccugacgcgguggaugcucaucgaggccgagcugaagugcuucgggaacaccgccguggcgaagugcaacgagaagcacgacgaggaguucugcgacaugcugcgccucuucgacuucaacaagcaggccauccggcgccugaagaccccggcccagaugagcauccagcugaucaacaaggccgugaacgcccucaucaacgaccagcugaucaugaagaaccaccuccgggacaucaugggcauccccuacugcaacuacuccaaguacugcuaccugaaccacaccgucacggggaagaccagccugccccgcugcugccugguguccaacggcagcuaccucaacgagacccacuucuccgacgacaucgagcagcaggcggacaacaugaucaccgagcugcugcagaaggaguacauggaccggcagggcaagacgccgcucgggcugguggaccuguucgucuucagcaccuccuucuaccugaucagcaucuuccuccaccugaucaagauccccacccaccgccacaucaccggcaagcccugccccaagccgcaccggcugaaccacauggggaucugcuccugcggccucuacaagcaccccggggugcccgugaaguggaagcgcugaggacuaguaauaaggaaacuguaugaaugucugugggcaggaagugaagagauccuucuguaaagguuuuuggaauuaugucugcugaauaauaaacuuuuuugaaauaauaaaucugguagaaaaaugagaucuaaaaaaaaaaaaaaaaaaaaaaaaaaaaaaaaaaaaaaaaaaaaaaaaaaaaaaaaaaaaaaaaaaaaaaaaaaaaaaaaaaaaaaaaaaaaaaaaaaaa

SEQ ID NO: 25870 - RNA, 1785 nt, Artificial Sequence
  mRNA product Design b-4 (A100) comprising derived and/or modified sequence from LASV(ISTH2010-NIG-2012;Clade II)__AIT17482__GPCmut3 (opt1)
aggagagucccgcagucggcguccagcggcucugcuuguucgugugugugucguugcaggccuuauucaagcuuaccaugggccagaucaucaccuucuuccaggaggugccccacgucaucgaggaggugaugaacaucgugcugaucgcccucagccugcuggccauccucaaggggaucuacaacgucgcgaccugcggccuguucgggcugguguccuuccuccugcugugcggccgcagcugcuccacgaccuacaaggggguguacgagcuccagacccuggagcuggacauggccagccucaacaugaccaugccgcuguccugcacgaagaacaacagccaccacuacaucauggucggcaacgagaccggccuggagcucacccugaccaacacguccaucaucaaccacaaguucugcaaccugagcgacgcccacaagaagaaccucuacgaccacgcccugauguccaucaucagcaccuuccaccuguccauccccaacuucaaccaguacgaggccaugagcugcgacuucaacgggggcaagaucuccgugcaguacaaccucagccacgcguacgccguggacgccgccaaccacugcgggaccaucgcgaacggcguccugcagaccuucaugcggauggccuggggcggguccuacaucgcccuggacagcggcaagggguccugggacugcaucaugacgagcuaccaguaccucaucauccagaacaucaccugggaggaccacugccaguucucccgccccagccccaucggcuaccuggggcugcucagccagcggacccgcgacaucuacaucucccggcgccggcgcggcaccuucacguggacccugagcgacuccgagggcaacgagacccccgggggcuacugccugacccgguggaugcucaucgaggccgagcugaagugcuucgggaacacggccguggcgaagugcaacgagaagcacgacgaggaguucugcgacaugcugcgccucuucgacuucaacaagcaggccauccggcgccugaagaccccggcccagaugagcauccagcugaucaacaaggccgugaacgcccucaucaacgaccagcugaucaugaagaaccaccuccgggacaucaugggcauccccuacugcaacuacuccaaguacugcuaccugaaccacaccgucaccgggaagacgagccugccccgcugcugccugguguccaacggcagcuaccucaacgagacccacuucuccgacgacaucgagcagcaggcggacaacaugaucaccgagcugcugcagaaggaguacaucgaccggcagggcaagaccccgcucgggcugguggaccuguucgucuucagcacguccuucuaccugaucagcaucuuccuccaccuggugaagauccccacccaccgccacguggucggcaagcccugccccaagccgcaccggcugaaccacauggggaucugcuccugcggccucuacaagcaccccggggugcccgugaaguggaagcgcugaggacuaguaauaaggaaacuguaugaaugucugugggcaggaagugaagagauccuucuguaaagguuuuuggaauuaugucugcugaauaauaaacuuuuuugaaauaauaaaucugguagaaaaaugagaucuaaaaaaaaaaaaaaaaaaaaaaaaaaaaaaaaaaaaaaaaaaaaaaaaaaaaaaaaaaaaaaaaaaaaaaaaaaaaaaaaaaaaaaaaaaaaaaaaaaaa

SEQ ID NO: 25871 - RNA, 1785 nt, Artificial Sequence
  mRNA product Design b-4 (A100) comprising derived and/or modified sequence from LASV(Lassa virus/H.sapiens-wt/NGA/2015/ISTH_0543;Clade II)__AVO03639__GPCmut3 (opt1)
aggagagucccgcagucggcguccagcggcucugcuuguucgugugugugucguugcaggccuuauucaagcuuaccaugggccagaucaucaccuucuuccaggaggugccccacgucaucgaggaggugaugaacaucgugcugaucgcccucagccugcuggccauccucaaggggaucuacaacgucgcgaccugcggccuguucgggcugguguccuuccuccugcugugcggccgcagcugcuccacgaccuacaaggggguguacgagcuccagacccuggagcuggacauggccaaccucaacaugaccaugccgcugagcugcacgaagaacaacucccaccacuacaucauggucggcaacgagaccggccuggagcucacccugaccaacacgagcaucaucaaccacaaguucugcaaccuguccgacgcccacaagaagaaccucuacgaccacgcccugaugagcaucaucuccaccuuccaccugagcauccccaacuucaaccaguacgaggccauguccugcgacuucaacgggggcaagaucagcgugcaguacaaccucucccacaccuacgcgguggacgccgccaaccacugcgggaccaucgccaacggcguccugcagacguucaugcggauggcguggggcgggagcuacaucgcccuggacuccggcaaggggagcugggacugcaucaugaccuccuaccaguaccucgugauccagaacaccaccugggaggaccacugccaguucagccgccccucccccaucggcuaccuggggcugcucagccagcggacgcgcgacaucuacaucagccggcgccggcgcggcaccuucaccuggacccuguccgacagcgagggcaacgagacgcccgggggcuacugccugacccgguggaugcucaucgaggccgagcugaagugcuucgggaacaccgccguggccaagugcaacgagaagcacgacgaggaguucugcgacaugcugcgccucuucgacuucaacaagcaggcgauccggcgccugaagaccccggcccagauguccauccagcugaucaacaaggccgucaacgcccucaucaacgaccagcugaucaugaagaaccaccuccgggacaucaugggcauccccuacugcaacuacagcaaguacugcuaccugaaccacacggugaccgggaagaccucccugccccgcugcugccuggugagcaacggcuccuaccucaacgagacccacuucagcgacgacaucgagcagcaggccgacaacaugaucacggagcugcugcagaaggaguacaucgaccggcagggcaagaccccgcucgggcuggucgaccuguucguguucuccaccagcuucuaccugaucuccaucuuccuccaccuggugaagauccccacccaccgccacaucacgggcaagcccugccccaagccgcaccggcugaaccacauggggaucugcagcugcggccucuacaagcaccccgggguccccgugaaguggaagcgcugaggacuaguaauaaggaaacuguaugaaugucugugggcaggaagugaagagauccuucuguaaagguuuuuggaauuaugucugcugaauaauaaacuuuuuugaaauaauaaaucugguagaaaaaugagaucuaaaaaaaaaaaaaaaaaaaaaaaaaaaaaaaaaaaaaaaaaaaaaaaaaaaaaaaaaaaaaaaaaaaaaaaaaaaaaaaaaaaaaaaaaaaaaaaaaaaa

SEQ ID NO: 25872 - RNA, 1785 nt, Artificial Sequence
  mRNA product Design b-4 (A100) comprising derived and/or modified sequence from LASV(Lassa virus/H.sapiens-wt/NGA/2016/ISTH_0009;Clade II)__AVO03571__GPCmut3 (opt1)
aggagagucccgcagucggcguccagcggcucugcuuguucgugugugugucguugcaggccuuauucaagcuuaccaugggccagaucaucaccuucuuccaggaggugccccacgucaucgaggaggugaugaacaucgugcugaucgcccucagccugcuggccauccucaaggggaucuacaacgucgcgaccugcggccugcuggggcucguguccuuccugcugcucugcggccgcagcugcuccacgaccuacaaggggguguacgagcugcagacccuggagcucgacauggccagccugaacaugaccaugccgcuguccugcacgaagaacaacagccaccacuacaucauggucggcaacgagaccggccucgagcugacccugaccaacacguccaucaucaaccacaaguucugcaaccucagcgacgcccacaagaagaaccuguacgaccacgcccugauguccaucaucagcaccuuccaccucuccauccccaacuucaaccaguacgaggccaugagcugcgacuucaacgggggccggaucuccgugcaguacaaccugagccacuccuacgcgguggacgccgccaaccacugcgggaccaucgccaacggcguccugcagaccuucaugcgcauggcguggggcgggagcuacaucgcccucgacuccggcaaggggagcugggacugcaucaugacguccuaccaguaccugaucauccagaacaccaccugggaggaccacugccaguucagccggcccagccccaucggcuaccuggggcuccugucccagcgcacccgggacaucuacaucagccgccggcgccggggcacguucaccuggacccuguccgacagcgagggcaacgagacccccgggggcuacugccucacgcgcuggaugcugaucgaggccgagcugaagugcuucgggaacaccgccguggccaagugcaacgagaagcacgacgaggaguucugcgacaugcuccggcuguucgacuucaacaagcaggcgauccgccggcugaagaccccggcccagauguccauccagcucaucaacaaggccgugaacgcccugaucaacgaccagcugaucaugaagaaccaccuccgcgacaucaugggcauccccuacugcaacuacagcaaguacugcuaccugaaccacaccgucacggggaagaccucccugccccggugcugccucgugagcaacggcuccuaccugaacgagacccacuucagcgacgacaucgagcagcaggccgacaacaugaucaccgagcugcuccagaaggaguacaucgaccgccagggcaagacgccgcuggggcugguggaccuguucgucuucuccaccagcuucuaccucaucuccaucuuccugcaccuggugaagauccccacccaccggcacaucaccggcaagcccugccccaagccgcaccgccucaaccacauggggaucugcagcugcggccuguacaaccaccccggggugcccgucaaguggaagcggugaggacuaguaauaaggaaacuguaugaaugucugugggcaggaagugaagagauccuucuguaaagguuuuuggaauuaugucugcugaauaauaaacuuuuuugaaauaauaaaucugguagaaaaaugagaucuaaaaaaaaaaaaaaaaaaaaaaaaaaaaaaaaaaaaaaaaaaaaaaaaaaaaaaaaaaaaaaaaaaaaaaaaaaaaaaaaaaaaaaaaaaaaaaaaaaaa

SEQ ID NO: 25873 - RNA, 1785 nt, Artificial Sequence
  mRNA product Design b-4 (A100) comprising derived and/or modified sequence from LASV(Lassa virus/H.sapiens-wt/NGA/2016/ISTH_0017;Clade II)__AVO03567__GPCmut3 (opt1)
aggagagucccgcagucggcguccagcggcucugcuuguucgugugugugucguugcaggccuuauucaagcuuaccaugggccagaucaucaccuucuuccaggaggugccccacgucaucgaggaggugaugaacaucgugcugaucgcccucagccugcuggccauccucaaggggaucuacaacgucgcgaccugcggccuguucgggcugguguccuuccuccugcugugcggccgcagcugcuccacgaccuacaaggggguguacgagcuccagacccuggagcuggacauggccagccucaacaugaccaugccgcuguccugcacgaagaacaacagccaccacuacaucauggucggcaacgagaccggccuggagcucacccugaccaacacguccaucaucaaccacaaguucugcaaccugagcgacgcccacaagaagaaccucuacgaccacgcccugauguccaucaucagcaccuuccaccuguccauccccaacuucaaccaguacgaggccaugagcugcgacuucaacgggggcaagaucuccgugcaguacaaccucagccacaccuacgcgaucgacgccgccaaccacugcgggaccaucgccaacggcgugcugcagacguucaugcggauggcguggggcggguccuacaucgcccuggacagcggcaagggguccugggacugcaucaugaccagcuaccaguaccucaucauccagaacaccaccugggaggaccacugccaguucucccgccccagccccaucggcuaccuggggcugcucagccagcggacgcgcgacaucuacaucucccggcgccggcgcggcaccuucaccuggacccugagcgacuccgagggcaacgagacgcccgggggcuacugccugacccgguggaugcucaucgaggccgagcugaagugcuucgggaacaccgccgucgccaagugcaacgagaagcacgacgaggaguucugcgacaugcugcgccucuucgacuucaacaagcaggcgauccggcgccugaagaccccggcccagaugagcauccagcugaucaacaaggccgugaacgcccucaucaacgaccagcugaucaugaagaaccaccuccgggacaucaugggcauccccuacugcaacuacuccaaguacugcuaccugaaccacacggugaccgggaagaccagccugccccgcugcugccuggucuccaacggcagcuaccucaacgagacccacuucuccgacgacaucgagcagcaggccgacaacaugaucacggagcugcugcagaaggaguacauggaccggcagggcaagaccccgcucgggcugguggaccuguucguguucagcaccuccuucuaccugaucagcaucuuccuccaccugguccgcauccccacccaccggcacgugaucggcaagcccugccccaagccgcaccgccugaaccacauggggaucugcuccugcggccucuacaagcaccccggggugcccgucaaguggaagcggugaggacuaguaauaaggaaacuguaugaaugucugugggcaggaagugaagagauccuucuguaaagguuuuuggaauuaugucugcugaauaauaaacuuuuuugaaauaauaaaucugguagaaaaaugagaucuaaaaaaaaaaaaaaaaaaaaaaaaaaaaaaaaaaaaaaaaaaaaaaaaaaaaaaaaaaaaaaaaaaaaaaaaaaaaaaaaaaaaaaaaaaaaaaaaaaaa

SEQ ID NO: 25874 - RNA, 1785 nt, Artificial Sequence
  mRNA product Design b-4 (A100) comprising derived and/or modified sequence from LASV(Lassa virus/H.sapiens-wt/NGA/2018/ISTH_0959;Clade II)__AVV65099__GPCmut3 (opt1)
aggagagucccgcagucggcguccagcggcucugcuuguucgugugugugucguugcaggccuuauucaagcuuaccaugggccagaucaucaccuucuuccaggaggugccccacgucaucgaggaggugaugaacaucgugcugaucgcccucagccugcuggccauccucaaggggaucuacaacgucgugaccugcggccuguucgggcugguguccuuccuccugcugugcggccgcagcugcuccacgaccuacaagggggucuacgagcuccagacccuggagcuggacauggcgagccucaacaugaccaugccgcuguccugcacgaagaacaacagccaccacuacaucauggugggcaacgagaccggccuggagcucacccugaccaacacguccaucaucaaccacaaguucugcaaccugagcgacgcccacaagaagaaccucuacgaccacgcccugauguccaucaucagcaccuuccaccuguccauccccaacuucaaccaguacgaggccaugagcugcgacuucaacgggggcaagaucuccgugcaguacaaccucagccacgccuacgcgaucgacgccgccaaccacugcgggaccaucgccaacggcguccugcagaccuucaugcggauggcguggggcggguccuacaucgcccuggacagcggcaagggguccugggacugcaucaugacgagcuaccaguaccucaucauccagaacaccaccugggaggaccacugccaguucucccgccccagccccaucggcuaccuggggcugcucagccagcggacccgcgacaucuacaucucccggcgccggcgcggcacguucaccuggacccugagcgacuccgagggcaacgagacccccgggggcuacugccugacgcgguggaugcucaucgaggccgagcugaagugcuucgggaacaccgccguggccaagugcaacgagaagcacgacgaggaguucugcgacaugcugcgccucuucgacuucaacaagcaggcgauccggcgccugaagaccccggcccagaugagcauccagcugaucaacaaggccgugaacgcccucaucaacgaccagcugaucaugaagaaccaccuccgggacaucaugggcauccccuacugcaacuacuccaaguacugcuaccugaaccacaccgucacggggaagaccagccugccccgcugcugccugguguccaacggcagcuaccucaacgagacccacuucuccgacgacaucgagcagcaggccgacaacaugaucaccgagcugcugcagaaggaguacaucgaccggcagggcaagacgccgcucgggcugguggaccuguucgucuucagcaccuccuucuaccugaucagcaucuuccuccaccuggugaagauccccacccaccgccacgugaucggcaagcccugccccaagccgcaccggcugaaccacauggggaucugcuccugcggccucuacaagcaccccgggguccccgugaaguggaagcgcugaggacuaguaauaaggaaacuguaugaaugucugugggcaggaagugaagagauccuucuguaaagguuuuuggaauuaugucugcugaauaauaaacuuuuuugaaauaauaaaucugguagaaaaaugagaucuaaaaaaaaaaaaaaaaaaaaaaaaaaaaaaaaaaaaaaaaaaaaaaaaaaaaaaaaaaaaaaaaaaaaaaaaaaaaaaaaaaaaaaaaaaaaaaaaaaaa

SEQ ID NO: 25875 - RNA, 1785 nt, Artificial Sequence
  mRNA product Design b-4 (A100) comprising derived and/or modified sequence from LASV(LASV003-NIG-2008;Clade II)__AIT17580__GPCmut3 (opt1)
aggagagucccgcagucggcguccagcggcucugcuuguucgugugugugucguugcaggccuuauucaagcuuaccaugggccagaucaucaccuucuuccaggaggugccccacgucaucgaggaggugaugaacaucgugcugaucgcccucagccugcuggccauccucaaggggaucuacaacgucgcgaccugcggccuguucgggcugguguccuuccuccugcugugcggccgcagcugcuccacgaccuacaaggggguguacgagcuccagacccuggagcuggacauggccagccucaacaugaccaugccgcuguccugcacgaagaacaacagccaccacuacaucauggucggcaacgagaccggccuggagcucacccugaccaacacguccaucaucaaccacaaguucugcaaccugagcgacgcccacaagaagaaccucuacgaccacgcccugauguccaucaucagcaccuuccaccuguccauccccaacuucaaccaguacgaggccaugagcugcgacuucaacgggggcaagaucuccgugcaguacaaccucagccacaccuacgcgguggacgccgccaaccacugcgggaccaucgccaacggcguccugcagacguucaugcggauggcguggggcggguccuacaucgcccuggacagcggcaagggguccugggacugcaucaugaccagcuaccaguaccucaucauccagaacaccaccugggaggaccacugccaguucucccgccccagccccaucggcuaccuggggcugcucagccagcggacgcgcgacaucuacaucucccggcgccggcgcggcaccuucaccuggacccugagcgacuccgagagcaacgagacgccgggcggguacugccugacccgguggaugcucaucgaggccgagcugaagugcuucggcaacaccgccguggccaagugcaacgagaagcacgacgaggaguucugcgacaugcugcgccucuucgacuucaacaagcaggcgauccggcgccugaaggcccccgcccagauguccauccagcugaucaacaaggccgugaacgcccucaucaacgaccagcugaucaugaagaaccaccuccgggacaucauggggauccccuacugcaacuacagcaaguacugcuaccugaaccacaccgucacgggccgcaccucccugccccggugcugccuggugagcaacggguccuaccucaacgagacccacuucagcgacgacaucgagcagcaggcggacaacaugaucaccgagcugcugcagaaggaguacauggaccgccagggcaagacgccgcucggccugguggaccuguucgucuucuccaccagcuucuaccugaucuccaucuuccuccaccuggugaagauccccacccaccggcacgugaucgggaagcccugccccaagccgcaccgccugaaccacaugggcaucugcagcugcgggcucuacaagcaccccggcguccccgugaaguggaagcggugaggacuaguaauaaggaaacuguaugaaugucugugggcaggaagugaagagauccuucuguaaagguuuuuggaauuaugucugcugaauaauaaacuuuuuugaaauaauaaaucugguagaaaaaugagaucuaaaaaaaaaaaaaaaaaaaaaaaaaaaaaaaaaaaaaaaaaaaaaaaaaaaaaaaaaaaaaaaaaaaaaaaaaaaaaaaaaaaaaaaaaaaaaaaaaaaa

SEQ ID NO: 25876 - RNA, 1785 nt, Artificial Sequence
  mRNA product Design b-4 (A100) comprising derived and/or modified sequence from LASV(LASV035-NIG-2009;Clade II)__AIT17588__GPCmut3 (opt1)
aggagagucccgcagucggcguccagcggcucugcuuguucgugugugugucguugcaggccuuauucaagcuuaccaugggccagaucaucaccuucuuccaggaggugccccacgucaucgaggaggugaugaacaucgugcugaucgcccucagccugcuggccauccucaaggggaucuacaacgucgcgaccugcggccuguucgggcugguguccuuccuccugcugugcggccgcagcugcuccacgaccuacaaggggguguacgagcuccagacccuggagcuggacauggccagccucaacaugaccaugccgcuguccugcacgaagaacaacagccaccacuacaucauggucggcaacgagaccggccuggagcucacccugaccaacacguccaucaucaaccacaaguucugcaaccugagcgacgcccacaagaagaaccucuacgaccacgcccugauguccaucaucagcaccuuccaccuguccauccccaacuucaaccaguacgaggccaugagcugcgacuucaacgggggcaagaucuccgugcaguacaaccucagccacgcguacgccguggacgccgccaaccacugcgggaccaucgcgaacggcguccugcagaccuucaugcggauggccuggggcggguccuacaucgcccuggacagcggcaagggguccugggacugcaucaugacgagcuaccaguaccucaucauccagaacaccaccugggaggaccacugccaguucucccgccccagccccaucggcuaccuggggcugcucagccagcggacccgcgacaucuacaucucccggcgccggcgcggcacguucaccuggacccugagcgacuccgagggcaacgagacccccgggggcuacugccugacgcgguggaugcucaucgaggccgagcugaagugcuucgggaacaccgccguggcgaagugcaacgagaagcacgacgaggaguucugcgacaugcugcgccucuucgacuucaacaagcaggccauccggcgccugaaggccccggcccagaugagcauccagcugaucaacaaggccgugaacgcgcucaucaacgaccagcugaucaugaagaaccaccuccgggacaucaugggcauccccuacugcaacuacuccaaguacugcuaccugaaccacaccgucaccgggaagacgagccugccccgcugcugccugguguccaacggcagcuaccucaacgagacccacuucuccgacgacaucgagcagcaggccgacaacaugaucaccgagcugcugcagaaggaguacaucgaccggcagggcaagaccccgcucgggcugguggaccuguucgucuucagcacguccuucuaccugaucagcaucuuccuccaccuggugaagauccccacccaccgccacgugaucggcaagcccugccccaagccgcaccggcugaaccacauggggaucugcuccugcggccucuacaagcaccccgggguccccgugaaguggaagcgcugaggacuaguaauaaggaaacuguaugaaugucugugggcaggaagugaagagauccuucuguaaagguuuuuggaauuaugucugcugaauaauaaacuuuuuugaaauaauaaaucugguagaaaaaugagaucuaaaaaaaaaaaaaaaaaaaaaaaaaaaaaaaaaaaaaaaaaaaaaaaaaaaaaaaaaaaaaaaaaaaaaaaaaaaaaaaaaaaaaaaaaaaaaaaaaaaa

SEQ ID NO: 25877 - RNA, 1785 nt, Artificial Sequence
  mRNA product Design b-4 (A100) comprising derived and/or modified sequence from LASV(LASV1000-NIG-2009;Clade II)__AIT17782__GPCmut3 (opt1)
aggagagucccgcagucggcguccagcggcucugcuuguucgugugugugucguugcaggccuuauucaagcuuaccaugggccagaucaucaccuucuuccaggaggugccccacgucaucgaggaggugaugaacaucgugcugaucgcccucagccugcuggccauccucaaggggaucuacaacgucgcgaccugcggccuguucgggcugguguccuuccuccugcugugcggccgcagcugcuccacgaccuacaaggggguguacgagcuccagacccuggagcuggacauggccagccucaacaugaccaugccgcuguccugcacgaagaacaacagccaccacuacaucauggucggcaacgagaccggccuggagcucacccugaccaacacguccaucaucaaccacaaguucugcaaccugagcgacgcccacaagaagaaccucuacgaccacgcccugauguccaucaucagcaccuuccaccuguccauccccaacuucaaccaguacgaggccaugagcugcgacuucaacgggggcaagaucuccgugcaguacaaccucagccacaccuacgcgguggacgccgccaaccacugcgggaccaucgccaacggcguccugcagacguucaugcggauggcguggggcggguccuacaucgcccuggacagcggcaagggguccugggacugcaucaugaccagcuaccaguaccucaucauccagaacaccaccugggaggaccacugccaguucucccgccccagccccaucggcuaccuggggcugcucagccagcggacgcgcgacaucuacaucucccggcgccggcgcggcaccuucaccuggacccugagcgacuccgagggcaacgagacgcccgggggcuacugccugacccgguggaugcucaucgaggccgagcugaagugcuucgggaacaccgccguggccaagugcaacgagaagcacgacgaggaguucugcgacaugcugcgccucuucgacuucaacaagcaggcgaucaagcggcugaagaccccggcccagaugagcauccagcugaucaacaaggccgugaacgcccucaucaacgaccagcugaucaugaagaaccaccuccgcgacaucaugggcauccccuacugcaacuacuccaaguacugcuaccugaaccacacggucaccgggaagaccagccugccccggugcugccugguguccaacggcagcuaccucaacgagacccacuucuccgacgacaucgagcagcaggccgacaacaugaucacggagcugcugcagaaggaguacaucgaccgccagggcaagaccccgcucgggcugguggaccuguucgucuucagcaccuccuucuaccugaucagcaucuuccuccaccuggugaagauccccacccaccggcacguggucggcaagcccugccccaagccgcaccgccugaaccacauggggaucugcuccugcggccucuacaagcaccccggggugcccgugaaguggaagcggugaggacuaguaauaaggaaacuguaugaaugucugugggcaggaagugaagagauccuucuguaaagguuuuuggaauuaugucugcugaauaauaaacuuuuuugaaauaauaaaucugguagaaaaaugagaucuaaaaaaaaaaaaaaaaaaaaaaaaaaaaaaaaaaaaaaaaaaaaaaaaaaaaaaaaaaaaaaaaaaaaaaaaaaaaaaaaaaaaaaaaaaaaaaaaaaaa

SEQ ID NO: 25878 - RNA, 1785 nt, Artificial Sequence
  mRNA product Design b-4 (A100) comprising derived and/or modified sequence from LASV(LASV221-NIG-2010;Clade II)__AIT17624__GPCmut3 (opt1)
aggagagucccgcagucggcguccagcggcucugcuuguucgugugugugucguugcaggccuuauucaagcuuaccaugggccagaucaucaccuucuuccaggaggugccccacgucaucgaggaggugaugaacaucgugcugaucgcccucagccugcuggccauccucaaggggaucuacaacgucgcgaccugcggccuguucgggcugguguccuuccuccugcugugcggccgcagcugcuccacgaccuacaaggggguguacgagcuccagacccuggagcuggacauggccagccucaacaugaccaugccgcuguccugcacgaagaacaacagccaccacuacaucauggucggcaacgagaccggccuggagcucacccugaccaacacguccaucaucaaccacaaguucugcaaccugagcgacgcccacaagaagaaccucuacgaccacgcccugauguccaucaucagcaccuuccaccuguccauccccaacuucaaccaguacgaggccaugagcugcgacuucaacgggggcaagaucuccgugcaguacaaccucagccacaccuacgcgaucgacgccgccaaccacugcgggaccaucgccaacggcgugcugcagacguucaugcggauggcguggggcggguccuacaucgcccuggacagcggcaagggguccugggacugcaucaugaccagcuaccaguaccucaucauccagaacaccaccugggaggaccacugccaguucucccgccccagccccaucggcuaccuggggcugcucagccagcggacgcgcgacaucuacaucucccggcgccggcgcggcaccuucaccuggacccugagcgacuccgagggcaacgagacgcccgggggcuacugccugacccgguggaugcucaucgaggccgagcugaagugcuucgggaacaccgccgucgccaagugcaacgagaagcacgacgaggaguucugcgacaugcugcgccucuucgacuucaacaagcaggcgauccggcgccugaagaccccggcccagaugagcauccagcugaucaacaaggccgugaacgcccucaucaacgaccagcugaucaugaagaaccaccuccgggacaucaugggcauccccuacugcaacuacuccaaguacugcuaccugaaccacacggugaccgggaagaccagccugccccgcugcugccuggucuccaacggcagcuaccucaacgagacccacuucuccgacgacaucgagcagcaggccgacaacaugaucacggagaugcugcagaaggaguacauggaccggcagggcaagaccccgcuggggcucguggaccuguucguguucagcaccuccuucuaccugaucagcaucuuccugcaccucgucaagauccccacccaccgccacgugaucggcaagcccugccccaagccgcaccggcugaaccacauggggaucugcuccugcggccuguacaagcaccccggggugcccgucaaguggaagcgcugaggacuaguaauaaggaaacuguaugaaugucugugggcaggaagugaagagauccuucuguaaagguuuuuggaauuaugucugcugaauaauaaacuuuuuugaaauaauaaaucugguagaaaaaugagaucuaaaaaaaaaaaaaaaaaaaaaaaaaaaaaaaaaaaaaaaaaaaaaaaaaaaaaaaaaaaaaaaaaaaaaaaaaaaaaaaaaaaaaaaaaaaaaaaaaaaa

SEQ ID NO: 25879 - RNA, 1785 nt, Artificial Sequence
  mRNA product Design b-4 (A100) comprising derived and/or modified sequence from LASV(LASV237-NIG-2010;Clade II)__AIT17638__GPCmut3 (opt1)
aggagagucccgcagucggcguccagcggcucugcuuguucgugugugugucguugcaggccuuauucaagcuuaccaugggccagaucaucaccuucuuccaggaggugccccacgucaucgaggaggugaugaacaucgugcugaucgcccucagccugcuggccauccucaaggggaucuacaacgucgcgaccugcggccuguucgggcugguguccuuccuccugcugugcggccgcagcugcuccacgaccuacaaggggguguacgagcuccagacccuggagcuggacauggccagccucaacaugaccaugccgcuguccugcacgaagaacaacagccaccacuacaucauggucggcaacgagaccggccuggagcucacccugaccaacacguccaucaucaaccacaaguucugcaaccugagcgacgcccacaagaaggaccucuacgaccacgcccugauguccaucaucagcaccuuccaccuguccauccccaacuucaaccaguacgaggccaugagcugcgacuucaacgggggcaagaucuccgugcaguacaaccucagccacaccuacgcgguggacgccgccaaccacugcgggaccaucgccaacggcguccugcagacguucaugcggauggcguggggcggguccuacaucgcccuggacagcggcaagggguccugggacugcaucaugaccagcuaccaguaccucaucauccagaacaccaccugggaggaccacugccaguucucccgccccagccccaucggcuaccuggggcugcucagccagcggacgcgcgacaucuacaucucccggcgccggcgcggcaccuucaccuggacccugagcgacuccgagggcaacgagacgcccgggggcuacugccugacccgguggaugcucaucgaggccgagcugaagugcuucgggaacaccgccguggccaagugcaacgagaagcacgacgaggaguucugcgacaugcugcgccucuucgacuucaacaagcaggcgauccggcgccugaagaccccggcccagaugagcauccagcugaucaacaaggccgugaacgcccucaucaacgaccagcugaucaugaagaaccaccuccgggacaucaugggcauccccuacugcaacuacuccaaguacugcuaccugaaccacacggucaccgggaagaccagccugccccgcugcugccugguguccaacggcagcuaccucaacgagacccacuucuccgacgacaucgagcagcaggccgacaacaugaucacggagcugcugcagaaggaguacauggaccggcagggcaagaccccgcucgggcugguggaccuguucgucuucagcaccuccuucuaccugaucagcaucuuccuccaccugaucaagauccccacccaccgccacaucacgggcaagcccugccccaagccgcaccggcugaaccacauggggaucugcuccugcggccucuacaagcaccccggggugcccgugaaguggaagcgcugaggacuaguaauaaggaaacuguaugaaugucugugggcaggaagugaagagauccuucuguaaagguuuuuggaauuaugucugcugaauaauaaacuuuuuugaaauaauaaaucugguagaaaaaugagaucuaaaaaaaaaaaaaaaaaaaaaaaaaaaaaaaaaaaaaaaaaaaaaaaaaaaaaaaaaaaaaaaaaaaaaaaaaaaaaaaaaaaaaaaaaaaaaaaaaaaa

SEQ ID NO: 25880 - RNA, 1785 nt, Artificial Sequence
  mRNA product Design b-4 (A100) comprising derived and/or modified sequence from LASV(LASV253-NIG-2011;Clade II)__AIT17670__GPCmut3 (opt1)
aggagagucccgcagucggcguccagcggcucugcuuguucgugugugugucguugcaggccuuauucaagcuuaccaugggccagaucaucaccuucuuccaggaggugccccacgucaucgaggaggugaugaacaucgugcugaucgcccucagccugcuggccauccucaaggggaucuacaacgucgcgaccugcggccuguucgggcugguguccuuccuccugcugugcggccgcagcugcuccacgaccuacaaggggguguacgagcuccagacccuggagcuggacauggccagccucaacaugaccaugccgcuguccugcacgaagaacaacagccaccacuacaucauggucggcaacgagaccggccuggagcucacccugaccaacacguccaucaucaaccacaaguucugcaaccugagcgacgcccacaagaagaaccucuacgaccacgcccugauguccaucaucagcaccuuccaccuguccauccccaacuucaaccaguacgaggccaugagcugcgacuucaacgggggcaagaucuccgugcaguacaaccucagccacaccuacgcgguggacgccgccaaccacugcgggaccaucgccaacggcguccugcagacguucaugcggauggcguggggcggguccuacaucgcccuggacagcggcaagggguccugggacugcaucaugaccagcuaccaguaccucaucauccagaacaccaccugggaggaccacugccaguucucccgccccagccccaucggcuaccuggggcugcucagccagcggacgcgcgacaucuacaucucccggcgccggcgcggcaccuucaccuggacccugagcgacuccgagggcaacgagacgcccgggggcuacugccugacccgguggaugcucaucgaggccgagcugaagugcuucgggaacaccgccguggccaagugcaacgagaagcacgacgaggaguucugcgacaugcugcgccucuucgacuucaacaagcaggcgauccggcgccugaaggccccggcccagaugagcauccagcugaucaacaaggccgugaacgcccucaucaacgaccagcugaucaugaagaaccaccuccgggacaucaugggcauccccuacugcaacuacuccaaguacugcuaccugaaccacaccgucacggggcgcaccagccugccccggugcugccugguguccaacggcagcuaccucaacgagacccacuucuccgacgacaucgagcagcaggcggacaacaugaucaccgagcugcugcagaaggaguacaucgaccgccagggcaagacgccgcucgggcugguggaccuguucgucuucagcaccuccuucuaccugaucagcaucuuccuccaccuggugaagauccccacccaccggcacaucaucggcaagcccugccccaagccgcaccgccugaaccacauggggaucugcuccugcggccucuacaagcaccccggggugcccgucaaguggaagcggugaggacuaguaauaaggaaacuguaugaaugucugugggcaggaagugaagagauccuucuguaaagguuuuuggaauuaugucugcugaauaauaaacuuuuuugaaauaauaaaucugguagaaaaaugagaucuaaaaaaaaaaaaaaaaaaaaaaaaaaaaaaaaaaaaaaaaaaaaaaaaaaaaaaaaaaaaaaaaaaaaaaaaaaaaaaaaaaaaaaaaaaaaaaaaaaaa

SEQ ID NO: 25881 - RNA, 1785 nt, Artificial Sequence
  mRNA product Design b-4 (A100) comprising derived and/or modified sequence from LASV(LASV254-NIG-2011;Clade II)__AIT17674__GPCmut3 (opt1)
aggagagucccgcagucggcguccagcggcucugcuuguucgugugugugucguugcaggccuuauucaagcuuaccaugggccagaucaucaccuucuuccaggaggugccccacgucaucgaggaggugaugaacaucgugcugaucgcccucagccugcuggccauccucaaggggaucuacaacgucgcgaccugcggccuguucgggcugguguccuuccuccugcugugcggccgcagcugcuccacgaccuacaaggggguguacgagcuccagacccuggagcuggacaugaccaaccucaacaugacgaugccgcugagcugcaccaagaacaacucccaccacuacaucauggucggcaacgagaccggccuggagcucacccugacgaacaccagcaucaucaaccacaaguucugcaaccuguccgacgcccacaagaagaaccucuacaaccacgcccugaugagcaucaucuccaccuuccaccugagcauccccaacuucaaccaguacgaggccauguccugcgacuucaacgggggcaagaucagcgugcaguacaaccucucccacagcuacgccguggacgcggccaaccacugcgggaccaucgccaacggcguccugcagacguucaugcggauggccuggggcggguccuacaucgcgcuggacagcggcaaggggaacugggacugcaucaugaccuccuaccaguaccucaucauccagaacaccaccugggaggaccacugccaguucagccgccccucccccaucggcuaccuggggcugcucagccagcggacgcgcgacaucuacaucagccggcgccggcgcggcaccuucaccuggacccuguccgacagcgagggcaacgagacgcccgggggcuacugccugacccgguggaugcucaucgaggccgagcugaagugcuucgggaacaccgccguggccaagugcaacgagaagcacgacgaggaguucugcgacaugcugcgccucuucgacuucaacaagcaggccauccggcgccugaagaccccggcgcaggccaacauccagcugaucaacaaggccgugaacgcccucaucaacgaccagcugaucaugaagaaccaccuccgggacaucaugggcauccccuacugcaacuacuccaaguacugcuaccugaaccacacggucaccgggaagaccagccugccccgcugcugccugguguccaacggcagcuaccucaacgagacccacuucuccgacgacaucgagcagcaggccgacaacaugaucacggagcugcugcagaaggaguacauggaccggcagggcaagaccccgcucgggcugguggaccuguucgucuucagcaccuccuucuaccugaucagcaucuuccuccaccuggugaagauccccacccaccgccacgugaucggcaagcccugccccaagccgcaccggcugaaccacauggggaucugcuccugcggccucuacaagcaccccgggguccccgugaaguggaagcgcugaggacuaguaauaaggaaacuguaugaaugucugugggcaggaagugaagagauccuucuguaaagguuuuuggaauuaugucugcugaauaauaaacuuuuuugaaauaauaaaucugguagaaaaaugagaucuaaaaaaaaaaaaaaaaaaaaaaaaaaaaaaaaaaaaaaaaaaaaaaaaaaaaaaaaaaaaaaaaaaaaaaaaaaaaaaaaaaaaaaaaaaaaaaaaaaaa

SEQ ID NO: 25882 - RNA, 1785 nt, Artificial Sequence
  mRNA product Design b-4 (A100) comprising derived and/or modified sequence from LASV(Nig08-A19;Clade III)__ADU56618__GPCmut3 (opt1)
aggagagucccgcagucggcguccagcggcucugcuuguucgugugugugucguugcaggccuuauucaagcuuaccaugggccagaucgugaccuucuuccaggaggucccccacgugaucgaggaggugaugaacaucguccugaucgcccucagcauccuggccauccugaaggggcucuacaacaucgcgaccugcggccugaucgggcuggugacguuccuccugcuguccggccgcagcugcuccaugaccuacaaggggguguacgagcuccagacccuggagcugaacaugaacacccucaacaugacgaugccgcugagcugcaccaagaacaacucccaccacuacaucauggucggcaacgagaccggccuggagcucacccugacgaacaccagccugcuccaccacaaguucugcaaccuguccgacgcccacaagaagaaccuguacgaccacacccucaugagcaucaucuccaccuuccaccugagcauccccaacuucaaccaguacgaggccauguccugcgacuucaacgggggcaagaucacggugcaguacaaccugagccacuccuacgccaucgacgccgcgaaccacugcgggaccguggccaacggcguccuccagaccuucaugcggauggccuggggcgggagcuacaucgcccuggacuccggccgcgggaagugggacugcaucaugaccagcuaccaguaccugaucauccagaacacgaccugggaggaccacugccaguucucccggcccagccccaucggcuaccucgggcugcugucccagcgcacccgggacaucuacaucagccgccggcgccggggcaccuucacguggacccucagcgacuccgagggcaacgagacccccgggggcuacugccugacccgcuggaugcugaucgaggcggagcucaagugcuucgggaacacggccguggccaagugcaacgagaagcacgacgaggaguucugcgacaugcugcggcuguucgacuucaacaagcaggccauccgccggcucaaggccccggcgcagaugagcauccagcugaucaacaaggccgugaacgcccugaucaacgaccagcucaucaugaagaaccaccuccgcgacaucaugggcauccccuacugcaacuacuccaaguacugcuaccugaaccacaccagcaccgggcggaccucccugccccgcugcugccuggucagcaacggcuccuaccugaacgagacgcacuucagcgacgacaucgagcagcaggccgacaacaugaucaccgagaugcuccagaaggaguaccuggaccggcagggcaagaccccgcuggggcugguggaccucuucguguucuccaccagcuucuaccugaucuccaucuuccugcaccucgucaagauccccacgcaccgccacaucgugggcaagcccugccccaagccgcaccggcugaaccacauggggaucugcagcugcggccuguacaagcagcccggggugcccguccgcuggaagcggugaggacuaguaauaaggaaacuguaugaaugucugugggcaggaagugaagagauccuucuguaaagguuuuuggaauuaugucugcugaauaauaaacuuuuuugaaauaauaaaucugguagaaaaaugagaucuaaaaaaaaaaaaaaaaaaaaaaaaaaaaaaaaaaaaaaaaaaaaaaaaaaaaaaaaaaaaaaaaaaaaaaaaaaaaaaaaaaaaaaaaaaaaaaaaaaaa

SEQ ID NO: 25883 - RNA, 1788 nt, Artificial Sequence
  mRNA product Design b-4 (A100) comprising derived and/or modified sequence from LASV(G1180-SLE-2010;Clade IV)__AIT17168__GPCmut3 (opt1)
aggagagucccgcagucggcguccagcggcucugcuuguucgugugugugucguugcaggccuuauucaagcuuaccaugggccagaucgugaccuucuuccaggaggucccccacgugaucgaggaggugaugaacaucguccugaucgcccucagcauccuggccgugcugaaggggcucuacaacuucgcgaccugcggccugguggggcugcucacguuccugcugcucugcggccgcuccugcaccgccagccgguacaagggggucuacgagcugcagacccuggagcucaacauggagacccugaacaugacgaugccgcuguccugcaccaagaacaacagccaccacuacaucauggugggcaacgagaccggccucgagcugacccugacgaacaccuccaucaucaaccacaaguucugcaaccucagcgacgcccacaagaagaaccuguacgaccacgcccugauguccaucaucagcaccuuccaccucuccauccccaacuucaaccaguacgaggccaugagcugcgacuucaacgggggcaagaucuccgugcaguacaaccugagccacuccuacgcgggggacgccgccaaccacugcggcaccgucgccaacggggugcugcagacguucaugcgcauggcguggggcggcagcuacaucgcccucgacuccgggcacggcagcugggacugcaucaugaccuccuaccaguaccugaucauccagaacaccaccugggaggaccacugccaguucagccggcccucccccaucggguaccugggccuccugagccagcgcacgcgggacaucuacaucagccgccggcgccggggcaccuucaccuggacccuguccgacagcgaggggaaggacacgccgggcggguacugccucacccgcuggaugcugaucgaggccgagcugaagugcuucggcaacaccgccguggccaagugcaacgagaagcacgacgaggaguucugcgacaugcuccggcuguucgacuucaacaagcaggcgauccagcgccugaaggcccccgcccagauguccauccagcucaucaacaaggccgucaacgcccugaucaacgaccagcugaucaugaagaaccaccuccgggacaucauggggauccccuacugcaacuacagcaaguacugcuaccugaaccacaccacgaccggcaagaccucccugcccaagugcugccucgugagcaacggcuccuaccugaacgagacccacuucagcgacgacaucgagcagcaggcggacaacaugaucacggagaugcugcagaaggaguacauggagcgccaggggaagaccccgcucggccugguggaccuguucgucuucuccaccagcuucuaccugaucuccaucuuccuccaccuggugaagauccccacccaccggcacaucgugggcaagagcugccccaagccccaccgccugaaccacauggggaucugcuccugcgggcucuacaagcagccgggcguccccgugaaguggaagcggugaggacuaguaauaaggaaacuguaugaaugucugugggcaggaagugaagagauccuucuguaaagguuuuuggaauuaugucugcugaauaauaaacuuuuuugaaauaauaaaucugguagaaaaaugagaucuaaaaaaaaaaaaaaaaaaaaaaaaaaaaaaaaaaaaaaaaaaaaaaaaaaaaaaaaaaaaaaaaaaaaaaaaaaaaaaaaaaaaaaaaaaaaaaaaaaaa

SEQ ID NO: 25884 - RNA, 1788 nt, Artificial Sequence
  mRNA product Design b-4 (A100) comprising derived and/or modified sequence from LASV(G1442-SLE-2011;Clade IV)__AIT17180__GPCmut3 (opt1)
aggagagucccgcagucggcguccagcggcucugcuuguucgugugugugucguugcaggccuuauucaagcuuaccaugggccagaucgugaccuucuuccaggaggucccccacgugaucgaggaggugaugaacaucguccugaucgcccucagcauccuggccgugcugaaggggcucuacaacguggcgaccugcggccugaucgggcuggucacguuccuccugcugugcggccgcuccugcaccaccacccucuacaaggggguguacgagcugcagacgcuggagcucaacauggagacccugaacaugaccaugccgcugagcugcaccaagaacaacucccaccacuacauccgggugggcaacgagacgggccucgagcugacccugaccaacaccagcaucaucaaccacaaguucugcaaccucuccgacgcccacaagaagaaccuguacgaccacgcccugaugagcaucaucuccacguuccaccucagcauccccaacuucaaccaguacgaggccauguccugcgacuucaacgggggcaagaucagcguccaguacaaccugucccacagcuacgccggggacgcggccaaccacugcggcaccguggccaacggggugcugcagaccuucaugcgcauggccuggggcggcuccuacaucgcgcucgacagcgggcggggcaacugggacugcaucaugaccuccuaccaguaccugaucauccagaacacgaccugggacgaccacugccaguucagccgccccucccccaucggguaccugggccuccugagccagcggacccgcgacgucuacaucucccggcgccggcgcggcaccuucacguggacccugagcgacagcgaggggaaggacaccccgggcggguacugccucacccgguggaugcugaucgaggccgagcugaagugcuucggcaacacggccguggccaagugcaacgagaagcacgacgaggaguucugcgacaugcuccgccuguucgacuucaacaagcaggccauccagcggcugaaggcgcccgcccagauguccauccagcucaucaacaaggccgugaacgcccugaucaacgaccagcugaucaugaagaaccaccuccgcgacaucauggggauccccuacugcaacuacagcaaguacugcuaccugaacaacaccgccaccggcaagaccucccugcccaagugcugccucaucagcaacggcuccuaccugaacgagacgcacuucagcgacgacaucgagcaggaggcggacaacaugaucaccgagaugcugcagaaggaguacauggagcggcaggggaagaccccgcucggccuggucgaccuguucguguucuccaccagcuucuaccugaucuccaucuuccuccaccuggugaagauccccacgcaccgccacaucgucggcaagagcugccccaagccccaccggcugaaccacauggggaucugcuccugcgggcucuacaagcagccgggcgugcccgugcgcuggaagcggugaggacuaguaauaaggaaacuguaugaaugucugugggcaggaagugaagagauccuucuguaaagguuuuuggaauuaugucugcugaauaauaaacuuuuuugaaauaauaaaucugguagaaaaaugagaucuaaaaaaaaaaaaaaaaaaaaaaaaaaaaaaaaaaaaaaaaaaaaaaaaaaaaaaaaaaaaaaaaaaaaaaaaaaaaaaaaaaaaaaaaaaaaaaaaaaaa

SEQ ID NO: 25885 - RNA, 1788 nt, Artificial Sequence
  mRNA product Design b-4 (A100) comprising derived and/or modified sequence from LASV(G3010-SLE-2013;Clade IV)__AIT17344__GPCmut3 (opt1)
aggagagucccgcagucggcguccagcggcucugcuuguucgugugugugucguugcaggccuuauucaagcuuaccaugggccagaucgugaccuucuuccaggaggucccccacgugaucgaggaggugaugaacaucguccugaucgcccucagcauccuggccgugcugaaggggcucuacaacuucgcgaccugcggccugguggggcuggucacguuccuccugcugugcggccgcuccugcaccaccagccucuacaaggggguguacgagcugcagacccuggagcucaacauggagacgcugaacaugaccaugccgcuguccugcaccaagaacaacagccaccacuacaucauggugggcaacgagaccggccucgagcugacgcugaccaacaccuccaucaucaaccacaaguucugcaaccucagcgacgcccacaagaagaaccuguacaaccacgcccugauguccaucaucagcaccuuccaccucuccauccccaacuucaaccaguacgaggccaugagcugcgacuucaacgggggcaagaucuccguccaguacaaccugagccacuccuacgccggggacgcggccagccacugcggcacgguggccaacggggugcugcagaccuucaugcggauggccuggggcggcuccuacaucgcgcucgacagcggguacggcaagugggacugcaucaugaccuccuaccaguaccugaucauccagaacaccacgugggaggaccacugccaguucagccgccccucccccaucggguaccugggccuccugagccagcggacccgcgacaucuacaucagccggcgccggcgcggcaccuucaccuggacgcuguccgacagcgaggggaaggacaccccgggcggguacugccucacccgguggaugcugaucgaggccgagcugaagugcuucggcaacaccgccgucgccaagugcaacgagaagcacgacgaggaguucugcgacaugcuccgccuguucgacuucaacaagcaggccauccagcggcugaagacgcccgcgcagauguccauccagcucaucaacaaggccgugaacgcccugaucaacgaccagcugaucaugaagaaccaccuccgcgacaucauggggauccccuacugcaacuacagcaaguacugcuaccugaaccacaccaccaccggcaagacgucccugcccaagugcugccucgugagcaacggcuccuaccugaacgagacccacuucagcgacgacaucgagcagcaggccgacaacaugaucaccgagaugcugcagaaggaguacauggagcggcaggggaagaccccgcucggccuggucgaccuguucguguucuccacgagcuucuaccugaucuccaucuuccuccaccuggugaagauccccacccaccgccacaucgucggcaagagcugccccaagccccaccggcugaaccacauggggaucugcuccugcgggcucuacaagcagccgggcgugcccgugcgcuggaagcggugaggacuaguaauaaggaaacuguaugaaugucugugggcaggaagugaagagauccuucuguaaagguuuuuggaauuaugucugcugaauaauaaacuuuuuugaaauaauaaaucugguagaaaaaugagaucuaaaaaaaaaaaaaaaaaaaaaaaaaaaaaaaaaaaaaaaaaaaaaaaaaaaaaaaaaaaaaaaaaaaaaaaaaaaaaaaaaaaaaaaaaaaaaaaaaaaa

SEQ ID NO: 25886 - RNA, 1788 nt, Artificial Sequence
  mRNA product Design b-4 (A100) comprising derived and/or modified sequence from LASV(G502-SLE-2009;Clade IV)__AIT17126__GPCmut3 (opt1)
aggagagucccgcagucggcguccagcggcucugcuuguucgugugugugucguugcaggccuuauucaagcuuaccaugggccagaucgugaccuucuuccaggaggucccccacgugaucgaggaggugaugaacaucguccugaucgcccucagcauccuggccgugcugaaggggcucuacaacuucgcgaccugcggccugguggggcugcucacguuccugcugcucugcggccgcuccugcaccaccgggcuguacaagggcgucuacgagcugcagacccucgagcugaacauggagacgcugaacaugaccaugccgcucagcugcaccaagaacaacucccaccacuacaucauggugggcaacgagaccgggcuggagcugacgcucaccaacaccagcaucaucaaccacaaguucugcaaccuguccgacgcccacaagaagaaccuguacgaccacgcccucaugagcaucaucuccaccuuccaccugagcauccccaacuucaaccaguacgaggccauguccugcgacuucaacggcgggaagaucagcgugcaguacaaccugucccacagcuacgccggcgacgcggccgaccacugcgggacggucgccaacggcgugcuccagaccuucaugcggauggccuggggcggguccuacaucgcgcuggacagcggccgcgggcggugggacugcaucaugaccuccuaccaguaccugaucauccagaacaccacgugggaggaccacugccaguucagccgccccucccccaucggcuaccucggccugcugagccagcggacccgcgacaucuacaucucccggcgccggcgcgggaccuucaccuggacgcucagcgacagcgagggcaaggacacccccgggggcuacugccugacccgguggaugcugaucgaggccgagcucaagugcuucgggaacaccgccguggccaagugcaacgagaagcacgacgaggaguucugcgacaugcugcgccuguucgacuucaacaagcaggccauccagcggcucaaggcgccggcccagauguccauccagcugaucaacaaggccgucaacgcccugaucaacgaccagcucgugaugaagaaccaccuccgcgacaucaugggcauccccuacugcaacuacagccgguacugcuaccugaaccacacgaccaccggccgcaccucccugcccaagugcugccuggugagcaacggguccuaccugaacgagacgcacuucagcgacgacaucgagcagcaggccgacaacaugaucaccgagaugcuccagaaggaguacauggagcggcagggcaagaccccgcuggggcuggucgaccuguucguguucuccaccagcuucuaccucaucuccaucuuccugcaccuggugaagauccccacgcaccgccacaucgucggcaagagcugccccaagccccaccggcucaaccacauggggaucugcuccugcggccuguacaagcagccgggcgugcccgugaaguggaagcgcugaggacuaguaauaaggaaacuguaugaaugucugugggcaggaagugaagagauccuucuguaaagguuuuuggaauuaugucugcugaauaauaaacuuuuuugaaauaauaaaucugguagaaaaaugagaucuaaaaaaaaaaaaaaaaaaaaaaaaaaaaaaaaaaaaaaaaaaaaaaaaaaaaaaaaaaaaaaaaaaaaaaaaaaaaaaaaaaaaaaaaaaaaaaaaaaaa

SEQ ID NO: 25887 - RNA, 1788 nt, Artificial Sequence
  mRNA product Design b-4 (A100) comprising derived and/or modified sequence from LASV(G733-SLE-2010;Clade IV)__AIT17154__GPCmut3 (opt1)
aggagagucccgcagucggcguccagcggcucugcuuguucgugugugugucguugcaggccuuauucaagcuuaccaugggccagaucgugaccuucuuccaggaggucccccacgugaucgaggaggugaugaacaucguccugaucgcccucagcauccuggccgugcugaaggggcucuacaacuucgcgaccugcggcaucguggggcuggucuccuuccugcuccugugcggccgcagcugcacgaccucccuguacaaggggguguacgagcuccagacccuggagcugaacauggagacccucaacaugacgaugccgcugagcugcaccaagaacaacucccaccacuacaucauggugggcaacgagaccggccuggagcucacccugacgaacaccagcaucaucaaccacaaguucugcaaccuguccgacgcccacaagaagaaccucuacgaccacgcccugaugagcaucaucuccaccuuccaccugagcauccccaacuucaaccaguacgaggccauguccugcgacuucaacgggggcaagaucagcguccaguacaaccucucccacagcuacgccggggacgcggccaaccacugcggcaccaucgccaacggggugcugcagacguucaugcggauggccuggggcggcuccuacaucgcgcuggacagcgggcgcgaccggugggacugcaucaugaccuccuaccaguaccucaucauccagaacaccaccugggaggaccacugccaguucagccgccccucccccaucggcuaccuggggcugcucagccagcggacgcgcgacaucuacaucagccggcgccggcgcggcaccuucaccuggacccuguccgacagcgagggcaaggacacgcccgggggcuacugccugacccgguggaugcucaucgaggccgagcugaagugcuucgggaacaccgccguggccaagugcaacgagaagcacgacgaggaguucugcgacaugcugcgccucuucgacuucaacaagcaggccauccagcggcugaaggcgccggcccagauguccauccagcugaucaacaaggccgucaacgcccucaucaacgaccagcugaucaugaagaaccaccuccgcgacaucaugggcauccccuacugcaacuacagcaaguacugcuaccugaaccacaccacgaccgggaagaccucccugcccaagugcugccuggugagcaacggcuccuaccucaacgagacccacuucagcgacgacaucgagcagcaggccgacaacaugaucacggagaugcugcagaaggaguacauggagcggcagggcaagaccccgcuggggcucguggaccuguucgucuucuccaccagcuucuaccugaucuccaucuuccugcaccucgugaagauccccacccaccgccacguggucggcaagagcugccccaagccccaccggcugaaccacauggggaucugcuccugcggccuguacgggcagccgggcgugcccgugaaguggaagcgcugaggacuaguaauaaggaaacuguaugaaugucugugggcaggaagugaagagauccuucuguaaagguuuuuggaauuaugucugcugaauaauaaacuuuuuugaaauaauaaaucugguagaaaaaugagaucuaaaaaaaaaaaaaaaaaaaaaaaaaaaaaaaaaaaaaaaaaaaaaaaaaaaaaaaaaaaaaaaaaaaaaaaaaaaaaaaaaaaaaaaaaaaaaaaaaaaa

SEQ ID NO: 25888 - RNA, 1788 nt, Artificial Sequence
  mRNA product Design b-4 (A100) comprising derived and/or modified sequence from MOPV/LASV reassortant(IGS-1;Clade IV)__AFY05576__GPCmut3 (opt1)
aggagagucccgcagucggcguccagcggcucugcuuguucgugugugugucguugcaggccuuauucaagcuuaccaugggccagaucgugaccuucuuccaggaggucccccacgugaucgaggaggugaugaacaucguccugaucgcccucagcgugcuggccgugcugaaggggcucuacaacuucgcgaccugcggccuggucgggcuggugacguuccuccugcugugcggccgcuccugcaccaccagccucuacaaggggguguacgagcugcagacccuggagcucaacauggagacgcugaacaugaccaugccgcuguccugcaccaagaacaacagccaccacuacaucauggucggcaacgagaccggccucgagcugacgcugaccaacaccuccaucaucaaccacaaguucugcaaccucagcgacgcccacaagaagaaccuguacgaccacgcccugauguccaucaucagcaccuuccaccucuccauccccaacuucaaccaguacgaggccaugagcugcgacuucaacgggggcaagaucuccgugcaguacaaccugagccacuccuacgccggggacgcggccaaccacugcggcacgguggccaacgggguccugcagaccuucaugcggauggccuggggcggcagcuacaucgcgcucgacuccgggcgcggcaacugggacugcaucaugaccagcuaccaguaccugaucauccagaacaccacgugggaggaccacugccaguucucccggcccagccccaucggguaccugggccuccugucccagcgcacccgggacaucuacaucagccgccggcgccggggcaccuucaccuggacgcugagcgacuccgagggggaggacaccccgggcggguacugccucacccgcuggaugcugaucgaggccgagcugaagugcuucggcaacaccgccguggccaagugcaacgagaagcacgacgaggaguucugcgacaugcuccggcuguucgacuucaacaagcaggccauccagcgccugaaggcgcccgcccagaugagcauccagcucaucaacaaggccgugaacgcccugaucaacgaccagcugaucaugaagaaccaccuccgggacaucauggggauccccuacugcaacuacuccaaguacugcuaccugaaccacacgaccaccggccgcaccagccugcccaagugcugccucgucuccaacggcagcuaccugaacgagacgcacuucuccgacgacaucgagcagcaggccgacaacaugaucaccgagaugcugcagaaggaguacauggagcggcaggggaagaccccgcucggccugguggaccuguucguguucagcaccuccuucuaccugaucagcaucuuccuccaccuggucaagauccccacgcaccgccacaucguggggaaguccugccccaagccccaccggcugaaccacaugggcaucugcagcugcgggcucuacaagcagccgggcgugcccgucaaguggaagcgcugaggacuaguaauaaggaaacuguaugaaugucugugggcaggaagugaagagauccuucuguaaagguuuuuggaauuaugucugcugaauaauaaacuuuuuugaaauaauaaaucugguagaaaaaugagaucuaaaaaaaaaaaaaaaaaaaaaaaaaaaaaaaaaaaaaaaaaaaaaaaaaaaaaaaaaaaaaaaaaaaaaaaaaaaaaaaaaaaaaaaaaaaaaaaaaaaa

SEQ ID NO: 25889 - RNA, 1788 nt, Artificial Sequence
  mRNA product Design b-4 (A100) comprising derived and/or modified sequence from LASV(LM765-SLE-2012;Clade IV)__AIT17814__GPCmut3 (opt1)
aggagagucccgcagucggcguccagcggcucugcuuguucgugugugugucguugcaggccuuauucaagcuuaccaugggccagaucgugaccuucuuccaggaggucccccacgugaucgaggaggugaugaacaucguccugaucgcccucagcauccuggccgugcugaaggggcucuacaacuucgcgaccugcggccugguggggcuggucacguuccuccugcugugcggccgcuccugcaccaccagccucuacaaggggguguacgagcugcagacccuggagcucaacauggagacgcugaacaugaccaugccgcuguccugcaccaagaacaacagccaccacuacaucauggugggcaacgagaccggccucgagcugacgcugaccaacaccuccaucaucgaccacaaguucugcaaccucagcgacgcccaccggaagaaccuguacgaccacgcccugauguccaucaucagcaccuuccaccucuccauccccaacuucaaccaguacgaggccaugagcugcgacuucaacgggggcaagaucuccguccaguacaaccugagccacuccuacgccaaggacgcggccgaccacugcgggacgguggccaacggcgugcugcagaccuucaugcgcauggccuggggcgggagcuacaucgcgcucgacuccggccgggggcgcugggacugcaucaugaccagcuaccaguaccugaucauccagaacaccacgugggaggaccacugccaguucucccggcccagccccaucggcuaccuggggcuccugucccagcgcacccgggacaucuacaucagccgccggcgccggggcaccuucaccuggacgcugagcgacuccgagggcaaggacacccccgggggcuacugccucacccgcuggaugcugaucgaggccgagcugaagugcuucgggaacaccgccgucgccaagugcaacgagaagcacgacgaggaguucugcgacaugcuccggcuguucgacuucaacaagcaggccauccagcgccugaaggcgccggcccagaugagcauccagcucaucaacaaggccgugaacgcccugaucaacgaccagcugaucaugaagaaccaccuccgggacaucaugggcauccccuacugcaacuacuccaaguacugcuaccugaaccacacgaccaccgggaagaccagccugcccaagugcugccucguguccaacggcagcuaccugaacgagacgcacuucuccgacgacaucgagcagcaggccgacaacaugaucaccgagaugcugcagaaggaguacauggagcgccagggcaagaccccgcucgggcuggucgaccuguucguguucagcaccuccuucuaccugaucagcaucuuccuccaccuggugaagauccccacgcaccggcacaucgucggcaagcccugccccaagccgcaccgccugaaccacauggggaucugcuccugcggccucuacaagcagcccggggugcccgugaaguggaagcggugaggacuaguaauaaggaaacuguaugaaugucugugggcaggaagugaagagauccuucuguaaagguuuuuggaauuaugucugcugaauaauaaacuuuuuugaaauaauaaaucugguagaaaaaugagaucuaaaaaaaaaaaaaaaaaaaaaaaaaaaaaaaaaaaaaaaaaaaaaaaaaaaaaaaaaaaaaaaaaaaaaaaaaaaaaaaaaaaaaaaaaaaaaaaaaaaa

SEQ ID NO: 25890 - RNA, 1788 nt, Artificial Sequence
  mRNA product Design b-4 (A100) comprising derived and/or modified sequence from LASV(LM776-SLE-2012;Clade IV)__AIT17824__GPCmut3 (opt1)
aggagagucccgcagucggcguccagcggcucugcuuguucgugugugugucguugcaggccuuauucaagcuuaccaugggccagaucgugaccuucuuccaggaggucccccacgugaucgaggaggugaugaacaucguccugaucgcccucagcauccuggccgugcugaaggggcucuacaacuucgcgaccugcggccugguggggcuggucacguuccuccugcugugcggccgcuccugcaccaccagcguguacaaggggguguacgagcuccagacccuggagcugaacauggagacgcucaacaugaccaugccgcuguccugcaccaagaacaacagccaccacuacaucauggucggcaacgagaccggccuggagcucacgcugaccaacaccuccaucaucaaccacaaguucugcaaccugagcgacgcccacaagaagaaccucuacgaccacgcccugauguccaucaucagcaccuuccaccuguccauccccaacuucaaccaguacgaggccaugagcugcgacuucaacgggggcaagaucuccgugcaguacaaccucagccacuccuacgccggggacgcggccaaccacugcggcacgguggccaacgggguccugcagaccuucaugcggauggccuggggcggcagcuacaucgcgcuggacuccgggcacggcaagugggacugcaucaugaccagcuaccaguaccucaucauccagaacaccacgugggaggaccacugccaguucucccgccccagccccaucggguaccugggccugcucucccagcggacccgcgacaucuacaucagccggcgccggcgcggcaccuucaccuggacgcugagcgacuccgaggggaaggacaccccgggcggguacugccugacccgguggaugcucaucgaggccgagcugaagugcuucggcaacaccgccguggccaagugcaacgagaagcacgacgaggaguucugcgacaugcugcgccucuucgacuucaacaagcaggccauccagcggcugaaggcgcccgcccagaugagcauccagcugaucaacaaggccgugaacgcccucaucaacgaccagcugaucaugaagaaccaccuccgcgacaucauggggauccccuacugcaacuacuccaaguacugcuaccugaaccacacgaccaccggcaagaccagccugcccaagugcugccuggucuccaacggcagcuaccucaacgagacgcacuucuccgacgacaucgagcagcaggccgacaacaugaucaccgagaugcugcagaaggaguacauggagcggcaggggaagaccccgcugggccucguggaccuguucguguucagcaccuccuucuaccugaucagcaucuuccugcaccucgucaagauccccacgcaccgccacaucguggggaaguccugccccaagccccaccggcugaaccacaugggcaucugcagcugcgggcuguacaagcagccgggcgugcccguccgcuggaagcggugaggacuaguaauaaggaaacuguaugaaugucugugggcaggaagugaagagauccuucuguaaagguuuuuggaauuaugucugcugaauaauaaacuuuuuugaaauaauaaaucugguagaaaaaugagaucuaaaaaaaaaaaaaaaaaaaaaaaaaaaaaaaaaaaaaaaaaaaaaaaaaaaaaaaaaaaaaaaaaaaaaaaaaaaaaaaaaaaaaaaaaaaaaaaaaaaa

SEQ ID NO: 25891 - RNA, 1788 nt, Artificial Sequence
  mRNA product Design b-4 (A100) comprising derived and/or modified sequence from LASV(Mad39;Clade IV)__ANH09722__GPCmut3 (opt1)
aggagagucccgcagucggcguccagcggcucugcuuguucgugugugugucguugcaggccuuauucaagcuuaccaugggccagaucgugaccuucuuccaggaggucccccacgugaucgaggaggugaugaacaucguccugaucgcccucagcauccuggccgugcugaaggggcucuacaacguggcgaccugcggccugaucgggcuggucacguuccuccugcugugcggccgcuccugcaccaccacccucuacaaggggguguacgagcugcaggcccuggagcucaacauggagacgcugaacaugaccaugccgcugagcugcaccaagaacaacucccaccacuacauccgggugggcaacgagaccggccucgagcugacgcugaccaacaccagccucaucaaccacaaguucugcaaccuguccgacgcccacaagaagaaccuguacgaccacgcccucaugagcaucaucuccaccuuccaccugagcauccccaacuucaaccaguacgaggccauguccugcgacuucaacgacgggaagaucagcguccaguacaaccugucccacacguacgcgggcgacaccgccaaccacugcgggaccguggccaacggcgugcuccagaccuucaugcgcauggccuggggcgggagcuacaucgcgcuggacuccggccgcgggggcugggacugcaucaugacgagcuaccaguaccugaucauccagaacaccaccugggaggaccacugccaguucucccggcccagccccaucggguaccucggccugcugucccagcggacccgcgacaucuacaucagccggcgccggcgcggcacguucaccuggacccucuccgacagcgaggggaaggacaccccgggcggguacugccugacgcgguggaugcugaucgaggccgagcucaagugcuucggcaacaccgccgucgccaagugcaacgagaagcacgacgaggaguucugcgacaugcugcgccuguucgacuucaacaagcaggccauccagcggcucaaggcgcccgcccagaugagcauccagcugaucaacaaggccgugaacgcccugaucaacgaccagcucaucaugaagaaccaccuccgcgacaucauggggauccccuacugcaacuacuccaaguacugcuaccugaaccacaccgugaccggcaagacgagccugcccaagugcugccuggucuccaacggcagcuaccugaacgagacccacuucuccgacgacaucgagcagcaggccgacaacaugaucaccgagaugcuccagaaggaguacauggagcggcaggggaagaccccgcugggccugguggaccuguucguguucagcacguccuucuaccucaucagcaucuuccugcaccuggucaagauccccacccaccgccacgugguggggaagcccugccccaagccgcaccggcucaaccacaugggcaucugcuccugcggguucuacaagcagcccggcguccccgugcgcuggaagcggugaggacuaguaauaaggaaacuguaugaaugucugugggcaggaagugaagagauccuucuguaaagguuuuuggaauuaugucugcugaauaauaaacuuuuuugaaauaauaaaucugguagaaaaaugagaucuaaaaaaaaaaaaaaaaaaaaaaaaaaaaaaaaaaaaaaaaaaaaaaaaaaaaaaaaaaaaaaaaaaaaaaaaaaaaaaaaaaaaaaaaaaaaaaaaaaaa

SEQ ID NO: 25892 - RNA, 1788 nt, Artificial Sequence
  mRNA product Design b-4 (A100) comprising derived and/or modified sequence from LASV(Z0947-SLE-2011;Clade IV)__AIT17840__GPCmut3 (opt1)
aggagagucccgcagucggcguccagcggcucugcuuguucgugugugugucguugcaggccuuauucaagcuuaccaugggccagaucgugaccuucuuccaggaggucccccacgugaucgaggaggugaugaacaucguccugaucgcccucagcauccuggccgugcugaaggggcucuacaacuucgcgaccugcggccugguggggcuggucacguuccuccugcugugcggccgcuccugcaccaucagccucuacaaggggguguacgagcugcagacccuggagcucaacauggagacccugaacaugacgaugccgcuguccugcaccaagaacaacagccaccacuacaucauggugggcaacgagaccggccucgagcugacccugacgaacaccuccaucaucaaccacaaguucugcaaccucagcgacgcccacaagaagaaccuguacgaccacgcccugauguccaucaucagcaccuuccaccucuccauccccaacuucaaccaguacgaggccaugagcugcgacuucaacgggggcaagaucuccguccaguacaaccugagccacuccuacgccggggacgcggccaaccacugcggcaccguggccaacggggugcugcagacguucaugcggauggccuggggcggcagcuacaucgcgcucgacuccgggcgcgaccggugggacugcaucaugaccagcuaccaguaccugaucauccagaacaccaccugggaggaccacugccaguucucccgccccagccccaucggcuaccuggggcuccugucccagcggacgcgcgacaucuacaucagccggcgccggcgcggcaccuucaccuggacccugagcgacuccgagggcaaggacacgcccgggggcuacugccucacccgguggaugcugaucgaggccgagcugaagugcuucgggaacaccgccgucgccaagugcaacgagaagcacgacgaggaguucugcgacaugcuccgccuguucgacuucaacaagcaggccauccagcggcugaaggcgccggcccagaugagcauccagcucaucaacaaggccgugaacgcccugaucaacgaccagcugaucaugaagaaccaccuccgcgacaucaugggcauccccuacugcaacuacuccaaguacugcuaccugaaccacaccacgaccgggaagaccagccugcccaagugcugccucguguccaacggcagcuaccugaacgagacccacuucuccgacgacaucgagcagcaggccgacaacaugaucacggagaugcugcagaaggaguacauggagcggcagggcaagaccccgcucgggcuggucgaccuguucguguucagcaccuccuucuaccugaucagcaucuuccuccaccuggugaagauccccacccaccgccacaucgucggcaagcccugccccaagccgcaccggcugaaccacauggggaucugcuccugcggccucuacaagcagcccggggugcccgugaaguggaagcgcugaggacuaguaauaaggaaacuguaugaaugucugugggcaggaagugaagagauccuucuguaaagguuuuuggaauuaugucugcugaauaauaaacuuuuuugaaauaauaaaucugguagaaaaaugagaucuaaaaaaaaaaaaaaaaaaaaaaaaaaaaaaaaaaaaaaaaaaaaaaaaaaaaaaaaaaaaaaaaaaaaaaaaaaaaaaaaaaaaaaaaaaaaaaaaaaaa

SEQ ID NO: 25893 - RNA, 1788 nt, Artificial Sequence
  mRNA product Design b-4 (A100) comprising derived and/or modified sequence from LASV(Josiah;Clade IV)__NP_694870__GPCmut3 (opt4)
aggagagucccgcagucggcguccagcggcucugcuuguucgugugugugucguugcaggccuuauucaagcuuaccaugggccagaucgugaccuucuuccaggaggugccccacgugaucgaggaggugaugaacaucgugcugaucgcccugagcgugcuggccgugcugaagggccuguacaacuucgccaccugcggccuggugggccuggugaccuuccugcugcugugcggcagaagcugcaccaccagccuguacaagggcguguacgagcugcagacccuggagcugaacauggagacccugaacaugaccaugccccugagcugcaccaagaacaacagccaccacuacaucauggugggcaacgagaccggccuggagcugacccugaccaacaccagcaucaucaaccacaaguucugcaaccugagcgacgcccacaagaagaaccuguacgaccacgcccugaugagcaucaucagcaccuuccaccugagcauccccaacuucaaccaguacgaggccaugagcugcgacuucaacggcggcaagaucagcgugcaguacaaccugagccacagcuacgccggcgacgccgccaaccacugcggcaccguggccaacggcgugcugcagaccuucaugagaauggccuggggcggcagcuacaucgcccuggacagcggcagaggcaacugggacugcaucaugaccagcuaccaguaccugaucauccagaacaccaccugggaggaccacugccaguucagcagacccagccccaucggcuaccugggccugcugagccagagaaccagagacaucuacaucagcagaagaagaagaggcaccuucaccuggacccugagcgacagcgagggcaaggacacccccggcggcuacugccugaccagauggaugcugaucgaggccgagcugaagugcuucggcaacaccgccguggccaagugcaacgagaagcacgacgaggaguucugcgacaugcugagacuguucgacuucaacaagcaggccauccagagacugaaggcccccgcccagaugagcauccagcugaucaacaaggccgugaacgcccugaucaacgaccagcugaucaugaagaaccaccugagagacaucaugggcauccccuacugcaacuacagcaaguacugcuaccugaaccacaccaccaccggcagaaccagccugcccaagugcugccuggugagcaacggcagcuaccugaacgagacccacuucagcgacgacaucgagcagcaggccgacaacaugaucaccgagaugcugcagaaggaguacauggagagacagggcaagaccccccugggccugguggaccuguucguguucagcaccagcuucuaccugaucagcaucuuccugcaccuggugaagauccccacccacagacacaucgugggcaagagcugccccaagccccacagacugaaccacaugggcaucugcagcugcggccuguacaagcagcccggcgugcccgugaaguggaagagaugaggacuaguaauaaggaaacuguaugaaugucugugggcaggaagugaagagauccuucuguaaagguuuuuggaauuaugucugcugaauaauaaacuuuuuugaaauaauaaaucugguagaaaaaugagaucuaaaaaaaaaaaaaaaaaaaaaaaaaaaaaaaaaaaaaaaaaaaaaaaaaaaaaaaaaaaaaaaaaaaaaaaaaaaaaaaaaaaaaaaaaaaaaaaaaaaa

SEQ ID NO: 25894 - RNA, 1785 nt, Artificial Sequence
  mRNA product Design b-4 (A100) comprising derived and/or modified sequence from LASV(LP;Clade I)__AAF86701__GPCmut3 (opt4)
aggagagucccgcagucggcguccagcggcucugcuuguucgugugugugucguugcaggccuuauucaagcuuaccaugggccagaucaucaccuucuuccaggaggugccccacgugaucgaggaggugaugaacaucgugcugaucgcccugagccugcuggccauccugaagggccuguacaacaucgccaccugcggcaucaucggccugguggccuuccuguuccugugcggcaagagcugcagccugacccugaagggcggcuacgagcugcagacccuggagcugaacauggagacccugaacaugaccaugccccugagcugcaccaagaacagcagccaccacuacaucagagugggcaacgagaccggccuggagcugacccugaccaacaccagcaucaucaaccacaaguucugcaaccugagcgacgcccacaagaagaaccuguacgaccacgcccugaugagcaucaucagcaccuuccaccugagcauccccaacuucaaccaguacgaggccaugagcugcgacuucaacggcggcaagaucagcgugcaguacaaccugagccacagcuacgccggcgacgccgccgagcacugcggcaccguggccaacggcgugcugcagaccuucaugagaauggccuggggcggcagauacaucgcccuggacagcggcaagggcaacugggacugcaucaugaccagcuaccaguaccugaucauccagaacaccaccugggaggaccacugccaguucagcagacccagccccaucggcuaccugggccugcugagccagagaaccagagacaucuacaucagcagaagaagaagaggcaccuucaccuggacccugagcgacagcgagggcaacgagacccccggcggcuacugccugaccagauggaugcugaucgaggccgagcugaagugcuucggcaacaccgccguggccaagugcaacgagaagcacgacgaggaguucugcgacaugcugagacuguucgacuucaacaagcaggccaucagaagacugaaggcccccgcccagaugagcauccagcugaucaacaaggccgugaacgcccugaucaacgaccagcugaucaugaagaaccaccugagagacaucaugggcauccccuacugcaacuacagcaaguacugcuaccugaaccacaccagcagcggcagaaccagccugcccaagugcugccugaucagcaacggcagcuaccugaacgagacccaguucagcgacgacaucgagcagcaggccgacaacaugaucaccgagaugcugcagaaggaguacaucgagagacagggcaagaccccccugggccugguggacaucuucaucuucagcaccagcuucuaccugaucagcaucuuccugcaccugaucaagauccccacccacagacacaucgugggcaagcccugccccaagccccacagacugaaccacaugggcgugugcagcugcggccuguacaagcaccccggcgugcccaccaaguggaagagaugaggacuaguaauaaggaaacuguaugaaugucugugggcaggaagugaagagauccuucuguaaagguuuuuggaauuaugucugcugaauaauaaacuuuuuugaaauaauaaaucugguagaaaaaugagaucuaaaaaaaaaaaaaaaaaaaaaaaaaaaaaaaaaaaaaaaaaaaaaaaaaaaaaaaaaaaaaaaaaaaaaaaaaaaaaaaaaaaaaaaaaaaaaaaaaaaa

SEQ ID NO: 25895 - RNA, 1785 nt, Artificial Sequence
  mRNA product Design b-4 (A100) comprising derived and/or modified sequence from LASV(803213;Clade II)__AAF86703__GPCmut3 (opt4)
aggagagucccgcagucggcguccagcggcucugcuuguucgugugugugucguugcaggccuuauucaagcuuaccaugggccagaucaucaccuucuuccaggaggugccccacgugaucgaggaggugaugaacaucgugcugaucgcccugagccugcuggccauccugaagggcaucuacaacguggccaccugcggccuguucggccugaucagcuuccugcugcugugcggcagaagcugcagcgugaccuacaagggcguguacgagcugcagacccuggagcugaacauggccaaccugaacaugaccaugccccugagcugcaccaagaacaacagccaccacuacaucauggugggcaacgagaccggccuggagcugacccugaccaacaccagcaucaucaaccacaaguucugcaaccugagcgacgcccacaagaagaaccuguacgaccacgcccugaugagcaucaucagcaccuuccaccugagcauccccaacuucaaccaguacgaggccaugagcugcgacuucaacggcggcaagaucagcgugcaguacaaccugagccacagcuucgccguggacgccgccaaccacugcggcaccaucgccaacggcgugcugcagaccuucaugagaauggccuggggcggcagcuacaucgcccuggacagcggcaagggcaacugggacugcaucaugaccagcuaccaguaccugaucauccagaacaccaccugggaggaccacugccaguucagcagacccagccccaucggcuaccugggccugcugagccagagaaccagagacaucuacaucagcagaagaagaagaggcaccuucaccuggacccugagcgacagcgagggcaacgaggcccccggcggcuacugccugaccagauggaugcugaucgaggccgagcugaagugcuucggcaacaccgccguggccaagugcaacgagaagcacgacgaggaguucugcgacaugcugagacuguucgacuucaacaagcaggccaucaagagacugaagacccccgcccagaugagcauccagcugaucaacaaggccgugaacgcccugaucaacgaccagcugaucaugaagaaccaccugagagacaucaugggcauccccuacugcaacuacagcagauacugcuaccugaaccacaccgugaccggcaagaccagccugcccagaugcugccuggugagcaacggcagcuaccugaacgagacccacuucagcgacgacaucgagcagcaggccgacaacaugaucaccgagaugcugcagaaggaguacauggacagacagggcaagaccccccugggccugguggaccuguucguguucagcaccagcuucuaccugaucagcaucuuccugcaccuggugaagauccccacccacagacacaucgugggcaagcccugccccaagccccacagacugaaccacaugggcaucugcagcugcggccuguacaagcaccccggcgugcccgugaaguggaagagaugaggacuaguaauaaggaaacuguaugaaugucugugggcaggaagugaagagauccuucuguaaagguuuuuggaauuaugucugcugaauaauaaacuuuuuugaaauaauaaaucugguagaaaaaugagaucuaaaaaaaaaaaaaaaaaaaaaaaaaaaaaaaaaaaaaaaaaaaaaaaaaaaaaaaaaaaaaaaaaaaaaaaaaaaaaaaaaaaaaaaaaaaaaaaaaaaa

SEQ ID NO: 25896 - RNA, 1785 nt, Artificial Sequence
  mRNA product Design b-4 (A100) comprising derived and/or modified sequence from LASV(GA391;Clade III)__CAA36645__GPCmut3 (opt4)
aggagagucccgcagucggcguccagcggcucugcuuguucgugugugugucguugcaggccuuauucaagcuuaccaugggccagaucgugaccuucuuccaggaggugccccacgugaucgaggaggugaugaacaucgugcugaucgcccugagcauccuggccauccugaagggccuguacaacguggccaccugcggccugaucggccuggugaccuuccugcugcugagcggcagaagcugcagccugaucuacaagggcaccuacgagcugcagacccuggagcugaacauggagacccugaacaugaccaugccccugagcugcaccaagaacaacagccaccacuacaucagagugggcaacgagaccggccuggagcugacccugaccaacaccagcauccugaaccacaaguucugcaaccugagcgacgcccacaagagaaaccuguacgaccacagccugaugagcaucaucagcaccuuccaccugagcauccccaacuucaaccaguacgaggccaugagcugcgacuucaacggcggcaagaucaccgugcaguacaaccugagccacagcuucgccguggacgccgccggccacugcggcacccuggccaacggcgugcugcagaccuucaugagaauggccuggggcggcagcuacaucgcccuggacagcggcagaggcaacugggacugcaucaugaccagcuaccaguaccugaucauccagaacaccaccugggacgaccacugccaguucagcagacccagccccaucggcuaccugggccugcugagccagagaaccagagacaucuacaucagcagaagaagaagaggcaccuucaccuggacccugagcgacagcgagggcaacgagacccccggcggcuacugccugaccagauggaugcugaucgaggccgagcugaagugcuucggcaacaccgccguggccaagugcaacgagaagcacgacgaggaguucugcgacaugcugagacuguucgacuucaacaagcaggccaucagaagacugaagacccccgcccagaugagcauccagcugaucaacaaggccgugaacgcccugaucaacgaccagcugaucaugaagaaccaccugagagacaucaugggcauccccuacugcaacuacagcagauacugcuaccugaaccacaccagcaccggcaagaccagccugcccagaugcugccugaucagcaacggcagcuaccugaacgagaccaaguucagcgacgacaucgagcagcaggccgacaacaugaucaccgagaugcugcagaaggaguacaucgacagacagggcaagaccccccugggccugguggaccuguucguguucagcaccagcuucuaccugaucagcaucuuccugcaccuggugaagauccccacccacagacacaucgugggcaagcccugccccaagccccacagacugaaccacaugggcaucugcagcugcggccuguacaagcagcccggcgugcccgugagauggaagagaugaggacuaguaauaaggaaacuguaugaaugucugugggcaggaagugaagagauccuucuguaaagguuuuuggaauuaugucugcugaauaauaaacuuuuuugaaauaauaaaucugguagaaaaaugagaucuaaaaaaaaaaaaaaaaaaaaaaaaaaaaaaaaaaaaaaaaaaaaaaaaaaaaaaaaaaaaaaaaaaaaaaaaaaaaaaaaaaaaaaaaaaaaaaaaaaaa

SEQ ID NO: 25897 - RNA, 1788 nt, Artificial Sequence
  mRNA product Design b-4 (A100) comprising derived and/or modified sequence from LASV(AV;Clade V)__CCA30314__GPCmut3 (opt4)
aggagagucccgcagucggcguccagcggcucugcuuguucgugugugugucguugcaggccuuauucaagcuuaccaugggccagaucgugaccuucuuccaggaggugccccacgugaucgaggaggugaugaacaucgugcugaucgcccugagcauccuggccgugcugaagggccuguacaacaucgccaccugcggccugaucggccugaucaccuuccugcugcugugcggcagaagcugcagcagcaaccuguacaagggcguguacgagcugcagagccuggaccugaacauggagacccugaacaugaccaugccccugagcugcaccaagaacaacagccaccacuacaucagagugggcaacgacaccggccuggagcugacccugaccaacaccagcauccugaaccacaaguucugcaaccugagcgacgcccacaagaaggaccuguacgaccacgcccugaugagcaucaucagcaccuuccaccugagcauccccaacuucaaccaguacgaggccaugagcugcgacuucaacggcggcaagaucagcgugcaguacaaccugagccacagcuacgccaucgacgccgccaaccacugcggcaccguggccaacggcauccugcagaccuucaugagaauggccuggggcggcagcuacaucgcccuggacagcggcagaggcaacugggacugcaucaugaccagcuaccaguaccugaucauccagaacaccaccugggagaaccacugccaguucagcagacccagccccaucggcuaccugggccugcugagccagagaaccagagacaucuacaucagcagaagaagaagaggcaccuucaccuggacccugagcgacagcgagggcaacgccacccccggcggcuacugccugaccagauggaugcugaucgaggccgagcugaagugcuucggcaacaccgccguggccaagugcaacgagaagcacgacgaggaguucugcgacaugcugagacuguucgacuucaacaagcaggccaucagcagacugaagagccccgcccagaugagcauccagcugaucaacaaggccgugaacgcccugaucaacgaccagcugaucaugaagaaccaccugagagacaucaugggcauccccuacugcaacuacagcaaguacugcuaccugaaccacaccaucaccggcaagaccagccugcccaagugcugccuggugagcaacggcagcuaccugaacgagacccacuucagcgacgacaucgagcagcaggccgacaacaugaucaccgagaugcugcagaaggaguacauggagagacagggcaagaccccccugggccugguggaccuguucguguucagcaccagcuucuaccugaucagcaucuuccugagacuggugaagauccccacccacagacacaucgugggcaagcccugccccaagccccacagacugaaccacaugggcaucugcagcugcggccuguacaagcagcccggcgugcccgugagauggaagagaugaggacuaguaauaaggaaacuguaugaaugucugugggcaggaagugaagagauccuucuguaaagguuuuuggaauuaugucugcugaauaauaaacuuuuuugaaauaauaaaucugguagaaaaaugagaucuaaaaaaaaaaaaaaaaaaaaaaaaaaaaaaaaaaaaaaaaaaaaaaaaaaaaaaaaaaaaaaaaaaaaaaaaaaaaaaaaaaaaaaaaaaaaaaaaaaaa

SEQ ID NO: 25898 - RNA, 1785 nt, Artificial Sequence
  mRNA product Design b-4 (A100) comprising derived and/or modified sequence from LASV(Togo/2016/7082;Clade VI)__AMR44577__GPCmut3 (opt4)
aggagagucccgcagucggcguccagcggcucugcuuguucgugugugugucguugcaggccuuauucaagcuuaccaugggccagaucaucaccuucuuccaggaggugccccacgugaucgaggaggugaugaacaucgugcugaucgcccugagccugcuggccauccugaagggcguguacaacguggccaccugcggcaucaucggccuggugaccuuccuguuccugugcggcagaagcugcagccugaucuacaagggcagcuacgagcugcagacccuggagcugaacauggagacccugaacaugaccaugccccugagcugcaccaagaacagcagccaccacuacaucagagugggcaacgagaccggccuggagcugacccugaccaacaccagcaucaucaaccacaaguucugcaaccugagcgacgcccacaagagaaaccuguacgaccacgcccugaugagcauccugagcaccuuccaccugagcauccccaacuucaaccaguacgaggccaugagcugcgacuucaacggcggcaagaucagcgugcaguacaaccugagccacgccuacgccguggacgccgccgagcacugcggcaccguggccaacggcgugcugcagaccuucaugagaauggccuggggcggcagcuacaucgcccuggacagcggcagaggcaacugggacugcaucaugaccagcuaccaguaccugaucauccagaacaccaccugggaggaccacugccaguucagcagacccagccccaucggcuaccugggccugcugagccagagaaccagagacaucuacaucagcagaagaagaagaggcaccuucaccuggacccugagcgacagcgagggcaacgagacccccggcggcuacugccugaccagauggaugcugaucgaggccgagcugaagugcuucggcaacaccgccguggccaagugcaacgagaagcacgacgaggaguucugcgacaugcugagacuguucgacuucaacaagcaggccauccagagacugaagagccccgcccagaugagcauccagcugaucaacaaggccgugaacgcccugaucaacgaccagcugaucaugaagaaccaccugagagacaugaugggcauccccuacugcaacuacagcaaguacugcuaccugaaccacaccagcagcggcagaaccagccugcccaagugcugccuggugagcaacggcagcuaccugaacgagacccacuucagcgacgacaucgagcagcaggccgacaacaugaucaccgagaugcugcagaaggaguacaucgacagacagggcaagaccccccugggccugguggaccuguucguguucagcaccagcuucuaccugaucagcaucuuccugcaccugaucaagauccccacccacagacacaucgugggcaagcccugccccaagccccacagacugaaccacaugggcaucugcagcugcggccuguacaagcagcccggcgugcccaccagauggaagagaugaggacuaguaauaaggaaacuguaugaaugucugugggcaggaagugaagagauccuucuguaaagguuuuuggaauuaugucugcugaauaauaaacuuuuuugaaauaauaaaucugguagaaaaaugagaucuaaaaaaaaaaaaaaaaaaaaaaaaaaaaaaaaaaaaaaaaaaaaaaaaaaaaaaaaaaaaaaaaaaaaaaaaaaaaaaaaaaaaaaaaaaaaaaaaaaaa

SEQ ID NO: 25899 - RNA, 1785 nt, Artificial Sequence
  mRNA product Design b-4 (A100) comprising derived and/or modified sequence from LASV(KAK-428;Clade n.d. (VII))__ANH09740__GPCmut3 (opt4)
aggagagucccgcagucggcguccagcggcucugcuuguucgugugugugucguugcaggccuuauucaagcuuaccaugggccagaucgugaccuucuuccaggaggugccccacgugaucgaggaggugaugaacaucgugcugaucgcccugagccugcuggccauccugaagggccuguacaacuucgccaccugcggcgugaucggccugaucaccuuccugcugcugugcggcagaagcugcagcgccaccuacaagggccaguacgagcugcagacccuggagcugaacauggagagccugaacaugaccaugccccugagcugcaccaagaacaacagccaccacuacaucagagccggcaacaacaccggccuggagcugacccugaccaacaccagcaucaucagccacaaguucugcaaccugagcgacgcccacaagaagaaccuguacgaccacacccugaugagcaucaucaccaccuuccaccugagcauccccaacuucaaccaguacgaggccaugagcugcgacuucaacggcggcaagaucagcauccaguacaaccugagccacagcuacgccggcgacgccgcccagcacugcggcaccguggccaacggcgugcugcagaccuucaugagaauggccuggggcggcagcuaccuggcccuggacagcggcagaagaggcugggacugcaucaucagcagcuaccaguaccugaucauccagaacaccaccugggacgaccacugccaguucagcagacccagccccaucggcuaccugggcuucgugagccagaagaccagagacaucuacaucagcagaagaagaagaggcaccuucaccuggacccugagcgacagcgagggccacgacaugcccggcggcuacugccugaccagauggaugcugaucgaggccgaccugaagugcuucggcaacaccgccguggccaagugcaacgagaagcacgacgaggaguucugcgacauguggagacuguucgacuucaacaagcaggccauccagagacugaaggcccccgcccagaugaacauccagcugaucaacaaggccgugaacgcccugaucaacgaccagcugaugaugaagaaccaccugagagacaucaugggcauccccuacugcaacuacagcaaguucugcuaccugaacaacaccaccaccggcagaaccagccugcccagaugcugccugaucagcaacggcagcuaccugaacgagacccacuucagcgacgacaucgagcagcaggccgacaacaugaucaccgagaugcugcagaaggaguacauggacagacagggcaagaccccccugggccugguggaccuguucguguucagcaccagcuucuaccugaucaccaucuuccugcaccuggugaagauccccacccacagacacaucgugggcaagcccugccccaagccccacagacugaaccacaugggcaucugcagcugcggccuguacaagcagcccggcgugcccgugagauggaagagaugaggacuaguaauaaggaaacuguaugaaugucugugggcaggaagugaagagauccuucuguaaagguuuuuggaauuaugucugcugaauaauaaacuuuuuugaaauaauaaaucugguagaaaaaugagaucuaaaaaaaaaaaaaaaaaaaaaaaaaaaaaaaaaaaaaaaaaaaaaaaaaaaaaaaaaaaaaaaaaaaaaaaaaaaaaaaaaaaaaaaaaaaaaaaaaaaa

SEQ ID NO: 25900 - RNA, 1785 nt, Artificial Sequence; identical to SEQ ID NO: 25894
  mRNA product Design b-4 (A100) comprising derived and/or modified sequence from LASV(Pinneo-NIG-1969;Clade I)__AIT17836__GPCmut3 (opt4)

SEQ ID NO: 25901 - RNA, 1785 nt, Artificial Sequence
  mRNA product Design b-4 (A100) comprising derived and/or modified sequence from LASV(ISTH0009-NIG-2011;Clade II)__AIT17404__GPCmut3 (opt4)
aggagagucccgcagucggcguccagcggcucugcuuguucgugugugugucguugcaggccuuauucaagcuuaccaugggccagaucaucaccuucuuccaggaggugccccacgugaucgaggaggugaugaacaucgugcugaucgcccugagccugcuggccauccugaagggcaucuacaacguggccaccugcggccuguucggccuggugagcuuccugcugcugugcggcagaagcugcagcaccaccuacaagggcguguacgagcugcagacccuggagcuggacauggccagccugaacaugaccaugccccugagcugcaccaagaacaacagccaccacuacaucauggugggcaacgagaccggccuggagcugacccugaccaacaccagcaucaucaaccacaaguucugcaaccugagcgacgcccacaagaagaaccuguacgaccacgcccugaugagcaucaucagcaccuuccaccugagcauccccaacuucaaccaguacgaggccaugagcugcgacuucaacggcggcaagaucagcgugcaguacaaccugagccacgccuacgccguggacgccgccaaccacugcggcaccaucgccaacggcgugcugcagaccuucaugagaauggccuggggcggcagcuacaucgcccuggacagcggcaagggcagcugggacugcaucaugaccagcuaccaguaccugaucauccagaacaccaccugggaggaccacugccaguucagcagacccagccccaucggcuaccugggccugcugagccagagaaccagagacaucuacaucagcagaagaagaagaggcaccuucaccuggacccugagcgacagcgagggcaacgagacccccggcggcuacugccugaccagauggaugcugaucgaggccgagcugaagugcuucggcaacaccgccguggccaagugcaacgagaagcacgacgaggaguucugcgacaugcugagacuguucgacuucaacaagcaggccaucagaagacugaagacccccgcccagaugagcauccagcugaucaacaaggccgugaacgcccugaucaacgaccagcugaucaugaagaaccaccugagagacaucaugggcauccccuacugcaacuacagcaaguacugcuaccugaaccacaccgugaccggcaagaccagccugcccagaugcugccuggugagcaacggcagcuaccugaacgagacccacuucagcgacgacaucgagcagcaggccgacaacaugaucaccgagcugcugcagaaggaguacauggacagacagggcaagaccccccugggccugguggaccuguucguguucagcaccagcuucuaccugaucagcaucuuccugcaccugaucaagauccccacccacagacacaucaccggcaagcccugccccaagccccacagacugaaccacaugggcaucugcagcugcggccuguacaagcaccccggcgugcccgugaaguggaagagaugaggacuaguaauaaggaaacuguaugaaugucugugggcaggaagugaagagauccuucuguaaagguuuuuggaauuaugucugcugaauaauaaacuuuuuugaaauaauaaaucugguagaaaaaugagaucuaaaaaaaaaaaaaaaaaaaaaaaaaaaaaaaaaaaaaaaaaaaaaaaaaaaaaaaaaaaaaaaaaaaaaaaaaaaaaaaaaaaaaaaaaaaaaaaaaaaa

SEQ ID NO: 25902 - RNA, 1785 nt, Artificial Sequence
  mRNA product Design b-4 (A100) comprising derived and/or modified sequence from LASV(ISTH2010-NIG-2012;Clade II)__AIT17482__GPCmut3 (opt4)
aggagagucccgcagucggcguccagcggcucugcuuguucgugugugugucguugcaggccuuauucaagcuuaccaugggccagaucaucaccuucuuccaggaggugccccacgugaucgaggaggugaugaacaucgugcugaucgcccugagccugcuggccauccugaagggcaucuacaacguggccaccugcggccuguucggccuggugagcuuccugcugcugugcggcagaagcugcagcaccaccuacaagggcguguacgagcugcagacccuggagcuggacauggccagccugaacaugaccaugccccugagcugcaccaagaacaacagccaccacuacaucauggugggcaacgagaccggccuggagcugacccugaccaacaccagcaucaucaaccacaaguucugcaaccugagcgacgcccacaagaagaaccuguacgaccacgcccugaugagcaucaucagcaccuuccaccugagcauccccaacuucaaccaguacgaggccaugagcugcgacuucaacggcggcaagaucagcgugcaguacaaccugagccacgccuacgccguggacgccgccaaccacugcggcaccaucgccaacggcgugcugcagaccuucaugagaauggccuggggcggcagcuacaucgcccuggacagcggcaagggcagcugggacugcaucaugaccagcuaccaguaccugaucauccagaacaucaccugggaggaccacugccaguucagcagacccagccccaucggcuaccugggccugcugagccagagaaccagagacaucuacaucagcagaagaagaagaggcaccuucaccuggacccugagcgacagcgagggcaacgagacccccggcggcuacugccugaccagauggaugcugaucgaggccgagcugaagugcuucggcaacaccgccguggccaagugcaacgagaagcacgacgaggaguucugcgacaugcugagacuguucgacuucaacaagcaggccaucagaagacugaagacccccgcccagaugagcauccagcugaucaacaaggccgugaacgcccugaucaacgaccagcugaucaugaagaaccaccugagagacaucaugggcauccccuacugcaacuacagcaaguacugcuaccugaaccacaccgugaccggcaagaccagccugcccagaugcugccuggugagcaacggcagcuaccugaacgagacccacuucagcgacgacaucgagcagcaggccgacaacaugaucaccgagcugcugcagaaggaguacaucgacagacagggcaagaccccccugggccugguggaccuguucguguucagcaccagcuucuaccugaucagcaucuuccugcaccuggugaagauccccacccacagacacguggugggcaagcccugccccaagccccacagacugaaccacaugggcaucugcagcugcggccuguacaagcaccccggcgugcccgugaaguggaagagaugaggacuaguaauaaggaaacuguaugaaugucugugggcaggaagugaagagauccuucuguaaagguuuuuggaauuaugucugcugaauaauaaacuuuuuugaaauaauaaaucugguagaaaaaugagaucuaaaaaaaaaaaaaaaaaaaaaaaaaaaaaaaaaaaaaaaaaaaaaaaaaaaaaaaaaaaaaaaaaaaaaaaaaaaaaaaaaaaaaaaaaaaaaaaaaaaa

SEQ ID NO: 25903 - RNA, 1785 nt, Artificial Sequence
  mRNA product Design b-4 (A100) comprising derived and/or modified sequence from LASV(Lassa virus/H.sapiens-wt/NGA/2015/ISTH_0543;Clade II)__AVO03639__GPCmut3 (opt4)
aggagagucccgcagucggcguccagcggcucugcuuguucgugugugugucguugcaggccuuauucaagcuuaccaugggccagaucaucaccuucuuccaggaggugccccacgugaucgaggaggugaugaacaucgugcugaucgcccugagccugcuggccauccugaagggcaucuacaacguggccaccugcggccuguucggccuggugagcuuccugcugcugugcggcagaagcugcagcaccaccuacaagggcguguacgagcugcagacccuggagcuggacauggccaaccugaacaugaccaugccccugagcugcaccaagaacaacagccaccacuacaucauggugggcaacgagaccggccuggagcugacccugaccaacaccagcaucaucaaccacaaguucugcaaccugagcgacgcccacaagaagaaccuguacgaccacgcccugaugagcaucaucagcaccuuccaccugagcauccccaacuucaaccaguacgaggccaugagcugcgacuucaacggcggcaagaucagcgugcaguacaaccugagccacaccuacgccguggacgccgccaaccacugcggcaccaucgccaacggcgugcugcagaccuucaugagaauggccuggggcggcagcuacaucgcccuggacagcggcaagggcagcugggacugcaucaugaccagcuaccaguaccuggugauccagaacaccaccugggaggaccacugccaguucagcagacccagccccaucggcuaccugggccugcugagccagagaaccagagacaucuacaucagcagaagaagaagaggcaccuucaccuggacccugagcgacagcgagggcaacgagacccccggcggcuacugccugaccagauggaugcugaucgaggccgagcugaagugcuucggcaacaccgccguggccaagugcaacgagaagcacgacgaggaguucugcgacaugcugagacuguucgacuucaacaagcaggccaucagaagacugaagacccccgcccagaugagcauccagcugaucaacaaggccgugaacgcccugaucaacgaccagcugaucaugaagaaccaccugagagacaucaugggcauccccuacugcaacuacagcaaguacugcuaccugaaccacaccgugaccggcaagaccagccugcccagaugcugccuggugagcaacggcagcuaccugaacgagacccacuucagcgacgacaucgagcagcaggccgacaacaugaucaccgagcugcugcagaaggaguacaucgacagacagggcaagaccccccugggccugguggaccuguucguguucagcaccagcuucuaccugaucagcaucuuccugcaccuggugaagauccccacccacagacacaucaccggcaagcccugccccaagccccacagacugaaccacaugggcaucugcagcugcggccuguacaagcaccccggcgugcccgugaaguggaagagaugaggacuaguaauaaggaaacuguaugaaugucugugggcaggaagugaagagauccuucuguaaagguuuuuggaauuaugucugcugaauaauaaacuuuuuugaaauaauaaaucugguagaaaaaugagaucuaaaaaaaaaaaaaaaaaaaaaaaaaaaaaaaaaaaaaaaaaaaaaaaaaaaaaaaaaaaaaaaaaaaaaaaaaaaaaaaaaaaaaaaaaaaaaaaaaaaa

SEQ ID NO: 25904 - RNA, 1785 nt, Artificial Sequence
  mRNA product Design b-4 (A100) comprising derived and/or modified sequence from LASV(Lassa virus/H.sapiens-wt/NGA/2016/ISTH_0009;Clade II)__AVO03571__GPCmut3 (opt4)
aggagagucccgcagucggcguccagcggcucugcuuguucgugugugugucguugcaggccuuauucaagcuuaccaugggccagaucaucaccuucuuccaggaggugccccacgugaucgaggaggugaugaacaucgugcugaucgcccugagccugcuggccauccugaagggcaucuacaacguggccaccugcggccugcugggccuggugagcuuccugcugcugugcggcagaagcugcagcaccaccuacaagggcguguacgagcugcagacccuggagcuggacauggccagccugaacaugaccaugccccugagcugcaccaagaacaacagccaccacuacaucauggugggcaacgagaccggccuggagcugacccugaccaacaccagcaucaucaaccacaaguucugcaaccugagcgacgcccacaagaagaaccuguacgaccacgcccugaugagcaucaucagcaccuuccaccugagcauccccaacuucaaccaguacgaggccaugagcugcgacuucaacggcggcagaaucagcgugcaguacaaccugagccacagcuacgccguggacgccgccaaccacugcggcaccaucgccaacggcgugcugcagaccuucaugagaauggccuggggcggcagcuacaucgcccuggacagcggcaagggcagcugggacugcaucaugaccagcuaccaguaccugaucauccagaacaccaccugggaggaccacugccaguucagcagacccagccccaucggcuaccugggccugcugagccagagaaccagagacaucuacaucagcagaagaagaagaggcaccuucaccuggacccugagcgacagcgagggcaacgagacccccggcggcuacugccugaccagauggaugcugaucgaggccgagcugaagugcuucggcaacaccgccguggccaagugcaacgagaagcacgacgaggaguucugcgacaugcugagacuguucgacuucaacaagcaggccaucagaagacugaagacccccgcccagaugagcauccagcugaucaacaaggccgugaacgcccugaucaacgaccagcugaucaugaagaaccaccugagagacaucaugggcauccccuacugcaacuacagcaaguacugcuaccugaaccacaccgugaccggcaagaccagccugcccagaugcugccuggugagcaacggcagcuaccugaacgagacccacuucagcgacgacaucgagcagcaggccgacaacaugaucaccgagcugcugcagaaggaguacaucgacagacagggcaagaccccccugggccugguggaccuguucguguucagcaccagcuucuaccugaucagcaucuuccugcaccuggugaagauccccacccacagacacaucaccggcaagcccugccccaagccccacagacugaaccacaugggcaucugcagcugcggccuguacaaccaccccggcgugcccgugaaguggaagagaugaggacuaguaauaaggaaacuguaugaaugucugugggcaggaagugaagagauccuucuguaaagguuuuuggaauuaugucugcugaauaauaaacuuuuuugaaauaauaaaucugguagaaaaaugagaucuaaaaaaaaaaaaaaaaaaaaaaaaaaaaaaaaaaaaaaaaaaaaaaaaaaaaaaaaaaaaaaaaaaaaaaaaaaaaaaaaaaaaaaaaaaaaaaaaaaaa

SEQ ID NO: 25905 - RNA, 1785 nt, Artificial Sequence
  mRNA product Design b-4 (A100) comprising derived and/or modified sequence from LASV(Lassa virus/H.sapiens-wt/NGA/2016/ISTH_0017;Clade II)__AVO03567__GPCmut3 (opt4)
aggagagucccgcagucggcguccagcggcucugcuuguucgugugugugucguugcaggccuuauucaagcuuaccaugggccagaucaucaccuucuuccaggaggugccccacgugaucgaggaggugaugaacaucgugcugaucgcccugagccugcuggccauccugaagggcaucuacaacguggccaccugcggccuguucggccuggugagcuuccugcugcugugcggcagaagcugcagcaccaccuacaagggcguguacgagcugcagacccuggagcuggacauggccagccugaacaugaccaugccccugagcugcaccaagaacaacagccaccacuacaucauggugggcaacgagaccggccuggagcugacccugaccaacaccagcaucaucaaccacaaguucugcaaccugagcgacgcccacaagaagaaccuguacgaccacgcccugaugagcaucaucagcaccuuccaccugagcauccccaacuucaaccaguacgaggccaugagcugcgacuucaacggcggcaagaucagcgugcaguacaaccugagccacaccuacgccaucgacgccgccaaccacugcggcaccaucgccaacggcgugcugcagaccuucaugagaauggccuggggcggcagcuacaucgcccuggacagcggcaagggcagcugggacugcaucaugaccagcuaccaguaccugaucauccagaacaccaccugggaggaccacugccaguucagcagacccagccccaucggcuaccugggccugcugagccagagaaccagagacaucuacaucagcagaagaagaagaggcaccuucaccuggacccugagcgacagcgagggcaacgagacccccggcggcuacugccugaccagauggaugcugaucgaggccgagcugaagugcuucggcaacaccgccguggccaagugcaacgagaagcacgacgaggaguucugcgacaugcugagacuguucgacuucaacaagcaggccaucagaagacugaagacccccgcccagaugagcauccagcugaucaacaaggccgugaacgcccugaucaacgaccagcugaucaugaagaaccaccugagagacaucaugggcauccccuacugcaacuacagcaaguacugcuaccugaaccacaccgugaccggcaagaccagccugcccagaugcugccuggugagcaacggcagcuaccugaacgagacccacuucagcgacgacaucgagcagcaggccgacaacaugaucaccgagcugcugcagaaggaguacauggacagacagggcaagaccccccugggccugguggaccuguucguguucagcaccagcuucuaccugaucagcaucuuccugcaccuggugagaauccccacccacagacacgugaucggcaagcccugccccaagccccacagacugaaccacaugggcaucugcagcugcggccuguacaagcaccccggcgugcccgugaaguggaagagaugaggacuaguaauaaggaaacuguaugaaugucugugggcaggaagugaagagauccuucuguaaagguuuuuggaauuaugucugcugaauaauaaacuuuuuugaaauaauaaaucugguagaaaaaugagaucuaaaaaaaaaaaaaaaaaaaaaaaaaaaaaaaaaaaaaaaaaaaaaaaaaaaaaaaaaaaaaaaaaaaaaaaaaaaaaaaaaaaaaaaaaaaaaaaaaaaa

SEQ ID NO: 25906 - RNA, 1785 nt, Artificial Sequence
  mRNA product Design b-4 (A100) comprising derived and/or modified sequence from LASV(Lassa virus/H.sapiens-wt/NGA/2018/ISTH_0959;Clade II)__AVV65099__GPCmut3 (opt4)
aggagagucccgcagucggcguccagcggcucugcuuguucgugugugugucguugcaggccuuauucaagcuuaccaugggccagaucaucaccuucuuccaggaggugccccacgugaucgaggaggugaugaacaucgugcugaucgcccugagccugcuggccauccugaagggcaucuacaacguggugaccugcggccuguucggccuggugagcuuccugcugcugugcggcagaagcugcagcaccaccuacaagggcguguacgagcugcagacccuggagcuggacauggccagccugaacaugaccaugccccugagcugcaccaagaacaacagccaccacuacaucauggugggcaacgagaccggccuggagcugacccugaccaacaccagcaucaucaaccacaaguucugcaaccugagcgacgcccacaagaagaaccuguacgaccacgcccugaugagcaucaucagcaccuuccaccugagcauccccaacuucaaccaguacgaggccaugagcugcgacuucaacggcggcaagaucagcgugcaguacaaccugagccacgccuacgccaucgacgccgccaaccacugcggcaccaucgccaacggcgugcugcagaccuucaugagaauggccuggggcggcagcuacaucgcccuggacagcggcaagggcagcugggacugcaucaugaccagcuaccaguaccugaucauccagaacaccaccugggaggaccacugccaguucagcagacccagccccaucggcuaccugggccugcugagccagagaaccagagacaucuacaucagcagaagaagaagaggcaccuucaccuggacccugagcgacagcgagggcaacgagacccccggcggcuacugccugaccagauggaugcugaucgaggccgagcugaagugcuucggcaacaccgccguggccaagugcaacgagaagcacgacgaggaguucugcgacaugcugagacuguucgacuucaacaagcaggccaucagaagacugaagacccccgcccagaugagcauccagcugaucaacaaggccgugaacgcccugaucaacgaccagcugaucaugaagaaccaccugagagacaucaugggcauccccuacugcaacuacagcaaguacugcuaccugaaccacaccgugaccggcaagaccagccugcccagaugcugccuggugagcaacggcagcuaccugaacgagacccacuucagcgacgacaucgagcagcaggccgacaacaugaucaccgagcugcugcagaaggaguacaucgacagacagggcaagaccccccugggccugguggaccuguucguguucagcaccagcuucuaccugaucagcaucuuccugcaccuggugaagauccccacccacagacacgugaucggcaagcccugccccaagccccacagacugaaccacaugggcaucugcagcugcggccuguacaagcaccccggcgugcccgugaaguggaagagaugaggacuaguaauaaggaaacuguaugaaugucugugggcaggaagugaagagauccuucuguaaagguuuuuggaauuaugucugcugaauaauaaacuuuuuugaaauaauaaaucugguagaaaaaugagaucuaaaaaaaaaaaaaaaaaaaaaaaaaaaaaaaaaaaaaaaaaaaaaaaaaaaaaaaaaaaaaaaaaaaaaaaaaaaaaaaaaaaaaaaaaaaaaaaaaaaa

SEQ ID NO: 25907 - RNA, 1785 nt, Artificial Sequence
  mRNA product Design b-4 (A100) comprising derived and/or modified sequence from LASV(LASV003-NIG-2008;Clade II)__AIT17580__GPCmut3 (opt4)
aggagagucccgcagucggcguccagcggcucugcuuguucgugugugugucguugcaggccuuauucaagcuuaccaugggccagaucaucaccuucuuccaggaggugccccacgugaucgaggaggugaugaacaucgugcugaucgcccugagccugcuggccauccugaagggcaucuacaacguggccaccugcggccuguucggccuggugagcuuccugcugcugugcggcagaagcugcagcaccaccuacaagggcguguacgagcugcagacccuggagcuggacauggccagccugaacaugaccaugccccugagcugcaccaagaacaacagccaccacuacaucauggugggcaacgagaccggccuggagcugacccugaccaacaccagcaucaucaaccacaaguucugcaaccugagcgacgcccacaagaagaaccuguacgaccacgcccugaugagcaucaucagcaccuuccaccugagcauccccaacuucaaccaguacgaggccaugagcugcgacuucaacggcggcaagaucagcgugcaguacaaccugagccacaccuacgccguggacgccgccaaccacugcggcaccaucgccaacggcgugcugcagaccuucaugagaauggccuggggcggcagcuacaucgcccuggacagcggcaagggcagcugggacugcaucaugaccagcuaccaguaccugaucauccagaacaccaccugggaggaccacugccaguucagcagacccagccccaucggcuaccugggccugcugagccagagaaccagagacaucuacaucagcagaagaagaagaggcaccuucaccuggacccugagcgacagcgagagcaacgagacccccggcggcuacugccugaccagauggaugcugaucgaggccgagcugaagugcuucggcaacaccgccguggccaagugcaacgagaagcacgacgaggaguucugcgacaugcugagacuguucgacuucaacaagcaggccaucagaagacugaaggcccccgcccagaugagcauccagcugaucaacaaggccgugaacgcccugaucaacgaccagcugaucaugaagaaccaccugagagacaucaugggcauccccuacugcaacuacagcaaguacugcuaccugaaccacaccgugaccggcagaaccagccugcccagaugcugccuggugagcaacggcagcuaccugaacgagacccacuucagcgacgacaucgagcagcaggccgacaacaugaucaccgagcugcugcagaaggaguacauggacagacagggcaagaccccccugggccugguggaccuguucguguucagcaccagcuucuaccugaucagcaucuuccugcaccuggugaagauccccacccacagacacgugaucggcaagcccugccccaagccccacagacugaaccacaugggcaucugcagcugcggccuguacaagcaccccggcgugcccgugaaguggaagagaugaggacuaguaauaaggaaacuguaugaaugucugugggcaggaagugaagagauccuucuguaaagguuuuuggaauuaugucugcugaauaauaaacuuuuuugaaauaauaaaucugguagaaaaaugagaucuaaaaaaaaaaaaaaaaaaaaaaaaaaaaaaaaaaaaaaaaaaaaaaaaaaaaaaaaaaaaaaaaaaaaaaaaaaaaaaaaaaaaaaaaaaaaaaaaaaaa

SEQ ID NO: 25908 - RNA, 1785 nt, Artificial Sequence
  mRNA product Design b-4 (A100) comprising derived and/or modified sequence from LASV(LASV035-NIG-2009;Clade II)__AIT17588__GPCmut3 (opt4)
aggagagucccgcagucggcguccagcggcucugcuuguucgugugugugucguugcaggccuuauucaagcuuaccaugggccagaucaucaccuucuuccaggaggugccccacgugaucgaggaggugaugaacaucgugcugaucgcccugagccugcuggccauccugaagggcaucuacaacguggccaccugcggccuguucggccuggugagcuuccugcugcugugcggcagaagcugcagcaccaccuacaagggcguguacgagcugcagacccuggagcuggacauggccagccugaacaugaccaugccccugagcugcaccaagaacaacagccaccacuacaucauggugggcaacgagaccggccuggagcugacccugaccaacaccagcaucaucaaccacaaguucugcaaccugagcgacgcccacaagaagaaccuguacgaccacgcccugaugagcaucaucagcaccuuccaccugagcauccccaacuucaaccaguacgaggccaugagcugcgacuucaacggcggcaagaucagcgugcaguacaaccugagccacgccuacgccguggacgccgccaaccacugcggcaccaucgccaacggcgugcugcagaccuucaugagaauggccuggggcggcagcuacaucgcccuggacagcggcaagggcagcugggacugcaucaugaccagcuaccaguaccugaucauccagaacaccaccugggaggaccacugccaguucagcagacccagccccaucggcuaccugggccugcugagccagagaaccagagacaucuacaucagcagaagaagaagaggcaccuucaccuggacccugagcgacagcgagggcaacgagacccccggcggcuacugccugaccagauggaugcugaucgaggccgagcugaagugcuucggcaacaccgccguggccaagugcaacgagaagcacgacgaggaguucugcgacaugcugagacuguucgacuucaacaagcaggccaucagaagacugaaggcccccgcccagaugagcauccagcugaucaacaaggccgugaacgcccugaucaacgaccagcugaucaugaagaaccaccugagagacaucaugggcauccccuacugcaacuacagcaaguacugcuaccugaaccacaccgugaccggcaagaccagccugcccagaugcugccuggugagcaacggcagcuaccugaacgagacccacuucagcgacgacaucgagcagcaggccgacaacaugaucaccgagcugcugcagaaggaguacaucgacagacagggcaagaccccccugggccugguggaccuguucguguucagcaccagcuucuaccugaucagcaucuuccugcaccuggugaagauccccacccacagacacgugaucggcaagcccugccccaagccccacagacugaaccacaugggcaucugcagcugcggccuguacaagcaccccggcgugcccgugaaguggaagagaugaggacuaguaauaaggaaacuguaugaaugucugugggcaggaagugaagagauccuucuguaaagguuuuuggaauuaugucugcugaauaauaaacuuuuuugaaauaauaaaucugguagaaaaaugagaucuaaaaaaaaaaaaaaaaaaaaaaaaaaaaaaaaaaaaaaaaaaaaaaaaaaaaaaaaaaaaaaaaaaaaaaaaaaaaaaaaaaaaaaaaaaaaaaaaaaaa

SEQ ID NO: 25909 - RNA, 1785 nt, Artificial Sequence
  mRNA product Design b-4 (A100) comprising derived and/or modified sequence from LASV(LASV1000-NIG-2009;Clade II)__AIT17782__GPCmut3 (opt4)
aggagagucccgcagucggcguccagcggcucugcuuguucgugugugugucguugcaggccuuauucaagcuuaccaugggccagaucaucaccuucuuccaggaggugccccacgugaucgaggaggugaugaacaucgugcugaucgcccugagccugcuggccauccugaagggcaucuacaacguggccaccugcggccuguucggccuggugagcuuccugcugcugugcggcagaagcugcagcaccaccuacaagggcguguacgagcugcagacccuggagcuggacauggccagccugaacaugaccaugccccugagcugcaccaagaacaacagccaccacuacaucauggugggcaacgagaccggccuggagcugacccugaccaacaccagcaucaucaaccacaaguucugcaaccugagcgacgcccacaagaagaaccuguacgaccacgcccugaugagcaucaucagcaccuuccaccugagcauccccaacuucaaccaguacgaggccaugagcugcgacuucaacggcggcaagaucagcgugcaguacaaccugagccacaccuacgccguggacgccgccaaccacugcggcaccaucgccaacggcgugcugcagaccuucaugagaauggccuggggcggcagcuacaucgcccuggacagcggcaagggcagcugggacugcaucaugaccagcuaccaguaccugaucauccagaacaccaccugggaggaccacugccaguucagcagacccagccccaucggcuaccugggccugcugagccagagaaccagagacaucuacaucagcagaagaagaagaggcaccuucaccuggacccugagcgacagcgagggcaacgagacccccggcggcuacugccugaccagauggaugcugaucgaggccgagcugaagugcuucggcaacaccgccguggccaagugcaacgagaagcacgacgaggaguucugcgacaugcugagacuguucgacuucaacaagcaggccaucaagagacugaagacccccgcccagaugagcauccagcugaucaacaaggccgugaacgcccugaucaacgaccagcugaucaugaagaaccaccugagagacaucaugggcauccccuacugcaacuacagcaaguacugcuaccugaaccacaccgugaccggcaagaccagccugcccagaugcugccuggugagcaacggcagcuaccugaacgagacccacuucagcgacgacaucgagcagcaggccgacaacaugaucaccgagcugcugcagaaggaguacaucgacagacagggcaagaccccccugggccugguggaccuguucguguucagcaccagcuucuaccugaucagcaucuuccugcaccuggugaagauccccacccacagacacguggugggcaagcccugccccaagccccacagacugaaccacaugggcaucugcagcugcggccuguacaagcaccccggcgugcccgugaaguggaagagaugaggacuaguaauaaggaaacuguaugaaugucugugggcaggaagugaagagauccuucuguaaagguuuuuggaauuaugucugcugaauaauaaacuuuuuugaaauaauaaaucugguagaaaaaugagaucuaaaaaaaaaaaaaaaaaaaaaaaaaaaaaaaaaaaaaaaaaaaaaaaaaaaaaaaaaaaaaaaaaaaaaaaaaaaaaaaaaaaaaaaaaaaaaaaaaaaa

SEQ ID NO: 25910 - RNA, 1785 nt, Artificial Sequence
  mRNA product Design b-4 (A100) comprising derived and/or modified sequence from LASV(LASV221-NIG-2010;Clade II)__AIT17624__GPCmut3 (opt4)
aggagagucccgcagucggcguccagcggcucugcuuguucgugugugugucguugcaggccuuauucaagcuuaccaugggccagaucaucaccuucuuccaggaggugccccacgugaucgaggaggugaugaacaucgugcugaucgcccugagccugcuggccauccugaagggcaucuacaacguggccaccugcggccuguucggccuggugagcuuccugcugcugugcggcagaagcugcagcaccaccuacaagggcguguacgagcugcagacccuggagcuggacauggccagccugaacaugaccaugccccugagcugcaccaagaacaacagccaccacuacaucauggugggcaacgagaccggccuggagcugacccugaccaacaccagcaucaucaaccacaaguucugcaaccugagcgacgcccacaagaagaaccuguacgaccacgcccugaugagcaucaucagcaccuuccaccugagcauccccaacuucaaccaguacgaggccaugagcugcgacuucaacggcggcaagaucagcgugcaguacaaccugagccacaccuacgccaucgacgccgccaaccacugcggcaccaucgccaacggcgugcugcagaccuucaugagaauggccuggggcggcagcuacaucgcccuggacagcggcaagggcagcugggacugcaucaugaccagcuaccaguaccugaucauccagaacaccaccugggaggaccacugccaguucagcagacccagccccaucggcuaccugggccugcugagccagagaaccagagacaucuacaucagcagaagaagaagaggcaccuucaccuggacccugagcgacagcgagggcaacgagacccccggcggcuacugccugaccagauggaugcugaucgaggccgagcugaagugcuucggcaacaccgccguggccaagugcaacgagaagcacgacgaggaguucugcgacaugcugagacuguucgacuucaacaagcaggccaucagaagacugaagacccccgcccagaugagcauccagcugaucaacaaggccgugaacgcccugaucaacgaccagcugaucaugaagaaccaccugagagacaucaugggcauccccuacugcaacuacagcaaguacugcuaccugaaccacaccgugaccggcaagaccagccugcccagaugcugccuggugagcaacggcagcuaccugaacgagacccacuucagcgacgacaucgagcagcaggccgacaacaugaucaccgagaugcugcagaaggaguacauggacagacagggcaagaccccccugggccugguggaccuguucguguucagcaccagcuucuaccugaucagcaucuuccugcaccuggugaagauccccacccacagacacgugaucggcaagcccugccccaagccccacagacugaaccacaugggcaucugcagcugcggccuguacaagcaccccggcgugcccgugaaguggaagagaugaggacuaguaauaaggaaacuguaugaaugucugugggcaggaagugaagagauccuucuguaaagguuuuuggaauuaugucugcugaauaauaaacuuuuuugaaauaauaaaucugguagaaaaaugagaucuaaaaaaaaaaaaaaaaaaaaaaaaaaaaaaaaaaaaaaaaaaaaaaaaaaaaaaaaaaaaaaaaaaaaaaaaaaaaaaaaaaaaaaaaaaaaaaaaaaaa

SEQ ID NO: 25911 - RNA, 1785 nt, Artificial Sequence
  mRNA product Design b-4 (A100) comprising derived and/or modified sequence from LASV(LASV237-NIG-2010;Clade II)__AIT17638__GPCmut3 (opt4)
aggagagucccgcagucggcguccagcggcucugcuuguucgugugugugucguugcaggccuuauucaagcuuaccaugggccagaucaucaccuucuuccaggaggugccccacgugaucgaggaggugaugaacaucgugcugaucgcccugagccugcuggccauccugaagggcaucuacaacguggccaccugcggccuguucggccuggugagcuuccugcugcugugcggcagaagcugcagcaccaccuacaagggcguguacgagcugcagacccuggagcuggacauggccagccugaacaugaccaugccccugagcugcaccaagaacaacagccaccacuacaucauggugggcaacgagaccggccuggagcugacccugaccaacaccagcaucaucaaccacaaguucugcaaccugagcgacgcccacaagaaggaccuguacgaccacgcccugaugagcaucaucagcaccuuccaccugagcauccccaacuucaaccaguacgaggccaugagcugcgacuucaacggcggcaagaucagcgugcaguacaaccugagccacaccuacgccguggacgccgccaaccacugcggcaccaucgccaacggcgugcugcagaccuucaugagaauggccuggggcggcagcuacaucgcccuggacagcggcaagggcagcugggacugcaucaugaccagcuaccaguaccugaucauccagaacaccaccugggaggaccacugccaguucagcagacccagccccaucggcuaccugggccugcugagccagagaaccagagacaucuacaucagcagaagaagaagaggcaccuucaccuggacccugagcgacagcgagggcaacgagacccccggcggcuacugccugaccagauggaugcugaucgaggccgagcugaagugcuucggcaacaccgccguggccaagugcaacgagaagcacgacgaggaguucugcgacaugcugagacuguucgacuucaacaagcaggccaucagaagacugaagacccccgcccagaugagcauccagcugaucaacaaggccgugaacgcccugaucaacgaccagcugaucaugaagaaccaccugagagacaucaugggcauccccuacugcaacuacagcaaguacugcuaccugaaccacaccgugaccggcaagaccagccugcccagaugcugccuggugagcaacggcagcuaccugaacgagacccacuucagcgacgacaucgagcagcaggccgacaacaugaucaccgagcugcugcagaaggaguacauggacagacagggcaagaccccccugggccugguggaccuguucguguucagcaccagcuucuaccugaucagcaucuuccugcaccugaucaagauccccacccacagacacaucaccggcaagcccugccccaagccccacagacugaaccacaugggcaucugcagcugcggccuguacaagcaccccggcgugcccgugaaguggaagagaugaggacuaguaauaaggaaacuguaugaaugucugugggcaggaagugaagagauccuucuguaaagguuuuuggaauuaugucugcugaauaauaaacuuuuuugaaauaauaaaucugguagaaaaaugagaucuaaaaaaaaaaaaaaaaaaaaaaaaaaaaaaaaaaaaaaaaaaaaaaaaaaaaaaaaaaaaaaaaaaaaaaaaaaaaaaaaaaaaaaaaaaaaaaaaaaaa

SEQ ID NO: 25912 - RNA, 1785 nt, Artificial Sequence
  mRNA product Design b-4 (A100) comprising derived and/or modified sequence from LASV(LASV253-NIG-2011;Clade II)__AIT17670__GPCmut3 (opt4)
aggagagucccgcagucggcguccagcggcucugcuuguucgugugugugucguugcaggccuuauucaagcuuaccaugggccagaucaucaccuucuuccaggaggugccccacgugaucgaggaggugaugaacaucgugcugaucgcccugagccugcuggccauccugaagggcaucuacaacguggccaccugcggccuguucggccuggugagcuuccugcugcugugcggcagaagcugcagcaccaccuacaagggcguguacgagcugcagacccuggagcuggacauggccagccugaacaugaccaugccccugagcugcaccaagaacaacagccaccacuacaucauggugggcaacgagaccggccuggagcugacccugaccaacaccagcaucaucaaccacaaguucugcaaccugagcgacgcccacaagaagaaccuguacgaccacgcccugaugagcaucaucagcaccuuccaccugagcauccccaacuucaaccaguacgaggccaugagcugcgacuucaacggcggcaagaucagcgugcaguacaaccugagccacaccuacgccguggacgccgccaaccacugcggcaccaucgccaacggcgugcugcagaccuucaugagaauggccuggggcggcagcuacaucgcccuggacagcggcaagggcagcugggacugcaucaugaccagcuaccaguaccugaucauccagaacaccaccugggaggaccacugccaguucagcagacccagccccaucggcuaccugggccugcugagccagagaaccagagacaucuacaucagcagaagaagaagaggcaccuucaccuggacccugagcgacagcgagggcaacgagacccccggcggcuacugccugaccagauggaugcugaucgaggccgagcugaagugcuucggcaacaccgccguggccaagugcaacgagaagcacgacgaggaguucugcgacaugcugagacuguucgacuucaacaagcaggccaucagaagacugaaggcccccgcccagaugagcauccagcugaucaacaaggccgugaacgcccugaucaacgaccagcugaucaugaagaaccaccugagagacaucaugggcauccccuacugcaacuacagcaaguacugcuaccugaaccacaccgugaccggcagaaccagccugcccagaugcugccuggugagcaacggcagcuaccugaacgagacccacuucagcgacgacaucgagcagcaggccgacaacaugaucaccgagcugcugcagaaggaguacaucgacagacagggcaagaccccccugggccugguggaccuguucguguucagcaccagcuucuaccugaucagcaucuuccugcaccuggugaagauccccacccacagacacaucaucggcaagcccugccccaagccccacagacugaaccacaugggcaucugcagcugcggccuguacaagcaccccggcgugcccgugaaguggaagagaugaggacuaguaauaaggaaacuguaugaaugucugugggcaggaagugaagagauccuucuguaaagguuuuuggaauuaugucugcugaauaauaaacuuuuuugaaauaauaaaucugguagaaaaaugagaucuaaaaaaaaaaaaaaaaaaaaaaaaaaaaaaaaaaaaaaaaaaaaaaaaaaaaaaaaaaaaaaaaaaaaaaaaaaaaaaaaaaaaaaaaaaaaaaaaaaaa

SEQ ID NO: 25913 - RNA, 1785 nt, Artificial Sequence
  mRNA product Design b-4 (A100) comprising derived and/or modified sequence from LASV(LASV254-NIG-2011;Clade II)__AIT17674__GPCmut3 (opt4)
aggagagucccgcagucggcguccagcggcucugcuuguucgugugugugucguugcaggccuuauucaagcuuaccaugggccagaucaucaccuucuuccaggaggugccccacgugaucgaggaggugaugaacaucgugcugaucgcccugagccugcuggccauccugaagggcaucuacaacguggccaccugcggccuguucggccuggugagcuuccugcugcugugcggcagaagcugcagcaccaccuacaagggcguguacgagcugcagacccuggagcuggacaugaccaaccugaacaugaccaugccccugagcugcaccaagaacaacagccaccacuacaucauggugggcaacgagaccggccuggagcugacccugaccaacaccagcaucaucaaccacaaguucugcaaccugagcgacgcccacaagaagaaccuguacaaccacgcccugaugagcaucaucagcaccuuccaccugagcauccccaacuucaaccaguacgaggccaugagcugcgacuucaacggcggcaagaucagcgugcaguacaaccugagccacagcuacgccguggacgccgccaaccacugcggcaccaucgccaacggcgugcugcagaccuucaugagaauggccuggggcggcagcuacaucgcccuggacagcggcaagggcaacugggacugcaucaugaccagcuaccaguaccugaucauccagaacaccaccugggaggaccacugccaguucagcagacccagccccaucggcuaccugggccugcugagccagagaaccagagacaucuacaucagcagaagaagaagaggcaccuucaccuggacccugagcgacagcgagggcaacgagacccccggcggcuacugccugaccagauggaugcugaucgaggccgagcugaagugcuucggcaacaccgccguggccaagugcaacgagaagcacgacgaggaguucugcgacaugcugagacuguucgacuucaacaagcaggccaucagaagacugaagacccccgcccaggccaacauccagcugaucaacaaggccgugaacgcccugaucaacgaccagcugaucaugaagaaccaccugagagacaucaugggcauccccuacugcaacuacagcaaguacugcuaccugaaccacaccgugaccggcaagaccagccugcccagaugcugccuggugagcaacggcagcuaccugaacgagacccacuucagcgacgacaucgagcagcaggccgacaacaugaucaccgagcugcugcagaaggaguacauggacagacagggcaagaccccccugggccugguggaccuguucguguucagcaccagcuucuaccugaucagcaucuuccugcaccuggugaagauccccacccacagacacgugaucggcaagcccugccccaagccccacagacugaaccacaugggcaucugcagcugcggccuguacaagcaccccggcgugcccgugaaguggaagagaugaggacuaguaauaaggaaacuguaugaaugucugugggcaggaagugaagagauccuucuguaaagguuuuuggaauuaugucugcugaauaauaaacuuuuuugaaauaauaaaucugguagaaaaaugagaucuaaaaaaaaaaaaaaaaaaaaaaaaaaaaaaaaaaaaaaaaaaaaaaaaaaaaaaaaaaaaaaaaaaaaaaaaaaaaaaaaaaaaaaaaaaaaaaaaaaaa

SEQ ID NO: 25914 - RNA, 1785 nt, Artificial Sequence
  mRNA product Design b-4 (A100) comprising derived and/or modified sequence from LASV(Nig08-A19;Clade III)__ADU56618__GPCmut3 (opt4)
aggagagucccgcagucggcguccagcggcucugcuuguucgugugugugucguugcaggccuuauucaagcuuaccaugggccagaucgugaccuucuuccaggaggugccccacgugaucgaggaggugaugaacaucgugcugaucgcccugagcauccuggccauccugaagggccuguacaacaucgccaccugcggccugaucggccuggugaccuuccugcugcugagcggcagaagcugcagcaugaccuacaagggcguguacgagcugcagacccuggagcugaacaugaacacccugaacaugaccaugccccugagcugcaccaagaacaacagccaccacuacaucauggugggcaacgagaccggccuggagcugacccugaccaacaccagccugcugcaccacaaguucugcaaccugagcgacgcccacaagaagaaccuguacgaccacacccugaugagcaucaucagcaccuuccaccugagcauccccaacuucaaccaguacgaggccaugagcugcgacuucaacggcggcaagaucaccgugcaguacaaccugagccacagcuacgccaucgacgccgccaaccacugcggcaccguggccaacggcgugcugcagaccuucaugagaauggccuggggcggcagcuacaucgcccuggacagcggcagaggcaagugggacugcaucaugaccagcuaccaguaccugaucauccagaacaccaccugggaggaccacugccaguucagcagacccagccccaucggcuaccugggccugcugagccagagaaccagagacaucuacaucagcagaagaagaagaggcaccuucaccuggacccugagcgacagcgagggcaacgagacccccggcggcuacugccugaccagauggaugcugaucgaggccgagcugaagugcuucggcaacaccgccguggccaagugcaacgagaagcacgacgaggaguucugcgacaugcugagacuguucgacuucaacaagcaggccaucagaagacugaaggcccccgcccagaugagcauccagcugaucaacaaggccgugaacgcccugaucaacgaccagcugaucaugaagaaccaccugagagacaucaugggcauccccuacugcaacuacagcaaguacugcuaccugaaccacaccagcaccggcagaaccagccugcccagaugcugccuggugagcaacggcagcuaccugaacgagacccacuucagcgacgacaucgagcagcaggccgacaacaugaucaccgagaugcugcagaaggaguaccuggacagacagggcaagaccccccugggccugguggaccuguucguguucagcaccagcuucuaccugaucagcaucuuccugcaccuggugaagauccccacccacagacacaucgugggcaagcccugccccaagccccacagacugaaccacaugggcaucugcagcugcggccuguacaagcagcccggcgugcccgugagauggaagagaugaggacuaguaauaaggaaacuguaugaaugucugugggcaggaagugaagagauccuucuguaaagguuuuuggaauuaugucugcugaauaauaaacuuuuuugaaauaauaaaucugguagaaaaaugagaucuaaaaaaaaaaaaaaaaaaaaaaaaaaaaaaaaaaaaaaaaaaaaaaaaaaaaaaaaaaaaaaaaaaaaaaaaaaaaaaaaaaaaaaaaaaaaaaaaaaaa

SEQ ID NO: 25915 - RNA, 1788 nt, Artificial Sequence
  mRNA product Design b-4 (A100) comprising derived and/or modified sequence from LASV(G1180-SLE-2010;Clade IV)__AIT17168__GPCmut3 (opt4)
aggagagucccgcagucggcguccagcggcucugcuuguucgugugugugucguugcaggccuuauucaagcuuaccaugggccagaucgugaccuucuuccaggaggugccccacgugaucgaggaggugaugaacaucgugcugaucgcccugagcauccuggccgugcugaagggccuguacaacuucgccaccugcggccuggugggccugcugaccuuccugcugcugugcggcagaagcugcaccgccagcagauacaagggcguguacgagcugcagacccuggagcugaacauggagacccugaacaugaccaugccccugagcugcaccaagaacaacagccaccacuacaucauggugggcaacgagaccggccuggagcugacccugaccaacaccagcaucaucaaccacaaguucugcaaccugagcgacgcccacaagaagaaccuguacgaccacgcccugaugagcaucaucagcaccuuccaccugagcauccccaacuucaaccaguacgaggccaugagcugcgacuucaacggcggcaagaucagcgugcaguacaaccugagccacagcuacgccggcgacgccgccaaccacugcggcaccguggccaacggcgugcugcagaccuucaugagaauggccuggggcggcagcuacaucgcccuggacagcggccacggcagcugggacugcaucaugaccagcuaccaguaccugaucauccagaacaccaccugggaggaccacugccaguucagcagacccagccccaucggcuaccugggccugcugagccagagaaccagagacaucuacaucagcagaagaagaagaggcaccuucaccuggacccugagcgacagcgagggcaaggacacccccggcggcuacugccugaccagauggaugcugaucgaggccgagcugaagugcuucggcaacaccgccguggccaagugcaacgagaagcacgacgaggaguucugcgacaugcugagacuguucgacuucaacaagcaggccauccagagacugaaggcccccgcccagaugagcauccagcugaucaacaaggccgugaacgcccugaucaacgaccagcugaucaugaagaaccaccugagagacaucaugggcauccccuacugcaacuacagcaaguacugcuaccugaaccacaccaccaccggcaagaccagccugcccaagugcugccuggugagcaacggcagcuaccugaacgagacccacuucagcgacgacaucgagcagcaggccgacaacaugaucaccgagaugcugcagaaggaguacauggagagacagggcaagaccccccugggccugguggaccuguucguguucagcaccagcuucuaccugaucagcaucuuccugcaccuggugaagauccccacccacagacacaucgugggcaagagcugccccaagccccacagacugaaccacaugggcaucugcagcugcggccuguacaagcagcccggcgugcccgugaaguggaagagaugaggacuaguaauaaggaaacuguaugaaugucugugggcaggaagugaagagauccuucuguaaagguuuuuggaauuaugucugcugaauaauaaacuuuuuugaaauaauaaaucugguagaaaaaugagaucuaaaaaaaaaaaaaaaaaaaaaaaaaaaaaaaaaaaaaaaaaaaaaaaaaaaaaaaaaaaaaaaaaaaaaaaaaaaaaaaaaaaaaaaaaaaaaaaaaaaa

SEQ ID NO: 25916 - RNA, 1788 nt, Artificial Sequence
  mRNA product Design b-4 (A100) comprising derived and/or modified sequence from LASV(G1442-SLE-2011;Clade IV)__AIT17180__GPCmut3 (opt4)
aggagagucccgcagucggcguccagcggcucugcuuguucgugugugugucguugcaggccuuauucaagcuuaccaugggccagaucgugaccuucuuccaggaggugccccacgugaucgaggaggugaugaacaucgugcugaucgcccugagcauccuggccgugcugaagggccuguacaacguggccaccugcggccugaucggccuggugaccuuccugcugcugugcggcagaagcugcaccaccacccuguacaagggcguguacgagcugcagacccuggagcugaacauggagacccugaacaugaccaugccccugagcugcaccaagaacaacagccaccacuacaucagagugggcaacgagaccggccuggagcugacccugaccaacaccagcaucaucaaccacaaguucugcaaccugagcgacgcccacaagaagaaccuguacgaccacgcccugaugagcaucaucagcaccuuccaccugagcauccccaacuucaaccaguacgaggccaugagcugcgacuucaacggcggcaagaucagcgugcaguacaaccugagccacagcuacgccggcgacgccgccaaccacugcggcaccguggccaacggcgugcugcagaccuucaugagaauggccuggggcggcagcuacaucgcccuggacagcggcagaggcaacugggacugcaucaugaccagcuaccaguaccugaucauccagaacaccaccugggacgaccacugccaguucagcagacccagccccaucggcuaccugggccugcugagccagagaaccagagacguguacaucagcagaagaagaagaggcaccuucaccuggacccugagcgacagcgagggcaaggacacccccggcggcuacugccugaccagauggaugcugaucgaggccgagcugaagugcuucggcaacaccgccguggccaagugcaacgagaagcacgacgaggaguucugcgacaugcugagacuguucgacuucaacaagcaggccauccagagacugaaggcccccgcccagaugagcauccagcugaucaacaaggccgugaacgcccugaucaacgaccagcugaucaugaagaaccaccugagagacaucaugggcauccccuacugcaacuacagcaaguacugcuaccugaacaacaccgccaccggcaagaccagccugcccaagugcugccugaucagcaacggcagcuaccugaacgagacccacuucagcgacgacaucgagcaggaggccgacaacaugaucaccgagaugcugcagaaggaguacauggagagacagggcaagaccccccugggccugguggaccuguucguguucagcaccagcuucuaccugaucagcaucuuccugcaccuggugaagauccccacccacagacacaucgugggcaagagcugccccaagccccacagacugaaccacaugggcaucugcagcugcggccuguacaagcagcccggcgugcccgugagauggaagagaugaggacuaguaauaaggaaacuguaugaaugucugugggcaggaagugaagagauccuucuguaaagguuuuuggaauuaugucugcugaauaauaaacuuuuuugaaauaauaaaucugguagaaaaaugagaucuaaaaaaaaaaaaaaaaaaaaaaaaaaaaaaaaaaaaaaaaaaaaaaaaaaaaaaaaaaaaaaaaaaaaaaaaaaaaaaaaaaaaaaaaaaaaaaaaaaaa

SEQ ID NO: 25917 - RNA, 1788 nt, Artificial Sequence
  mRNA product Design b-4 (A100) comprising derived and/or modified sequence from LASV(G3010-SLE-2013;Clade IV)__AIT17344__GPCmut3 (opt4)
aggagagucccgcagucggcguccagcggcucugcuuguucgugugugugucguugcaggccuuauucaagcuuaccaugggccagaucgugaccuucuuccaggaggugccccacgugaucgaggaggugaugaacaucgugcugaucgcccugagcauccuggccgugcugaagggccuguacaacuucgccaccugcggccuggugggccuggugaccuuccugcugcugugcggcagaagcugcaccaccagccuguacaagggcguguacgagcugcagacccuggagcugaacauggagacccugaacaugaccaugccccugagcugcaccaagaacaacagccaccacuacaucauggugggcaacgagaccggccuggagcugacccugaccaacaccagcaucaucaaccacaaguucugcaaccugagcgacgcccacaagaagaaccuguacaaccacgcccugaugagcaucaucagcaccuuccaccugagcauccccaacuucaaccaguacgaggccaugagcugcgacuucaacggcggcaagaucagcgugcaguacaaccugagccacagcuacgccggcgacgccgccagccacugcggcaccguggccaacggcgugcugcagaccuucaugagaauggccuggggcggcagcuacaucgcccuggacagcggcuacggcaagugggacugcaucaugaccagcuaccaguaccugaucauccagaacaccaccugggaggaccacugccaguucagcagacccagccccaucggcuaccugggccugcugagccagagaaccagagacaucuacaucagcagaagaagaagaggcaccuucaccuggacccugagcgacagcgagggcaaggacacccccggcggcuacugccugaccagauggaugcugaucgaggccgagcugaagugcuucggcaacaccgccguggccaagugcaacgagaagcacgacgaggaguucugcgacaugcugagacuguucgacuucaacaagcaggccauccagagacugaagacccccgcccagaugagcauccagcugaucaacaaggccgugaacgcccugaucaacgaccagcugaucaugaagaaccaccugagagacaucaugggcauccccuacugcaacuacagcaaguacugcuaccugaaccacaccaccaccggcaagaccagccugcccaagugcugccuggugagcaacggcagcuaccugaacgagacccacuucagcgacgacaucgagcagcaggccgacaacaugaucaccgagaugcugcagaaggaguacauggagagacagggcaagaccccccugggccugguggaccuguucguguucagcaccagcuucuaccugaucagcaucuuccugcaccuggugaagauccccacccacagacacaucgugggcaagagcugccccaagccccacagacugaaccacaugggcaucugcagcugcggccuguacaagcagcccggcgugcccgugagauggaagagaugaggacuaguaauaaggaaacuguaugaaugucugugggcaggaagugaagagauccuucuguaaagguuuuuggaauuaugucugcugaauaauaaacuuuuuugaaauaauaaaucugguagaaaaaugagaucuaaaaaaaaaaaaaaaaaaaaaaaaaaaaaaaaaaaaaaaaaaaaaaaaaaaaaaaaaaaaaaaaaaaaaaaaaaaaaaaaaaaaaaaaaaaaaaaaaaaa

SEQ ID NO: 25918 - RNA, 1788 nt, Artificial Sequence
  mRNA product Design b-4 (A100) comprising derived and/or modified sequence from LASV(G502-SLE-2009;Clade IV)__AIT17126__GPCmut3 (opt4)
aggagagucccgcagucggcguccagcggcucugcuuguucgugugugugucguugcaggccuuauucaagcuuaccaugggccagaucgugaccuucuuccaggaggugccccacgugaucgaggaggugaugaacaucgugcugaucgcccugagcauccuggccgugcugaagggccuguacaacuucgccaccugcggccuggugggccugcugaccuuccugcugcugugcggcagaagcugcaccaccggccuguacaagggcguguacgagcugcagacccuggagcugaacauggagacccugaacaugaccaugccccugagcugcaccaagaacaacagccaccacuacaucauggugggcaacgagaccggccuggagcugacccugaccaacaccagcaucaucaaccacaaguucugcaaccugagcgacgcccacaagaagaaccuguacgaccacgcccugaugagcaucaucagcaccuuccaccugagcauccccaacuucaaccaguacgaggccaugagcugcgacuucaacggcggcaagaucagcgugcaguacaaccugagccacagcuacgccggcgacgccgccgaccacugcggcaccguggccaacggcgugcugcagaccuucaugagaauggccuggggcggcagcuacaucgcccuggacagcggcagaggcagaugggacugcaucaugaccagcuaccaguaccugaucauccagaacaccaccugggaggaccacugccaguucagcagacccagccccaucggcuaccugggccugcugagccagagaaccagagacaucuacaucagcagaagaagaagaggcaccuucaccuggacccugagcgacagcgagggcaaggacacccccggcggcuacugccugaccagauggaugcugaucgaggccgagcugaagugcuucggcaacaccgccguggccaagugcaacgagaagcacgacgaggaguucugcgacaugcugagacuguucgacuucaacaagcaggccauccagagacugaaggcccccgcccagaugagcauccagcugaucaacaaggccgugaacgcccugaucaacgaccagcuggugaugaagaaccaccugagagacaucaugggcauccccuacugcaacuacagcagauacugcuaccugaaccacaccaccaccggcagaaccagccugcccaagugcugccuggugagcaacggcagcuaccugaacgagacccacuucagcgacgacaucgagcagcaggccgacaacaugaucaccgagaugcugcagaaggaguacauggagagacagggcaagaccccccugggccugguggaccuguucguguucagcaccagcuucuaccugaucagcaucuuccugcaccuggugaagauccccacccacagacacaucgugggcaagagcugccccaagccccacagacugaaccacaugggcaucugcagcugcggccuguacaagcagcccggcgugcccgugaaguggaagagaugaggacuaguaauaaggaaacuguaugaaugucugugggcaggaagugaagagauccuucuguaaagguuuuuggaauuaugucugcugaauaauaaacuuuuuugaaauaauaaaucugguagaaaaaugagaucuaaaaaaaaaaaaaaaaaaaaaaaaaaaaaaaaaaaaaaaaaaaaaaaaaaaaaaaaaaaaaaaaaaaaaaaaaaaaaaaaaaaaaaaaaaaaaaaaaaaa

SEQ ID NO: 25919 - RNA, 1788 nt, Artificial Sequence
  mRNA product Design b-4 (A100) comprising derived and/or modified sequence from LASV(G733-SLE-2010;Clade IV)__AIT17154__GPCmut3 (opt4)
aggagagucccgcagucggcguccagcggcucugcuuguucgugugugugucguugcaggccuuauucaagcuuaccaugggccagaucgugaccuucuuccaggaggugccccacgugaucgaggaggugaugaacaucgugcugaucgcccugagcauccuggccgugcugaagggccuguacaacuucgccaccugcggcaucgugggccuggugagcuuccugcugcugugcggcagaagcugcaccaccagccuguacaagggcguguacgagcugcagacccuggagcugaacauggagacccugaacaugaccaugccccugagcugcaccaagaacaacagccaccacuacaucauggugggcaacgagaccggccuggagcugacccugaccaacaccagcaucaucaaccacaaguucugcaaccugagcgacgcccacaagaagaaccuguacgaccacgcccugaugagcaucaucagcaccuuccaccugagcauccccaacuucaaccaguacgaggccaugagcugcgacuucaacggcggcaagaucagcgugcaguacaaccugagccacagcuacgccggcgacgccgccaaccacugcggcaccaucgccaacggcgugcugcagaccuucaugagaauggccuggggcggcagcuacaucgcccuggacagcggcagagacagaugggacugcaucaugaccagcuaccaguaccugaucauccagaacaccaccugggaggaccacugccaguucagcagacccagccccaucggcuaccugggccugcugagccagagaaccagagacaucuacaucagcagaagaagaagaggcaccuucaccuggacccugagcgacagcgagggcaaggacacccccggcggcuacugccugaccagauggaugcugaucgaggccgagcugaagugcuucggcaacaccgccguggccaagugcaacgagaagcacgacgaggaguucugcgacaugcugagacuguucgacuucaacaagcaggccauccagagacugaaggcccccgcccagaugagcauccagcugaucaacaaggccgugaacgcccugaucaacgaccagcugaucaugaagaaccaccugagagacaucaugggcauccccuacugcaacuacagcaaguacugcuaccugaaccacaccaccaccggcaagaccagccugcccaagugcugccuggugagcaacggcagcuaccugaacgagacccacuucagcgacgacaucgagcagcaggccgacaacaugaucaccgagaugcugcagaaggaguacauggagagacagggcaagaccccccugggccugguggaccuguucguguucagcaccagcuucuaccugaucagcaucuuccugcaccuggugaagauccccacccacagacacguggugggcaagagcugccccaagccccacagacugaaccacaugggcaucugcagcugcggccuguacggccagcccggcgugcccgugaaguggaagagaugaggacuaguaauaaggaaacuguaugaaugucugugggcaggaagugaagagauccuucuguaaagguuuuuggaauuaugucugcugaauaauaaacuuuuuugaaauaauaaaucugguagaaaaaugagaucuaaaaaaaaaaaaaaaaaaaaaaaaaaaaaaaaaaaaaaaaaaaaaaaaaaaaaaaaaaaaaaaaaaaaaaaaaaaaaaaaaaaaaaaaaaaaaaaaaaaa

SEQ ID NO: 25920 - RNA, 1788 nt, Artificial Sequence
  mRNA product Design b-4 (A100) comprising derived and/or modified sequence from MOPV/LASV reassortant(IGS-1;Clade IV)__AFY05576__GPCmut3 (opt4)
aggagagucccgcagucggcguccagcggcucugcuuguucgugugugugucguugcaggccuuauucaagcuuaccaugggccagaucgugaccuucuuccaggaggugccccacgugaucgaggaggugaugaacaucgugcugaucgcccugagcgugcuggccgugcugaagggccuguacaacuucgccaccugcggccuggugggccuggugaccuuccugcugcugugcggcagaagcugcaccaccagccuguacaagggcguguacgagcugcagacccuggagcugaacauggagacccugaacaugaccaugccccugagcugcaccaagaacaacagccaccacuacaucauggugggcaacgagaccggccuggagcugacccugaccaacaccagcaucaucaaccacaaguucugcaaccugagcgacgcccacaagaagaaccuguacgaccacgcccugaugagcaucaucagcaccuuccaccugagcauccccaacuucaaccaguacgaggccaugagcugcgacuucaacggcggcaagaucagcgugcaguacaaccugagccacagcuacgccggcgacgccgccaaccacugcggcaccguggccaacggcgugcugcagaccuucaugagaauggccuggggcggcagcuacaucgcccuggacagcggcagaggcaacugggacugcaucaugaccagcuaccaguaccugaucauccagaacaccaccugggaggaccacugccaguucagcagacccagccccaucggcuaccugggccugcugagccagagaaccagagacaucuacaucagcagaagaagaagaggcaccuucaccuggacccugagcgacagcgagggcgaggacacccccggcggcuacugccugaccagauggaugcugaucgaggccgagcugaagugcuucggcaacaccgccguggccaagugcaacgagaagcacgacgaggaguucugcgacaugcugagacuguucgacuucaacaagcaggccauccagagacugaaggcccccgcccagaugagcauccagcugaucaacaaggccgugaacgcccugaucaacgaccagcugaucaugaagaaccaccugagagacaucaugggcauccccuacugcaacuacagcaaguacugcuaccugaaccacaccaccaccggcagaaccagccugcccaagugcugccuggugagcaacggcagcuaccugaacgagacccacuucagcgacgacaucgagcagcaggccgacaacaugaucaccgagaugcugcagaaggaguacauggagagacagggcaagaccccccugggccugguggaccuguucguguucagcaccagcuucuaccugaucagcaucuuccugcaccuggugaagauccccacccacagacacaucgugggcaagagcugccccaagccccacagacugaaccacaugggcaucugcagcugcggccuguacaagcagcccggcgugcccgugaaguggaagagaugaggacuaguaauaaggaaacuguaugaaugucugugggcaggaagugaagagauccuucuguaaagguuuuuggaauuaugucugcugaauaauaaacuuuuuugaaauaauaaaucugguagaaaaaugagaucuaaaaaaaaaaaaaaaaaaaaaaaaaaaaaaaaaaaaaaaaaaaaaaaaaaaaaaaaaaaaaaaaaaaaaaaaaaaaaaaaaaaaaaaaaaaaaaaaaaaa

SEQ ID NO: 25921 - RNA, 1788 nt, Artificial Sequence
  mRNA product Design b-4 (A100) comprising derived and/or modified sequence from LASV(LM765-SLE-2012;Clade IV)__AIT17814__GPCmut3 (opt4)
aggagagucccgcagucggcguccagcggcucugcuuguucgugugugugucguugcaggccuuauucaagcuuaccaugggccagaucgugaccuucuuccaggaggugccccacgugaucgaggaggugaugaacaucgugcugaucgcccugagcauccuggccgugcugaagggccuguacaacuucgccaccugcggccuggugggccuggugaccuuccugcugcugugcggcagaagcugcaccaccagccuguacaagggcguguacgagcugcagacccuggagcugaacauggagacccugaacaugaccaugccccugagcugcaccaagaacaacagccaccacuacaucauggugggcaacgagaccggccuggagcugacccugaccaacaccagcaucaucgaccacaaguucugcaaccugagcgacgcccacagaaagaaccuguacgaccacgcccugaugagcaucaucagcaccuuccaccugagcauccccaacuucaaccaguacgaggccaugagcugcgacuucaacggcggcaagaucagcgugcaguacaaccugagccacagcuacgccaaggacgccgccgaccacugcggcaccguggccaacggcgugcugcagaccuucaugagaauggccuggggcggcagcuacaucgcccuggacagcggcagaggcagaugggacugcaucaugaccagcuaccaguaccugaucauccagaacaccaccugggaggaccacugccaguucagcagacccagccccaucggcuaccugggccugcugagccagagaaccagagacaucuacaucagcagaagaagaagaggcaccuucaccuggacccugagcgacagcgagggcaaggacacccccggcggcuacugccugaccagauggaugcugaucgaggccgagcugaagugcuucggcaacaccgccguggccaagugcaacgagaagcacgacgaggaguucugcgacaugcugagacuguucgacuucaacaagcaggccauccagagacugaaggcccccgcccagaugagcauccagcugaucaacaaggccgugaacgcccugaucaacgaccagcugaucaugaagaaccaccugagagacaucaugggcauccccuacugcaacuacagcaaguacugcuaccugaaccacaccaccaccggcaagaccagccugcccaagugcugccuggugagcaacggcagcuaccugaacgagacccacuucagcgacgacaucgagcagcaggccgacaacaugaucaccgagaugcugcagaaggaguacauggagagacagggcaagaccccccugggccugguggaccuguucguguucagcaccagcuucuaccugaucagcaucuuccugcaccuggugaagauccccacccacagacacaucgugggcaagcccugccccaagccccacagacugaaccacaugggcaucugcagcugcggccuguacaagcagcccggcgugcccgugaaguggaagagaugaggacuaguaauaaggaaacuguaugaaugucugugggcaggaagugaagagauccuucuguaaagguuuuuggaauuaugucugcugaauaauaaacuuuuuugaaauaauaaaucugguagaaaaaugagaucuaaaaaaaaaaaaaaaaaaaaaaaaaaaaaaaaaaaaaaaaaaaaaaaaaaaaaaaaaaaaaaaaaaaaaaaaaaaaaaaaaaaaaaaaaaaaaaaaaaaa

SEQ ID NO: 25922 - RNA, 1788 nt, Artificial Sequence
  mRNA product Design b-4 (A100) comprising derived and/or modified sequence from LASV(LM776-SLE-2012;Clade IV)__AIT17824__GPCmut3 (opt4)
aggagagucccgcagucggcguccagcggcucugcuuguucgugugugugucguugcaggccuuauucaagcuuaccaugggccagaucgugaccuucuuccaggaggugccccacgugaucgaggaggugaugaacaucgugcugaucgcccugagcauccuggccgugcugaagggccuguacaacuucgccaccugcggccuggugggccuggugaccuuccugcugcugugcggcagaagcugcaccaccagcguguacaagggcguguacgagcugcagacccuggagcugaacauggagacccugaacaugaccaugccccugagcugcaccaagaacaacagccaccacuacaucauggugggcaacgagaccggccuggagcugacccugaccaacaccagcaucaucaaccacaaguucugcaaccugagcgacgcccacaagaagaaccuguacgaccacgcccugaugagcaucaucagcaccuuccaccugagcauccccaacuucaaccaguacgaggccaugagcugcgacuucaacggcggcaagaucagcgugcaguacaaccugagccacagcuacgccggcgacgccgccaaccacugcggcaccguggccaacggcgugcugcagaccuucaugagaauggccuggggcggcagcuacaucgcccuggacagcggccacggcaagugggacugcaucaugaccagcuaccaguaccugaucauccagaacaccaccugggaggaccacugccaguucagcagacccagccccaucggcuaccugggccugcugagccagagaaccagagacaucuacaucagcagaagaagaagaggcaccuucaccuggacccugagcgacagcgagggcaaggacacccccggcggcuacugccugaccagauggaugcugaucgaggccgagcugaagugcuucggcaacaccgccguggccaagugcaacgagaagcacgacgaggaguucugcgacaugcugagacuguucgacuucaacaagcaggccauccagagacugaaggcccccgcccagaugagcauccagcugaucaacaaggccgugaacgcccugaucaacgaccagcugaucaugaagaaccaccugagagacaucaugggcauccccuacugcaacuacagcaaguacugcuaccugaaccacaccaccaccggcaagaccagccugcccaagugcugccuggugagcaacggcagcuaccugaacgagacccacuucagcgacgacaucgagcagcaggccgacaacaugaucaccgagaugcugcagaaggaguacauggagagacagggcaagaccccccugggccugguggaccuguucguguucagcaccagcuucuaccugaucagcaucuuccugcaccuggugaagauccccacccacagacacaucgugggcaagagcugccccaagccccacagacugaaccacaugggcaucugcagcugcggccuguacaagcagcccggcgugcccgugagauggaagagaugaggacuaguaauaaggaaacuguaugaaugucugugggcaggaagugaagagauccuucuguaaagguuuuuggaauuaugucugcugaauaauaaacuuuuuugaaauaauaaaucugguagaaaaaugagaucuaaaaaaaaaaaaaaaaaaaaaaaaaaaaaaaaaaaaaaaaaaaaaaaaaaaaaaaaaaaaaaaaaaaaaaaaaaaaaaaaaaaaaaaaaaaaaaaaaaaa

SEQ ID NO: 25923 - RNA, 1788 nt, Artificial Sequence
  mRNA product Design b-4 (A100) comprising derived and/or modified sequence from LASV(Mad39;Clade IV)__ANH09722__GPCmut3 (opt4)
aggagagucccgcagucggcguccagcggcucugcuuguucgugugugugucguugcaggccuuauucaagcuuaccaugggccagaucgugaccuucuuccaggaggugccccacgugaucgaggaggugaugaacaucgugcugaucgcccugagcauccuggccgugcugaagggccuguacaacguggccaccugcggccugaucggccuggugaccuuccugcugcugugcggcagaagcugcaccaccacccuguacaagggcguguacgagcugcaggcccuggagcugaacauggagacccugaacaugaccaugccccugagcugcaccaagaacaacagccaccacuacaucagagugggcaacgagaccggccuggagcugacccugaccaacaccagccugaucaaccacaaguucugcaaccugagcgacgcccacaagaagaaccuguacgaccacgcccugaugagcaucaucagcaccuuccaccugagcauccccaacuucaaccaguacgaggccaugagcugcgacuucaacgacggcaagaucagcgugcaguacaaccugagccacaccuacgccggcgacaccgccaaccacugcggcaccguggccaacggcgugcugcagaccuucaugagaauggccuggggcggcagcuacaucgcccuggacagcggcagaggcggcugggacugcaucaugaccagcuaccaguaccugaucauccagaacaccaccugggaggaccacugccaguucagcagacccagccccaucggcuaccugggccugcugagccagagaaccagagacaucuacaucagcagaagaagaagaggcaccuucaccuggacccugagcgacagcgagggcaaggacacccccggcggcuacugccugaccagauggaugcugaucgaggccgagcugaagugcuucggcaacaccgccguggccaagugcaacgagaagcacgacgaggaguucugcgacaugcugagacuguucgacuucaacaagcaggccauccagagacugaaggcccccgcccagaugagcauccagcugaucaacaaggccgugaacgcccugaucaacgaccagcugaucaugaagaaccaccugagagacaucaugggcauccccuacugcaacuacagcaaguacugcuaccugaaccacaccgugaccggcaagaccagccugcccaagugcugccuggugagcaacggcagcuaccugaacgagacccacuucagcgacgacaucgagcagcaggccgacaacaugaucaccgagaugcugcagaaggaguacauggagagacagggcaagaccccccugggccugguggaccuguucguguucagcaccagcuucuaccugaucagcaucuuccugcaccuggugaagauccccacccacagacacguggugggcaagcccugccccaagccccacagacugaaccacaugggcaucugcagcugcggcuucuacaagcagcccggcgugcccgugagauggaagagaugaggacuaguaauaaggaaacuguaugaaugucugugggcaggaagugaagagauccuucuguaaagguuuuuggaauuaugucugcugaauaauaaacuuuuuugaaauaauaaaucugguagaaaaaugagaucuaaaaaaaaaaaaaaaaaaaaaaaaaaaaaaaaaaaaaaaaaaaaaaaaaaaaaaaaaaaaaaaaaaaaaaaaaaaaaaaaaaaaaaaaaaaaaaaaaaaa

SEQ ID NO: 25924 - RNA, 1788 nt, Artificial Sequence
  mRNA product Design b-4 (A100) comprising derived and/or modified sequence from LASV(Z0947-SLE-2011;Clade IV)__AIT17840__GPCmut3 (opt4)
aggagagucccgcagucggcguccagcggcucugcuuguucgugugugugucguugcaggccuuauucaagcuuaccaugggccagaucgugaccuucuuccaggaggugccccacgugaucgaggaggugaugaacaucgugcugaucgcccugagcauccuggccgugcugaagggccuguacaacuucgccaccugcggccuggugggccuggugaccuuccugcugcugugcggcagaagcugcaccaucagccuguacaagggcguguacgagcugcagacccuggagcugaacauggagacccugaacaugaccaugccccugagcugcaccaagaacaacagccaccacuacaucauggugggcaacgagaccggccuggagcugacccugaccaacaccagcaucaucaaccacaaguucugcaaccugagcgacgcccacaagaagaaccuguacgaccacgcccugaugagcaucaucagcaccuuccaccugagcauccccaacuucaaccaguacgaggccaugagcugcgacuucaacggcggcaagaucagcgugcaguacaaccugagccacagcuacgccggcgacgccgccaaccacugcggcaccguggccaacggcgugcugcagaccuucaugagaauggccuggggcggcagcuacaucgcccuggacagcggcagagacagaugggacugcaucaugaccagcuaccaguaccugaucauccagaacaccaccugggaggaccacugccaguucagcagacccagccccaucggcuaccugggccugcugagccagagaaccagagacaucuacaucagcagaagaagaagaggcaccuucaccuggacccugagcgacagcgagggcaaggacacccccggcggcuacugccugaccagauggaugcugaucgaggccgagcugaagugcuucggcaacaccgccguggccaagugcaacgagaagcacgacgaggaguucugcgacaugcugagacuguucgacuucaacaagcaggccauccagagacugaaggcccccgcccagaugagcauccagcugaucaacaaggccgugaacgcccugaucaacgaccagcugaucaugaagaaccaccugagagacaucaugggcauccccuacugcaacuacagcaaguacugcuaccugaaccacaccaccaccggcaagaccagccugcccaagugcugccuggugagcaacggcagcuaccugaacgagacccacuucagcgacgacaucgagcagcaggccgacaacaugaucaccgagaugcugcagaaggaguacauggagagacagggcaagaccccccugggccugguggaccuguucguguucagcaccagcuucuaccugaucagcaucuuccugcaccuggugaagauccccacccacagacacaucgugggcaagcccugccccaagccccacagacugaaccacaugggcaucugcagcugcggccuguacaagcagcccggcgugcccgugaaguggaagagaugaggacuaguaauaaggaaacuguaugaaugucugugggcaggaagugaagagauccuucuguaaagguuuuuggaauuaugucugcugaauaauaaacuuuuuugaaauaauaaaucugguagaaaaaugagaucuaaaaaaaaaaaaaaaaaaaaaaaaaaaaaaaaaaaaaaaaaaaaaaaaaaaaaaaaaaaaaaaaaaaaaaaaaaaaaaaaaaaaaaaaaaaaaaaaaaaa

SEQ ID NO: 25925 - RNA, 1788 nt, Artificial Sequence
  mRNA product Design b-4 (A100) comprising derived and/or modified sequence from LASV(Josiah;Clade IV)__NP_694870__GPCmut3 (opt5)
aggagagucccgcagucggcguccagcggcucugcuuguucgugugugugucguugcaggccuuauucaagcuuaccaugggccagaucgugaccuucuuucaagaggucccccacguuauugaagaggugaugaacaucgugcugauugcccucagcguccuggcugugcuuaaggggcuguacaauuucgccacaugcggacucguuggccuggugacguuucuucugcucugugggagauccugcaccacaucucuguauaaaggagucuacgaacugcagacccucgagcugaacauggaaacacuuaauaugaccaugccucugagcuguacaaagaacaauucccaucacuauaucauggugggcaacgagaccgggcucgagcugacgcuuaccaauacaucuauuaucaaccauaaauucugcaaucugagcgacgcgcacaagaaaaaccucuacgaucaugcucugauguccaucauuucuaccuuucaccugagcaucccgaauuucaaccaguaugaagccauguccugugacuuuaauggaggcaagauuagcguucaguacaaccucucucacuccuaugccggcgaugcugccaaucauugcgggacaguggcuaacggaguccugcaaaccuucaugcggauggccuggggcgggagcuacaucgcgcuugacucuggacgcggcaacugggauuguauuaugacguccuaccaguaucugaucauucagaauacaaccugggaggaccacugccaguuuagcagacccucuccuaucggguaccucggacugcuuucccaacggacacgcgauaucuauauuagcagacggcgcagaggcaccuucaccuggacacuguccgacucugaaggcaaggauacgcccgggggauacugucucacccgguggaugcugaucgaggccgagcugaaaugcuuuggcaacacagcuguggccaaguguaaugaaaaacaugacgaggaguucugcgauaugcuccgccuguuugacuucaacaagcaggcuauucagagacuuaaagccccugcgcagaugagcauccaacugauuaauaaggccgugaacgcucucaucaaugaucagcugaucaugaagaaccaccuucgggacauuauggggauccccuauugcaauuacuccaaauauuguuaccugaaccacaccacaaccggacgcacgagccucccuaagugcugucuggucucuaauggcuccuaccugaacgaaacacauuucagcgacgauauugaacagcaagccgacaauaugaucaccgagaugcuccagaaagaguauauggaaagacaggggaagaccccgcugggacuuguugaucuguuuguguucucuaccagcuuuuaccucauuuccaucuuccugcaccuggugaaaauccccacacaucggcacauugucggcaagucuugcccuaaaccccaucgccuuaaccacaugggcaucuguagcugcgggcucuauaagcagccuggagugcccguuaaguggaaaagaugaggacuaguaauaaggaaacuguaugaaugucugugggcaggaagugaagagauccuucuguaaagguuuuuggaauuaugucugcugaauaauaaacuuuuuugaaauaauaaaucugguagaaaaaugagaucuaaaaaaaaaaaaaaaaaaaaaaaaaaaaaaaaaaaaaaaaaaaaaaaaaaaaaaaaaaaaaaaaaaaaaaaaaaaaaaaaaaaaaaaaaaaaaaaaaaaa

SEQ ID NO: 25926 - RNA, 1785 nt, Artificial Sequence
  mRNA product Design b-4 (A100) comprising derived and/or modified sequence from LASV(LP;Clade I)__AAF86701__GPCmut3 (opt5)
aggagagucccgcagucggcguccagcggcucugcuuguucgugugugugucguugcaggccuuauucaagcuuaccaugggccagaucauuaccuucuuucaagaggugccccacgucaucgaagagguuaugaacauugugcugaucgcccucagccugcuugcuauucugaaggggcucuacaauaucgccacaugcggaaucauuggccugguggcguuccuuuuucugugugggaaauccugcucucucacgcugaagggaggcuaugaacugcagacccucgagcugaacauggaaacacuuaauaugaccaugccucugagcuguaccaaaaacuccucucaucacuacaucagagucgggaaugagacaggacucgagcugacacuuaccaacacgagcauuaucaaucauaaguucugcaaccuguccgacgcucacaaaaagaaucucuaugaucaugcccugaugucuauuaucagcaccuuucaccuguccauuccgaacuucaaucaguacgaagccaugagcugugacuuuaacggcggcaagaucucugugcaguauaaucucucccacagcuacgcuggggaugccgcugagcauugcggaacaguugccaacggcgugcugcaaaccuucaugcggauggcguggggagggcgcuauaucgcccuugacucuggcaaagggaauugggauuguauuaugacauccuaccaguaccugaucauucagaacaccacgugggaagaccacugccaguuuagcagacccucuccuaucggauaucucggccugcuuucccaacggacacgcgauauuuacaucagcagacggcgcagaggcaccuucacauggacccuguccgacucugaggggaacgagacccccggaggcuauugucucacacgguggaugcugaucgaagcugagcugaagugcuuugggaauacggccgucgcuaaauguaacgaaaagcaugaugaggaguucugcgacaugcuccgccuguuugauuucaauaaacaggccauuagacggcuuaaggcgccugcccagaugagcauccagcugauuaacaaggcugugaaugcccucaucaacgaccaacugauuaugaaaaaucaccuucgcgauaucaugggaauccccuacugcaacuauuccaaguacuguuaucugaaucacaccagcucuggcagaacaucccucccuaaaugcugucugauuagcaacgggucuuaccugaaugaaacccaguucagcgacgacaucgagcagcaagcugauaacaugauuacagaaaugcuccagaaggaguacaucgaacggcagggaaaaaccccgcugggccuuguugacauuuuuaucuucuccacgucuuuuuaucugauuagcaucuuccuccaucugaucaagauucccacacaccgccauaucgugggcaaaccuugccccaagccucacagacugaaucauaugggggucuguuccugcggacuuuacaagcaccccggcgugccgaccaaauggaagcggugaggacuaguaauaaggaaacuguaugaaugucugugggcaggaagugaagagauccuucuguaaagguuuuuggaauuaugucugcugaauaauaaacuuuuuugaaauaauaaaucugguagaaaaaugagaucuaaaaaaaaaaaaaaaaaaaaaaaaaaaaaaaaaaaaaaaaaaaaaaaaaaaaaaaaaaaaaaaaaaaaaaaaaaaaaaaaaaaaaaaaaaaaaaaaaaaa

SEQ ID NO: 25927 - RNA, 1785 nt, Artificial Sequence
  mRNA product Design b-4 (A100) comprising derived and/or modified sequence from LASV(803213;Clade II)__AAF86703__GPCmut3 (opt5)
aggagagucccgcagucggcguccagcggcucugcuuguucgugugugugucguugcaggccuuauucaagcuuaccaugggccagaucauuaccuucuuucaagaggugccccacgucaucgaagagguuaugaacauugugcugaucgcccucagccugcuugcuauucugaaggggaucuacaauguggccacaugcggacucuucggccugaucuccuuucuucugcucugugggagaucuugcagcgucacguauaaaggaguguacgaacugcagacccuggagcucaacauggcgaaucugaacaugacaaugccucuuuccuguaccaagaauaacucucaucacuauauuaugguuggcaaugaaacagggcuggagcucacccugacaaacaccagcaucauuaaucauaaauucugcaaccuuuccgacgcucacaagaaaaaucuguacgaucaugcccucaugucuaucauuagcacguuucaccuguccaucccgaacuucaaucaguaugaggccaugagcugugacuuuaacggaggcaagauuucugugcaguacaaucugucccacagcuucgcugucgaugccgcuaaccauugcggcaccaucgccaacggggugcuccaaacauuuaugcggauggcguggggaggcucuuauaucgcccuggacuccgggaagggaaauugggauuguauuaugaccagcuaccaguaccuuaucauucagaacacaaccugggaagaccacugccaguucucucgccccuccccuaucggcuaucuggggcuccugagccaaagaacgcgggauauuuacaucucccgcagacggcgcggaacauuuaccuggacacuuucugacagcgagggcaaugaagcucccggcggguauugucugaccagauggaugcucaucgaggccgagcugaaaugcuucggaaacaccgcuguugccaaguguaaugaaaaacaugaugaggaauuuugcgacaugcugcgccucuucgauuucaacaagcaggcgauuaaacggcugaagacgccugcccagauguccauccagcuuauuaauaaggcugugaacgcccugaucaaugaccaacucauuaugaaaaaccaccugagagauaucaugggcauccccuacugcaauuauagccgguacuguuaucuuaaccacacagucaccgggaagacaucucugccucgcugcugucucguguccaauggaagcuaccugaacgagacccauuuuucugacgacauugaacagcaggcugauaauaugaucacagagaugcugcaaaaagaguacauggacagacagggcaagaccccgcucgggcugguggaucuuuucgucuuuagcacguccuucuaucugauuucuaucuuucuccaccugguuaaaauucccacacaucggcacaucgugggaaagccuugccccaaaccucaucgccugaaccacaugggcauuuguagcugcggccuuuacaagcaccccggggugccggucaaguggaaaagaugaggacuaguaauaaggaaacuguaugaaugucugugggcaggaagugaagagauccuucuguaaagguuuuuggaauuaugucugcugaauaauaaacuuuuuugaaauaauaaaucugguagaaaaaugagaucuaaaaaaaaaaaaaaaaaaaaaaaaaaaaaaaaaaaaaaaaaaaaaaaaaaaaaaaaaaaaaaaaaaaaaaaaaaaaaaaaaaaaaaaaaaaaaaaaaaaa

SEQ ID NO: 25928 - RNA, 1785 nt, Artificial Sequence
  mRNA product Design b-4 (A100) comprising derived and/or modified sequence from LASV(GA391;Clade III)__CAA36645__GPCmut3 (opt5)
aggagagucccgcagucggcguccagcggcucugcuuguucgugugugugucguugcaggccuuauucaagcuuaccaugggccagaucgugaccuucuuucaagaggucccccacguuauugaagaggugaugaacaucgugcugauugcccucagcauccuggcuauucuuaaggggcuguacaaugucgccacaugcggacucaucggccuggugacguuccuucugcucuccgggagaucuuguagccugaucuauaaaggaaccuacgaacugcagacacucgagcugaacauggaaacccuuaauaugacaaugccucuguccugcaccaagaacaauucucaucacuauauucggguuggcaacgagacagggcucgagcugacccuuacgaauaccagcauccugaaccauaaauuuuguaaucucuccgacgcgcacaagcgcaaccuguacgaucauucucugaugagcauuaucuccacauuccaccucagcauuccgaauuuuaaccaguaugaagcuaugucuugcgacuucaauggaggcaaaaucaccgugcaguacaaccugucccacagcuuugccgucgaugccgcuggccauugugggacacuugccaauggagugcugcaaaccuucaugagaauggcuuggggcgggucuuauauugcccucgacuccggacggggcaacugggauugcaucaugacgagcuaccaguaccugaucauucagaacacaaccugggacgaucacugucaguuuucucgccccuccccuaucggguaucuuggacugcucagccaaagaacacgggacauuuacaucucccgcagacggcgcggcaccuucaccuggacacugucugauagcgagggcaaugaaacgcccgggggauauugccugaccagauggaugcucauugaggcggagcugaaguguuuuggcaacacagccguugcuaagugcaaugaaaaacaugacgaggaguucugugauaugcuucggcuguuugacuucaacaagcaggccauccgcagacucaaaaccccugcucagauguccauccagcugauuaauaaggccgugaacgcgcuuaucaaugaucaacugauuaugaaaaaccaccuccgggacaucauggggauucccuacugcaauuauagccgcuacugcuaucugaaccacacaucuaccggaaagacgucccugccuagauguugccucaucagcaauggcucuuaccugaacgaaacaaaguucagcgacgauaucgaacagcaggccgacaauaugauuaccgagaugcuucaaaaagaguacaucgaucggcaggggaagaccccgcugggacucgucgaccuguuuguguucuccacaucuuuuuaucugauuagcaucuuccuucaucucgugaaaauucccacccacagacauaucgucggcaagccuugucccaaaccucaccgccugaaccauaugggcauuugcuccugugggcuguacaagcagcccggaguuccggugcgguggaaaagaugaggacuaguaauaaggaaacuguaugaaugucugugggcaggaagugaagagauccuucuguaaagguuuuuggaauuaugucugcugaauaauaaacuuuuuugaaauaauaaaucugguagaaaaaugagaucuaaaaaaaaaaaaaaaaaaaaaaaaaaaaaaaaaaaaaaaaaaaaaaaaaaaaaaaaaaaaaaaaaaaaaaaaaaaaaaaaaaaaaaaaaaaaaaaaaaaa

SEQ ID NO: 25929 - RNA, 1788 nt, Artificial Sequence
  mRNA product Design b-4 (A100) comprising derived and/or modified sequence from LASV(AV;Clade V)__CCA30314__GPCmut3 (opt5)
aggagagucccgcagucggcguccagcggcucugcuuguucgugugugugucguugcaggccuuauucaagcuuaccaugggccagaucgugaccuucuuucaagaggucccccacguuauugaagaggugaugaacaucgugcugauugcccucagcauccuggcuguccuuaaggggcuguacaauauugccacaugcggacucaucggccugaucacguuccuucugcucugugggagauccugcucuagcaaccuguauaaaggaguguacgaacugcagucccucgaccugaauauggagacccuuaacaugacaaugccucugucuuguaccaagaauaacagccaucacuauauucggguuggcaaugauacagggcucgaacugacccuuacaaacaccuccauccugaaucauaaauuuugcaaccucucugacgcgcacaagaaagaucuguacgaccaugcucugaugagcauuaucuccacguuccaccucagcauuccgaauuuuaaccaguaugaggccaugucuugugauuucaauggaggcaagaucuccgugcaguacaaccugagccacucuuaugccauugacgcugccaaucauugcggcaccgucgcuaacgggauccuucaaacauuuaugcgcauggccuggggaggcuccuacaucgcgcuggauagcgggagaggaaacugggacuguauuaugaccucuuaccaguaucucaucauucagaauacaaccugggagaaccacugccaguucucccggcccagcccuaucggcuaccuggggcuucugucccaacgcacgagagauauuuauaucucucggcgcagacggggaacauuuaccuggacacucagcgacuccgaaggcaaugccacccccggcggguacugucugacccgcuggaugcugaucgaggcugaacucaagugcuucggaaacacagccguggcuaaauguaaugagaagcaugaugaggaauuuugcgacaugcugagacuuuucgauuuuaacaaacaggccauuagccggcugaagucuccugcgcagauguccauccagcucauuaauaaagccguuaacgcucugaucaaugaccaacuuauuaugaagaaccaucugcgcgacaucaugggcauccccuauugcaauuacagcaaguauuguuaccucaaccacacgauuaccgggaaaacaucucugccuaagugcugucuggugagcaauggauccuaccucaacgagacccacuucucugaugacaucgaacagcaggccgauaauaugauuacagagaugcugcaaaaagaauauauggagagacagggcaagaccccgcuugggcuggucgaccucuucguguuuagcacguccuucuaccugaucagcauuuuucugcggcuugugaaaauccccacacaccgccauauugucggaaagccuugccccaaaccucacagacucaaccauaugggcaucuguucuugcggccuguauaagcagcccgggguuccggugcgguggaagagaugaggacuaguaauaaggaaacuguaugaaugucugugggcaggaagugaagagauccuucuguaaagguuuuuggaauuaugucugcugaauaauaaacuuuuuugaaauaauaaaucugguagaaaaaugagaucuaaaaaaaaaaaaaaaaaaaaaaaaaaaaaaaaaaaaaaaaaaaaaaaaaaaaaaaaaaaaaaaaaaaaaaaaaaaaaaaaaaaaaaaaaaaaaaaaaaaa

SEQ ID NO: 25930 - RNA, 1785 nt, Artificial Sequence
  mRNA product Design b-4 (A100) comprising derived and/or modified sequence from LASV(Togo/2016/7082;Clade VI)__AMR44577__GPCmut3 (opt5)
aggagagucccgcagucggcguccagcggcucugcuuguucgugugugugucguugcaggccuuauucaagcuuaccaugggccagaucauuaccuucuuucaagaggugccccacgucaucgaagagguuaugaacauugugcugaucgcccucagccugcuugcuauucugaaggggguguacaaugucgccacaugcggaaucaucggccucgugacguuccuguuucuuugugggagauccugcucucugauuuauaaaggaagcuacgaacuccagacccuggagcugaacauggaaacacucaauaugaccaugccucuguccuguacaaagaacucuagccaucacuauauccggguuggcaaugagaccgggcuugagcugacacucaccaacacguccauuaucaaucauaaauucugcaaccugucugacgcgcacaagcgcaaucuuuacgaucaugcucugaugagcauucucuccaccuuucaccugagcaucccgaacuucaaucaguaugaagccaugucuugugacuuuaacggaggcaaaauuuccgugcaguacaaucugagccacgccuaugcugucgaugccgcugagcauugcggcacaguggccaacgggguucuccaaaccuucaugagaauggcguggggaggcucuuacaucgcccuggacuccgggcggggaaauugggauuguaucaugacaagcuaccaguaucuuauuauccagaacaccacgugggaagaccacugccaguuuucucgccccuccccuauuggcuaccuggggcuccugagccaaagaacacgggauaucuauauuucccgcagacggcgcggaaccuucacauggacccuuucugacagcgagggcaacgagacccccggcggguacugucugacaagauggaugcucaucgaagcugagcugaagugcuuuggaaauacggccguggcuaaguguaacgaaaaacaugaugaggaguucugcgacaugcugcggcucuuugauuucaauaagcaggccauccagcgccugaaauccccugcgcagaugagcauucaacuuaucaacaaggccgucaaugcucugauuaacgaccagcucaucaugaaaaaucaccugagagauaugaugggcauucccuauugcaacuacucuaaguauuguuaccuuaaucacaccuccagcgggcggacaucucugccuaagugcugucucgugagcaacggauccuaccugaaugaaacccauuucucugacgacaucgagcagcaagccgauaacaugaucacagaaaugcugcagaaagaguauauugaccgccagggcaagaccccgcucgggcugguggaucuuuuugucuucagcacguccuuuuaccugaucagcauuuuccuccaccugaucaaaauucccacacauagacacaucguuggaaagccuugccccaaaccucaucggcugaaucacaugggcauuuguucuugcggccuuuauaagcagcccggggugccgaccagauggaaacgcugaggacuaguaauaaggaaacuguaugaaugucugugggcaggaagugaagagauccuucuguaaagguuuuuggaauuaugucugcugaauaauaaacuuuuuugaaauaauaaaucugguagaaaaaugagaucuaaaaaaaaaaaaaaaaaaaaaaaaaaaaaaaaaaaaaaaaaaaaaaaaaaaaaaaaaaaaaaaaaaaaaaaaaaaaaaaaaaaaaaaaaaaaaaaaaaaa

SEQ ID NO: 25931 - RNA, 1785 nt, Artificial Sequence
  mRNA product Design b-4 (A100) comprising derived and/or modified sequence from LASV(KAK-428;Clade n.d. (VII))__ANH09740__GPCmut3 (opt5)
aggagagucccgcagucggcguccagcggcucugcuuguucgugugugugucguugcaggccuuauucaagcuuaccaugggccagaucgugaccuucuuucaagaggucccccacguuauugaagaggugaugaacaucgugcugauugcccucagccugcuugcuauccugaaggggcucuacaauuucgccacaugcggagucauuggccugaucacguuucuucugcucugugggagauccugcucugcgaccuauaaaggacaguacgaacugcagacacuggagcucaacauggaaagccugaauaugaccaugccucuuuccuguacaaagaacaauucucaucacuauauccgggcuggcaacaauaccgggcuggagcucacacugaccaacacgagcauuaucucccauaaauucugcaaucuuucugacgcccacaagaaaaaccuguacgaucauacccucaugagcauuaucacaaccuuucaccuguccauuccgaauuucaaccaguaugaggccaugagcugugacuuuaauggaggcaagaucucuauucaauacaaccugucccacagcuaugcuggcgaugccgcucagcauugcgggacaguggccaauggaguucuccagaccuucaugcgcauggcguggggcgggucuuaccuggcccuugacuccggaagacggggcugggauuguaucaucagcucuuaccaguaucugauuauccaaaacacgacaugggacgaucacugccaguuuucccgccccagcccuauuggguaccucggauucgugucccagaagaccagagacaucuauauuucucggcgcagacggggcacauuuaccuggacccugagcgauuccgaaggccaugacaugcccgggggauacugucuuacacgcuggaugcugaucgaggcugaucucaaaugcuucggcaacacggccgucgcuaaguguaaugaaaaacacgacgaggaguuuugcgauauguggagacuguucgacuucaacaagcaggccauccaacggcugaaagcgccugcccagaugaauauucagcucaucaacaaggcugugaaugcccugauuaacgaccaacuuaugaugaagaaucaucugcgcgauaucauggggauucccuauugcaacuacagcaaauuuuguuaucucaauaacaccacaaccggaagaacaucucugccucggugcugucuuaucuccaauggcagcuaccugaacgaaacccacuucucugacgauaucgagcagcaggcugacaauaugauuacggaaaugcuccagaaggaguacauggaucgccaagggaaaacaccgcugggacugguugaccucuuuguguucagcaccuccuuuuaucugaucaccauuuuccuucaccuggucaagauccccacacauagacacauugugggcaaaccuugccccaagccucaucggcucaaccacaugggcaucuguucuugcgggcuguacaaacagcccggagugccggucagauggaagcgcugaggacuaguaauaaggaaacuguaugaaugucugugggcaggaagugaagagauccuucuguaaagguuuuuggaauuaugucugcugaauaauaaacuuuuuugaaauaauaaaucugguagaaaaaugagaucuaaaaaaaaaaaaaaaaaaaaaaaaaaaaaaaaaaaaaaaaaaaaaaaaaaaaaaaaaaaaaaaaaaaaaaaaaaaaaaaaaaaaaaaaaaaaaaaaaaaa

SEQ ID NO: 25932 - RNA, 1785 nt, Artificial Sequence; identical to SEQ ID NO: 25926
  mRNA product Design b-4 (A100) comprising derived and/or modified sequence from LASV(Pinneo-NIG-1969;Clade I)__AIT17836__GPCmut3 (opt5)

SEQ ID NO: 25933 - RNA, 1785 nt, Artificial Sequence
  mRNA product Design b-4 (A100) comprising derived and/or modified sequence from LASV(ISTH0009-NIG-2011;Clade II)__AIT17404__GPCmut3 (opt5)
aggagagucccgcagucggcguccagcggcucugcuuguucgugugugugucguugcaggccuuauucaagcuuaccaugggccagaucauuaccuucuuucaagaggugccccacgucaucgaagagguuaugaacauugugcugaucgcccucagccugcuugcuauucugaaggggaucuacaauguggccacaugcggacucuucggccuggucuccuuucuucugcucugugggagaucuugcagcacgaccuauaaaggaguguacgaacugcagacacuggagcucgacauggcgucccugaacaugaccaugccucuuucuuguacaaagaauaacagccaucacuauaucaugguuggcaaugaaaccgggcuggagcucacacugaccaacacguccauuaucaaucauaaauucugcaaccuuucugaugcucacaagaaaaaucuguacgaccaugcccucaugagcauuaucuccaccuuucaccugagcauuccgaacuucaaucaguaugaggccaugucuugugauuuuaacggaggcaagaucuccgugcaguacaaucugagccacgcuuaugccgucgacgcugccaaccauugcggcacaauugcgaauggggugcuccaaaccuucaugcggauggccuggggaggcucuuacaucgcucuggauuccgggaagggaagcugggacuguaucaugacaucuuaccaguaucuuauuauccagaacaccacgugggaagaucacugccaguuuucccgccccagcccuauuggcuaccuggggcuccugucccaaagaacacgggacaucuauauuucucgcagacggcgcggaaccuucacauggacccuuagcgauuccgagggcaacgaaacccccggcggguacugucugacaagauggaugcucaucgaggccgagcugaaaugcuuuggaaauacggcuguugccaaguguaacgaaaaacaugacgaggaguucugcgauaugcugcggcucuuugacuucaauaagcaggcgauccgcagacugaaaaccccugcccagaugagcauucagcuuaucaacaaggcugugaaugcccugauuaacgaucaacucaucaugaagaaucaucugcgggacauuaugggcauccccuauugcaacuacucuaaauauuguuaccuuaaucacacagucaccgggaagacaucccugccucgcugcugucucgugagcaacggaucuuaccugaaugaaacccacuucagcgacgauaucgaacagcaggcugacaacaugauuacggagcugcuccaaaaagaguauauggauagacagggcaagacaccgcuggggcuuguggaccuguuugucuucuccaccucuuuuuaccucaucagcauuuuccugcaccugaucaaaauucccacccaucggcacaucacaggaaagccuugccccaaaccucaucgccuuaaucacaugggcauuuguuccugcggccucuauaagcaccccgggguuccggugaaguggaaaagaugaggacuaguaauaaggaaacuguaugaaugucugugggcaggaagugaagagauccuucuguaaagguuuuuggaauuaugucugcugaauaauaaacuuuuuugaaauaauaaaucugguagaaaaaugagaucuaaaaaaaaaaaaaaaaaaaaaaaaaaaaaaaaaaaaaaaaaaaaaaaaaaaaaaaaaaaaaaaaaaaaaaaaaaaaaaaaaaaaaaaaaaaaaaaaaaaa

SEQ ID NO: 25934 - RNA, 1785 nt, Artificial Sequence
  mRNA product Design b-4 (A100) comprising derived and/or modified sequence from LASV(ISTH2010-NIG-2012;Clade II)__AIT17482__GPCmut3 (opt5)
aggagagucccgcagucggcguccagcggcucugcuuguucgugugugugucguugcaggccuuauucaagcuuaccaugggccagaucauuaccuucuuucaagaggugccccacgucaucgaagagguuaugaacauugugcugaucgcccucagccugcuugcuauucugaaggggaucuacaauguggccacaugcggacucuucggccuggucuccuuucuucugcucugugggagaucuugcagcacgaccuauaaaggaguguacgaacugcagacacuggagcucgacauggcgucccugaacaugaccaugccucuuucuuguacaaagaauaacagccaucacuauaucaugguuggcaaugaaaccgggcuggagcucacacugaccaacacguccauuaucaaucauaaauucugcaaccuuucugaugcucacaagaaaaaucuguacgaccaugcccucaugagcauuaucuccaccuuucaccugagcauuccgaacuucaaucaguaugaggccaugucuugugauuuuaacggaggcaagaucuccgugcaguacaaucugagccacgcuuaugccgucgacgcugccaaccauugcggcacaauugcgaauggggugcuccaaaccuucaugcggauggccuggggaggcucuuacaucgcucuggauuccgggaagggaagcugggacuguaucaugacaucuuaccaguaucuuauuauccagaacauuaccugggaagaucacugccaguuuucccgccccagcccuaucggcuaccuggggcuccugucccaaagaacgcgggacauuuauaucucucgcagacggcgcggaacauucaccuggacacuuagcgauuccgagggcaacgaaacccccggcggguacugucugaccagauggaugcucaucgaggccgagcugaaaugcuuuggaaauacagcuguugccaaguguaacgaaaaacaugacgaggaguucugcgauaugcugcggcucuuugacuucaauaagcaggcgauucgcagacugaaaacgccugcccagaugagcauccagcuuauuaacaaggcugugaaugcccugaucaacgaucaacucauuaugaagaaucaucugcgggacaucaugggcauccccuauugcaacuacucuaaauauuguuaccuuaaucacaccgucacagggaagaccucccugccucgcugcugucucgugagcaacggaucuuaccugaaugaaacacacuucagcgacgauauugaacagcaggcugacaacaugaucaccgagcugcuccaaaaagaguauauugauagacagggcaagacgccgcuggggcuuguggaccuguuugucuucuccacaucuuuuuaccucaucagcauuuuccugcaccugguuaaaauccccacccaucggcacguggugggaaagccuugccccaaaccucaucgccuuaaucacaugggcauuuguuccugcggccucuauaagcaccccggggucccggugaaguggaaaagaugaggacuaguaauaaggaaacuguaugaaugucugugggcaggaagugaagagauccuucuguaaagguuuuuggaauuaugucugcugaauaauaaacuuuuuugaaauaauaaaucugguagaaaaaugagaucuaaaaaaaaaaaaaaaaaaaaaaaaaaaaaaaaaaaaaaaaaaaaaaaaaaaaaaaaaaaaaaaaaaaaaaaaaaaaaaaaaaaaaaaaaaaaaaaaaaaa

SEQ ID NO: 25935 - RNA, 1785 nt, Artificial Sequence
  mRNA product Design b-4 (A100) comprising derived and/or modified sequence from LASV(Lassa virus/H.sapiens-wt/NGA/2015/ISTH_0543;Clade II)__AVO03639__GPCmut3 (opt5)
aggagagucccgcagucggcguccagcggcucugcuuguucgugugugugucguugcaggccuuauucaagcuuaccaugggccagaucauuaccuucuuucaagaggugccccacgucaucgaagagguuaugaacauugugcugaucgcccucagccugcuugcuauucugaaggggaucuacaauguggccacaugcggacucuucggccuggucuccuuucuucugcucugugggagaucuugcagcacgaccuauaaaggaguguacgaacugcagacacuggagcucgacauggcgaaccugaauaugaccaugccucuuuccuguacaaagaacaauucucaucacuauaucaugguuggcaacgaaaccgggcuggagcucacacugaccaauacgagcauuaucaaccauaaauucugcaaucuuuccgaugcucacaagaaaaaccuguacgaccaugcccucaugucuauuaucagcaccuuucaccuguccauuccgaauuucaaccaguaugaggccaugagcugugauuuuaauggaggcaagaucucugugcaguacaaccugucccacacauaugcugucgacgccgcuaaucauugcggcaccauugccaacggggugcuccaaacauucaugcggauggcguggggaggcagcuacaucgcccuggauucugggaagggauccugggacuguaucaugaccagcuaccaguaucuuguuauucagaacacgacaugggaagaucacugccaguuuucucgccccuccccuaucggcuaccuggggcuccugagccaaagaacccgggacauuuauaucucccgcagacggcgcggaacauucaccuggacccuuucugauagcgagggcaaugaaacacccggcggguacugucugacgagauggaugcucauugaggcugagcugaaaugcuuuggaaacaccgccguggcuaaguguaaugaaaaacaugacgaggaguucugcgauaugcugcggcucuuugacuucaacaagcaggccauccgcagacugaaaaccccugcgcagauguccauccagcuuauuaauaaggccgucaacgcucugaucaaugaucaacucauuaugaagaaccaucugcgggacaucaugggcauucccuauugcaauuacagcaaauauuguuaccuuaaccacacagugacagggaagaccucucugccucgcugcugucucguguccaauggaagcuaccugaacgaaacgcacuucucugacgauaucgaacagcaggccgacaauaugaucacagagcugcuccaaaaagaguauauugauagacagggcaagaccccgcuggggcuugucgaccuguuuguuuucagcaccuccuuuuaccucaucucuauuuuccugcaccuggugaaaauccccacacaucggcacauuaccggaaagccuugccccaaaccucaucgccuuaaccacaugggcaucuguagcugcggccucuauaagcaccccggggugccggucaaguggaaaagaugaggacuaguaauaaggaaacuguaugaaugucugugggcaggaagugaagagauccuucuguaaagguuuuuggaauuaugucugcugaauaauaaacuuuuuugaaauaauaaaucugguagaaaaaugagaucuaaaaaaaaaaaaaaaaaaaaaaaaaaaaaaaaaaaaaaaaaaaaaaaaaaaaaaaaaaaaaaaaaaaaaaaaaaaaaaaaaaaaaaaaaaaaaaaaaaaa

SEQ ID NO: 25936 - RNA, 1785 nt, Artificial Sequence
  mRNA product Design b-4 (A100) comprising derived and/or modified sequence from LASV(Lassa virus/H.sapiens-wt/NGA/2016/ISTH_0009;Clade II)__AVO03571__GPCmut3 (opt5)
aggagagucccgcagucggcguccagcggcucugcuuguucgugugugugucguugcaggccuuauucaagcuuaccaugggccagaucauuaccuucuuucaagaggugccccacgucaucgaagagguuaugaacauugugcugaucgcccucagccugcuugcuauucugaaggggaucuacaauguggccacaugcggacuccugggccuugucuccuuccugcuccugugugggagaucuugcagcacgaccuauaaaggaguguacgaacugcagacacucgagcuggacauggcgucccuuaacaugaccaugccucugucuuguacaaagaauaacagccaucacuauaucaugguuggcaaugaaaccgggcucgagcugacacuuaccaacacguccauuaucaaucauaaauuuugcaaccugucugaugcucacaagaaaaaucucuacgaccaugcccugaugagcauuaucuccaccuuccaccugagcauuccgaacuuuaaucaguaugaggccaugucuugugauuucaacggaggccggaucuccgugcaguacaaucucagccacucuuaugcugucgacgccgcuaaccauugcggcacaauugccaauggggugcugcaaaccuuuaugcgcauggcguggggaggcuccuacaucgcccuugauagcgggaagggaucuugggacuguaucaugacauccuaccaguaucugauuauccagaacaccacgugggaagaucacugccaguucagcagacccuccccuauuggcuaccucgggcugcuuucucaacggacacgcgacaucuauauuagcagacggcgcagaggaaccuuuacauggacccuguccgauagcgagggcaacgaaacccccggcggguacugucucacacgguggaugcugaucgaggcugagcugaagugcuucggaaauacggccguugcuaaauguaacgaaaagcaugacgaggaauuuugcgauaugcuccgccuguucgacuuuaauaaacaggccaucagacggcuuaagaccccugcgcagaugucuauucagcugaucaacaaagccgugaaugcucucauuaacgaucaacugaucaugaagaaucaccuucgcgacauuaugggcauccccuauugcaacuacuccaaguauuguuaccugaaucacacagucaccgggaaaacaagccucccuagaugcugucuggugucuaacggaagcuaccugaaugagacccauuucuccgacgauaucgaacagcaggccgacaacaugauuacggagcuccugcaaaaggaguauaucgaucggcagggcaaaacaccgcuugggcugguggaccucuucgucuuuucuaccagcuucuaccugauuuccaucuuucugcaccuuguuaagauucccacccaucgccacaucacaggaaaaccuugccccaagccucauagacucaaucacaugggcauuuguagcugcggccuguauaaccaccccggggugccggugaaauggaagcggugaggacuaguaauaaggaaacuguaugaaugucugugggcaggaagugaagagauccuucuguaaagguuuuuggaauuaugucugcugaauaauaaacuuuuuugaaauaauaaaucugguagaaaaaugagaucuaaaaaaaaaaaaaaaaaaaaaaaaaaaaaaaaaaaaaaaaaaaaaaaaaaaaaaaaaaaaaaaaaaaaaaaaaaaaaaaaaaaaaaaaaaaaaaaaaaaa

SEQ ID NO: 25937 - RNA, 1785 nt, Artificial Sequence
  mRNA product Design b-4 (A100) comprising derived and/or modified sequence from LASV(Lassa virus/H.sapiens-wt/NGA/2016/ISTH_0017;Clade II)__AVO03567__GPCmut3 (opt5)
aggagagucccgcagucggcguccagcggcucugcuuguucgugugugugucguugcaggccuuauucaagcuuaccaugggccagaucauuaccuucuuucaagaggugccccacgucaucgaagagguuaugaacauugugcugaucgcccucagccugcuugcuauucugaaggggaucuacaauguggccacaugcggacucuucggccuggucuccuuucuucugcucugugggagaucuugcagcacgaccuauaaaggaguguacgaacugcagacacuggagcucgacauggcgucccugaacaugaccaugccucuuucuuguacaaagaauaacagccaucacuauaucaugguuggcaaugaaaccgggcuggagcucacacugaccaacacguccauuaucaaucauaaauucugcaaccuuucugaugcucacaagaaaaaucuguacgaccaugcccucaugagcauuaucuccaccuuucaccugagcauuccgaacuucaaucaguaugaggccaugucuugugauuuuaacggaggcaagaucuccgugcaguacaaucugagccacacauaugcuauugacgccgcuaaccauugcggcaccaucgccaaugggguccuccaaacauucaugcggauggcguggggaggcucuuacaucgcccuggauuccgggaagggaagcugggacuguauuaugaccucuuaccaguaucuuaucauucagaacacgacaugggaagaucacugccaguuuucccgccccagcccuaucggcuaccuggggcuccugucccaaagaacccgggacauuuauaucucucgcagacggcgcggaacauucaccuggacccuuagcgauuccgagggcaacgaaacacccggcggguacugucugacgagauggaugcucaucgaggcugagcugaaaugcuuuggaaauaccgccguggcuaaguguaacgaaaaacaugacgaggaguucugcgauaugcugcggcucuuugacuucaauaagcaggccauucgcagacugaaaaccccugcgcagaugagcauccagcuuauuaacaaggccguuaaugcucugaucaacgaucaacucauuaugaagaaucaucugcgggacaucaugggcauccccuauugcaacuacucuaaauauuguuaccuuaaucacacagugacagggaagaccucccugccucgcugcugucucgucagcaacggaucuuaccugaaugaaacgcacuucagcgacgauauugaacagcaggccgacaacaugaucacagagcugcuccaaaaagaguauauggauagacagggcaagaccccgcuggggcuuguggaccuguuuguguucuccaccucuuuuuaccucauuagcaucuuccugcaccugguccggauucccacacaucgccacguuaucggaaaaccuugccccaagccucauagacuuaaucacaugggcauuuguuccugcggccucuauaaacaccccggggugccggugaaguggaagcggugaggacuaguaauaaggaaacuguaugaaugucugugggcaggaagugaagagauccuucuguaaagguuuuuggaauuaugucugcugaauaauaaacuuuuuugaaauaauaaaucugguagaaaaaugagaucuaaaaaaaaaaaaaaaaaaaaaaaaaaaaaaaaaaaaaaaaaaaaaaaaaaaaaaaaaaaaaaaaaaaaaaaaaaaaaaaaaaaaaaaaaaaaaaaaaaaa

SEQ ID NO: 25938 - RNA, 1785 nt, Artificial Sequence
  mRNA product Design b-4 (A100) comprising derived and/or modified sequence from LASV(Lassa virus/H.sapiens-wt/NGA/2018/ISTH_0959;Clade II)__AVV65099__GPCmut3 (opt5)
aggagagucccgcagucggcguccagcggcucugcuuguucgugugugugucguugcaggccuuauucaagcuuaccaugggccagaucauuaccuucuuucaagaggugccccacgucaucgaagagguuaugaacauugugcugaucgcccucagccugcuugcuauucugaaggggaucuacaauguggucacaugcggacucuucggccugguguccuuucuucugcucugugggagaucuugcagcacgaccuauaaaggaguuuacgaacugcagacacuggagcucgacauggccucccugaacaugaccaugccucuuucuuguacaaagaauaacagccaucacuauaucauggugggcaaugaaaccgggcuggagcucacacugaccaacacguccauuaucaaucauaaauucugcaaccuuucugaugcgcacaagaaaaaucuguacgaccaugcucucaugagcauuaucuccaccuuucaccugagcauuccgaacuucaaucaguaugaggccaugucuugugauuuuaacggaggcaagaucuccguccaguacaaucugagccacgccuaugcuauugacgccgcuaaccauugcggcacaaucgccaauggggugcuccaaaccuucaugcggauggcguggggaggcucuuacaucgcccuggauuccgggaagggaagcugggacuguauuaugacaucuuaccaguaucuuaucauucagaacaccacgugggaagaucacugccaguuuucccgccccagcccuaucggcuaccuggggcuccugucccaaagaacacgggacauuuauaucucucgcagacggcgcggaaccuucacauggacccuuagcgauuccgagggcaacgaaacccccggcggguacugucugacaagauggaugcucaucgaggcugagcugaaaugcuuuggaaauacggccguugcuaaguguaacgaaaaacaugacgaggaguucugcgauaugcugcggcucuuugacuucaauaagcaggccauucgcagacugaaaaccccugcgcagaugagcauccagcuuauuaacaaggccgugaaugcucugaucaacgaucaacucauuaugaagaaucaucugcgggacaucaugggcauccccuauugcaacuacucuaaauauuguuaccuuaaucacacagucaccgggaagacaucccugccucgcugcugucucgugagcaacggaucuuaccugaaugaaacccacuucagcgacgauauugaacagcaggccgacaacaugaucacggagcugcuccaaaaagaguauauugauagacagggcaagacaccgcuggggcuuguggaccuguuugucuucuccaccucuuuuuaccucaucagcauuuuccugcaccugguuaaaauccccacccaucggcacgugauuggaaagccuugccccaaaccucaucgccuuaaucacaugggcaucuguuccugcggccucuauaagcaccccggggugccggucaaguggaaaagaugaggacuaguaauaaggaaacuguaugaaugucugugggcaggaagugaagagauccuucuguaaagguuuuuggaauuaugucugcugaauaauaaacuuuuuugaaauaauaaaucugguagaaaaaugagaucuaaaaaaaaaaaaaaaaaaaaaaaaaaaaaaaaaaaaaaaaaaaaaaaaaaaaaaaaaaaaaaaaaaaaaaaaaaaaaaaaaaaaaaaaaaaaaaaaaaaa

SEQ ID NO: 25939 - RNA, 1785 nt, Artificial Sequence
  mRNA product Design b-4 (A100) comprising derived and/or modified sequence from LASV(LASV003-NIG-2008;Clade II)__AIT17580__GPCmut3 (opt5)
aggagagucccgcagucggcguccagcggcucugcuuguucgugugugugucguugcaggccuuauucaagcuuaccaugggccagaucauuaccuucuuucaagaggugccccacgucaucgaagagguuaugaacauugugcugaucgcccucagccugcuugcuauucugaaggggaucuacaauguggccacaugcggacucuucggccuggucuccuuucuucugcucugugggagaucuugcagcacgaccuauaaaggaguguacgaacugcagacacuggagcucgacauggcgucccugaacaugaccaugccucuuucuuguacaaagaauaacagccaucacuauaucaugguuggcaaugaaaccgggcuggagcucacacugaccaacacguccauuaucaaucauaaauucugcaaccuuucugaugcucacaagaaaaaucuguacgaccaugcccucaugagcauuaucuccaccuuucaccugagcauuccgaacuucaaucaguaugaggccaugucuugugauuuuaacggaggcaagaucuccgugcaguacaaucugagccacacauaugcugucgacgccgcuaaccauugcggcaccauugccaauggggugcuccaaacauucaugcggauggcguggggaggcucuuacaucgcccuggauuccgggaagggaagcugggacuguaucaugaccucuuaccaguaucuuauuauccagaacacgacaugggaagaucacugccaguuuucccgccccagcccuauuggcuaccuggggcuccugucccaaagaacccgggacaucuauauuucucgcagacggcgcggaacauucaccuggacccuuagcgauuccgagagcaacgaaacacccggcggcuacugucugacgagauggaugcucaucgaggcugagcugaaaugcuuugggaauaccgccguugcuaaguguaacgaaaaacaugacgaggaguucugcgauaugcugcggcucuuugacuucaauaagcaggccauccgcagacugaaagcgccugcccagaugucuauucagcuuaucaacaaggcugugaaugcccugauuaacgaucaacucaucaugaagaaucaucugcgggacauuaugggaauccccuauugcaacuacuccaaauauuguuaccuuaaucacacagucaccggccgcacaagccugccuagaugcugucucgugucuaacgggagcuaccugaaugaaacccacuucuccgacgauaucgaacagcaggcugacaacaugauuacggagcugcuccaaaaggaguauauggaucggcagggaaaaacaccgcugggccuuguggaccuguuugucuucucuaccagcuuuuaccucaucuccauuuuccugcaccugguuaagauccccacccaucgccacgugauugggaaaccuugccccaagccucauagacuuaaucacaugggaaucuguagcugcggccucuauaaacaccccggcgugccggucaaguggaagcggugaggacuaguaauaaggaaacuguaugaaugucugugggcaggaagugaagagauccuucuguaaagguuuuuggaauuaugucugcugaauaauaaacuuuuuugaaauaauaaaucugguagaaaaaugagaucuaaaaaaaaaaaaaaaaaaaaaaaaaaaaaaaaaaaaaaaaaaaaaaaaaaaaaaaaaaaaaaaaaaaaaaaaaaaaaaaaaaaaaaaaaaaaaaaaaaaa

SEQ ID NO: 25940 - RNA, 1785 nt, Artificial Sequence
  mRNA product Design b-4 (A100) comprising derived and/or modified sequence from LASV(LASV035-NIG-2009;Clade II)__AIT17588__GPCmut3 (opt5)
aggagagucccgcagucggcguccagcggcucugcuuguucgugugugugucguugcaggccuuauucaagcuuaccaugggccagaucauuaccuucuuucaagaggugccccacgucaucgaagagguuaugaacauugugcugaucgcccucagccugcuugcuauucugaaggggaucuacaauguggccacaugcggacucuucggccuggucuccuuucuucugcucugugggagaucuugcagcacgaccuauaaaggaguguacgaacugcagacacuggagcucgacauggcgucccugaacaugaccaugccucuuucuuguacaaagaauaacagccaucacuauaucaugguuggcaaugaaaccgggcuggagcucacacugaccaacacguccauuaucaaucauaaauucugcaaccuuucugaugcucacaagaaaaaucuguacgaccaugcccucaugagcauuaucuccaccuuucaccugagcauuccgaacuucaaucaguaugaggccaugucuugugauuuuaacggaggcaagaucuccgugcaguacaaucugagccacgcuuaugccgucgacgcugccaaccauugcggcacaauugcgaauggggugcuccaaaccuucaugcggauggccuggggaggcucuuacaucgcucuggauuccgggaagggaagcugggacuguaucaugacaucuuaccaguaucuuauuauccagaacaccacgugggaagaucacugccaguuuucccgccccagcccuauuggcuaccuggggcuccugucccaaagaacacgggacaucuauauuucucgcagacggcgcggaaccuucacauggacccuuagcgauuccgagggcaacgaaacccccggcggguacugucugacaagauggaugcucaucgaggccgagcugaaaugcuuuggaaauacggcuguugccaaguguaacgaaaaacaugacgaggaguucugcgauaugcugcggcucuuugacuucaauaagcaggcgauccgcagacugaaagccccugcucagaugagcauucagcuuaucaacaaggccgugaaugcucugauuaacgaucaacucaucaugaagaaucaucugcgggacauuaugggcauccccuauugcaacuacucuaaauauuguuaccuuaaucacaccgucacagggaagaccucccugccucgcugcugucucgugagcaacggaucuuaccugaaugaaacacacuucagcgacgauaucgaacagcaggccgacaacaugauuaccgagcugcuccaaaaagaguauaucgauagacagggcaagacgccgcuggggcuuguggaccuguuugucuucuccacaucuuuuuaccucauuagcaucuuccugcaccugguuaaaauucccacccaucggcacgugaucggaaagccuugccccaaaccucaucgccuuaaucacaugggcauuuguuccugcggccucuauaagcaccccggggugccggucaaguggaaaagaugaggacuaguaauaaggaaacuguaugaaugucugugggcaggaagugaagagauccuucuguaaagguuuuuggaauuaugucugcugaauaauaaacuuuuuugaaauaauaaaucugguagaaaaaugagaucuaaaaaaaaaaaaaaaaaaaaaaaaaaaaaaaaaaaaaaaaaaaaaaaaaaaaaaaaaaaaaaaaaaaaaaaaaaaaaaaaaaaaaaaaaaaaaaaaaaaa

SEQ ID NO: 25941 - RNA, 1785 nt, Artificial Sequence
  mRNA product Design b-4 (A100) comprising derived and/or modified sequence from LASV(LASV1000-NIG-2009;Clade II)__AIT17782__GPCmut3 (opt5)
aggagagucccgcagucggcguccagcggcucugcuuguucgugugugugucguugcaggccuuauucaagcuuaccaugggccagaucauuaccuucuuucaagaggugccccacgucaucgaagagguuaugaacauugugcugaucgcccucagccugcuugcuauucugaaggggaucuacaauguggccacaugcggacucuucggccuggucuccuuucuucugcucugugggagaucuugcagcacgaccuauaaaggaguguacgaacugcagacacuggagcucgacauggcgucccugaacaugaccaugccucuuucuuguacaaagaauaacagccaucacuauaucaugguuggcaaugaaaccgggcuggagcucacacugaccaacacguccauuaucaaucauaaauucugcaaccuuucugaugcucacaagaaaaaucuguacgaccaugcccucaugagcauuaucuccaccuuucaccugagcauuccgaacuucaaucaguaugaggccaugucuugugauuuuaacggaggcaagaucuccgugcaguacaaucugagccacacauaugcugucgacgccgcuaaccauugcggcaccauugccaauggggugcuccaaacauucaugcggauggcguggggaggcucuuacaucgcccuggauuccgggaagggaagcugggacuguaucaugaccucuuaccaguaucuuauuauccagaacacgacaugggaagaucacugccaguuuucccgccccagcccuauuggcuaccuggggcuccugucccaaagaacccgggacaucuauauuucucgcagacggcgcggaacauucaccuggacccuuagcgauuccgagggcaacgaaacacccggcggguacugucugacgagauggaugcucaucgaggcugagcugaaaugcuuuggaaauaccgccguugcuaaguguaacgaaaaacaugacgaggaguucugcgauaugcugcggcucuuugacuucaauaagcaggccaucaaacgccugaagaccccugcgcagaugagcauucagcuuaucaacaaggccgugaaugcucugauuaacgaucaacucaucaugaaaaaucaccugagagacauuaugggcauccccuauugcaacuacucuaaguauuguuaccuuaaucacacagucacagggaaaaccucccugccucggugcugucucgugagcaacggaucuuaccugaaugaaacgcauuucagcgacgauaucgaacagcaggccgacaacaugauuacagagcugcuccaaaaggaguauaucgaucgccagggcaaaaccccgcuggggcuuguggaccuguuugucuucuccaccucuuuuuaccucauuagcaucuuccugcaccugguuaagauucccacacauagacacguggugggaaaaccuugccccaagccucaucggcuuaaucacaugggcaucuguuccugcggccucuauaagcaccccggggucccggugaaauggaagcgcugaggacuaguaauaaggaaacuguaugaaugucugugggcaggaagugaagagauccuucuguaaagguuuuuggaauuaugucugcugaauaauaaacuuuuuugaaauaauaaaucugguagaaaaaugagaucuaaaaaaaaaaaaaaaaaaaaaaaaaaaaaaaaaaaaaaaaaaaaaaaaaaaaaaaaaaaaaaaaaaaaaaaaaaaaaaaaaaaaaaaaaaaaaaaaaaaa

SEQ ID NO: 25942 - RNA, 1785 nt, Artificial Sequence
  mRNA product Design b-4 (A100) comprising derived and/or modified sequence from LASV(LASV221-NIG-2010;Clade II)__AIT17624__GPCmut3 (opt5)
aggagagucccgcagucggcguccagcggcucugcuuguucgugugugugucguugcaggccuuauucaagcuuaccaugggccagaucauuaccuucuuucaagaggugccccacgucaucgaagagguuaugaacauugugcugaucgcccucagccugcuugcuauucugaaggggaucuacaauguggccacaugcggacucuucggccuggucuccuuucuucugcucugugggagaucuugcagcacgaccuauaaaggaguguacgaacugcagacacuggagcucgacauggcgucccugaacaugaccaugccucuuucuuguacaaagaauaacagccaucacuauaucaugguuggcaaugaaaccgggcuggagcucacacugaccaacacguccauuaucaaucauaaauucugcaaccuuucugaugcucacaagaaaaaucuguacgaccaugcccucaugagcauuaucuccaccuuucaccugagcauuccgaacuucaaucaguaugaggccaugucuugugauuuuaacggaggcaagaucuccgugcaguacaaucugagccacacauaugcuauugacgccgcuaaccauugcggcaccaucgccaaugggguccuccaaacauucaugcggauggcguggggaggcucuuacaucgcccuggauuccgggaagggaagcugggacuguauuaugaccucuuaccaguaucuuaucauucagaacacgacaugggaagaucacugccaguuuucccgccccagcccuaucggcuaccuggggcuccugucccaaagaacccgggacauuuauaucucucgcagacggcgcggaacauucaccuggacccuuagcgauuccgagggcaacgaaacacccggcggguacugucugacgagauggaugcucaucgaggcugagcugaaaugcuuuggaaauaccgccguggcuaaguguaacgaaaaacaugacgaggaguucugcgauaugcugcggcucuuugacuucaauaagcaggccauucgcagacugaaaaccccugcgcagaugagcauccagcuuauuaacaaggccguuaaugcucugaucaacgaucaacucauuaugaagaaucaucugcgggacaucaugggcauccccuauugcaacuacucuaaauauuguuaccuuaaucacacagugacagggaagaccucccugccucgcugcugucucgucagcaacggaucuuaccugaaugaaacgcacuucagcgacgauauugaacagcaggccgacaacaugaucacagagaugcugcaaaaagaguauauggauagacagggcaagaccccgcucgggcugguggaccuuuuuguguucuccaccucuuuuuaccugauuagcaucuuccuccaccuggucaaaauucccacacaucggcacguuaucggaaagccuugccccaaaccucaucgccugaaucacaugggcauuuguuccugcggccuuuauaagcaccccggggugccggugaaguggaaaagaugaggacuaguaauaaggaaacuguaugaaugucugugggcaggaagugaagagauccuucuguaaagguuuuuggaauuaugucugcugaauaauaaacuuuuuugaaauaauaaaucugguagaaaaaugagaucuaaaaaaaaaaaaaaaaaaaaaaaaaaaaaaaaaaaaaaaaaaaaaaaaaaaaaaaaaaaaaaaaaaaaaaaaaaaaaaaaaaaaaaaaaaaaaaaaaaaa

SEQ ID NO: 25943 - RNA, 1785 nt, Artificial Sequence
  mRNA product Design b-4 (A100) comprising derived and/or modified sequence from LASV(LASV237-NIG-2010;Clade II)__AIT17638__GPCmut3 (opt5)
aggagagucccgcagucggcguccagcggcucugcuuguucgugugugugucguugcaggccuuauucaagcuuaccaugggccagaucauuaccuucuuucaagaggugccccacgucaucgaagagguuaugaacauugugcugaucgcccucagccugcuugcuauucugaaggggaucuacaauguggccacaugcggacucuucggccuggucuccuuucuucugcucugugggagaucuugcagcacgaccuauaaaggaguguacgaacugcagacacuggagcucgacauggcgucccugaacaugaccaugccucuuucuuguacaaagaauaacagccaucacuauaucaugguuggcaaugaaaccgggcuggagcucacacugaccaacacguccauuaucaaucauaaauucugcaaccuuucugaugcucacaagaaagaccuguacgaucaugcccucaugagcauuaucuccaccuuucaccugagcauuccgaauuucaaccaguaugaggccaugucuugugacuuuaauggaggcaagaucuccgugcaguacaaccugagccacacauaugcugucgaugccgcuaaucauugcggcaccauugccaacggggugcuccaaacauucaugcggauggcguggggaggcucuuacaucgcccuggacuccgggaagggaagcugggauuguaucaugaccucuuaccaguaucuuauuauccagaauacgacaugggaagaccacugccaguuuucccgccccagcccuauuggcuaccuggggcuccugucccaaagaacccgggauaucuauauuucucgcagacggcgcggaacauucaccuggacccuuagcgacuccgagggcaacgaaacacccggcggguacugucugacgagauggaugcucaucgaggcugagcugaaaugcuuuggaaacaccgccguugcuaaguguaaugaaaaacaugaugaggaguucugcgacaugcugcggcucuuugauuucaacaagcaggccauccgcagacugaaaaccccugcgcagaugagcauucagcuuaucaauaaggccgugaacgcucugauuaaugaccaacucaucaugaagaaccaucugcgggacauuaugggcauccccuauugcaauuacucuaaauauuguuaccuuaaccacacagucacagggaagaccucccugccucgcugcugucucgugagcaauggaucuuaccugaacgaaacgcacuucagcgaugacaucgaacagcaggccgauaauaugauuacagagcugcuccaaaaagaguauauggacagacagggcaagaccccgcuggggcuuguggaucuguuugucuucuccaccucuuuuuaccucaucagcauuuuccugcaccugaucaaaauucccacacaucggcacaucaccggaaagccuugccccaaaccucaucgccuuaaccacaugggcauuuguuccugcggccucuauaagcaccccgggguuccggugaaguggaaaagaugaggacuaguaauaaggaaacuguaugaaugucugugggcaggaagugaagagauccuucuguaaagguuuuuggaauuaugucugcugaauaauaaacuuuuuugaaauaauaaaucugguagaaaaaugagaucuaaaaaaaaaaaaaaaaaaaaaaaaaaaaaaaaaaaaaaaaaaaaaaaaaaaaaaaaaaaaaaaaaaaaaaaaaaaaaaaaaaaaaaaaaaaaaaaaaaaa

SEQ ID NO: 25944 - RNA, 1785 nt, Artificial Sequence
  mRNA product Design b-4 (A100) comprising derived and/or modified sequence from LASV(LASV253-NIG-2011;Clade II)__AIT17670__GPCmut3 (opt5)
aggagagucccgcagucggcguccagcggcucugcuuguucgugugugugucguugcaggccuuauucaagcuuaccaugggccagaucauuaccuucuuucaagaggugccccacgucaucgaagagguuaugaacauugugcugaucgcccucagccugcuugcuauucugaaggggaucuacaauguggccacaugcggacucuucggccuggucuccuuucuucugcucugugggagaucuugcagcacgaccuauaaaggaguguacgaacugcagacacuggagcucgacauggcgucccugaacaugaccaugccucuuucuuguacaaagaauaacagccaucacuauaucaugguuggcaaugaaaccgggcuggagcucacacugaccaacacguccauuaucaaucauaaauucugcaaccuuucugaugcucacaagaaaaaucuguacgaccaugcccucaugagcauuaucuccaccuuucaccugagcauuccgaacuucaaucaguaugaggccaugucuugugauuuuaacggaggcaagaucuccgugcaguacaaucugagccacacauaugcugucgacgccgcuaaccauugcggcaccauugccaauggggugcuccaaacauucaugcggauggcguggggaggcucuuacaucgcccuggauuccgggaagggaagcugggacuguaucaugaccucuuaccaguaucuuauuauccagaacacgacaugggaagaucacugccaguuuucccgccccagcccuauuggcuaccuggggcuccugucccaaagaacccgggacaucuauauuucucgcagacggcgcggaacauucaccuggacccuuagcgauuccgagggcaacgaaacacccggcggguacugucugacgagauggaugcucaucgaggcugagcugaaaugcuuuggaaauaccgccguugcuaaguguaacgaaaaacaugacgaggaguucugcgauaugcugcggcucuuugacuucaauaagcaggccauccgcagacugaaagcgccugcccagaugagcauucagcuuaucaacaaggcugugaaugcccugauuaacgaucaacucaucaugaagaaucaucugcgggacauuaugggcauccccuauugcaacuacucuaaauauuguuaccuuaaucacacagucaccgggcgcacaucccugccuagaugcugucucgugagcaacggaucuuaccugaaugaaacccacuucagcgacgauaucgaacagcaggcugacaacaugauuacggagcugcuccaaaaggaguauaucgaucggcagggcaaaacaccgcuggggcuuguggaccuguuugucuucuccaccucuuuuuaccucauuagcaucuuccugcaccugguuaagauucccacccaucgccacaucauuggaaaaccuugccccaagccucauagacuuaaucacaugggcaucuguuccugcggccucuauaaacaccccggggugccggugaaguggaagcggugaggacuaguaauaaggaaacuguaugaaugucugugggcaggaagugaagagauccuucuguaaagguuuuuggaauuaugucugcugaauaauaaacuuuuuugaaauaauaaaucugguagaaaaaugagaucuaaaaaaaaaaaaaaaaaaaaaaaaaaaaaaaaaaaaaaaaaaaaaaaaaaaaaaaaaaaaaaaaaaaaaaaaaaaaaaaaaaaaaaaaaaaaaaaaaaaa

SEQ ID NO: 25945 - RNA, 1785 nt, Artificial Sequence
  mRNA product Design b-4 (A100) comprising derived and/or modified sequence from LASV(LASV254-NIG-2011;Clade II)__AIT17674__GPCmut3 (opt5)
aggagagucccgcagucggcguccagcggcucugcuuguucgugugugugucguugcaggccuuauucaagcuuaccaugggccagaucauuaccuucuuucaagaggugccccacgucaucgaagagguuaugaacauugugcugaucgcccucagccugcuugcuauucugaaggggaucuacaauguggccacaugcggacucuucggccuggucuccuuucuucugcucugugggagaucuugcagcacgaccuauaaaggaguguacgaacugcagacacuggagcucgacaugaccaaccugaauaugacaaugccucuuuccuguaccaagaacaauucucaucacuauaucaugguuggcaacgaaacagggcuggagcucacccugacgaauaccagcauuaucaaccauaaauucugcaaucuuuccgaugcgcacaagaaaaaccuguacaaucaugcucucaugucuauuaucagcacauuucaccuguccauuccgaacuucaaucaguaugaggccaugagcugugacuuuaacggaggcaagaucucugugcaguacaaucugucccacagcuaugccgucgaugcugccaaccauugcggcaccauugcuaacggggugcuccaaacauucaugcggauggccuggggaggcucuuacaucgcgcuggacuccgggaagggaaauugggauuguaucaugaccagcuaccaguaucuuauuauccagaacacgacaugggaagaccacugccaguuuucucgccccuccccuauuggcuaccuggggcuccugagccaaagaacccgggauaucuauauuucccgcagacggcgcggaacauucaccuggacccuuucugacagcgagggcaaugaaacacccggcggguacugucugacgagauggaugcucaucgaggccgagcugaaaugcuuuggaaacaccgcuguugccaaguguaaugaaaaacaugaugaggaguucugcgacaugcugcggcucuuugauuucaacaagcaggcuauccgcagacugaaaaccccugcccaggcgaauauucagcuuaucaacaaggccgugaaugcucugauuaacgaccaacucaucaugaagaaucaucugcgggauauuaugggcauccccuauugcaacuacuccaaauauuguuaccuuaaucacacagucacagggaagaccagccugccucgcugcugucucgugucuaacggauccuaccugaaugaaacgcacuucagcgacgacaucgaacagcaggccgauaacaugauuacagagcugcuccaaaaagaguauauggacagacagggcaagaccccgcuggggcuuguggaucuguuugucuucucuaccagcuuuuaccucaucuccauuuuccugcaccugguuaaaauccccacacaucggcacgugauuggaaagccuugccccaaaccucaucgccuuaaccacaugggcaucuguucuugcggccucuauaagcaccccggggugccggucaaguggaaaagaugaggacuaguaauaaggaaacuguaugaaugucugugggcaggaagugaagagauccuucuguaaagguuuuuggaauuaugucugcugaauaauaaacuuuuuugaaauaauaaaucugguagaaaaaugagaucuaaaaaaaaaaaaaaaaaaaaaaaaaaaaaaaaaaaaaaaaaaaaaaaaaaaaaaaaaaaaaaaaaaaaaaaaaaaaaaaaaaaaaaaaaaaaaaaaaaaa

SEQ ID NO: 25946 - RNA, 1785 nt, Artificial Sequence
  mRNA product Design b-4 (A100) comprising derived and/or modified sequence from LASV(Nig08-A19;Clade III)__ADU56618__GPCmut3 (opt5)
aggagagucccgcagucggcguccagcggcucugcuuguucgugugugugucguugcaggccuuauucaagcuuaccaugggccagaucgugaccuucuuucaagaggucccccacguuauugaagaggugaugaacaucgugcugauugcccucagcauccuggcuauucuuaaggggcuguacaauaucgccacaugcggacucaucggccuggucacguuccuucugcucuccgggagaucuuguagcaugaccuauaaaggaguguacgaacugcagacacuggagcucaacaugaauacccugaacaugacaaugccucuuuccugcaccaagaauaacucucaucacuauauuaugguuggcaaugaaacagggcuggagcucacccugacgaacaccagccuucugcaucacaaauuuuguaaucucuccgacgcgcauaagaaaaaccuguacgaucacacacugaugucuaucauuagcaccuuccaccucuccaucccgaauuuuaaccaguaugaggcuaugagcugcgacuucaauggaggcaagauuacagugcaguacaaccugucucauuccuaugccaucgaugccgcuaaucacuguggcaccgucgccaacggggugcuucaaacguuuaugcggauggcuuggggaggcagcuacauugcccuggacucugggcgcggaaagugggauugcaucaugacauccuaccaguaucucaucauucagaacaccacaugggaagaccauugucaguucagcagacccucuccuaucggcuaccuggggcuucugucccaacggacccgcgauauuuauaucagcagacggcgcagaggaaccuuuacauggacgcucuccgacucugagggcaaugaaacccccggcggguacugccugacacgguggaugcugauugaggcggagcucaaauguuucggaaacaccgccguugcuaagugcaaugaaaaacacgaugaggaauuuugugacaugcugcgccuuuucgauuuuaacaagcaggccaucagacggcugaaagcuccugcccagaugagcauccagcucauuaauaaggcggugaacgcccugaucaaugaccaacuuauuaugaagaaccaucugcgcgauaucaugggcauucccuauugcaauuacuccaaauauugcuaccucaaccacacaagcaccgggagaacgucucugccucgguguugccuggucuccaauggaagcuaccucaacgagacacacuucucugacgacaucgaacagcaggcugauaauaugaucaccgagaugcugcaaaaggaguaucuugaccgccagggcaaaaccccgcuggggcucguggaucuguucguguuuagcacauccuucuaccugauuucuaucuuucuucaucucgucaagauucccacccacagacauaucguuggaaaaccuugucccaagccucaccggcugaaccacaugggcauuugcagcuguggccuguauaaacagcccggggugccggugagauggaagcgcugaggacuaguaauaaggaaacuguaugaaugucugugggcaggaagugaagagauccuucuguaaagguuuuuggaauuaugucugcugaauaauaaacuuuuuugaaauaauaaaucugguagaaaaaugagaucuaaaaaaaaaaaaaaaaaaaaaaaaaaaaaaaaaaaaaaaaaaaaaaaaaaaaaaaaaaaaaaaaaaaaaaaaaaaaaaaaaaaaaaaaaaaaaaaaaaaa

SEQ ID NO: 25947 - RNA, 1788 nt, Artificial Sequence
  mRNA product Design b-4 (A100) comprising derived and/or modified sequence from LASV(G1180-SLE-2010;Clade IV)__AIT17168__GPCmut3 (opt5)
aggagagucccgcagucggcguccagcggcucugcuuguucgugugugugucguugcaggccuuauucaagcuuaccaugggccagaucgugaccuucuuucaagaggucccccacguuauugaagaggugaugaacaucgugcugauugcccucagcauccuggcuguccuuaaggggcuguacaauuucgccacaugcggacucgugggccugcuuacguuucugcuccugugugggagauccugcaccgcgucucgguauaaaggaguuuacgaacugcagacacucgagcugaacauggaaacccuuaauaugacaaugccucugagcuguaccaagaacaauucccaucacuauauuauggugggcaacgagacagggcucgagcugacccuuacgaauaccucuaucaucaaccauaaauucugcaaucugagcgacgcucacaagaaaaaccucuacgaucaugcccugauguccauuaucucuacauuucaccugagcauuccgaauuucaaccaguaugaagccauguccugugacuuuaauggaggcaagaucagcguccaguacaaccucucucacuccuaugcuggcgaugccgcuaaucauugcgggaccguggccaacggaguucugcaaacauucaugcgcauggcguggggcgggagcuacauugcccuugacucuggacacggcuccugggauuguaucaugaccagcuaccaguaucugauuauccagaacacgacaugggaggaccauugccaguuuucuagacccuccccuaucggguaccucggacugcuuagccaacggacccgcgauauuuauaucuccagacggcgcagaggcacauucaccuggacccugucugacagcgaaggcaaggauacacccgggggauacugucucacgcgguggaugcugauugaggcugagcugaaaugcuuuggcaauaccgccguggcuaaguguaacgaaaaacacgacgaggaguucugcgauaugcuccgccuguuugacuucaauaagcaggccauccagagacuuaaagcgccugcccagauguccauucaacugaucaacaaggcugucaaugcccucaucaacgaucagcugauuaugaagaaucaccuucgggacaucauggggauucccuauugcaacuacagcaaauauuguuaccugaaucauacaaccacaggaaagaccucucucccuaaaugcugucugguguccaacggcagcuaccugaaugaaacgcacuucucugacgauaucgaacagcaagcugacaacaugauuacagagaugcuccagaaggaguauauggaacgccaggggaaaaccccgcugggacuuguggaucuguuugucuucagcaccuccuuuuaccucaucucuaucuuccugcaucugguuaagauucccacacacagacauaucgugggcaaaagcugcccuaagccccaccggcuuaaucacaugggcauuuguuccugcgggcucuauaagcagccuggagugcccgucaaauggaagcgcugaggacuaguaauaaggaaacuguaugaaugucugugggcaggaagugaagagauccuucuguaaagguuuuuggaauuaugucugcugaauaauaaacuuuuuugaaauaauaaaucugguagaaaaaugagaucuaaaaaaaaaaaaaaaaaaaaaaaaaaaaaaaaaaaaaaaaaaaaaaaaaaaaaaaaaaaaaaaaaaaaaaaaaaaaaaaaaaaaaaaaaaaaaaaaaaaa

SEQ ID NO: 25948 - RNA, 1788 nt, Artificial Sequence
  mRNA product Design b-4 (A100) comprising derived and/or modified sequence from LASV(G1442-SLE-2011;Clade IV)__AIT17180__GPCmut3 (opt5)
aggagagucccgcagucggcguccagcggcucugcuuguucgugugugugucguugcaggccuuauucaagcuuaccaugggccagaucgugaccuucuuucaagaggucccccacguuauugaagaggugaugaacaucgugcugauugcccucagcauccuggcuguccuuaaggggcuguacaauguggccacaugcggacucauuggccugguuacguuccuucugcucugugggagauccugcaccacaacccuguauaaaggaguguacgaacugcagacacucgagcugaacauggaaacccuuaauaugacaaugccucugucuuguaccaagaacaauagccaucacuauauccgggucggcaacgagacggggcucgagcugacccuuacaaauaccuccaucauuaaccauaaauuuugcaaucugucugacgcgcacaagaaaaaccucuacgaucaugcucugaugagcaucauuuccacauuccaccugucuaucccgaauuuuaaccaguaugaagccaugagcugugacuucaauggaggcaagauuuccgugcaguacaaccucagccacucuuaugccggcgaugcugccaaucauugcgggaccguugcuaacggagugcugcaaacguuuaugcgcauggccuggggcggguccuacaucgcgcuugacagcggaagaggcaacugggauuguauuaugacaucuuaccaguaucugaucauccagaauaccacaugggacgaucacugccaguucucccggcccagcccuauuggguaccucggacugcuuucucaacgcaccagagacgucuauaucucccggcgcagacggggcaccuuuacauggacgcugagcgauuccgagggcaaggacacccccgggggauacugucucacacgcuggaugcugauugaagccgagcugaaaugcuucggcaacaccgcuguggccaaguguaaugagaaacaugaugaagaguuuugcgacaugcucagacuguucgauuuuaacaagcaggcuauccagcggcuuaaagccccugcgcagaugucuauucaacugaucaauaaggccgugaacgcucucaucaaugaccagcugauuaugaagaaccaccuucgcgacaucauggggauucccuauugcaauuacagcaaauauuguuaccugaacaauacagccaccggaaagacgucccucccuaaaugcugucugaucagcaacggcucuuaccugaaugaaacacacuucuccgaugacauugagcaggaagcugauaacaugaucaccgagaugcuccaaaaggaguauauggaaagacaggggaaaaccccgcugggacuugucgaccuguucguuuuuagcacaucuuucuaccucaucagcauuuuucugcaucuggugaagauccccacccaccggcauauugugggcaaauccugcccuaagccccaccgccuuaaucauaugggcaucuguucuugcgggcucuauaagcagccuggaguccccgugagauggaaacggugaggacuaguaauaaggaaacuguaugaaugucugugggcaggaagugaagagauccuucuguaaagguuuuuggaauuaugucugcugaauaauaaacuuuuuugaaauaauaaaucugguagaaaaaugagaucuaaaaaaaaaaaaaaaaaaaaaaaaaaaaaaaaaaaaaaaaaaaaaaaaaaaaaaaaaaaaaaaaaaaaaaaaaaaaaaaaaaaaaaaaaaaaaaaaaaaa

SEQ ID NO: 25949 - RNA, 1788 nt, Artificial Sequence
  mRNA product Design b-4 (A100) comprising derived and/or modified sequence from LASV(G3010-SLE-2013;Clade IV)__AIT17344__GPCmut3 (opt5)
aggagagucccgcagucggcguccagcggcucugcuuguucgugugugugucguugcaggccuuauucaagcuuaccaugggccagaucgugaccuucuuucaagaggucccccacguuauugaagaggugaugaacaucgugcugauugcccucagcauccuggcuguccuuaaggggcuguacaauuucgccacaugcggacucgugggccugguuacguuucuucugcucugugggagauccugcaccacaucucuguauaaaggaguguacgaacugcagacccucgagcugaacauggaaacacuuaauaugaccaugccucugagcuguacaaagaacaauucccaucacuauauuauggucggcaacgagaccgggcucgagcugacgcuuaccaauacaucuaucaucaaccauaaauucugcaaucugagcgacgcgcacaagaaaaaccucuacaaucaugcucugauguccauuaucucuaccuuucaccugagcauuccgaacuucaaucaguaugaagccauguccugugauuuuaacggaggcaagaucagcgugcaguacaaucucucucacuccuaugccggcgacgcugccagccauugcgggacaguugcuaacggagugcugcaaaccuucaugcggauggccuggggcgggucuuacauugcgcuugauuccggauacggcaagugggacuguaucaugacgagcuaucaguaccugauuauccagaacacaaccugggaggaucacugccaguuuucucgccccuccccuaucggguaucucggacugcuuagccaaagaacacgggacauuuacaucucccgcagacggcgcggcaccuucaccuggacacugucugauagcgaaggcaaagacacgcccgggggauauugucucaccagauggaugcugauugaggccgagcugaagugcuuuggcaauacagcugucgccaaauguaacgaaaagcaugaugaggaguucugcgacaugcuccggcuguuugauuucaauaaacaggcuauccagcgccuuaagaccccugcccagauguccauucaacugaucaacaaggcggugaaugcccucaucaacgaccagcugauuaugaaaaaucaccuuagagauaucauggggauucccuacugcaacuauagcaaguacuguuaccugaaucacacaaccacgggaaaaacaucucucccuaagugcugucugguguccaacggcagcuaucugaaugaaacccauuucucugacgacaucgaacagcaagcugauaacaugauuaccgagaugcuccagaaagaguacauggaacggcaggggaagacaccgcugggacuugucgaccuguuuguuuucagcaccuccuuuuaucucaucucuaucuuccugcaccuggugaaaauucccacacaucgccacaucgugggcaagagcugcccuaagccccauagacuuaaucacaugggcauuuguuccugcgggcucuacaaacagccuggaguccccgugcgguggaagcgcugaggacuaguaauaaggaaacuguaugaaugucugugggcaggaagugaagagauccuucuguaaagguuuuuggaauuaugucugcugaauaauaaacuuuuuugaaauaauaaaucugguagaaaaaugagaucuaaaaaaaaaaaaaaaaaaaaaaaaaaaaaaaaaaaaaaaaaaaaaaaaaaaaaaaaaaaaaaaaaaaaaaaaaaaaaaaaaaaaaaaaaaaaaaaaaaaa

SEQ ID NO: 25950 - RNA, 1788 nt, Artificial Sequence
  mRNA product Design b-4 (A100) comprising derived and/or modified sequence from LASV(G502-SLE-2009;Clade IV)__AIT17126__GPCmut3 (opt5)
aggagagucccgcagucggcguccagcggcucugcuuguucgugugugugucguugcaggccuuauucaagcuuaccaugggccagaucgugaccuucuuucaagaggucccccacguuauugaagaggugaugaacaucgugcugauugcccucagcauccuggcuguccuuaaggggcuguacaauuucgccacaugcggacucgugggccugcuuacguuucugcuccugugugggagauccugcaccacaggacuguauaaaggcguuuacgaacuccagacccuggagcuuaacauggaaacacugaauaugaccaugccucucucuuguacaaagaacaauagccaucacuauauuaugguggggaacgagaccggacuggagcuuacgcugaccaauacauccaucaucaaccauaaauucugcaaucucucugacgcgcacaagaaaaaccuguacgaucaugcucugaugagcauuaucuccaccuuucaccucucuauuccgaauuucaaccaguaugaagccaugagcugugacuuuaauggcggcaagaucuccguccaguacaaccugagccacucuuaugccggggaugcugccgaccauugcggaacaguggcuaauggcguucuucaaaccuucaugcggauggccuggggaggguccuacauugcgcuggauagcggccgcgggagaugggacuguaucaugacgucuuaccaguaucucauuauccagaacacaaccugggaggaucacugccaguuuucccggcccagcccuaucggauaccugggccuucugucucaacgcacaagagacauuuauaucucccggcgcagacggggcaccuucaccuggacacucagcgauuccgaagggaaggacacgcccggaggcuacugucugacccgcuggaugcugauugaggccgagcucaaaugcuuugggaacacagcuguggccaaguguaaugaaaaacaugaugaggaguucugcgacaugcugagacuuuuugauuucaacaagcaggcuauccagcggcugaaagccccugcgcagaugucuauucaacucaucaauaaggccgucaacgcucugaucaaugaccagcuugugaugaagaaccaucugcgcgacauuaugggaauccccuauugcaauuacagcagauauuguuaccucaaccacaccacaaccggccggacgucccugccuaaaugcugucuggugagcaaugggucuuaccucaacgaaacacacuucuccgaugacauugaacagcaagccgauaauaugaucaccgagaugcugcagaaggaguauauggaacgccagggaaaaaccccgcuuggccuggucgaccucuuuguuuucagcacaucuuuuuaccugauuagcaucuuccugcaccuugugaagauccccacccauagacacauugugggcaaauccugcccuaagccccaucggcucaaccacauggggaucuguucuugcggacuguauaaacagccuggcguccccgugaaguggaagagaugaggacuaguaauaaggaaacuguaugaaugucugugggcaggaagugaagagauccuucuguaaagguuuuuggaauuaugucugcugaauaauaaacuuuuuugaaauaauaaaucugguagaaaaaugagaucuaaaaaaaaaaaaaaaaaaaaaaaaaaaaaaaaaaaaaaaaaaaaaaaaaaaaaaaaaaaaaaaaaaaaaaaaaaaaaaaaaaaaaaaaaaaaaaaaaaaa

SEQ ID NO: 25951 - RNA, 1788 nt, Artificial Sequence
  mRNA product Design b-4 (A100) comprising derived and/or modified sequence from LASV(G733-SLE-2010;Clade IV)__AIT17154__GPCmut3 (opt5)
aggagagucccgcagucggcguccagcggcucugcuuguucgugugugugucguugcaggccuuauucaagcuuaccaugggccagaucgugaccuucuuucaagaggucccccacguuauugaagaggugaugaacaucgugcugauugcccucagcauccuggcuguccuuaaggggcuguacaauuucgccacaugcggaauugugggccucguuuccuuucugcuucugugugggagaucuugcacgaccagccucuauaaaggaguguacgaacugcagacacuggagcucaacauggaaacccugaauaugacaaugccucuuuccuguaccaagaacaauucucaucacuauaucauggucggcaacgagacagggcuggagcucacccugacgaauaccagcaucauuaaccauaaauucugcaaucuuuccgacgcgcacaagaaaaaccuguacgaucaugcucucaugucuaucauuagcacauuucaccuguccaucccgaauuucaaccaguaugaagccaugagcugugacuuuaauggaggcaagauuucugugcaguacaaccugucccacagcuaugccggcgaugcugccaaucauugcgggaccaucgcuaacggaguucuccaaacauucaugcggauggccuggggcgggucuuacauugcgcuggacuccggacgcgauagaugggacuguaucaugaccagcuaccaguaucuuaucauucagaacacgacaugggaggaucacugccaguuuucucggcccuccccuaucggcuaccuggggcuccugagccaacgcaccagagacauuuauaucucccggcgcagacggggaacauucaccuggacccuuucugauagcgaaggcaaggacacacccggcggguacugucugacgcgcuggaugcucauugaggccgagcugaaaugcuuuggaaauaccgcuguggccaaguguaacgaaaaacaugaugaggaguucugcgacaugcugagacucuuugauuucaauaagcaggcuauccagcggcugaaagccccugcgcagauguccauccaacuuauuaacaaggccgucaaugcucugaucaacgaccagcucauuaugaagaaucaucugcgcgacaucaugggcauucccuauugcaacuacagcaaauauuguuaccuuaaucacacaaccacagggaagaccucucugccuaaaugcugucucguguccaacggaagcuaccugaaugaaacgcacuucucugaugacaucgaacagcaagccgauaacaugaucacagagaugcugcagaaggaguauauggaaagacagggcaaaaccccgcucgggcugguggaccuuuuugucuucagcaccuccuuuuaccugauuucuaucuuccuccaccugguuaagauucccacacaucggcacguggugggaaaaagcugcccuaagccccaucgccugaaucacaugggcaucuguuccugcggccuuuaugggcagccuggaguccccgugaaguggaaaagaugaggacuaguaauaaggaaacuguaugaaugucugugggcaggaagugaagagauccuucuguaaagguuuuuggaauuaugucugcugaauaauaaacuuuuuugaaauaauaaaucugguagaaaaaugagaucuaaaaaaaaaaaaaaaaaaaaaaaaaaaaaaaaaaaaaaaaaaaaaaaaaaaaaaaaaaaaaaaaaaaaaaaaaaaaaaaaaaaaaaaaaaaaaaaaaaaa

SEQ ID NO: 25952 - RNA, 1788 nt, Artificial Sequence
  mRNA product Design b-4 (A100) comprising derived and/or modified sequence from MOPV/LASV reassortant(IGS-1;Clade IV)__AFY05576__GPCmut3 (opt5)
aggagagucccgcagucggcguccagcggcucugcuuguucgugugugugucguugcaggccuuauucaagcuuaccaugggccagaucgugaccuucuuucaagaggucccccacguuauugaagaggugaugaacaucgugcugauugcccucagcguccuggcugugcuuaaggggcuguacaauuucgccacaugcggacucguuggccuggugacguuucuucugcucugugggagauccugcaccacaucucuguauaaaggagucuacgaacugcagacccucgagcugaacauggaaacacuuaauaugaccaugccucugagcuguacaaagaacaauucccaucacuauaucauggugggcaacgagaccgggcucgagcugacgcuuaccaauacaucuauuaucaaccauaaauucugcaaucugagcgacgcgcacaagaaaaaccucuacgaucaugcucugauguccaucauuucuaccuuucaccugagcaucccgaauuucaaccaguaugaagccauguccugugacuuuaauggaggcaagauuagcguucaguacaaccucucucacuccuaugccggcgaugcugccaaucauugcgggacaguggcuaacggaguccugcaaaccuucaugcggauggccuggggcgggagcuacaucgcgcuugacucuggacgcggcaacugggauuguauuaugacguccuaccaguaucugaucauucagaauacaaccugggaggaccacugccaguuuagcagacccucuccuaucggguaccucggacugcuuucccaacggacacgcgauaucuauauuagcagacggcgcagaggcaccuucaccuggacacuguccgacucugaaggcgaggauacgcccgggggauacugucucacccgguggaugcugaucgaggccgaacugaagugcuuuggcaacacagcuguggccaaauguaaugagaagcaugacgaagaguucugcgauaugcuccgccuguuugacuucaacaaacaggcuauucagagacuuaaggccccugcgcagaugagcauccaacugauuaauaaagccgugaacgcucucaucaaugaucagcugaucaugaagaaccaccuucgggacauuauggggauccccuauugcaauuacuccaaguauuguuaccugaaccacaccacaaccggacgcacgagccucccuaaaugcugucuggucucuaauggcuccuaccugaacgaaacacauuucagcgacgauauugagcagcaagccgacaauaugaucaccgagaugcuccagaaggaauauauggagagacaggggaaaaccccgcugggacuuguugaucuguuuguguucucuaccagcuuuuaccucauuuccaucuuccugcaccuggugaagauccccacacaucggcacauugucggcaaaucuugcccuaagccccaucgccuuaaccacaugggcaucuguagcugcgggcucuauaaacagccuggagugcccguuaaguggaagagaugaggacuaguaauaaggaaacuguaugaaugucugugggcaggaagugaagagauccuucuguaaagguuuuuggaauuaugucugcugaauaauaaacuuuuuugaaauaauaaaucugguagaaaaaugagaucuaaaaaaaaaaaaaaaaaaaaaaaaaaaaaaaaaaaaaaaaaaaaaaaaaaaaaaaaaaaaaaaaaaaaaaaaaaaaaaaaaaaaaaaaaaaaaaaaaaaa

SEQ ID NO: 25953 - RNA, 1788 nt, Artificial Sequence
  mRNA product Design b-4 (A100) comprising derived and/or modified sequence from LASV(LM765-SLE-2012;Clade IV)__AIT17814__GPCmut3 (opt5)
aggagagucccgcagucggcguccagcggcucugcuuguucgugugugugucguugcaggccuuauucaagcuuaccaugggccagaucgugaccuucuuucaagaggucccccacguuauugaagaggugaugaacaucgugcugauugcccucagcauccuggcuguccuuaaggggcuguacaauuucgccacaugcggacucgugggccugguuacguuucuucugcucugugggagauccugcaccacaucucuguauaaaggaguguacgaacugcagacccucgagcugaacauggaaacacuuaauaugaccaugccucugagcuguacaaagaacaauucccaucacuauauuauggucggcaacgagaccgggcucgagcugacgcuuaccaauacaucuaucaucgaccauaaauucugcaaccugagcgaugcgcaccggaagaaucucuacgaccaugcucugauguccauuaucucuaccuuucaccugagcauuccgaacuucaaucaguaugaagccauguccugugauuuuaacggaggcaaaaucagcgugcaguacaaucucucucacuccuaugccaaggacgcugccgaucauugcggcacaguugcuaacggggugcugcaaaccuucaugcgcauggccuggggaggcagcuacauugcgcuugacucugggagaggacggugggauuguaucaugacguccuaccaguaucugauuauccagaauacaaccugggaggaccacugccaguuuagccgccccucuccuaucggcuaccucgggcugcuuucccaaagaacacgggauauuuauaucagccgcagacggcgcggaaccuucaccuggacacuguccgacucugaaggcaaggauacgcccggcggguacugucucaccagauggaugcugauugaggccgagcugaaaugcuuuggaaacacagcugucgccaaguguaacgaaaaacaugacgaggaguucugcgauaugcuccggcuguuugacuucaauaagcaggcuauccagcgccuuaaagccccugcgcagaugagcauucaacugaucaacaaggccgugaaugcucucaucaacgaccagcugauuaugaagaaucaccuuagagauaucaugggcauucccuauugcaacuacuccaaauauuguuaccugaaucacaccacaaccgggaagacgagccucccuaaaugcugucuggugucuaacggauccuaccugaaugaaacacauuucagcgacgauaucgaacagcaagccgacaacaugauuaccgagaugcuccagaaggaguauauggaacggcagggcaaaaccccgcuggggcuugucgaucuguuuguuuucucuaccagcuuuuaccucaucuccaucuuccugcaccuggugaagauucccacacaucgccacaucgugggaaaaccuugccccaagccucauagacuuaaucacaugggcauuuguucuugcggccucuauaagcagcccggggucccggugaaauggaagcggugaggacuaguaauaaggaaacuguaugaaugucugugggcaggaagugaagagauccuucuguaaagguuuuuggaauuaugucugcugaauaauaaacuuuuuugaaauaauaaaucugguagaaaaaugagaucuaaaaaaaaaaaaaaaaaaaaaaaaaaaaaaaaaaaaaaaaaaaaaaaaaaaaaaaaaaaaaaaaaaaaaaaaaaaaaaaaaaaaaaaaaaaaaaaaaaaa

SEQ ID NO: 25954 - RNA, 1788 nt, Artificial Sequence
  mRNA product Design b-4 (A100) comprising derived and/or modified sequence from LASV(LM776-SLE-2012;Clade IV)__AIT17824__GPCmut3 (opt5)
aggagagucccgcagucggcguccagcggcucugcuuguucgugugugugucguugcaggccuuauucaagcuuaccaugggccagaucgugaccuucuuucaagaggucccccacguuauugaagaggugaugaacaucgugcugauugcccucagcauccuggcuguccuuaaggggcuguacaauuucgccacaugcggacucgugggccugguuacguuucuucugcucugugggagauccugcaccacaucuguguauaaaggagucuacgaacugcagacccuggagcucaacauggaaacacugaauaugaccaugccucuuagcuguacaaagaacaauucccaucacuauauuauggugggcaacgagaccgggcuggagcucacgcugaccaauacaucuaucaucaaccauaaauucugcaaucuuagcgacgcgcacaagaaaaaccuguacgaucaugcucucauguccauuaucucuaccuuucaccugagcauuccgaauuucaaccaguaugaagccauguccugugacuuuaauggaggcaagaucagcguucaguacaaccugucucacuccuaugccggcgaugcugccaaucauugcgggacaguggcuaacggaguccuccaaaccuucaugcggauggccuggggcgggagcuacauugcgcuggacucuggacacggcaagugggauuguaucaugacguccuaccaguaucuuauuauccagaacacaaccugggaggaccauugccaguuuagccgccccucuccuaucggguaccugggacuccugucccaaagaacacgggauauuuauaucagccgcagacggcgcggcaccuucaccuggacacuuuccgacucugaaggcaaagauacgcccgggggauacugucugaccagauggaugcucauugaggccgagcugaagugcuuuggcaauacagcuguggccaaauguaacgaaaagcacgacgaggaguucugcgauaugcugcggcucuuugacuucaauaaacaggcuauccagcgccugaaggccccugcgcagaugagcauucaacuuaucaacaaggccgugaaugcucugaucaacgaucagcucauuaugaaaaaucaccugagagacaucauggggauucccuauugcaacuacuccaaguauuguuaccuuaaucauaccacaaccggaaaaacgagccugccuaagugcugucucgucucuaacggcuccuaccugaaugaaacacacuucagcgacgauaucgaacagcaagccgacaacaugauuaccgagaugcugcagaaagaguauauggaacggcaggggaagaccccgcucggacugguugaucuuuuuguguucucuaccagcuuuuaccugaucuccaucuuccuccaucuggugaaaauucccacacaccgccauaucgucggcaagucuugcccuaagccccacagacugaaucacaugggcauuuguagcugcgggcuuuauaaacagccuggagugcccguucgguggaagcgcugaggacuaguaauaaggaaacuguaugaaugucugugggcaggaagugaagagauccuucuguaaagguuuuuggaauuaugucugcugaauaauaaacuuuuuugaaauaauaaaucugguagaaaaaugagaucuaaaaaaaaaaaaaaaaaaaaaaaaaaaaaaaaaaaaaaaaaaaaaaaaaaaaaaaaaaaaaaaaaaaaaaaaaaaaaaaaaaaaaaaaaaaaaaaaaaaa

SEQ ID NO: 25955 - RNA, 1788 nt, Artificial Sequence
  mRNA product Design b-4 (A100) comprising derived and/or modified sequence from LASV(Mad39;Clade IV)__ANH09722__GPCmut3 (opt5)
aggagagucccgcagucggcguccagcggcucugcuuguucgugugugugucguugcaggccuuauucaagcuuaccaugggccagaucgugaccuucuuucaagaggucccccacguuauugaagaggugaugaacaucgugcugauugcccucagcauccuggcuguccuuaaggggcuguacaauguggccacaugcggacucauuggccugguuacguuccuucugcucugugggagauccugcaccacaacccuguauaaaggaguguacgaacugcaggcgcucgagcugaacauggaaacacuuaauaugaccaugccucugucuuguacaaagaacaauagccaucacuauauccgggucggcaacgagaccgggcucgagcugacgcuuaccaauacaucccugaucaaccauaaauuuugcaaucucucugacgcucacaagaaaaaccuguacgaucaugcccugaugagcauuaucuccaccuuccaccucucuauuccgaauuuuaaccaguaugaagccaugagcugugacuucaaugauggaaagaucuccgugcaguacaaccugagccacacauaugcuggcgacaccgccaaucauugcggcacgguugcuaacggggugcuucaaacauuuaugcgcauggccuggggaggcucuuacauugcgcuggauuccgggagaggaggcugggacuguaucaugaccagcuaccaguaucucauuauccagaacacaaccugggaggaucacugccaguucucucggcccuccccuaucggguaccugggacuucugagccaacgcaccagagacauuuauaucucucggcgcagacggggcacauuuacguggacccucuccgauagcgaaggcaaggacacacccgggggauacugucugacccgcuggaugcugauugaggccgagcucaaaugcuucggcaauacagcugucgccaaguguaacgaaaaacaugaugaggaauuuugcgacaugcugagacuuuucgauuuuaauaagcaggcuauccagcggcugaaagccccugcgcagauguccauucaacucaucaacaaggccgugaaugcucugaucaacgaccagcuuauuaugaagaaucaucugcgcgacaucauggggauucccuauugcaacuacucuaaauauuguuaccucaaucacaccgugacgggaaagacaagccugccuaaaugcugucuggucuccaacggcagcuaccucaaugagacccacuucucugaugacaucgaacagcaagccgauaacaugauuaccgagaugcugcagaaggaguauauggaaagacaggggaaaacaccgcuuggacugguugaccucuucguguuuuccaccagcuucuaccugaucucuaucuuucugcaccuugugaagauucccacacaucggcacgucgugggcaaaccuugccccaagccucaucgccucaaucacaugggcaucuguagcugcggguucuauaagcagcccggaguuccggugagauggaaacggugaggacuaguaauaaggaaacuguaugaaugucugugggcaggaagugaagagauccuucuguaaagguuuuuggaauuaugucugcugaauaauaaacuuuuuugaaauaauaaaucugguagaaaaaugagaucuaaaaaaaaaaaaaaaaaaaaaaaaaaaaaaaaaaaaaaaaaaaaaaaaaaaaaaaaaaaaaaaaaaaaaaaaaaaaaaaaaaaaaaaaaaaaaaaaaaaa

SEQ ID NO: 25956 - RNA, 1788 nt, Artificial Sequence
  mRNA product Design b-4 (A100) comprising derived and/or modified sequence from LASV(Z0947-SLE-2011;Clade IV)__AIT17840__GPCmut3 (opt5)
aggagagucccgcagucggcguccagcggcucugcuuguucgugugugugucguugcaggccuuauucaagcuuaccaugggccagaucgugaccuucuuucaagaggucccccacguuauugaagaggugaugaacaucgugcugauugcccucagcauccuggcuguccuuaaggggcuguacaauuucgccacaugcggacucgugggccugguuacguuucuucugcucugugggagauccugcaccauuucucuguauaaaggaguguacgaacugcagacacucgagcugaacauggaaacccuuaauaugacaaugccucugagcuguaccaagaacaauucccaucacuauaucauggucggcaacgagacagggcucgagcugacccuuacgaauaccucuaucauuaaccauaaauucugcaaucugagcgacgcgcacaagaaaaaccucuacgaucaugcucugauguccaucauuucuacauuucaccugagcaucccgaauuucaaccaguaugaagccauguccugugacuuuaauggaggcaagauuagcgugcaguacaaccucucucacuccuaugccggcgaugcugccaaucauugcgggaccguugcuaacggagugcugcaaacauucaugcggauggccuggggcgggagcuacaucgcgcuugacucuggacgcgauagaugggacuguauuaugaccuccuaccaguaucugaucauccagaacacgacaugggaggaucacugccaguuuagccggcccucuccuauuggcuaccucgggcugcuuucccaacgcaccagagacaucuauauuagccggcgcagacggggaacauucaccuggacccuguccgauucugaaggcaaggacacacccggcggguacugucucacgcgcuggaugcugaucgaggccgagcugaaaugcuuuggaaauaccgcugucgccaaguguaacgaaaaacaugaugaggaguucugcgacaugcucagacuguuugauuucaauaagcaggcuauucagcggcuuaaagccccugcgcagaugagcauccaacugaucaacaaggccgugaaugcucucauuaacgaccagcugaucaugaagaaucaccuucgcgacauuaugggcauccccuauugcaacuacuccaaauauuguuaccugaaucacacaaccacagggaagaccagccucccuaaaugcugucuggugucuaacggauccuaccugaaugaaacgcauuucagcgaugacauugaacagcaagccgauaacaugaucacagagaugcuccagaaggaguauauggaaagacagggcaaaaccccgcuggggcuugucgaccuguuuguuuucucuaccagcuuuuaccucaucuccauuuuccugcaccuggugaagauccccacacaucggcacauugugggaaaaccuugccccaagccucaucgccuuaaucacaugggcaucuguucuugcggccucuauaagcagcccggggucccggugaaauggaagagaugaggacuaguaauaaggaaacuguaugaaugucugugggcaggaagugaagagauccuucuguaaagguuuuuggaauuaugucugcugaauaauaaacuuuuuugaaauaauaaaucugguagaaaaaugagaucuaaaaaaaaaaaaaaaaaaaaaaaaaaaaaaaaaaaaaaaaaaaaaaaaaaaaaaaaaaaaaaaaaaaaaaaaaaaaaaaaaaaaaaaaaaaaaaaaaaaa

SEQ ID NO: 25957 - RNA, 1658 nt, Artificial Sequence
  mRNA product Design i-3 (hSL-A64-N5) comprising derived and/or modified sequence from LASV(Josiah;Clade IV)__NP_694870__GPCmut3 (opt1)
aggagaaagcuuaccaugggccagaucgugaccuucuuccaggaggucccccacgugaucgaggaggugaugaacaucguccugaucgcccucagcgugcuggccgugcugaaggggcucuacaacuucgcgaccugcggccuggucgggcuggugacguuccuccugcugugcggccgcuccugcaccaccagccucuacaaggggguguacgagcugcagacccuggagcucaacauggagacgcugaacaugaccaugccgcuguccugcaccaagaacaacagccaccacuacaucauggucggcaacgagaccggccucgagcugacgcugaccaacaccuccaucaucaaccacaaguucugcaaccucagcgacgcccacaagaagaaccuguacgaccacgcccugauguccaucaucagcaccuuccaccucuccauccccaacuucaaccaguacgaggccaugagcugcgacuucaacgggggcaagaucuccgugcaguacaaccugagccacuccuacgccggggacgcggccaaccacugcggcacgguggccaacgggguccugcagaccuucaugcggauggccuggggcggcagcuacaucgcgcucgacuccgggcgcggcaacugggacugcaucaugaccagcuaccaguaccugaucauccagaacaccacgugggaggaccacugccaguucucccggcccagccccaucggguaccugggccuccugucccagcgcacccgggacaucuacaucagccgccggcgccggggcaccuucaccuggacgcugagcgacuccgaggggaaggacaccccgggcggguacugccugacccgcuggaugcucaucgaggccgagcugaagugcuucggcaacaccgccguggccaagugcaacgagaagcacgacgaggaguucugcgacaugcugcggcuguucgacuucaacaagcaggccauccagcgccugaaggcgcccgcccagaugagcauccagcugaucaacaaggccgugaacgcccucaucaacgaccagcugaucaugaagaaccaccuccgggacaucauggggauccccuacugcaacuacuccaaguacugcuaccucaaccacacgaccaccggccgcaccagccugcccaagugcugccuggucuccaacggcagcuaccucaacgagacgcacuucuccgacgacaucgagcagcaggccgacaacaugaucaccgagaugcugcagaaggaguacauggagcggcaggggaagacgccccugggccucguggaccuguucguguucagcaccuccuucuaccugaucagcaucuuccugcaccucgucaagaucccgacccaccgccacaucguggggaaguccugccccaagccccaccggcugaaccacaugggcaucugcagcugcgggcuguacaagcagcccggcgugccggucaaguggaagcgcugaggacuaguuauaagacugacuagcccgaugggccucccaacgggcccuccuccccuccuugcaccgagauuaaucaaaggcucuuuucagagccaccaaaaaaaaaaaaaaaaaaaaaaaaaaaaaaaaaaaaaaaaaaaaaaaaaaaaaaaaaaaaaaaaagaauu

SEQ ID NO: 25958 - RNA, 1655 nt, Artificial Sequence
  mRNA product Design i-3 (hSL-A64-N5) comprising derived and/or modified sequence from LASV(LP;Clade I)__AAF86701__GPCmut3 (opt1)
aggagaaagcuuaccaugggccagaucaucaccuucuuccaggaggugccccacgucaucgaggaggugaugaacaucgugcugaucgcccucagccugcuggccauccucaaggggcuguacaacaucgcgaccugcggcaucaucgggcuggucgccuuccucuuccugugcggcaaguccugcagccugacgcucaagggcggguacgagcugcagacccuggagcucaacauggagacccugaacaugaccaugccgcuguccugcacgaagaacagcucccaccacuacauccgcgugggcaacgagaccgggcucgagcugacccugaccaacacgagcaucaucaaccacaaguucugcaaccucuccgacgcccacaagaagaaccuguacgaccacgcccugaugagcaucaucuccaccuuccaccucagcauccccaacuucaaccaguacgaggccauguccugcgacuucaacggcgggaagaucagcgugcaguacaaccugucccacagcuacgcgggcgacgccgccgagcacugcgggaccgucgccaacggcgugcugcagaccuucaugcggauggcguggggcgggcgcuacaucgcccucgacuccggcaaggggaacugggacugcaucaugacgagcuaccaguaccugaucauccagaacaccaccugggaggaccacugccaguucucccggcccagccccaucggcuaccugggccuccugucccagcgcacccgggacaucuacaucagccgccggcgccgggggacguucaccuggacccugagcgacuccgagggcaacgagacccccgggggcuacugccugacgcgcuggaugcucaucgaggccgagcugaagugcuucgggaacaccgccguggccaagugcaacgagaagcacgacgaggaguucugcgacaugcugcggcuguucgacuucaacaagcaggcgauccgccggcugaaggcccccgcccagaugagcauccagcugaucaacaaggccgucaacgcccucaucaacgaccagcugaucaugaagaaccaccuccgcgacaucaugggcauccccuacugcaacuacuccaaguacugcuaccucaaccacaccagcuccggccggaccagccugcccaagugcugccugaucuccaacgggagcuaccucaacgagacgcaguucuccgacgacaucgagcagcaggcggacaacaugaucaccgagaugcugcagaaggaguacaucgagcgccagggcaagaccccgcuggggcucguggacaucuucaucuucagcaccuccuucuaccugaucagcaucuuccugcaccugaucaagaucccgacgcaccggcacaucgugggcaagcccugccccaagccccaccgccucaaccacaugggggucugcuccugcggccuguacaagcacccgggcgugcccaccaaguggaagcggugaggacuaguuauaagacugacuagcccgaugggccucccaacgggcccuccuccccuccuugcaccgagauuaaucaaaggcucuuuucagagccaccaaaaaaaaaaaaaaaaaaaaaaaaaaaaaaaaaaaaaaaaaaaaaaaaaaaaaaaaaaaaaaaaagaauu

SEQ ID NO: 25959 - RNA, 1655 nt, Artificial Sequence
  mRNA product Design i-3 (hSL-A64-N5) comprising derived and/or modified sequence from LASV(803213;Clade II)__AAF86703__GPCmut3 (opt1)
aggagaaagcuuaccaugggccagaucaucaccuucuuccaggaggugccccacgucaucgaggaggugaugaacaucgugcugaucgcccucagccugcuggccauccucaaggggaucuacaacgucgcgaccugcggccuguucgggcugaucuccuuccuccugcugugcggccgcagcugcuccgugacguacaaggggguguacgagcuccagacccuggagcugaacauggccaaccucaacaugaccaugccgcugagcugcaccaagaacaacucccaccacuacaucauggucggcaacgagacgggccuggagcucacccugaccaacaccagcaucaucaaccacaaguucugcaaccuguccgacgcccacaagaagaaccucuacgaccacgcccugaugagcaucaucuccacguuccaccugagcauccccaacuucaaccaguacgaggccauguccugcgacuucaacgggggcaagaucagcgugcaguacaaccucucccacagcuucgcgguggacgccgccaaccacugcgggaccaucgccaacggcguccugcagaccuucaugcggauggcguggggcggguccuacaucgcccuggacagcggcaaggggaacugggacugcaucaugaccuccuaccaguaccucaucauccagaacacgaccugggaggaccacugccaguucagccgccccucccccaucggcuaccuggggcugcucagccagcggacccgcgacaucuacaucagccggcgccgccggggcaccuucacguggacccucuccgacagcgagggcaacgaggcccccgggggcuacugccugacccgguggaugcugaucgaggccgagcucaagugcuucgggaacaccgccguggcgaagugcaacgagaagcacgacgaggaguucugcgacaugcugcgccuguucgacuucaacaagcaggccaucaagcggcucaagacgcccgcccagauguccauccagcugaucaacaaggccgugaacgcccugaucaacgaccagcucaucaugaagaaccaccuccgcgacaucaugggcauccccuacugcaacuacagccgguacugcuaccugaaccacaccgucaccgggaagaccucccugccccgcugcugccuggugagcaacggcuccuaccugaacgagacgcacuucagcgacgacaucgagcagcaggcggacaacaugaucaccgagaugcuccagaaggaguacauggaccggcagggcaagaccccgcuggggcugguggaccucuucgucuucuccaccagcuucuaccugaucuccaucuuccugcaccuggugaagaucccgacgcaccgccacaucgugggcaagcccugccccaagccccaccggcucaaccacauggggaucugcagcugcggccuguacaagcacccggggguccccgugaaguggaagcgcugaggacuaguuauaagacugacuagcccgaugggccucccaacgggcccuccuccccuccuugcaccgagauuaaucaaaggcucuuuucagagccaccaaaaaaaaaaaaaaaaaaaaaaaaaaaaaaaaaaaaaaaaaaaaaaaaaaaaaaaaaaaaaaaaagaauu

SEQ ID NO: 25960 - RNA, 1655 nt, Artificial Sequence
  mRNA product Design i-3 (hSL-A64-N5) comprising derived and/or modified sequence from LASV(GA391;Clade III)__CAA36645__GPCmut3 (opt1)
aggagaaagcuuaccaugggccagaucgugaccuucuuccaggaggucccccacgugaucgaggaggugaugaacaucguccugaucgcccucagcauccuggccauccugaaggggcucuacaacguggcgaccugcggccugaucgggcuggugacguuccuccugcuguccggccgcagcugcucccucaucuacaaggggaccuacgagcugcagacccuggagcucaacauggagacccugaacaugacgaugccgcugagcugcaccaagaacaacucccaccacuacauccgggucggcaacgagaccggccucgagcugacccugacgaacaccagcauccucaaccacaaguucugcaaccuguccgacgcccacaagcgcaaccuguacgaccacagccucauguccaucaucagcaccuuccaccuguccauccccaacuucaaccaguacgaggccaugagcugcgacuucaacgggggcaagaucaccgugcaguacaaccugucccacagcuucgccguggacgccgcggggcacugcggcacgcucgccaacgggguccugcagaccuucaugcggauggccuggggcggcuccuacaucgcccuggacagcgggcgcggcaacugggacugcaucaugaccuccuaccaguaccucaucauccagaacaccacgugggacgaccacugccaguucagccggcccucccccaucggguaccugggccugcucagccagcgcacccgggacaucuacaucagccgccggcgccggggcaccuucaccuggacgcucuccgacagcgaggggaacgagaccccgggcggguacugccugacccgcuggaugcugaucgaggcggagcucaagugcuucggcaacaccgccguggccaagugcaacgagaagcacgacgaggaguucugcgacaugcugcggcuguucgacuucaacaagcaggccauccgccggcucaagacgcccgcccagauguccauccagcugaucaacaaggcggugaacgcccugaucaacgaccagcucaucaugaagaaccaccuccgcgacaucauggggauccccuacugcaacuacagccgguacugcuaccugaaccacaccuccaccggcaagaccagccugccccgcugcugccugaucuccaacggcagcuaccugaacgagacgaaguucuccgacgacaucgagcagcaggccgacaacaugaucaccgagaugcuccagaaggaguacaucgaccggcaggggaagacgccccugggccuggucgaccuguucguguucagcaccuccuucuaccucaucagcaucuuccugcaccuggugaagaucccgacccaccgccacaucgucgggaagcccugccccaagccccaccggcucaaccacaugggcaucugcuccugcgggcuguacaagcagccgggcgugcccgugcgcuggaagcggugaggacuaguuauaagacugacuagcccgaugggccucccaacgggcccuccuccccuccuugcaccgagauuaaucaaaggcucuuuucagagccaccaaaaaaaaaaaaaaaaaaaaaaaaaaaaaaaaaaaaaaaaaaaaaaaaaaaaaaaaaaaaaaaaagaauu

SEQ ID NO: 25961 - RNA, 1658 nt, Artificial Sequence
  mRNA product Design i-3 (hSL-A64-N5) comprising derived and/or modified sequence from LASV(AV;Clade V)__CCA30314__GPCmut3 (opt1)
aggagaaagcuuaccaugggccagaucgugaccuucuuccaggaggucccccacgugaucgaggaggugaugaacaucguccugaucgcccucagcauccuggccgugcugaaggggcucuacaacaucgcgaccugcggccugaucgggcugaucacguuccuccugcugugcggccgcuccugcagcuccaaccucuacaaggggguguacgagcugcagagccuggaccucaacauggagacccugaacaugaccaugccgcuguccugcaccaagaacaacagccaccacuacauccgggucggcaacgacacgggccucgagcugacccugaccaacaccuccauccucaaccacaaguucugcaaccugagcgacgcccacaagaaggaccuguacgaccacgcccucauguccaucaucagcacguuccaccuguccauccccaacuucaaccaguacgaggccaugagcugcgacuucaacgggggcaagaucuccgugcaguacaaccugagccacuccuacgccaucgacgcggccaaccacugcgggaccguggccaacggcauccuccagaccuucaugcgcauggccuggggcgggagcuacaucgcgcuggacuccggccgggggaacugggacugcaucaugaccagcuaccaguaccugaucauccagaacacgaccugggagaaccacugccaguucucccgccccagccccaucggcuaccucgggcugcugagccagcggacccgcgacaucuacaucucccggcgccgccggggcaccuucacguggacccugagcgacuccgagggcaacgccacccccgggggcuacugccucacccgguggaugcugaucgaggccgagcugaagugcuucgggaacacggccgucgccaagugcaacgagaagcacgacgaggaguucugcgacaugcuccgccuguucgacuucaacaagcaggcgaucagccggcugaagucccccgcccagaugagcauccagcucaucaacaaggccgugaacgcccugaucaacgaccagcugaucaugaagaaccaccuccgcgacaucaugggcauccccuacugcaacuacuccaaguacugcuaccugaaccacaccaucaccgggaagaccagccugcccaagugcugccucguguccaacggcagcuaccugaacgagacgcacuucuccgacgacaucgagcagcaggccgacaacaugaucaccgagaugcugcagaaggaguacauggagcggcagggcaagaccccgcucgggcuggucgaccuguucguguucagcaccuccuucuaccugaucagcaucuuccuccgccuggugaagaucccgacgcaccggcacaucgucggcaagcccugccccaagccccaccgccugaaccacauggggaucugcuccugcggccucuacaagcagccgggggugcccgugcgguggaagcgcugaggacuaguuauaagacugacuagcccgaugggccucccaacgggcccuccuccccuccuugcaccgagauuaaucaaaggcucuuuucagagccaccaaaaaaaaaaaaaaaaaaaaaaaaaaaaaaaaaaaaaaaaaaaaaaaaaaaaaaaaaaaaaaaaagaauu

SEQ ID NO: 25962 - RNA, 1655 nt, Artificial Sequence
  mRNA product Design i-3 (hSL-A64-N5) comprising derived and/or modified sequence from LASV(Togo/2016/7082;Clade VI)__AMR44577__GPCmut3 (opt1)
aggagaaagcuuaccaugggccagaucaucaccuucuuccaggaggugccccacgucaucgaggaggugaugaacaucgugcugaucgcccucagccugcuggccauccucaagggggucuacaacguggcgaccugcggcaucaucgggcuggugacguuccuguuccucugcggccgcuccugcagccugaucuacaagggguccuacgagcugcagacccucgagcugaacauggagacccugaacaugaccaugccgcucagcugcacgaagaacuccagccaccacuacauccgggucggcaacgagaccggccuggagcugacccucaccaacacguccaucaucaaccacaaguucugcaaccugagcgacgcccacaagcgcaaccuguacgaccacgcccucauguccauccugagcaccuuccaccuguccauccccaacuucaaccaguacgaggccaugagcugcgacuucaacgggggcaagaucuccgugcaguacaaccucagccacgccuacgcgguggacgccgccgagcacugcgggaccgucgccaacggcgugcugcagaccuucaugcggauggcguggggcggguccuacaucgcccuggacagcggccgcgggaacugggacugcaucaugacguccuaccaguaccucaucauccagaacaccaccugggaggaccacugccaguucagccggcccucccccaucggcuaccuggggcugcucagccagcgcacccgggacaucuacaucagccgccggcgccggggcacguucaccuggacccucuccgacagcgagggcaacgagacccccgggggcuacugccugacgcgcuggaugcugaucgaggccgagcucaagugcuucgggaacaccgccguggccaagugcaacgagaagcacgacgaggaguucugcgacaugcugcggcuguucgacuucaacaagcaggcgauccagcgccucaagucccccgcccagaugagcauccagcugaucaacaaggccgucaacgcccugaucaacgaccagcucaucaugaagaaccaccuccgggacaugaugggcauccccuacugcaacuacuccaaguacugcuaccugaaccacaccagcuccgggcgcaccagccugcccaagugcugccugguguccaacggcagcuaccugaacgagacgcacuucuccgacgacaucgagcagcaggccgacaacaugaucaccgagaugcuccagaaggaguacaucgaccggcagggcaagaccccgcuggggcugguggaccucuucgucuucagcaccuccuucuaccugaucagcaucuuccugcaccugaucaagaucccgacgcaccgccacaucgugggcaagcccugccccaagccccaccggcucaaccacauggggaucugcuccugcggccuguacaagcagccgggggugcccacccgcuggaagcggugaggacuaguuauaagacugacuagcccgaugggccucccaacgggcccuccuccccuccuugcaccgagauuaaucaaaggcucuuuucagagccaccaaaaaaaaaaaaaaaaaaaaaaaaaaaaaaaaaaaaaaaaaaaaaaaaaaaaaaaaaaaaaaaaagaauu

SEQ ID NO: 25963 - RNA, 1655 nt, Artificial Sequence
  mRNA product Design i-3 (hSL-A64-N5) comprising derived and/or modified sequence from LASV(KAK-428;Clade n.d. (VII))__ANH09740__GPCmut3 (opt1)
aggagaaagcuuaccaugggccagaucgugaccuucuuccaggaggucccccacgugaucgaggaggugaugaacaucguccugaucgcccucagccugcuggccauccucaaggggcuguacaacuucgcgaccugcggcgugaucgggcugaucacguuccuccugcugugcggccgcuccugcagcgccaccuacaaggggcaguacgagcuccagacccuggagcugaacauggagucccucaacaugaccaugccgcugagcugcacgaagaacaacucccaccacuacauccgggccggcaacaacaccggccuggagcucacccugaccaacacgagcaucaucucccacaaguucugcaaccugagcgacgcccacaagaagaaccucuacgaccacacccugauguccaucaucaccaccuuccaccugagcauccccaacuucaaccaguacgaggccauguccugcgacuucaacgggggcaagaucagcauccaguacaaccucucccacagcuacgcgggggacgccgcccagcacugcggcacgguggccaacgggguccugcagaccuucaugcgcauggcguggggcggcuccuaccuggcccucgacagcgggcggcgcggcugggacugcaucaucuccagcuaccaguaccugaucauccagaacaccaccugggacgaccacugccaguucucccggcccagccccaucggguaccugggcuucgugagccagaagacgcgcgacaucuacaucucccggcgccgccggggcaccuucaccuggacccugagcgacuccgaggggcacgacaugccgggcggguacugccucacgcgguggaugcugaucgaggccgaccugaagugcuucggcaacaccgccguggccaagugcaacgagaagcacgacgaggaguucugcgacauguggcgccucuucgacuucaacaagcaggcgauccagcggcugaaggcccccgcccagaugaacauccagcugaucaacaaggccgucaacgcccucaucaacgaccagcugaugaugaagaaccaccuccgcgacaucauggggauccccuacugcaacuacagcaaguucugcuaccugaacaacaccaccacgggccggaccucccugccccgcugcugccugaucagcaacggcuccuaccucaacgagacccacuucagcgacgacaucgagcagcaggcggacaacaugaucaccgagaugcugcagaaggaguacauggaccggcaggggaagacgccccugggccucguggaccuguucguguucuccaccagcuucuaccugaucaccaucuuccuccaccuggucaagaucccgacccaccgccacaucguggggaagcccugccccaagccccaccggcugaaccacaugggcaucugcuccugcgggcuguacaagcagccgggcgugcccguccgcuggaagcggugaggacuaguuauaagacugacuagcccgaugggccucccaacgggcccuccuccccuccuugcaccgagauuaaucaaaggcucuuuucagagccaccaaaaaaaaaaaaaaaaaaaaaaaaaaaaaaaaaaaaaaaaaaaaaaaaaaaaaaaaaaaaaaaaagaauu

SEQ ID NO: 25964 - RNA, 1655 nt, Artificial Sequence; identical to SEQ ID NO: 25958
  mRNA product Design i-3 (hSL-A64-N5) comprising derived and/or modified sequence from LASV(Pinneo-NIG-1969;Clade I)__AIT17836__GPCmut3 (opt1)

SEQ ID NO: 25965 - RNA, 1655 nt, Artificial Sequence
  mRNA product Design i-3 (hSL-A64-N5) comprising derived and/or modified sequence from LASV(ISTH0009-NIG-2011;Clade II)__AIT17404__GPCmut3 (opt1)
aggagaaagcuuaccaugggccagaucaucaccuucuuccaggaggugccccacgucaucgaggaggugaugaacaucgugcugaucgcccucagccugcuggccauccucaaggggaucuacaacgucgcgaccugcggccuguucgggcugguguccuuccuccugcugugcggccgcagcugcuccacgaccuacaaggggguguacgagcuccagacccuggagcuggacauggccagccucaacaugaccaugccgcuguccugcacgaagaacaacagccaccacuacaucauggucggcaacgagaccggccuggagcucacccugaccaacacguccaucaucaaccacaaguucugcaaccugagcgacgcccacaagaagaaccucuacgaccacgcccugauguccaucaucagcaccuuccaccuguccauccccaacuucaaccaguacgaggccaugagcugcgacuucaacgggggcaagaucuccgugcaguacaaccucagccacgcguacgccguggacgccgccaaccacugcgggaccaucgcgaacggcguccugcagaccuucaugcggauggccuggggcggguccuacaucgcccuggacagcggcaagggguccugggacugcaucaugacgagcuaccaguaccucaucauccagaacaccaccugggaggaccacugccaguucucccgccccagccccaucggcuaccuggggcugcucagccagcggacccgcgacaucuacaucucccggcgccgccggggcacguucaccuggacccucagcgacuccgagggcaacgagacccccgggggcuacugccugacgcgguggaugcugaucgaggccgagcucaagugcuucgggaacaccgccguggcgaagugcaacgagaagcacgacgaggaguucugcgacaugcugcgccuguucgacuucaacaagcaggccauccggcgccucaagacccccgcccagaugagcauccagcugaucaacaaggccgugaacgcccugaucaacgaccagcucaucaugaagaaccaccuccgggacaucaugggcaucccguacugcaacuacuccaaguacugcuaccugaaccacaccgucacggggaagaccagccugccccgcugcugccugguguccaacggcagcuaccugaacgagacccacuucuccgacgacaucgagcagcaggcggacaacaugaucaccgagcuccugcagaaggaguacauggaccggcagggcaagacgccccuggggcucguggaccuguucgucuucagcaccuccuucuaccugaucagcaucuuccugcaccucaucaagaucccgacccaccgccacaucaccggcaagcccugccccaagccccaccggcugaaccacauggggaucugcuccugcggccuguacaagcacccgggggugcccgugaaguggaagcgcugaggacuaguuauaagacugacuagcccgaugggccucccaacgggcccuccuccccuccuugcaccgagauuaaucaaaggcucuuuucagagccaccaaaaaaaaaaaaaaaaaaaaaaaaaaaaaaaaaaaaaaaaaaaaaaaaaaaaaaaaaaaaaaaaagaauu

SEQ ID NO: 25966 - RNA, 1655 nt, Artificial Sequence
  mRNA product Design i-3 (hSL-A64-N5) comprising derived and/or modified sequence from LASV(ISTH2010-NIG-2012;Clade II)__AIT17482__GPCmut3 (opt1)
aggagaaagcuuaccaugggccagaucaucaccuucuuccaggaggugccccacgucaucgaggaggugaugaacaucgugcugaucgcccucagccugcuggccauccucaaggggaucuacaacgucgcgaccugcggccuguucgggcugguguccuuccuccugcugugcggccgcagcugcuccacgaccuacaaggggguguacgagcuccagacccuggagcuggacauggccagccucaacaugaccaugccgcuguccugcacgaagaacaacagccaccacuacaucauggucggcaacgagaccggccuggagcucacccugaccaacacguccaucaucaaccacaaguucugcaaccugagcgacgcccacaagaagaaccucuacgaccacgcccugauguccaucaucagcaccuuccaccuguccauccccaacuucaaccaguacgaggccaugagcugcgacuucaacgggggcaagaucuccgugcaguacaaccucagccacgcguacgccguggacgccgccaaccacugcgggaccaucgcgaacggcguccugcagaccuucaugcggauggccuggggcggguccuacaucgcccuggacagcggcaagggguccugggacugcaucaugacgagcuaccaguaccucaucauccagaacaucaccugggaggaccacugccaguucucccgccccagccccaucggcuaccuggggcugcucagccagcggacccgcgacaucuacaucucccggcgccgccggggcaccuucacguggacccucagcgacuccgagggcaacgagacccccgggggcuacugccugacccgguggaugcugaucgaggccgagcucaagugcuucgggaacacggccguggcgaagugcaacgagaagcacgacgaggaguucugcgacaugcugcgccuguucgacuucaacaagcaggccauccggcgccucaagacccccgcccagaugagcauccagcugaucaacaaggccgugaacgcccugaucaacgaccagcucaucaugaagaaccaccuccgggacaucaugggcauccccuacugcaacuacuccaaguacugcuaccugaaccacaccgucaccgggaagacgagccugccccgcugcugccugguguccaacggcagcuaccugaacgagacccacuucuccgacgacaucgagcagcaggcggacaacaugaucaccgagcuccugcagaaggaguacaucgaccggcagggcaagaccccgcuggggcucguggaccuguucgucuucagcacguccuucuaccugaucagcaucuuccugcaccucgugaagaucccgacccaccgccacguggucggcaagcccugccccaagccccaccggcugaaccacauggggaucugcuccugcggccuguacaagcacccgggggugcccgugaaguggaagcgcugaggacuaguuauaagacugacuagcccgaugggccucccaacgggcccuccuccccuccuugcaccgagauuaaucaaaggcucuuuucagagccaccaaaaaaaaaaaaaaaaaaaaaaaaaaaaaaaaaaaaaaaaaaaaaaaaaaaaaaaaaaaaaaaaagaauu

SEQ ID NO: 25967 - RNA, 1655 nt, Artificial Sequence
  mRNA product Design i-3 (hSL-A64-N5) comprising derived and/or modified sequence from LASV(Lassa virus/H.sapiens-wt/NGA/2015/ISTH_0543;Clade II)__AVO03639__GPCmut3 (opt1)
aggagaaagcuuaccaugggccagaucaucaccuucuuccaggaggugccccacgucaucgaggaggugaugaacaucgugcugaucgcccucagccugcuggccauccucaaggggaucuacaacgucgcgaccugcggccuguucgggcugguguccuuccuccugcugugcggccgcagcugcuccacgaccuacaaggggguguacgagcuccagacccuggagcuggacauggccaaccucaacaugaccaugccgcugagcugcacgaagaacaacucccaccacuacaucauggucggcaacgagaccggccuggagcucacccugaccaacacgagcaucaucaaccacaaguucugcaaccuguccgacgcccacaagaagaaccucuacgaccacgcccugaugagcaucaucuccaccuuccaccugagcauccccaacuucaaccaguacgaggccauguccugcgacuucaacgggggcaagaucagcgugcaguacaaccucucccacaccuacgcgguggacgccgccaaccacugcgggaccaucgccaacggcguccugcagacguucaugcggauggcguggggcgggagcuacaucgcccuggacuccggcaaggggagcugggacugcaucaugaccuccuaccaguaccucgugauccagaacaccaccugggaggaccacugccaguucagccgccccucccccaucggcuaccuggggcugcucagccagcggacgcgcgacaucuacaucagccggcgccgccggggcaccuucaccuggacccucuccgacagcgagggcaacgagacgcccgggggcuacugccugacccgguggaugcugaucgaggccgagcucaagugcuucgggaacaccgccguggccaagugcaacgagaagcacgacgaggaguucugcgacaugcugcgccuguucgacuucaacaagcaggcgauccggcgccucaagacccccgcccagauguccauccagcugaucaacaaggccgucaacgcccugaucaacgaccagcucaucaugaagaaccaccuccgggacaucaugggcauccccuacugcaacuacagcaaguacugcuaccugaaccacacggugaccgggaagaccucccugccccgcugcugccuggugagcaacggcuccuaccugaacgagacccacuucagcgacgacaucgagcagcaggccgacaacaugaucacggagcuccugcagaaggaguacaucgaccggcagggcaagaccccgcuggggcucgucgaccuguucguguucuccaccagcuucuaccugaucuccaucuuccugcaccucgugaagaucccgacccaccgccacaucacgggcaagcccugccccaagccccaccggcugaaccacauggggaucugcagcugcggccuguacaagcacccggggguccccgugaaguggaagcgcugaggacuaguuauaagacugacuagcccgaugggccucccaacgggcccuccuccccuccuugcaccgagauuaaucaaaggcucuuuucagagccaccaaaaaaaaaaaaaaaaaaaaaaaaaaaaaaaaaaaaaaaaaaaaaaaaaaaaaaaaaaaaaaaaagaauu

SEQ ID NO: 25968 - RNA, 1655 nt, Artificial Sequence
  mRNA product Design i-3 (hSL-A64-N5) comprising derived and/or modified sequence from LASV(Lassa virus/H.sapiens-wt/NGA/2016/ISTH_0009;Clade II)__AVO03571__GPCmut3 (opt1)
aggagaaagcuuaccaugggccagaucaucaccuucuuccaggaggugccccacgucaucgaggaggugaugaacaucgugcugaucgcccucagccugcuggccauccucaaggggaucuacaacgucgcgaccugcggccugcuggggcucguguccuuccugcugcucugcggccgcagcugcuccacgaccuacaaggggguguacgagcugcagacccuggagcucgacauggccagccugaacaugaccaugccgcuguccugcacgaagaacaacagccaccacuacaucauggucggcaacgagaccggccucgagcugacccugaccaacacguccaucaucaaccacaaguucugcaaccucagcgacgcccacaagaagaaccuguacgaccacgcccugauguccaucaucagcaccuuccaccucuccauccccaacuucaaccaguacgaggccaugagcugcgacuucaacgggggccggaucuccgugcaguacaaccugagccacuccuacgcgguggacgccgccaaccacugcgggaccaucgccaacggcguccugcagaccuucaugcgcauggcguggggcgggagcuacaucgcccucgacuccggcaaggggagcugggacugcaucaugacguccuaccaguaccugaucauccagaacaccaccugggaggaccacugccaguucagccggcccagccccaucggcuaccuggggcuccugucccagcgcacccgggacaucuacaucagccgccggcgccggggcacguucaccuggacccuguccgacagcgagggcaacgagacccccgggggcuacugccugacgcgcuggaugcucaucgaggccgagcugaagugcuucgggaacaccgccguggccaagugcaacgagaagcacgacgaggaguucugcgacaugcugcggcuguucgacuucaacaagcaggcgauccgccggcugaagacccccgcccagauguccauccagcugaucaacaaggccgugaacgcccucaucaacgaccagcugaucaugaagaaccaccuccgcgacaucaugggcaucccguacugcaacuacagcaaguacugcuaccucaaccacaccgucacggggaagaccucccugccccggugcugccuggugagcaacggcuccuaccucaacgagacccacuucagcgacgacaucgagcagcaggccgacaacaugaucaccgagcugcugcagaaggaguacaucgaccgccagggcaagacgccccucgggcugguggaccuguucgucuucuccaccagcuucuaccugaucuccaucuuccuccaccuggugaagaucccgacccaccggcacaucaccggcaagcccugccccaagccccaccgccugaaccacauggggaucugcagcugcggccucuacaaccacccgggggugcccgucaaguggaagcggugaggacuaguuauaagacugacuagcccgaugggccucccaacgggcccuccuccccuccuugcaccgagauuaaucaaaggcucuuuucagagccaccaaaaaaaaaaaaaaaaaaaaaaaaaaaaaaaaaaaaaaaaaaaaaaaaaaaaaaaaaaaaaaaaagaauu

SEQ ID NO: 25969 - RNA, 1655 nt, Artificial Sequence
  mRNA product Design i-3 (hSL-A64-N5) comprising derived and/or modified sequence from LASV(Lassa virus/H.sapiens-wt/NGA/2016/ISTH_0017;Clade II)__AVO03567__GPCmut3 (opt1)
aggagaaagcuuaccaugggccagaucaucaccuucuuccaggaggugccccacgucaucgaggaggugaugaacaucgugcugaucgcccucagccugcuggccauccucaaggggaucuacaacgucgcgaccugcggccuguucgggcugguguccuuccuccugcugugcggccgcagcugcuccacgaccuacaaggggguguacgagcuccagacccuggagcuggacauggccagccucaacaugaccaugccgcuguccugcacgaagaacaacagccaccacuacaucauggucggcaacgagaccggccuggagcucacccugaccaacacguccaucaucaaccacaaguucugcaaccugagcgacgcccacaagaagaaccucuacgaccacgcccugauguccaucaucagcaccuuccaccuguccauccccaacuucaaccaguacgaggccaugagcugcgacuucaacgggggcaagaucuccgugcaguacaaccucagccacaccuacgcgaucgacgccgccaaccacugcgggaccaucgccaacggcgugcugcagacguucaugcggauggcguggggcggguccuacaucgcccuggacagcggcaagggguccugggacugcaucaugaccagcuaccaguaccucaucauccagaacaccaccugggaggaccacugccaguucucccgccccagccccaucggcuaccuggggcugcucagccagcggacgcgcgacaucuacaucucccggcgccgccggggcaccuucaccuggacccucagcgacuccgagggcaacgagacgcccgggggcuacugccugacccgguggaugcugaucgaggccgagcucaagugcuucgggaacaccgccgucgccaagugcaacgagaagcacgacgaggaguucugcgacaugcugcgccuguucgacuucaacaagcaggcgauccggcgccucaagacccccgcccagaugagcauccagcugaucaacaaggccgugaacgcccugaucaacgaccagcucaucaugaagaaccaccuccgggacaucaugggcauccccuacugcaacuacuccaaguacugcuaccugaaccacacggugaccgggaagaccagccugccccgcugcugccuggucuccaacggcagcuaccugaacgagacccacuucuccgacgacaucgagcagcaggccgacaacaugaucacggagcuccugcagaaggaguacauggaccggcagggcaagaccccgcuggggcucguggaccuguucguguucagcaccuccuucuaccugaucagcaucuuccugcaccucguccgcaucccgacccaccggcacgugaucggcaagcccugccccaagccccaccgccugaaccacauggggaucugcuccugcggccuguacaagcacccgggggugcccgucaaguggaagcggugaggacuaguuauaagacugacuagcccgaugggccucccaacgggcccuccuccccuccuugcaccgagauuaaucaaaggcucuuuucagagccaccaaaaaaaaaaaaaaaaaaaaaaaaaaaaaaaaaaaaaaaaaaaaaaaaaaaaaaaaaaaaaaaaagaauu

SEQ ID NO: 25970 - RNA, 1655 nt, Artificial Sequence
  mRNA product Design i-3 (hSL-A64-N5) comprising derived and/or modified sequence from LASV(Lassa virus/H.sapiens-wt/NGA/2018/ISTH_0959;Clade II)__AVV65099__GPCmut3 (opt1)
aggagaaagcuuaccaugggccagaucaucaccuucuuccaggaggugccccacgucaucgaggaggugaugaacaucgugcugaucgcccucagccugcuggccauccucaaggggaucuacaacgucgugaccugcggccuguucgggcugguguccuuccuccugcugugcggccgcagcugcuccacgaccuacaagggggucuacgagcuccagacccuggagcuggacauggcgagccucaacaugaccaugccgcuguccugcacgaagaacaacagccaccacuacaucauggugggcaacgagaccggccuggagcucacccugaccaacacguccaucaucaaccacaaguucugcaaccugagcgacgcccacaagaagaaccucuacgaccacgcccugauguccaucaucagcaccuuccaccuguccauccccaacuucaaccaguacgaggccaugagcugcgacuucaacgggggcaagaucuccgugcaguacaaccucagccacgccuacgcgaucgacgccgccaaccacugcgggaccaucgccaacggcguccugcagaccuucaugcggauggcguggggcggguccuacaucgcccuggacagcggcaagggguccugggacugcaucaugacgagcuaccaguaccucaucauccagaacaccaccugggaggaccacugccaguucucccgccccagccccaucggcuaccuggggcugcucagccagcggacccgcgacaucuacaucucccggcgccgccggggcacguucaccuggacccucagcgacuccgagggcaacgagacccccgggggcuacugccugacgcgguggaugcugaucgaggccgagcucaagugcuucgggaacaccgccguggccaagugcaacgagaagcacgacgaggaguucugcgacaugcugcgccuguucgacuucaacaagcaggcgauccggcgccucaagacccccgcccagaugagcauccagcugaucaacaaggccgugaacgcccugaucaacgaccagcucaucaugaagaaccaccuccgggacaucaugggcaucccguacugcaacuacuccaaguacugcuaccugaaccacaccgucacggggaagaccagccugccccgcugcugccugguguccaacggcagcuaccugaacgagacccacuucuccgacgacaucgagcagcaggccgacaacaugaucaccgagcuccugcagaaggaguacaucgaccggcagggcaagacgccccuggggcucguggaccuguucgucuucagcaccuccuucuaccugaucagcaucuuccugcaccucgugaagaucccgacccaccgccacgugaucggcaagcccugccccaagccccaccggcugaaccacauggggaucugcuccugcggccuguacaagcacccggggguccccgugaaguggaagcgcugaggacuaguuauaagacugacuagcccgaugggccucccaacgggcccuccuccccuccuugcaccgagauuaaucaaaggcucuuuucagagccaccaaaaaaaaaaaaaaaaaaaaaaaaaaaaaaaaaaaaaaaaaaaaaaaaaaaaaaaaaaaaaaaaagaauu

SEQ ID NO: 25971 - RNA, 1655 nt, Artificial Sequence
  mRNA product Design i-3 (hSL-A64-N5) comprising derived and/or modified sequence from LASV(LASV003-NIG-2008;Clade II)__AIT17580__GPCmut3 (opt1)
aggagaaagcuuaccaugggccagaucaucaccuucuuccaggaggugccccacgucaucgaggaggugaugaacaucgugcugaucgcccucagccugcuggccauccucaaggggaucuacaacgucgcgaccugcggccuguucgggcugguguccuuccuccugcugugcggccgcagcugcuccacgaccuacaaggggguguacgagcuccagacccuggagcuggacauggccagccucaacaugaccaugccgcuguccugcacgaagaacaacagccaccacuacaucauggucggcaacgagaccggccuggagcucacccugaccaacacguccaucaucaaccacaaguucugcaaccugagcgacgcccacaagaagaaccucuacgaccacgcccugauguccaucaucagcaccuuccaccuguccauccccaacuucaaccaguacgaggccaugagcugcgacuucaacgggggcaagaucuccgugcaguacaaccucagccacaccuacgcgguggacgccgccaaccacugcgggaccaucgccaacggcguccugcagacguucaugcggauggcguggggcggguccuacaucgcccuggacagcggcaagggguccugggacugcaucaugaccagcuaccaguaccucaucauccagaacaccaccugggaggaccacugccaguucucccgccccagccccaucggcuaccuggggcugcucagccagcggacgcgcgacaucuacaucucccggcgccgccggggcaccuucaccuggacccucagcgacuccgagagcaacgagacgccgggcggguacugccugacccgguggaugcugaucgaggccgagcucaagugcuucggcaacaccgccguggccaagugcaacgagaagcacgacgaggaguucugcgacaugcugcgccuguucgacuucaacaagcaggcgauccggcgccucaaggcccccgcccagauguccauccagcugaucaacaaggccgugaacgcccugaucaacgaccagcucaucaugaagaaccaccuccgggacaucauggggauccccuacugcaacuacagcaaguacugcuaccugaaccacaccgucacgggccgcaccucccugccccggugcugccuggugagcaacggguccuaccugaacgagacccacuucagcgacgacaucgagcagcaggcggacaacaugaucaccgagcuccugcagaaggaguacauggaccgccagggcaagacgccccugggccucguggaccuguucgucuucuccaccagcuucuaccugaucuccaucuuccugcaccucgugaagaucccgacccaccggcacgugaucgggaagcccugccccaagccccaccgccugaaccacaugggcaucugcagcugcgggcuguacaagcacccgggcguccccgugaaguggaagcggugaggacuaguuauaagacugacuagcccgaugggccucccaacgggcccuccuccccuccuugcaccgagauuaaucaaaggcucuuuucagagccaccaaaaaaaaaaaaaaaaaaaaaaaaaaaaaaaaaaaaaaaaaaaaaaaaaaaaaaaaaaaaaaaaagaauu

SEQ ID NO: 25972 - RNA, 1655 nt, Artificial Sequence
  mRNA product Design i-3 (hSL-A64-N5) comprising derived and/or modified sequence from LASV(LASV035-NIG-2009;Clade II)__AIT17588__GPCmut3 (opt1)
aggagaaagcuuaccaugggccagaucaucaccuucuuccaggaggugccccacgucaucgaggaggugaugaacaucgugcugaucgcccucagccugcuggccauccucaaggggaucuacaacgucgcgaccugcggccuguucgggcugguguccuuccuccugcugugcggccgcagcugcuccacgaccuacaaggggguguacgagcuccagacccuggagcuggacauggccagccucaacaugaccaugccgcuguccugcacgaagaacaacagccaccacuacaucauggucggcaacgagaccggccuggagcucacccugaccaacacguccaucaucaaccacaaguucugcaaccugagcgacgcccacaagaagaaccucuacgaccacgcccugauguccaucaucagcaccuuccaccuguccauccccaacuucaaccaguacgaggccaugagcugcgacuucaacgggggcaagaucuccgugcaguacaaccucagccacgcguacgccguggacgccgccaaccacugcgggaccaucgcgaacggcguccugcagaccuucaugcggauggccuggggcggguccuacaucgcccuggacagcggcaagggguccugggacugcaucaugacgagcuaccaguaccucaucauccagaacaccaccugggaggaccacugccaguucucccgccccagccccaucggcuaccuggggcugcucagccagcggacccgcgacaucuacaucucccggcgccgccggggcacguucaccuggacccucagcgacuccgagggcaacgagacccccgggggcuacugccugacgcgguggaugcugaucgaggccgagcucaagugcuucgggaacaccgccguggcgaagugcaacgagaagcacgacgaggaguucugcgacaugcugcgccuguucgacuucaacaagcaggccauccggcgccucaaggcccccgcccagaugagcauccagcugaucaacaaggccgugaacgcgcugaucaacgaccagcucaucaugaagaaccaccuccgggacaucaugggcauccccuacugcaacuacuccaaguacugcuaccugaaccacaccgucaccgggaagacgagccugccccgcugcugccugguguccaacggcagcuaccugaacgagacccacuucuccgacgacaucgagcagcaggccgacaacaugaucaccgagcuccugcagaaggaguacaucgaccggcagggcaagaccccgcuggggcucguggaccuguucgucuucagcacguccuucuaccugaucagcaucuuccugcaccucgugaagaucccgacccaccgccacgugaucggcaagcccugccccaagccccaccggcugaaccacauggggaucugcuccugcggccuguacaagcacccggggguccccgugaaguggaagcgcugaggacuaguuauaagacugacuagcccgaugggccucccaacgggcccuccuccccuccuugcaccgagauuaaucaaaggcucuuuucagagccaccaaaaaaaaaaaaaaaaaaaaaaaaaaaaaaaaaaaaaaaaaaaaaaaaaaaaaaaaaaaaaaaaagaauu

SEQ ID NO: 25973 - RNA, 1655 nt, Artificial Sequence
  mRNA product Design i-3 (hSL-A64-N5) comprising derived and/or modified sequence from LASV(LASV1000-NIG-2009;Clade II)__AIT17782__GPCmut3 (opt1)
aggagaaagcuuaccaugggccagaucaucaccuucuuccaggaggugccccacgucaucgaggaggugaugaacaucgugcugaucgcccucagccugcuggccauccucaaggggaucuacaacgucgcgaccugcggccuguucgggcugguguccuuccuccugcugugcggccgcagcugcuccacgaccuacaaggggguguacgagcuccagacccuggagcuggacauggccagccucaacaugaccaugccgcuguccugcacgaagaacaacagccaccacuacaucauggucggcaacgagaccggccuggagcucacccugaccaacacguccaucaucaaccacaaguucugcaaccugagcgacgcccacaagaagaaccucuacgaccacgcccugauguccaucaucagcaccuuccaccuguccauccccaacuucaaccaguacgaggccaugagcugcgacuucaacgggggcaagaucuccgugcaguacaaccucagccacaccuacgcgguggacgccgccaaccacugcgggaccaucgccaacggcguccugcagacguucaugcggauggcguggggcggguccuacaucgcccuggacagcggcaagggguccugggacugcaucaugaccagcuaccaguaccucaucauccagaacaccaccugggaggaccacugccaguucucccgccccagccccaucggcuaccuggggcugcucagccagcggacgcgcgacaucuacaucucccggcgccgccggggcaccuucaccuggacccucagcgacuccgagggcaacgagacgcccgggggcuacugccugacccgguggaugcugaucgaggccgagcucaagugcuucgggaacaccgccguggccaagugcaacgagaagcacgacgaggaguucugcgacaugcugcgccuguucgacuucaacaagcaggcgaucaagcggcucaagacccccgcccagaugagcauccagcugaucaacaaggccgugaacgcccugaucaacgaccagcucaucaugaagaaccaccuccgcgacaucaugggcauccccuacugcaacuacuccaaguacugcuaccugaaccacacggucaccgggaagaccagccugccccggugcugccugguguccaacggcagcuaccugaacgagacccacuucuccgacgacaucgagcagcaggccgacaacaugaucacggagcuccugcagaaggaguacaucgaccgccagggcaagaccccgcuggggcucguggaccuguucgucuucagcaccuccuucuaccugaucagcaucuuccugcaccucgugaagaucccgacccaccggcacguggucggcaagcccugccccaagccccaccgccugaaccacauggggaucugcuccugcggccuguacaagcacccgggggugcccgugaaguggaagcggugaggacuaguuauaagacugacuagcccgaugggccucccaacgggcccuccuccccuccuugcaccgagauuaaucaaaggcucuuuucagagccaccaaaaaaaaaaaaaaaaaaaaaaaaaaaaaaaaaaaaaaaaaaaaaaaaaaaaaaaaaaaaaaaaagaauu

SEQ ID NO: 25974 - RNA, 1655 nt, Artificial Sequence
  mRNA product Design i-3 (hSL-A64-N5) comprising derived and/or modified sequence from LASV(LASV221-NIG-2010;Clade II)__AIT17624__GPCmut3 (opt1)
aggagaaagcuuaccaugggccagaucaucaccuucuuccaggaggugccccacgucaucgaggaggugaugaacaucgugcugaucgcccucagccugcuggccauccucaaggggaucuacaacgucgcgaccugcggccuguucgggcugguguccuuccuccugcugugcggccgcagcugcuccacgaccuacaaggggguguacgagcuccagacccuggagcuggacauggccagccucaacaugaccaugccgcuguccugcacgaagaacaacagccaccacuacaucauggucggcaacgagaccggccuggagcucacccugaccaacacguccaucaucaaccacaaguucugcaaccugagcgacgcccacaagaagaaccucuacgaccacgcccugauguccaucaucagcaccuuccaccuguccauccccaacuucaaccaguacgaggccaugagcugcgacuucaacgggggcaagaucuccgugcaguacaaccucagccacaccuacgcgaucgacgccgccaaccacugcgggaccaucgccaacggcgugcugcagacguucaugcggauggcguggggcggguccuacaucgcccuggacagcggcaagggguccugggacugcaucaugaccagcuaccaguaccucaucauccagaacaccaccugggaggaccacugccaguucucccgccccagccccaucggcuaccuggggcugcucagccagcggacgcgcgacaucuacaucucccggcgccgccggggcaccuucaccuggacccucagcgacuccgagggcaacgagacgcccgggggcuacugccugacccgguggaugcugaucgaggccgagcucaagugcuucgggaacaccgccgucgccaagugcaacgagaagcacgacgaggaguucugcgacaugcugcgccuguucgacuucaacaagcaggcgauccggcgccucaagacccccgcccagaugagcauccagcugaucaacaaggccgugaacgcccugaucaacgaccagcucaucaugaagaaccaccuccgggacaucaugggcauccccuacugcaacuacuccaaguacugcuaccugaaccacacggugaccgggaagaccagccugccccgcugcugccuggucuccaacggcagcuaccugaacgagacccacuucuccgacgacaucgagcagcaggccgacaacaugaucacggagaugcuccagaaggaguacauggaccggcagggcaagaccccgcuggggcugguggaccucuucguguucagcaccuccuucuaccugaucagcaucuuccugcaccuggucaagaucccgacccaccgccacgugaucggcaagcccugccccaagccccaccggcucaaccacauggggaucugcuccugcggccuguacaagcacccgggggugcccgucaaguggaagcgcugaggacuaguuauaagacugacuagcccgaugggccucccaacgggcccuccuccccuccuugcaccgagauuaaucaaaggcucuuuucagagccaccaaaaaaaaaaaaaaaaaaaaaaaaaaaaaaaaaaaaaaaaaaaaaaaaaaaaaaaaaaaaaaaaagaauu

SEQ ID NO: 25975 - RNA, 1655 nt, Artificial Sequence
  mRNA product Design i-3 (hSL-A64-N5) comprising derived and/or modified sequence from LASV(LASV237-NIG-2010;Clade II)__AIT17638__GPCmut3 (opt1)
aggagaaagcuuaccaugggccagaucaucaccuucuuccaggaggugccccacgucaucgaggaggugaugaacaucgugcugaucgcccucagccugcuggccauccucaaggggaucuacaacgucgcgaccugcggccuguucgggcugguguccuuccuccugcugugcggccgcagcugcuccacgaccuacaaggggguguacgagcuccagacccuggagcuggacauggccagccucaacaugaccaugccgcuguccugcacgaagaacaacagccaccacuacaucauggucggcaacgagaccggccuggagcucacccugaccaacacguccaucaucaaccacaaguucugcaaccugagcgacgcccacaagaaggaccucuacgaccacgcccugauguccaucaucagcaccuuccaccuguccauccccaacuucaaccaguacgaggccaugagcugcgacuucaacgggggcaagaucuccgugcaguacaaccucagccacaccuacgcgguggacgccgccaaccacugcgggaccaucgccaacggcguccugcagacguucaugcggauggcguggggcggguccuacaucgcccuggacagcggcaagggguccugggacugcaucaugaccagcuaccaguaccucaucauccagaacaccaccugggaggaccacugccaguucucccgccccagccccaucggcuaccuggggcugcucagccagcggacgcgcgacaucuacaucucccggcgccgccggggcaccuucaccuggacccucagcgacuccgagggcaacgagacgcccgggggcuacugccugacccgguggaugcugaucgaggccgagcucaagugcuucgggaacaccgccguggccaagugcaacgagaagcacgacgaggaguucugcgacaugcugcgccuguucgacuucaacaagcaggcgauccggcgccucaagacccccgcccagaugagcauccagcugaucaacaaggccgugaacgcccugaucaacgaccagcucaucaugaagaaccaccuccgggacaucaugggcauccccuacugcaacuacuccaaguacugcuaccugaaccacacggucaccgggaagaccagccugccccgcugcugccugguguccaacggcagcuaccugaacgagacccacuucuccgacgacaucgagcagcaggccgacaacaugaucacggagcuccugcagaaggaguacauggaccggcagggcaagaccccgcuggggcucguggaccuguucgucuucagcaccuccuucuaccugaucagcaucuuccugcaccucaucaagaucccgacccaccgccacaucacgggcaagcccugccccaagccccaccggcugaaccacauggggaucugcuccugcggccuguacaagcacccgggggugcccgugaaguggaagcgcugaggacuaguuauaagacugacuagcccgaugggccucccaacgggcccuccuccccuccuugcaccgagauuaaucaaaggcucuuuucagagccaccaaaaaaaaaaaaaaaaaaaaaaaaaaaaaaaaaaaaaaaaaaaaaaaaaaaaaaaaaaaaaaaaagaauu

SEQ ID NO: 25976 - RNA, 1655 nt, Artificial Sequence
  mRNA product Design i-3 (hSL-A64-N5) comprising derived and/or modified sequence from LASV(LASV253-NIG-2011;Clade II)__AIT17670__GPCmut3 (opt1)
aggagaaagcuuaccaugggccagaucaucaccuucuuccaggaggugccccacgucaucgaggaggugaugaacaucgugcugaucgcccucagccugcuggccauccucaaggggaucuacaacgucgcgaccugcggccuguucgggcugguguccuuccuccugcugugcggccgcagcugcuccacgaccuacaaggggguguacgagcuccagacccuggagcuggacauggccagccucaacaugaccaugccgcuguccugcacgaagaacaacagccaccacuacaucauggucggcaacgagaccggccuggagcucacccugaccaacacguccaucaucaaccacaaguucugcaaccugagcgacgcccacaagaagaaccucuacgaccacgcccugauguccaucaucagcaccuuccaccuguccauccccaacuucaaccaguacgaggccaugagcugcgacuucaacgggggcaagaucuccgugcaguacaaccucagccacaccuacgcgguggacgccgccaaccacugcgggaccaucgccaacggcguccugcagacguucaugcggauggcguggggcggguccuacaucgcccuggacagcggcaagggguccugggacugcaucaugaccagcuaccaguaccucaucauccagaacaccaccugggaggaccacugccaguucucccgccccagccccaucggcuaccuggggcugcucagccagcggacgcgcgacaucuacaucucccggcgccgccggggcaccuucaccuggacccucagcgacuccgagggcaacgagacgcccgggggcuacugccugacccgguggaugcugaucgaggccgagcucaagugcuucgggaacaccgccguggccaagugcaacgagaagcacgacgaggaguucugcgacaugcugcgccuguucgacuucaacaagcaggcgauccggcgccucaaggcccccgcccagaugagcauccagcugaucaacaaggccgugaacgcccugaucaacgaccagcucaucaugaagaaccaccuccgggacaucaugggcaucccguacugcaacuacuccaaguacugcuaccugaaccacaccgucacggggcgcaccagccugccccggugcugccugguguccaacggcagcuaccugaacgagacccacuucuccgacgacaucgagcagcaggcggacaacaugaucaccgagcuccugcagaaggaguacaucgaccgccagggcaagacgccccuggggcucguggaccuguucgucuucagcaccuccuucuaccugaucagcaucuuccugcaccucgugaagaucccgacccaccggcacaucaucggcaagcccugccccaagccccaccgccugaaccacauggggaucugcuccugcggccuguacaagcacccgggggugcccgucaaguggaagcggugaggacuaguuauaagacugacuagcccgaugggccucccaacgggcccuccuccccuccuugcaccgagauuaaucaaaggcucuuuucagagccaccaaaaaaaaaaaaaaaaaaaaaaaaaaaaaaaaaaaaaaaaaaaaaaaaaaaaaaaaaaaaaaaaagaauu

SEQ ID NO: 25977 - RNA, 1655 nt, Artificial Sequence
  mRNA product Design i-3 (hSL-A64-N5) comprising derived and/or modified sequence from LASV(LASV254-NIG-2011;Clade II)__AIT17674__GPCmut3 (opt1)
aggagaaagcuuaccaugggccagaucaucaccuucuuccaggaggugccccacgucaucgaggaggugaugaacaucgugcugaucgcccucagccugcuggccauccucaaggggaucuacaacgucgcgaccugcggccuguucgggcugguguccuuccuccugcugugcggccgcagcugcuccacgaccuacaaggggguguacgagcuccagacccuggagcuggacaugaccaaccucaacaugacgaugccgcugagcugcaccaagaacaacucccaccacuacaucauggucggcaacgagaccggccuggagcucacccugacgaacaccagcaucaucaaccacaaguucugcaaccuguccgacgcccacaagaagaaccucuacaaccacgcccugaugagcaucaucuccaccuuccaccugagcauccccaacuucaaccaguacgaggccauguccugcgacuucaacgggggcaagaucagcgugcaguacaaccucucccacagcuacgccguggacgcggccaaccacugcgggaccaucgccaacggcguccugcagacguucaugcggauggccuggggcggguccuacaucgcgcuggacagcggcaaggggaacugggacugcaucaugaccuccuaccaguaccucaucauccagaacaccaccugggaggaccacugccaguucagccgccccucccccaucggcuaccuggggcugcucagccagcggacgcgcgacaucuacaucagccggcgccgccggggcaccuucaccuggacccucuccgacagcgagggcaacgagacgcccgggggcuacugccugacccgguggaugcugaucgaggccgagcucaagugcuucgggaacaccgccguggccaagugcaacgagaagcacgacgaggaguucugcgacaugcugcgccuguucgacuucaacaagcaggccauccggcgccucaagacccccgcgcaggccaacauccagcugaucaacaaggccgugaacgcccugaucaacgaccagcucaucaugaagaaccaccuccgggacaucaugggcauccccuacugcaacuacuccaaguacugcuaccugaaccacacggucaccgggaagaccagccugccccgcugcugccugguguccaacggcagcuaccugaacgagacccacuucuccgacgacaucgagcagcaggccgacaacaugaucacggagcuccugcagaaggaguacauggaccggcagggcaagaccccgcuggggcucguggaccuguucgucuucagcaccuccuucuaccugaucagcaucuuccugcaccucgugaagaucccgacccaccgccacgugaucggcaagcccugccccaagccccaccggcugaaccacauggggaucugcuccugcggccuguacaagcacccggggguccccgugaaguggaagcgcugaggacuaguuauaagacugacuagcccgaugggccucccaacgggcccuccuccccuccuugcaccgagauuaaucaaaggcucuuuucagagccaccaaaaaaaaaaaaaaaaaaaaaaaaaaaaaaaaaaaaaaaaaaaaaaaaaaaaaaaaaaaaaaaaagaauu

SEQ ID NO: 25978 - RNA, 1655 nt, Artificial Sequence
  mRNA product Design i-3 (hSL-A64-N5) comprising derived and/or modified sequence from LASV(Nig08-A19;Clade III)__ADU56618__GPCmut3 (opt1)
aggagaaagcuuaccaugggccagaucgugaccuucuuccaggaggucccccacgugaucgaggaggugaugaacaucguccugaucgcccucagcauccuggccauccugaaggggcucuacaacaucgcgaccugcggccugaucgggcuggugacguuccuccugcuguccggccgcagcugcuccaugaccuacaaggggguguacgagcuccagacccuggagcugaacaugaacacccucaacaugacgaugccgcugagcugcaccaagaacaacucccaccacuacaucauggucggcaacgagaccggccuggagcucacccugacgaacaccagccugcuccaccacaaguucugcaaccuguccgacgcccacaagaagaaccuguacgaccacacccucaugagcaucaucuccaccuuccaccugagcauccccaacuucaaccaguacgaggccauguccugcgacuucaacgggggcaagaucacggugcaguacaaccugagccacuccuacgccaucgacgccgcgaaccacugcgggaccguggccaacggcguccuccagaccuucaugcggauggccuggggcgggagcuacaucgcccuggacuccggccgcgggaagugggacugcaucaugaccagcuaccaguaccugaucauccagaacacgaccugggaggaccacugccaguucucccggcccagccccaucggcuaccucgggcugcugucccagcgcacccgggacaucuacaucagccgccggcgccggggcaccuucacguggacccugagcgacuccgagggcaacgagacccccgggggcuacugccucacccgcuggaugcugaucgaggcggagcugaagugcuucgggaacacggccguggccaagugcaacgagaagcacgacgaggaguucugcgacaugcuccggcuguucgacuucaacaagcaggccauccgccggcugaaggcccccgcgcagaugagcauccagcucaucaacaaggccgugaacgcccugaucaacgaccagcugaucaugaagaaccaccuccgcgacaucaugggcauccccuacugcaacuacuccaaguacugcuaccugaaccacaccagcaccgggcggaccucccugccccgcugcugccucgucagcaacggcuccuaccugaacgagacgcacuucagcgacgacaucgagcagcaggccgacaacaugaucaccgagaugcugcagaaggaguaccucgaccggcagggcaagaccccgcuggggcugguggaccuguucguguucuccaccagcuucuaccucaucuccaucuuccugcaccuggucaagaucccgacgcaccgccacaucgugggcaagcccugccccaagccccaccggcucaaccacauggggaucugcagcugcggccuguacaagcagccgggggugcccguccgcuggaagcggugaggacuaguuauaagacugacuagcccgaugggccucccaacgggcccuccuccccuccuugcaccgagauuaaucaaaggcucuuuucagagccaccaaaaaaaaaaaaaaaaaaaaaaaaaaaaaaaaaaaaaaaaaaaaaaaaaaaaaaaaaaaaaaaaagaauu

SEQ ID NO: 25979 - RNA, 1658 nt, Artificial Sequence
  mRNA product Design i-3 (hSL-A64-N5) comprising derived and/or modified sequence from LASV(G1180-SLE-2010;Clade IV)__AIT17168__GPCmut3 (opt1)
aggagaaagcuuaccaugggccagaucgugaccuucuuccaggaggucccccacgugaucgaggaggugaugaacaucguccugaucgcccucagcauccuggccgugcugaaggggcucuacaacuucgcgaccugcggccugguggggcugcucaccuuccugcugcucugcggccgcuccugcaccgccagccgguacaagggggucuacgagcugcagacccuggagcucaacauggagacccugaacaugacgaugccgcuguccugcaccaagaacaacagccaccacuacaucauggugggcaacgagaccggccucgagcugacccugacgaacaccuccaucaucaaccacaaguucugcaaccucagcgacgcccacaagaagaaccuguacgaccacgcccugauguccaucaucagcaccuuccaccucuccauccccaacuucaaccaguacgaggccaugagcugcgacuucaacgggggcaagaucuccgugcaguacaaccugagccacuccuacgcgggggacgccgccaaccacugcggcaccgucgccaacggggugcugcagacguucaugcgcauggcguggggcggcagcuacaucgcccucgacuccgggcacggcagcugggacugcaucaugaccuccuaccaguaccugaucauccagaacaccaccugggaggaccacugccaguucagccggcccucccccaucggguaccugggccuccugagccagcgcacgcgggacaucuacaucagccgccggcgccggggcaccuucaccuggacccuguccgacagcgaggggaaggacacgccgggcggguacugccugacccgcuggaugcucaucgaggccgagcugaagugcuucggcaacaccgccguggccaagugcaacgagaagcacgacgaggaguucugcgacaugcugcggcuguucgacuucaacaagcaggcgauccagcgccugaaggcccccgcccagauguccauccagcugaucaacaaggccgucaacgcccucaucaacgaccagcugaucaugaagaaccaccuccgggacaucauggggauccccuacugcaacuacagcaaguacugcuaccucaaccacaccacgaccggcaagaccucccugcccaagugcugccuggugagcaacggcuccuaccucaacgagacccacuucagcgacgacaucgagcagcaggcggacaacaugaucacggagaugcugcagaaggaguacauggagcgccaggggaagacgccccugggccucguggaccuguucgucuucuccaccagcuucuaccugaucuccaucuuccugcaccucgugaagaucccgacccaccggcacaucgugggcaagagcugccccaagccccaccgccugaaccacauggggaucugcuccugcgggcuguacaagcagcccggcgucccggugaaguggaagcggugaggacuaguuauaagacugacuagcccgaugggccucccaacgggcccuccuccccuccuugcaccgagauuaaucaaaggcucuuuucagagccaccaaaaaaaaaaaaaaaaaaaaaaaaaaaaaaaaaaaaaaaaaaaaaaaaaaaaaaaaaaaaaaaaagaauu

SEQ ID NO: 25980 - RNA, 1658 nt, Artificial Sequence
  mRNA product Design i-3 (hSL-A64-N5) comprising derived and/or modified sequence from LASV(G1442-SLE-2011;Clade IV)__AIT17180__GPCmut3 (opt1)
aggagaaagcuuaccaugggccagaucgugaccuucuuccaggaggucccccacgugaucgaggaggugaugaacaucguccugaucgcccucagcauccuggccgugcugaaggggcucuacaacguggcgaccugcggccugaucgggcuggucacguuccuccugcugugcggccgcuccugcaccaccacccucuacaaggggguguacgagcugcagacgcuggagcucaacauggagacccugaacaugaccaugccgcugagcugcaccaagaacaacucccaccacuacauccgggugggcaacgagacgggccucgagcugacccugaccaacaccagcaucaucaaccacaaguucugcaaccucuccgacgcccacaagaagaaccuguacgaccacgcccugaugagcaucaucuccacguuccaccucagcauccccaacuucaaccaguacgaggccauguccugcgacuucaacgggggcaagaucagcguccaguacaaccugucccacagcuacgccggggacgcggccaaccacugcggcaccguggccaacggggugcugcagaccuucaugcgcauggccuggggcggcuccuacaucgcgcucgacagcgggcggggcaacugggacugcaucaugaccuccuaccaguaccugaucauccagaacacgaccugggacgaccacugccaguucagccgccccucccccaucggguaccugggccuccugagccagcggacccgcgacgucuacaucucccggcgccgccggggcaccuucacguggacccugagcgacagcgaggggaaggacaccccgggcggguacugccugacccgguggaugcucaucgaggccgagcugaagugcuucggcaacacggccguggccaagugcaacgagaagcacgacgaggaguucugcgacaugcugcgccucuucgacuucaacaagcaggccauccagcggcugaaggcgcccgcccagauguccauccagcugaucaacaaggccgugaacgcccucaucaacgaccagcugaucaugaagaaccaccuccgcgacaucauggggauccccuacugcaacuacagcaaguacugcuaccugaacaacaccgccaccggcaagaccucccugcccaagugcugccugaucagcaacggcuccuaccucaacgagacgcacuucagcgacgacaucgagcaggaggcggacaacaugaucaccgagaugcugcagaaggaguacauggagcggcaggggaagacgccccugggccucgucgaccuguucguguucuccaccagcuucuaccugaucuccaucuuccugcaccucgugaagaucccgacccaccgccacaucgucggcaagagcugccccaagccccaccggcugaaccacauggggaucugcuccugcgggcuguacaagcagcccggcgugccggugcgcuggaagcggugaggacuaguuauaagacugacuagcccgaugggccucccaacgggcccuccuccccuccuugcaccgagauuaaucaaaggcucuuuucagagccaccaaaaaaaaaaaaaaaaaaaaaaaaaaaaaaaaaaaaaaaaaaaaaaaaaaaaaaaaaaaaaaaaagaauu

SEQ ID NO: 25981 - RNA, 1658 nt, Artificial Sequence
  mRNA product Design i-3 (hSL-A64-N5) comprising derived and/or modified sequence from LASV(G3010-SLE-2013;Clade IV)__AIT17344__GPCmut3 (opt1)
aggagaaagcuuaccaugggccagaucgugaccuucuuccaggaggucccccacgugaucgaggaggugaugaacaucguccugaucgcccucagcauccuggccgugcugaaggggcucuacaacuucgcgaccugcggccugguggggcuggucacguuccuccugcugugcggccgcuccugcaccaccagccucuacaaggggguguacgagcugcagacccuggagcucaacauggagacgcugaacaugaccaugccgcuguccugcaccaagaacaacagccaccacuacaucauggugggcaacgagaccggccucgagcugacgcugaccaacaccuccaucaucaaccacaaguucugcaaccucagcgacgcccacaagaagaaccuguacaaccacgcccugauguccaucaucagcaccuuccaccucuccauccccaacuucaaccaguacgaggccaugagcugcgacuucaacgggggcaagaucuccguccaguacaaccugagccacuccuacgccggggacgcggccagccacugcggcacgguggccaacggggugcugcagaccuucaugcggauggccuggggcggcuccuacaucgcgcucgacagcggguacggcaagugggacugcaucaugaccuccuaccaguaccugaucauccagaacaccacgugggaggaccacugccaguucagccgccccucccccaucggguaccugggccuccugagccagcggacccgcgacaucuacaucagccggcgccgccggggcaccuucaccuggacgcuguccgacagcgaggggaaggacaccccgggcggguacugccugacccgguggaugcucaucgaggccgagcugaagugcuucggcaacaccgccgucgccaagugcaacgagaagcacgacgaggaguucugcgacaugcugcgccucuucgacuucaacaagcaggccauccagcggcugaagacgcccgcgcagauguccauccagcugaucaacaaggccgugaacgcccucaucaacgaccagcugaucaugaagaaccaccuccgcgacaucauggggauccccuacugcaacuacagcaaguacugcuaccugaaccacaccaccaccggcaagacgucccugcccaagugcugccuggugagcaacggcuccuaccucaacgagacccacuucagcgacgacaucgagcagcaggccgacaacaugaucaccgagaugcugcagaaggaguacauggagcggcaggggaagacgccccugggccucgucgaccuguucguguucuccaccagcuucuaccugaucuccaucuuccugcaccucgugaagaucccgacccaccgccacaucgucggcaagagcugccccaagccccaccggcugaaccacauggggaucugcuccugcgggcuguacaagcagcccggcgugccggugcgcuggaagcggugaggacuaguuauaagacugacuagcccgaugggccucccaacgggcccuccuccccuccuugcaccgagauuaaucaaaggcucuuuucagagccaccaaaaaaaaaaaaaaaaaaaaaaaaaaaaaaaaaaaaaaaaaaaaaaaaaaaaaaaaaaaaaaaaagaauu

SEQ ID NO: 25982 - RNA, 1658 nt, Artificial Sequence
  mRNA product Design i-3 (hSL-A64-N5) comprising derived and/or modified sequence from LASV(G502-SLE-2009;Clade IV)__AIT17126__GPCmut3 (opt1)
aggagaaagcuuaccaugggccagaucgugaccuucuuccaggaggucccccacgugaucgaggaggugaugaacaucguccugaucgcccucagcauccuggccgugcugaaggggcucuacaacuucgcgaccugcggccugguggggcugcucacguuccugcugcucugcggccgcuccugcaccaccgggcuguacaagggcgucuacgagcugcagacccucgagcugaacauggagacgcugaacaugaccaugccgcucagcugcaccaagaacaacucccaccacuacaucauggugggcaacgagaccgggcuggagcugacgcucaccaacaccagcaucaucaaccacaaguucugcaaccuguccgacgcccacaagaagaaccuguacgaccacgcccucaugagcaucaucuccaccuuccaccugagcauccccaacuucaaccaguacgaggccauguccugcgacuucaacggcgggaagaucagcgugcaguacaaccugucccacagcuacgccggcgacgcggccgaccacugcgggacggucgccaacggcgugcuccagaccuucaugcggauggccuggggcggguccuacaucgcgcuggacagcggccgcgggcggugggacugcaucaugaccuccuaccaguaccugaucauccagaacaccacgugggaggaccacugccaguucagccgccccucccccaucggcuaccucggccugcugagccagcggacccgcgacaucuacaucucccggcgccgccgggggaccuucaccuggacgcugagcgacagcgagggcaaggacacccccgggggcuacugccucacccgguggaugcugaucgaggccgagcugaagugcuucgggaacaccgccguggccaagugcaacgagaagcacgacgaggaguucugcgacaugcuccgccuguucgacuucaacaagcaggccauccagcggcugaaggcgcccgcccagauguccauccagcucaucaacaaggccgucaacgcccugaucaacgaccagcuggugaugaagaaccaccuccgcgacaucaugggcauccccuacugcaacuacagccgguacugcuaccugaaccacacgaccaccggccgcaccucccugcccaagugcugccucgugagcaacggguccuaccugaacgagacgcacuucagcgacgacaucgagcagcaggccgacaacaugaucaccgagaugcugcagaaggaguacauggagcggcagggcaagaccccgcucgggcuggucgaccuguucguguucuccaccagcuucuaccugaucuccaucuuccuccaccuggugaagaucccgacgcaccgccacaucgucggcaagagcugccccaagccccaccggcugaaccacauggggaucugcuccugcggccucuacaagcagcccggcgugccggugaaguggaagcgcugaggacuaguuauaagacugacuagcccgaugggccucccaacgggcccuccuccccuccuugcaccgagauuaaucaaaggcucuuuucagagccaccaaaaaaaaaaaaaaaaaaaaaaaaaaaaaaaaaaaaaaaaaaaaaaaaaaaaaaaaaaaaaaaaagaauu

SEQ ID NO: 25983 - RNA, 1658 nt, Artificial Sequence
  mRNA product Design i-3 (hSL-A64-N5) comprising derived and/or modified sequence from LASV(G733-SLE-2010;Clade IV)__AIT17154__GPCmut3 (opt1)
aggagaaagcuuaccaugggccagaucgugaccuucuuccaggaggucccccacgugaucgaggaggugaugaacaucguccugaucgcccucagcauccuggccgugcugaaggggcucuacaacuucgcgaccugcggcaucguggggcuggucuccuuccugcuccugugcggccgcagcugcacgaccucccuguacaaggggguguacgagcuccagacccuggagcugaacauggagacccucaacaugacgaugccgcugagcugcaccaagaacaacucccaccacuacaucauggugggcaacgagaccggccuggagcucacccugacgaacaccagcaucaucaaccacaaguucugcaaccuguccgacgcccacaagaagaaccucuacgaccacgcccugaugagcaucaucuccaccuuccaccugagcauccccaacuucaaccaguacgaggccauguccugcgacuucaacgggggcaagaucagcguccaguacaaccucucccacagcuacgccggggacgcggccaaccacugcggcaccaucgccaacggggugcugcagacguucaugcggauggccuggggcggcuccuacaucgcgcuggacagcgggcgcgaccggugggacugcaucaugaccuccuaccaguaccucaucauccagaacaccaccugggaggaccacugccaguucagccgccccucccccaucggcuaccuggggcugcucagccagcggacgcgcgacaucuacaucagccggcgccgccggggcaccuucaccuggacccucuccgacagcgagggcaaggacacgcccgggggcuacugccugacccgguggaugcugaucgaggccgagcucaagugcuucgggaacaccgccguggccaagugcaacgagaagcacgacgaggaguucugcgacaugcugcgccuguucgacuucaacaagcaggccauccagcggcucaaggcgcccgcccagauguccauccagcugaucaacaaggccgucaacgcccugaucaacgaccagcucaucaugaagaaccaccuccgcgacaucaugggcauccccuacugcaacuacagcaaguacugcuaccugaaccacaccacgaccgggaagaccucccugcccaagugcugccuggugagcaacggcuccuaccugaacgagacccacuucagcgacgacaucgagcagcaggccgacaacaugaucacggagaugcuccagaaggaguacauggagcggcagggcaagaccccgcuggggcugguggaccucuucgucuucuccaccagcuucuaccugaucuccaucuuccugcaccuggugaagaucccgacccaccgccacguggucggcaagagcugccccaagccccaccggcucaaccacauggggaucugcuccugcggccuguacgggcagcccggcgugccggugaaguggaagcgcugaggacuaguuauaagacugacuagcccgaugggccucccaacgggcccuccuccccuccuugcaccgagauuaaucaaaggcucuuuucagagccaccaaaaaaaaaaaaaaaaaaaaaaaaaaaaaaaaaaaaaaaaaaaaaaaaaaaaaaaaaaaaaaaaagaauu

SEQ ID NO: 25984 - RNA, 1658 nt, Artificial Sequence
  mRNA product Design i-3 (hSL-A64-N5) comprising derived and/or modified sequence from MOPV/LASV reassortant(IGS-1;Clade IV)__AFY05576__GPCmut3 (opt1)
aggagaaagcuuaccaugggccagaucgugaccuucuuccaggaggucccccacgugaucgaggaggugaugaacaucguccugaucgcccucagcgugcuggccgugcugaaggggcucuacaacuucgcgaccugcggccuggucgggcuggugacguuccuccugcugugcggccgcuccugcaccaccagccucuacaaggggguguacgagcugcagacccuggagcucaacauggagacgcugaacaugaccaugccgcuguccugcaccaagaacaacagccaccacuacaucauggucggcaacgagaccggccucgagcugacgcugaccaacaccuccaucaucaaccacaaguucugcaaccucagcgacgcccacaagaagaaccuguacgaccacgcccugauguccaucaucagcaccuuccaccucuccauccccaacuucaaccaguacgaggccaugagcugcgacuucaacgggggcaagaucuccgugcaguacaaccugagccacuccuacgccggggacgcggccaaccacugcggcacgguggccaacgggguccugcagaccuucaugcggauggccuggggcggcagcuacaucgcgcucgacuccgggcgcggcaacugggacugcaucaugaccagcuaccaguaccugaucauccagaacaccacgugggaggaccacugccaguucucccggcccagccccaucggguaccugggccuccugucccagcgcacccgggacaucuacaucagccgccggcgccggggcaccuucaccuggacgcugagcgacuccgagggggaggacaccccgggcggguacugccugacccgcuggaugcucaucgaggccgagcugaagugcuucggcaacaccgccguggccaagugcaacgagaagcacgacgaggaguucugcgacaugcugcggcuguucgacuucaacaagcaggccauccagcgccugaaggcgcccgcccagaugagcauccagcugaucaacaaggccgugaacgcccucaucaacgaccagcugaucaugaagaaccaccuccgggacaucauggggauccccuacugcaacuacuccaaguacugcuaccucaaccacacgaccaccggccgcaccagccugcccaagugcugccuggucuccaacggcagcuaccucaacgagacgcacuucuccgacgacaucgagcagcaggccgacaacaugaucaccgagaugcugcagaaggaguacauggagcggcaggggaagacgccccugggccucguggaccuguucguguucagcaccuccuucuaccugaucagcaucuuccugcaccucgucaagaucccgacccaccgccacaucguggggaaguccugccccaagccccaccggcugaaccacaugggcaucugcagcugcgggcuguacaagcagcccggcgugccggucaaguggaagcgcugaggacuaguuauaagacugacuagcccgaugggccucccaacgggcccuccuccccuccuugcaccgagauuaaucaaaggcucuuuucagagccaccaaaaaaaaaaaaaaaaaaaaaaaaaaaaaaaaaaaaaaaaaaaaaaaaaaaaaaaaaaaaaaaaagaauu

SEQ ID NO: 25985 - RNA, 1658 nt, Artificial Sequence
  mRNA product Design i-3 (hSL-A64-N5) comprising derived and/or modified sequence from LASV(LM765-SLE-2012;Clade IV)__AIT17814__GPCmut3 (opt1)
aggagaaagcuuaccaugggccagaucgugaccuucuuccaggaggucccccacgugaucgaggaggugaugaacaucguccugaucgcccucagcauccuggccgugcugaaggggcucuacaacuucgcgaccugcggccugguggggcuggucacguuccuccugcugugcggccgcuccugcaccaccagccucuacaaggggguguacgagcugcagacccuggagcucaacauggagacgcugaacaugaccaugccgcuguccugcaccaagaacaacagccaccacuacaucauggugggcaacgagaccggccucgagcugacgcugaccaacaccuccaucaucgaccacaaguucugcaaccucagcgacgcccaccggaagaaccuguacgaccacgcccugauguccaucaucagcaccuuccaccucuccauccccaacuucaaccaguacgaggccaugagcugcgacuucaacgggggcaagaucuccguccaguacaaccugagccacuccuacgccaaggacgcggccgaccacugcgggacgguggccaacggcgugcugcagaccuucaugcgcauggccuggggcgggagcuacaucgcgcucgacuccggccgggggcgcugggacugcaucaugaccagcuaccaguaccugaucauccagaacaccacgugggaggaccacugccaguucucccggcccagccccaucggcuaccuggggcuccugucccagcgcacccgggacaucuacaucagccgccggcgccggggcaccuucaccuggacgcugagcgacuccgagggcaaggacacccccgggggcuacugccugacccgcuggaugcucaucgaggccgagcugaagugcuucgggaacaccgccgucgccaagugcaacgagaagcacgacgaggaguucugcgacaugcugcggcuguucgacuucaacaagcaggccauccagcgccugaaggcgcccgcccagaugagcauccagcugaucaacaaggccgugaacgcccucaucaacgaccagcugaucaugaagaaccaccuccgggacaucaugggcauccccuacugcaacuacuccaaguacugcuaccucaaccacacgaccaccgggaagaccagccugcccaagugcugccugguguccaacggcagcuaccucaacgagacgcacuucuccgacgacaucgagcagcaggccgacaacaugaucaccgagaugcugcagaaggaguacauggagcgccagggcaagaccccgcuggggcucgucgaccuguucguguucagcaccuccuucuaccugaucagcaucuuccugcaccucgugaagaucccgacgcaccggcacaucgucggcaagcccugccccaagccccaccgccugaaccacauggggaucugcuccugcggccuguacaagcagccgggggugcccgugaaguggaagcggugaggacuaguuauaagacugacuagcccgaugggccucccaacgggcccuccuccccuccuugcaccgagauuaaucaaaggcucuuuucagagccaccaaaaaaaaaaaaaaaaaaaaaaaaaaaaaaaaaaaaaaaaaaaaaaaaaaaaaaaaaaaaaaaaagaauu

SEQ ID NO: 25986 - RNA, 1658 nt, Artificial Sequence
  mRNA product Design i-3 (hSL-A64-N5) comprising derived and/or modified sequence from LASV(LM776-SLE-2012;Clade IV)__AIT17824__GPCmut3 (opt1)
aggagaaagcuuaccaugggccagaucgugaccuucuuccaggaggucccccacgugaucgaggaggugaugaacaucguccugaucgcccucagcauccuggccgugcugaaggggcucuacaacuucgcgaccugcggccugguggggcuggucacguuccuccugcugugcggccgcuccugcaccaccagcguguacaaggggguguacgagcuccagacccuggagcugaacauggagacgcucaacaugaccaugccgcuguccugcaccaagaacaacagccaccacuacaucauggucggcaacgagaccggccuggagcucacgcugaccaacaccuccaucaucaaccacaaguucugcaaccugagcgacgcccacaagaagaaccucuacgaccacgcccugauguccaucaucagcaccuuccaccuguccauccccaacuucaaccaguacgaggccaugagcugcgacuucaacgggggcaagaucuccgugcaguacaaccucagccacuccuacgccggggacgcggccaaccacugcggcacgguggccaacgggguccugcagaccuucaugcggauggccuggggcggcagcuacaucgcgcuggacuccgggcacggcaagugggacugcaucaugaccagcuaccaguaccucaucauccagaacaccacgugggaggaccacugccaguucucccgccccagccccaucggguaccugggccugcucucccagcggacccgcgacaucuacaucagccggcgccgccggggcaccuucaccuggacgcucagcgacuccgaggggaaggacaccccgggcggguacugccugacccgguggaugcugaucgaggccgagcucaagugcuucggcaacaccgccguggccaagugcaacgagaagcacgacgaggaguucugcgacaugcugcgccuguucgacuucaacaagcaggccauccagcggcucaaggcgcccgcccagaugagcauccagcugaucaacaaggccgugaacgcccugaucaacgaccagcucaucaugaagaaccaccuccgcgacaucauggggauccccuacugcaacuacuccaaguacugcuaccugaaccacacgaccaccggcaagaccagccugcccaagugcugccuggucuccaacggcagcuaccugaacgagacgcacuucuccgacgacaucgagcagcaggccgacaacaugaucaccgagaugcuccagaaggaguacauggagcggcaggggaagacgccccugggccugguggaccucuucguguucagcaccuccuucuaccugaucagcaucuuccugcaccuggucaagaucccgacccaccgccacaucguggggaaguccugccccaagccccaccggcucaaccacaugggcaucugcagcugcgggcuguacaagcagcccggcgugccgguccgcuggaagcggugaggacuaguuauaagacugacuagcccgaugggccucccaacgggcccuccuccccuccuugcaccgagauuaaucaaaggcucuuuucagagccaccaaaaaaaaaaaaaaaaaaaaaaaaaaaaaaaaaaaaaaaaaaaaaaaaaaaaaaaaaaaaaaaaagaauu

SEQ ID NO: 25987 - RNA, 1658 nt, Artificial Sequence
  mRNA product Design i-3 (hSL-A64-N5) comprising derived and/or modified sequence from LASV(Mad39;Clade IV)__ANH09722__GPCmut3 (opt1)
aggagaaagcuuaccaugggccagaucgugaccuucuuccaggaggucccccacgugaucgaggaggugaugaacaucguccugaucgcccucagcauccuggccgugcugaaggggcucuacaacguggcgaccugcggccugaucgggcuggucacguuccuccugcugugcggccgcuccugcaccaccacccucuacaaggggguguacgagcugcaggcccuggagcucaacauggagacgcugaacaugaccaugccgcugagcugcaccaagaacaacucccaccacuacauccgggugggcaacgagaccggccucgagcugacgcugaccaacaccagccucaucaaccacaaguucugcaaccuguccgacgcccacaagaagaaccuguacgaccacgcccucaugagcaucaucuccaccuuccaccugagcauccccaacuucaaccaguacgaggccauguccugcgacuucaacgacgggaagaucagcguccaguacaaccugucccacacguacgcgggcgacaccgccaaccacugcgggaccguggccaacggcgugcuccagaccuucaugcgcauggccuggggcgggagcuacaucgcgcuggacuccggccgcgggggcugggacugcaucaugacgagcuaccaguaccugaucauccagaacaccaccugggaggaccacugccaguucucccggcccagccccaucggguaccucggccugcugucccagcggacccgcgacaucuacaucagccggcgccgccggggcacguucaccuggacccuguccgacagcgaggggaaggacaccccgggcggguacugccucacgcgguggaugcugaucgaggccgagcugaagugcuucggcaacaccgccgucgccaagugcaacgagaagcacgacgaggaguucugcgacaugcuccgccuguucgacuucaacaagcaggccauccagcggcugaaggcgcccgcccagaugagcauccagcucaucaacaaggccgugaacgcccugaucaacgaccagcugaucaugaagaaccaccuccgcgacaucauggggauccccuacugcaacuacuccaaguacugcuaccugaaccacaccgugaccggcaagacgagccugcccaagugcugccucgucuccaacggcagcuaccugaacgagacccacuucuccgacgacaucgagcagcaggccgacaacaugaucaccgagaugcugcagaaggaguacauggagcggcaggggaagacgccccucggccugguggaccuguucguguucagcaccuccuucuaccugaucagcaucuuccuccaccuggucaagaucccgacccaccgccacgugguggggaagcccugccccaagccccaccggcugaaccacaugggcaucugcuccugcggguucuacaagcagccgggcguccccgugcgcuggaagcggugaggacuaguuauaagacugacuagcccgaugggccucccaacgggcccuccuccccuccuugcaccgagauuaaucaaaggcucuuuucagagccaccaaaaaaaaaaaaaaaaaaaaaaaaaaaaaaaaaaaaaaaaaaaaaaaaaaaaaaaaaaaaaaaaagaauu

SEQ ID NO: 25988 - RNA, 1658 nt, Artificial Sequence
  mRNA product Design i-3 (hSL-A64-N5) comprising derived and/or modified sequence from LASV(Z0947-SLE-2011;Clade IV)__AIT17840__GPCmut3 (opt1)
aggagaaagcuuaccaugggccagaucgugaccuucuuccaggaggucccccacgugaucgaggaggugaugaacaucguccugaucgcccucagcauccuggccgugcugaaggggcucuacaacuucgcgaccugcggccugguggggcuggucacguuccuccugcugugcggccgcuccugcaccaucagccucuacaaggggguguacgagcugcagacccuggagcucaacauggagacccugaacaugacgaugccgcuguccugcaccaagaacaacagccaccacuacaucauggugggcaacgagaccggccucgagcugacccugacgaacaccuccaucaucaaccacaaguucugcaaccucagcgacgcccacaagaagaaccuguacgaccacgcccugauguccaucaucagcaccuuccaccucuccauccccaacuucaaccaguacgaggccaugagcugcgacuucaacgggggcaagaucuccguccaguacaaccugagccacuccuacgccggggacgcggccaaccacugcggcaccguggccaacggggugcugcagacguucaugcggauggccuggggcggcagcuacaucgcgcucgacuccgggcgcgaccggugggacugcaucaugaccagcuaccaguaccugaucauccagaacaccaccugggaggaccacugccaguucucccgccccagccccaucggcuaccuggggcuccugucccagcggacgcgcgacaucuacaucagccggcgccgccggggcaccuucaccuggacccugagcgacuccgagggcaaggacacgcccgggggcuacugccugacccgguggaugcucaucgaggccgagcugaagugcuucgggaacaccgccgucgccaagugcaacgagaagcacgacgaggaguucugcgacaugcugcgccucuucgacuucaacaagcaggccauccagcggcugaaggcgcccgcccagaugagcauccagcugaucaacaaggccgugaacgcccucaucaacgaccagcugaucaugaagaaccaccuccgcgacaucaugggcauccccuacugcaacuacuccaaguacugcuaccugaaccacaccacgaccgggaagaccagccugcccaagugcugccugguguccaacggcagcuaccucaacgagacccacuucuccgacgacaucgagcagcaggccgacaacaugaucacggagaugcugcagaaggaguacauggagcggcagggcaagaccccgcuggggcucgucgaccuguucguguucagcaccuccuucuaccugaucagcaucuuccugcaccucgugaagaucccgacccaccgccacaucgucggcaagcccugccccaagccccaccggcugaaccacauggggaucugcuccugcggccuguacaagcagccgggggugcccgugaaguggaagcgcugaggacuaguuauaagacugacuagcccgaugggccucccaacgggcccuccuccccuccuugcaccgagauuaaucaaaggcucuuuucagagccaccaaaaaaaaaaaaaaaaaaaaaaaaaaaaaaaaaaaaaaaaaaaaaaaaaaaaaaaaaaaaaaaaagaauu

SEQ ID NO: 25989 - RNA, 1658 nt, Artificial Sequence
  mRNA product Design i-3 (hSL-A64-N5) comprising derived and/or modified sequence from LASV(Josiah;Clade IV)__NP_694870__GPCmut3 (opt1)
aggagaaagcuuaccaugggccagaucgugaccuucuuccaggaggucccccacgugaucgaggaggugaugaacaucguccugaucgcccucagcgugcuggccgugcugaaggggcucuacaacuucgcgaccugcggccuggucgggcuggugacguuccuccugcugugcggccgcuccugcaccaccagccucuacaaggggguguacgagcugcagacccuggagcucaacauggagacgcugaacaugaccaugccgcuguccugcaccaagaacaacagccaccacuacaucauggucggcaacgagaccggccucgagcugacgcugaccaacaccuccaucaucaaccacaaguucugcaaccucagcgacgcccacaagaagaaccuguacgaccacgcccugauguccaucaucagcaccuuccaccucuccauccccaacuucaaccaguacgaggccaugagcugcgacuucaacgggggcaagaucuccgugcaguacaaccugagccacuccuacgccggggacgcggccaaccacugcggcacgguggccaacgggguccugcagaccuucaugcggauggccuggggcggcagcuacaucgcgcucgacuccgggcgcggcaacugggacugcaucaugaccagcuaccaguaccugaucauccagaacaccacgugggaggaccacugccaguucucccggcccagccccaucggguaccugggccuccugucccagcgcacccgggacaucuacaucagccgccggcgccggggcaccuucaccuggacgcugagcgacuccgaggggaaggacaccccgggcggguacugccucacccgcuggaugcugaucgaggccgagcugaagugcuucggcaacaccgccguggccaagugcaacgagaagcacgacgaggaguucugcgacaugcuccggcuguucgacuucaacaagcaggccauccagcgccugaaggcgcccgcccagaugagcauccagcucaucaacaaggccgugaacgcccugaucaacgaccagcugaucaugaagaaccaccuccgggacaucauggggauccccuacugcaacuacuccaaguacugcuaccugaaccacacgaccaccggccgcaccagccugcccaagugcugccucgucuccaacggcagcuaccugaacgagacgcacuucuccgacgacaucgagcagcaggccgacaacaugaucaccgagaugcugcagaaggaguacauggagcggcaggggaagaccccgcucggccugguggaccuguucguguucagcaccuccuucuaccugaucagcaucuuccuccaccuggucaagauccccacgcaccgccacaucguggggaaguccugccccaagccccaccggcugaaccacaugggcaucugcagcugcgggcucuacaagcagccgggcgugcccgucaaguggaagcgcugaggacuaguuauaagacugacuagcccgaugggccucccaacgggcccuccuccccuccuugcaccgagauuaaucaaaggcucuuuucagagccaccaaaaaaaaaaaaaaaaaaaaaaaaaaaaaaaaaaaaaaaaaaaaaaaaaaaaaaaaaaaaaaaaagaauu

SEQ ID NO: 25990 - RNA, 1655 nt, Artificial Sequence
  mRNA product Design i-3 (hSL-A64-N5) comprising derived and/or modified sequence from LASV(LP;Clade I)__AAF86701__GPCmut3 (opt1)
aggagaaagcuuaccaugggccagaucaucaccuucuuccaggaggugccccacgucaucgaggaggugaugaacaucgugcugaucgcccucagccugcuggccauccucaaggggcuguacaacaucgcgaccugcggcaucaucgggcuggucgccuuccucuuccugugcggcaaguccugcagccugacgcucaagggcggguacgagcugcagacccuggagcucaacauggagacccugaacaugaccaugccgcuguccugcacgaagaacagcucccaccacuacauccgcgugggcaacgagaccgggcucgagcugacccugaccaacacgagcaucaucaaccacaaguucugcaaccucuccgacgcccacaagaagaaccuguacgaccacgcccugaugagcaucaucuccaccuuccaccucagcauccccaacuucaaccaguacgaggccauguccugcgacuucaacggcgggaagaucagcgugcaguacaaccugucccacagcuacgcgggcgacgccgccgagcacugcgggaccgucgccaacggcgugcugcagaccuucaugcggauggcguggggcgggcgcuacaucgcccucgacuccggcaaggggaacugggacugcaucaugacgagcuaccaguaccugaucauccagaacaccaccugggaggaccacugccaguucucccggcccagccccaucggcuaccugggccuccugucccagcgcacccgggacaucuacaucagccgccggcgccgggggacguucaccuggacccugagcgacuccgagggcaacgagacccccgggggcuacugccucacgcgcuggaugcugaucgaggccgagcugaagugcuucgggaacaccgccguggccaagugcaacgagaagcacgacgaggaguucugcgacaugcuccggcuguucgacuucaacaagcaggcgauccgccggcugaaggccccggcccagaugagcauccagcucaucaacaaggccgucaacgcccugaucaacgaccagcugaucaugaagaaccaccuccgcgacaucaugggcauccccuacugcaacuacuccaaguacugcuaccugaaccacaccagcuccggccggaccagccugcccaagugcugccucaucuccaacgggagcuaccugaacgagacgcaguucuccgacgacaucgagcagcaggcggacaacaugaucaccgagaugcugcagaaggaguacaucgagcgccagggcaagaccccgcucgggcugguggacaucuucaucuucagcaccuccuucuaccugaucagcaucuuccugcaccucaucaagauccccacgcaccggcacaucgugggcaagcccugccccaagccgcaccgccugaaccacaugggggucugcuccugcggccuguacaagcaccccggcgugcccaccaaguggaagcggugaggacuaguuauaagacugacuagcccgaugggccucccaacgggcccuccuccccuccuugcaccgagauuaaucaaaggcucuuuucagagccaccaaaaaaaaaaaaaaaaaaaaaaaaaaaaaaaaaaaaaaaaaaaaaaaaaaaaaaaaaaaaaaaaagaauu

SEQ ID NO: 25991 - RNA, 1655 nt, Artificial Sequence
  mRNA product Design i-3 (hSL-A64-N5) comprising derived and/or modified sequence from LASV(803213;Clade II)__AAF86703__GPCmut3 (opt1)
aggagaaagcuuaccaugggccagaucaucaccuucuuccaggaggugccccacgucaucgaggaggugaugaacaucgugcugaucgcccucagccugcuggccauccucaaggggaucuacaacgucgcgaccugcggccuguucgggcugaucuccuuccuccugcugugcggccgcagcugcuccgugacguacaaggggguguacgagcuccagacccuggagcugaacauggccaaccucaacaugaccaugccgcugagcugcaccaagaacaacucccaccacuacaucauggucggcaacgagacgggccuggagcucacccugaccaacaccagcaucaucaaccacaaguucugcaaccuguccgacgcccacaagaagaaccucuacgaccacgcccugaugagcaucaucuccacguuccaccugagcauccccaacuucaaccaguacgaggccauguccugcgacuucaacgggggcaagaucagcgugcaguacaaccucucccacagcuucgcgguggacgccgccaaccacugcgggaccaucgccaacggcguccugcagaccuucaugcggauggcguggggcggguccuacaucgcccuggacagcggcaaggggaacugggacugcaucaugaccuccuaccaguaccucaucauccagaacacgaccugggaggaccacugccaguucagccgccccucccccaucggcuaccuggggcugcucagccagcggacccgcgacaucuacaucagccggcgccggcgcggcaccuucacguggacccuguccgacagcgagggcaacgaggcccccgggggcuacugccugacccgguggaugcucaucgaggccgagcugaagugcuucgggaacaccgccguggcgaagugcaacgagaagcacgacgaggaguucugcgacaugcugcgccucuucgacuucaacaagcaggccaucaagcggcugaagacgccggcccagauguccauccagcugaucaacaaggccgugaacgcccucaucaacgaccagcugaucaugaagaaccaccuccgcgacaucaugggcauccccuacugcaacuacagccgguacugcuaccugaaccacaccgucaccgggaagaccucccugccccgcugcugccuggugagcaacggcuccuaccucaacgagacgcacuucagcgacgacaucgagcagcaggcggacaacaugaucaccgagaugcugcagaaggaguacauggaccggcagggcaagaccccgcuggggcucguggaccuguucgucuucuccaccagcuucuaccugaucuccaucuuccugcaccucgugaagauccccacgcaccgccacaucgugggcaagcccugccccaagccgcaccggcugaaccacauggggaucugcagcugcggccuguacaagcaccccgggguccccgugaaguggaagcgcugaggacuaguuauaagacugacuagcccgaugggccucccaacgggcccuccuccccuccuugcaccgagauuaaucaaaggcucuuuucagagccaccaaaaaaaaaaaaaaaaaaaaaaaaaaaaaaaaaaaaaaaaaaaaaaaaaaaaaaaaaaaaaaaaagaauu

SEQ ID NO: 25992 - RNA, 1655 nt, Artificial Sequence
  mRNA product Design i-3 (hSL-A64-N5) comprising derived and/or modified sequence from LASV(GA391;Clade III)__CAA36645__GPCmut3 (opt1)
aggagaaagcuuaccaugggccagaucgugaccuucuuccaggaggucccccacgugaucgaggaggugaugaacaucguccugaucgcccucagcauccuggccauccugaaggggcucuacaacguggcgaccugcggccugaucgggcuggugacguuccuccugcuguccggccgcagcugcucccucaucuacaaggggaccuacgagcugcagacccuggagcucaacauggagacccugaacaugacgaugccgcugagcugcaccaagaacaacucccaccacuacauccgggucggcaacgagaccggccucgagcugacccugacgaacaccagcauccucaaccacaaguucugcaaccuguccgacgcccacaagcgcaaccuguacgaccacagccucauguccaucaucagcaccuuccaccuguccauccccaacuucaaccaguacgaggccaugagcugcgacuucaacgggggcaagaucaccgugcaguacaaccugucccacagcuucgccguggacgccgcggggcacugcggcacgcucgccaacgggguccugcagaccuucaugcggauggccuggggcggcuccuacaucgcccuggacagcgggcgcggcaacugggacugcaucaugaccuccuaccaguaccucaucauccagaacaccacgugggacgaccacugccaguucagccggcccucccccaucggguaccugggccugcucagccagcgcacccgggacaucuacaucagccgccggcgccggggcaccuucaccuggacgcuguccgacagcgaggggaacgagaccccgggcggguacugccugacccgcuggaugcucaucgaggcggagcugaagugcuucggcaacaccgccguggccaagugcaacgagaagcacgacgaggaguucugcgacaugcugcggcuguucgacuucaacaagcaggccauccgccggcugaagacgcccgcccagauguccauccagcugaucaacaaggcggugaacgcccucaucaacgaccagcugaucaugaagaaccaccuccgcgacaucauggggauccccuacugcaacuacagccgguacugcuaccucaaccacaccuccaccggcaagaccagccugccccgcugcugccugaucuccaacggcagcuaccucaacgagacgaaguucuccgacgacaucgagcagcaggccgacaacaugaucaccgagaugcugcagaaggaguacaucgaccggcaggggaagaccccgcugggccuggucgaccucuucguguucagcaccuccuucuaccugaucagcaucuuccugcaccucgugaagauccccacgcaccgccacaucgucgggaagcccugccccaagccgcaccggcugaaccacaugggcaucugcuccugcgggcuguacaagcagcccggcgugcccgugcgcuggaagcgcugaggacuaguuauaagacugacuagcccgaugggccucccaacgggcccuccuccccuccuugcaccgagauuaaucaaaggcucuuuucagagccaccaaaaaaaaaaaaaaaaaaaaaaaaaaaaaaaaaaaaaaaaaaaaaaaaaaaaaaaaaaaaaaaaagaauu

SEQ ID NO: 25993 - RNA, 1658 nt, Artificial Sequence
  mRNA product Design i-3 (hSL-A64-N5) comprising derived and/or modified sequence from LASV(AV;Clade V)__CCA30314__GPCmut3 (opt1)
aggagaaagcuuaccaugggccagaucgugaccuucuuccaggaggucccccacgugaucgaggaggugaugaacaucguccugaucgcccucagcauccuggccgugcugaaggggcucuacaacaucgcgaccugcggccugaucgggcugaucacguuccuccugcugugcggccgcuccugcagcuccaaccucuacaaggggguguacgagcugcagagccuggaccucaacauggagacccugaacaugaccaugccgcuguccugcaccaagaacaacagccaccacuacauccgggucggcaacgacacgggccucgagcugacccugaccaacaccuccauccucaaccacaaguucugcaaccugagcgacgcccacaagaaggaccuguacgaccacgcccucauguccaucaucagcacguuccaccuguccauccccaacuucaaccaguacgaggccaugagcugcgacuucaacgggggcaagaucuccgugcaguacaaccugagccacuccuacgccaucgacgcggccaaccacugcgggaccguggccaacggcauccuccagaccuucaugcgcauggccuggggcgggagcuacaucgcgcuggacuccggccgggggaacugggacugcaucaugaccagcuaccaguaccugaucauccagaacacgaccugggagaaccacugccaguucucccgccccagccccaucggcuaccucgggcugcugagccagcggacccgcgacaucuacaucucccggcgccggcgcggcaccuucacguggacccucagcgacuccgagggcaacgccacccccgggggcuacugccugacccgguggaugcugaucgaggccgagcucaagugcuucgggaacacggccgucgccaagugcaacgagaagcacgacgaggaguucugcgacaugcugcgccuguucgacuucaacaagcaggcgaucagccggcucaaguccccggcccagaugagcauccagcugaucaacaaggccgugaacgcccugaucaacgaccagcucaucaugaagaaccaccuccgcgacaucaugggcauccccuacugcaacuacuccaaguacugcuaccugaaccacaccaucaccgggaagaccagccugcccaagugcugccugguguccaacggcagcuaccugaacgagacgcacuucuccgacgacaucgagcagcaggccgacaacaugaucaccgagaugcuccagaaggaguacauggagcggcagggcaagaccccgcuggggcuggucgaccuguucguguucagcaccuccuucuaccucaucagcaucuuccugcgccuggugaagauccccacgcaccggcacaucgucggcaagcccugccccaagccgcaccgccucaaccacauggggaucugcuccugcggccuguacaagcagcccggggugcccgugcgguggaagcgcugaggacuaguuauaagacugacuagcccgaugggccucccaacgggcccuccuccccuccuugcaccgagauuaaucaaaggcucuuuucagagccaccaaaaaaaaaaaaaaaaaaaaaaaaaaaaaaaaaaaaaaaaaaaaaaaaaaaaaaaaaaaaaaaaagaauu

SEQ ID NO: 25994 - RNA, 1655 nt, Artificial Sequence
  mRNA product Design i-3 (hSL-A64-N5) comprising derived and/or modified sequence from LASV(Togo/2016/7082;Clade VI)__AMR44577__GPCmut3 (opt1)
aggagaaagcuuaccaugggccagaucaucaccuucuuccaggaggugccccacgucaucgaggaggugaugaacaucgugcugaucgcccucagccugcuggccauccucaagggggucuacaacguggcgaccugcggcaucaucgggcuggugacguuccuguuccucugcggccgcuccugcagccugaucuacaagggguccuacgagcugcagacccucgagcugaacauggagacccugaacaugaccaugccgcucagcugcacgaagaacuccagccaccacuacauccgggucggcaacgagaccggccuggagcugacccucaccaacacguccaucaucaaccacaaguucugcaaccugagcgacgcccacaagcgcaaccuguacgaccacgcccucauguccauccugagcaccuuccaccuguccauccccaacuucaaccaguacgaggccaugagcugcgacuucaacgggggcaagaucuccgugcaguacaaccucagccacgccuacgcgguggacgccgccgagcacugcgggaccgucgccaacggcgugcugcagaccuucaugcggauggcguggggcggguccuacaucgcccuggacagcggccgcgggaacugggacugcaucaugacguccuaccaguaccucaucauccagaacaccaccugggaggaccacugccaguucagccggcccucccccaucggcuaccuggggcugcucagccagcgcacccgggacaucuacaucagccgccggcgccggggcacguucaccuggacccuguccgacagcgagggcaacgagacccccgggggcuacugccugacgcgcuggaugcucaucgaggccgagcugaagugcuucgggaacaccgccguggccaagugcaacgagaagcacgacgaggaguucugcgacaugcugcggcuguucgacuucaacaagcaggcgauccagcgccugaaguccccggcccagaugagcauccagcugaucaacaaggccgucaacgcccucaucaacgaccagcugaucaugaagaaccaccuccgggacaugaugggcauccccuacugcaacuacuccaaguacugcuaccucaaccacaccagcuccgggcgcaccagccugcccaagugcugccugguguccaacggcagcuaccucaacgagacgcacuucuccgacgacaucgagcagcaggccgacaacaugaucaccgagaugcugcagaaggaguacaucgaccggcagggcaagaccccgcuggggcucguggaccuguucgucuucagcaccuccuucuaccugaucagcaucuuccugcaccucaucaagauccccacgcaccgccacaucgugggcaagcccugccccaagccgcaccggcugaaccacauggggaucugcuccugcggccuguacaagcagcccggggugcccacccgcuggaagcggugaggacuaguuauaagacugacuagcccgaugggccucccaacgggcccuccuccccuccuugcaccgagauuaaucaaaggcucuuuucagagccaccaaaaaaaaaaaaaaaaaaaaaaaaaaaaaaaaaaaaaaaaaaaaaaaaaaaaaaaaaaaaaaaaagaauu

SEQ ID NO: 25995 - RNA, 1655 nt, Artificial Sequence
  mRNA product Design i-3 (hSL-A64-N5) comprising derived and/or modified sequence from LASV(KAK-428;Clade n.d. (VII))__ANH09740__GPCmut3 (opt1)
aggagaaagcuuaccaugggccagaucgugaccuucuuccaggaggucccccacgugaucgaggaggugaugaacaucguccugaucgcccucagccugcuggccauccucaaggggcuguacaacuucgcgaccugcggcgugaucgggcugaucacguuccuccugcugugcggccgcuccugcagcgccaccuacaaggggcaguacgagcuccagacccuggagcugaacauggagucccucaacaugaccaugccgcugagcugcacgaagaacaacucccaccacuacauccgggccggcaacaacaccggccuggagcucacccugaccaacacgagcaucaucucccacaaguucugcaaccugagcgacgcccacaagaagaaccucuacgaccacacccugauguccaucaucaccaccuuccaccugagcauccccaacuucaaccaguacgaggccauguccugcgacuucaacgggggcaagaucagcauccaguacaaccucucccacagcuacgcgggggacgccgcccagcacugcggcacgguggccaacgggguccugcagaccuucaugcgcauggcguggggcggcuccuaccuggcccucgacagcgggcggcgcggcugggacugcaucaucuccagcuaccaguaccugaucauccagaacaccaccugggacgaccacugccaguucucccggcccagccccaucggguaccugggcuucgugagccagaagacgcgcgacaucuacaucucccggcgccggcgcggcaccuucaccuggacccucagcgacuccgaggggcacgacaugccgggcggguacugccugacgcgguggaugcugaucgaggccgaccucaagugcuucggcaacaccgccguggccaagugcaacgagaagcacgacgaggaguucugcgacauguggcgccuguucgacuucaacaagcaggcgauccagcggcugaaggcccccgcccagaugaacauccagcucaucaacaaggccgucaacgcccugaucaacgaccagcugaugaugaagaaccaccuccgcgacaucauggggauccccuacugcaacuacagcaaguucugcuaccugaacaacaccaccacgggccggaccucccugccccgcugcugccucaucagcaacggcuccuaccugaacgagacccacuucagcgacgacaucgagcagcaggcggacaacaugaucaccgagaugcugcagaaggaguacauggaccggcaggggaagacgccgcucggccugguggaccuguucguguucuccaccagcuucuaccucaucaccaucuuccugcaccuggucaagauccccacccaccgccacaucguggggaagcccugccccaagccgcaccggcugaaccacaugggcaucugcuccugcgggcucuacaagcagcccggcgugcccguccgcuggaagcggugaggacuaguuauaagacugacuagcccgaugggccucccaacgggcccuccuccccuccuugcaccgagauuaaucaaaggcucuuuucagagccaccaaaaaaaaaaaaaaaaaaaaaaaaaaaaaaaaaaaaaaaaaaaaaaaaaaaaaaaaaaaaaaaaagaauu

SEQ ID NO: 25996 - RNA, 1655 nt, Artificial Sequence; identical to SEQ ID NO: 25990
  mRNA product Design i-3 (hSL-A64-N5) comprising derived and/or modified sequence from LASV(Pinneo-NIG-1969;Clade I)__AIT17836__GPCmut3 (opt1)

SEQ ID NO: 25997 - RNA, 1655 nt, Artificial Sequence
  mRNA product Design i-3 (hSL-A64-N5) comprising derived and/or modified sequence from LASV(ISTH0009-NIG-2011;Clade II)__AIT17404__GPCmut3 (opt1)
aggagaaagcuuaccaugggccagaucaucaccuucuuccaggaggugccccacgucaucgaggaggugaugaacaucgugcugaucgcccucagccugcuggccauccucaaggggaucuacaacgucgcgaccugcggccuguucgggcugguguccuuccuccugcugugcggccgcagcugcuccacgaccuacaaggggguguacgagcuccagacccuggagcuggacauggccagccucaacaugaccaugccgcuguccugcacgaagaacaacagccaccacuacaucauggucggcaacgagaccggccuggagcucacccugaccaacacguccaucaucaaccacaaguucugcaaccugagcgacgcccacaagaagaaccucuacgaccacgcccugauguccaucaucagcaccuuccaccuguccauccccaacuucaaccaguacgaggccaugagcugcgacuucaacgggggcaagaucuccgugcaguacaaccucagccacgcguacgccguggacgccgccaaccacugcgggaccaucgcgaacggcguccugcagaccuucaugcggauggccuggggcggguccuacaucgcccuggacagcggcaagggguccugggacugcaucaugacgagcuaccaguaccucaucauccagaacaccaccugggaggaccacugccaguucucccgccccagccccaucggcuaccuggggcugcucagccagcggacccgcgacaucuacaucucccggcgccggcgcggcacguucaccuggacccugagcgacuccgagggcaacgagacccccgggggcuacugccugacgcgguggaugcucaucgaggccgagcugaagugcuucgggaacaccgccguggcgaagugcaacgagaagcacgacgaggaguucugcgacaugcugcgccucuucgacuucaacaagcaggccauccggcgccugaagaccccggcccagaugagcauccagcugaucaacaaggccgugaacgcccucaucaacgaccagcugaucaugaagaaccaccuccgggacaucaugggcauccccuacugcaacuacuccaaguacugcuaccugaaccacaccgucacggggaagaccagccugccccgcugcugccugguguccaacggcagcuaccucaacgagacccacuucuccgacgacaucgagcagcaggcggacaacaugaucaccgagcugcugcagaaggaguacauggaccggcagggcaagacgccgcucgggcugguggaccuguucgucuucagcaccuccuucuaccugaucagcaucuuccuccaccugaucaagauccccacccaccgccacaucaccggcaagcccugccccaagccgcaccggcugaaccacauggggaucugcuccugcggccucuacaagcaccccggggugcccgugaaguggaagcgcugaggacuaguuauaagacugacuagcccgaugggccucccaacgggcccuccuccccuccuugcaccgagauuaaucaaaggcucuuuucagagccaccaaaaaaaaaaaaaaaaaaaaaaaaaaaaaaaaaaaaaaaaaaaaaaaaaaaaaaaaaaaaaaaaagaauu

SEQ ID NO: 25998 - RNA, 1655 nt, Artificial Sequence
  mRNA product Design i-3 (hSL-A64-N5) comprising derived and/or modified sequence from LASV(ISTH2010-NIG-2012;Clade II)__AIT17482__GPCmut3 (opt1)
aggagaaagcuuaccaugggccagaucaucaccuucuuccaggaggugccccacgucaucgaggaggugaugaacaucgugcugaucgcccucagccugcuggccauccucaaggggaucuacaacgucgcgaccugcggccuguucgggcugguguccuuccuccugcugugcggccgcagcugcuccacgaccuacaaggggguguacgagcuccagacccuggagcuggacauggccagccucaacaugaccaugccgcuguccugcacgaagaacaacagccaccacuacaucauggucggcaacgagaccggccuggagcucacccugaccaacacguccaucaucaaccacaaguucugcaaccugagcgacgcccacaagaagaaccucuacgaccacgcccugauguccaucaucagcaccuuccaccuguccauccccaacuucaaccaguacgaggccaugagcugcgacuucaacgggggcaagaucuccgugcaguacaaccucagccacgcguacgccguggacgccgccaaccacugcgggaccaucgcgaacggcguccugcagaccuucaugcggauggccuggggcggguccuacaucgcccuggacagcggcaagggguccugggacugcaucaugacgagcuaccaguaccucaucauccagaacaucaccugggaggaccacugccaguucucccgccccagccccaucggcuaccuggggcugcucagccagcggacccgcgacaucuacaucucccggcgccggcgcggcaccuucacguggacccugagcgacuccgagggcaacgagacccccgggggcuacugccugacccgguggaugcucaucgaggccgagcugaagugcuucgggaacacggccguggcgaagugcaacgagaagcacgacgaggaguucugcgacaugcugcgccucuucgacuucaacaagcaggccauccggcgccugaagaccccggcccagaugagcauccagcugaucaacaaggccgugaacgcccucaucaacgaccagcugaucaugaagaaccaccuccgggacaucaugggcauccccuacugcaacuacuccaaguacugcuaccugaaccacaccgucaccgggaagacgagccugccccgcugcugccugguguccaacggcagcuaccucaacgagacccacuucuccgacgacaucgagcagcaggcggacaacaugaucaccgagcugcugcagaaggaguacaucgaccggcagggcaagaccccgcucgggcugguggaccuguucgucuucagcacguccuucuaccugaucagcaucuuccuccaccuggugaagauccccacccaccgccacguggucggcaagcccugccccaagccgcaccggcugaaccacauggggaucugcuccugcggccucuacaagcaccccggggugcccgugaaguggaagcgcugaggacuaguuauaagacugacuagcccgaugggccucccaacgggcccuccuccccuccuugcaccgagauuaaucaaaggcucuuuucagagccaccaaaaaaaaaaaaaaaaaaaaaaaaaaaaaaaaaaaaaaaaaaaaaaaaaaaaaaaaaaaaaaaaagaauu

SEQ ID NO: 25999 - RNA, 1655 nt, Artificial Sequence
  mRNA product Design i-3 (hSL-A64-N5) comprising derived and/or modified sequence from LASV(Lassa virus/H.sapiens-wt/NGA/2015/ISTH_0543;Clade II)__AVO03639__GPCmut3 (opt1)
aggagaaagcuuaccaugggccagaucaucaccuucuuccaggaggugccccacgucaucgaggaggugaugaacaucgugcugaucgcccucagccugcuggccauccucaaggggaucuacaacgucgcgaccugcggccuguucgggcugguguccuuccuccugcugugcggccgcagcugcuccacgaccuacaaggggguguacgagcuccagacccuggagcuggacauggccaaccucaacaugaccaugccgcugagcugcacgaagaacaacucccaccacuacaucauggucggcaacgagaccggccuggagcucacccugaccaacacgagcaucaucaaccacaaguucugcaaccuguccgacgcccacaagaagaaccucuacgaccacgcccugaugagcaucaucuccaccuuccaccugagcauccccaacuucaaccaguacgaggccauguccugcgacuucaacgggggcaagaucagcgugcaguacaaccucucccacaccuacgcgguggacgccgccaaccacugcgggaccaucgccaacggcguccugcagacguucaugcggauggcguggggcgggagcuacaucgcccuggacuccggcaaggggagcugggacugcaucaugaccuccuaccaguaccucgugauccagaacaccaccugggaggaccacugccaguucagccgccccucccccaucggcuaccuggggcugcucagccagcggacgcgcgacaucuacaucagccggcgccggcgcggcaccuucaccuggacccuguccgacagcgagggcaacgagacgcccgggggcuacugccugacccgguggaugcucaucgaggccgagcugaagugcuucgggaacaccgccguggccaagugcaacgagaagcacgacgaggaguucugcgacaugcugcgccucuucgacuucaacaagcaggcgauccggcgccugaagaccccggcccagauguccauccagcugaucaacaaggccgucaacgcccucaucaacgaccagcugaucaugaagaaccaccuccgggacaucaugggcauccccuacugcaacuacagcaaguacugcuaccugaaccacacggugaccgggaagaccucccugccccgcugcugccuggugagcaacggcuccuaccucaacgagacccacuucagcgacgacaucgagcagcaggccgacaacaugaucacggagcugcugcagaaggaguacaucgaccggcagggcaagaccccgcucgggcuggucgaccuguucguguucuccaccagcuucuaccugaucuccaucuuccuccaccuggugaagauccccacccaccgccacaucacgggcaagcccugccccaagccgcaccggcugaaccacauggggaucugcagcugcggccucuacaagcaccccgggguccccgugaaguggaagcgcugaggacuaguuauaagacugacuagcccgaugggccucccaacgggcccuccuccccuccuugcaccgagauuaaucaaaggcucuuuucagagccaccaaaaaaaaaaaaaaaaaaaaaaaaaaaaaaaaaaaaaaaaaaaaaaaaaaaaaaaaaaaaaaaaagaauu

SEQ ID NO: 26000 - RNA, 1655 nt, Artificial Sequence
  mRNA product Design i-3 (hSL-A64-N5) comprising derived and/or modified sequence from LASV(Lassa virus/H.sapiens-wt/NGA/2016/ISTH_0009;Clade II)__AVO03571__GPCmut3 (opt1)
aggagaaagcuuaccaugggccagaucaucaccuucuuccaggaggugccccacgucaucgaggaggugaugaacaucgugcugaucgcccucagccugcuggccauccucaaggggaucuacaacgucgcgaccugcggccugcuggggcucguguccuuccugcugcucugcggccgcagcugcuccacgaccuacaaggggguguacgagcugcagacccuggagcucgacauggccagccugaacaugaccaugccgcuguccugcacgaagaacaacagccaccacuacaucauggucggcaacgagaccggccucgagcugacccugaccaacacguccaucaucaaccacaaguucugcaaccucagcgacgcccacaagaagaaccuguacgaccacgcccugauguccaucaucagcaccuuccaccucuccauccccaacuucaaccaguacgaggccaugagcugcgacuucaacgggggccggaucuccgugcaguacaaccugagccacuccuacgcgguggacgccgccaaccacugcgggaccaucgccaacggcguccugcagaccuucaugcgcauggcguggggcgggagcuacaucgcccucgacuccggcaaggggagcugggacugcaucaugacguccuaccaguaccugaucauccagaacaccaccugggaggaccacugccaguucagccggcccagccccaucggcuaccuggggcuccugucccagcgcacccgggacaucuacaucagccgccggcgccggggcacguucaccuggacccuguccgacagcgagggcaacgagacccccgggggcuacugccucacgcgcuggaugcugaucgaggccgagcugaagugcuucgggaacaccgccguggccaagugcaacgagaagcacgacgaggaguucugcgacaugcuccggcuguucgacuucaacaagcaggcgauccgccggcugaagaccccggcccagauguccauccagcucaucaacaaggccgugaacgcccugaucaacgaccagcugaucaugaagaaccaccuccgcgacaucaugggcauccccuacugcaacuacagcaaguacugcuaccugaaccacaccgucacggggaagaccucccugccccggugcugccucgugagcaacggcuccuaccugaacgagacccacuucagcgacgacaucgagcagcaggccgacaacaugaucaccgagcugcuccagaaggaguacaucgaccgccagggcaagacgccgcuggggcugguggaccuguucgucuucuccaccagcuucuaccucaucuccaucuuccugcaccuggugaagauccccacccaccggcacaucaccggcaagcccugccccaagccgcaccgccucaaccacauggggaucugcagcugcggccuguacaaccaccccggggugcccgucaaguggaagcggugaggacuaguuauaagacugacuagcccgaugggccucccaacgggcccuccuccccuccuugcaccgagauuaaucaaaggcucuuuucagagccaccaaaaaaaaaaaaaaaaaaaaaaaaaaaaaaaaaaaaaaaaaaaaaaaaaaaaaaaaaaaaaaaaagaauu

SEQ ID NO: 26001 - RNA, 1655 nt, Artificial Sequence
  mRNA product Design i-3 (hSL-A64-N5) comprising derived and/or modified sequence from LASV(Lassa virus/H.sapiens-wt/NGA/2016/ISTH_0017;Clade II)__AVO03567__GPCmut3 (opt1)
aggagaaagcuuaccaugggccagaucaucaccuucuuccaggaggugccccacgucaucgaggaggugaugaacaucgugcugaucgcccucagccugcuggccauccucaaggggaucuacaacgucgcgaccugcggccuguucgggcugguguccuuccuccugcugugcggccgcagcugcuccacgaccuacaaggggguguacgagcuccagacccuggagcuggacauggccagccucaacaugaccaugccgcuguccugcacgaagaacaacagccaccacuacaucauggucggcaacgagaccggccuggagcucacccugaccaacacguccaucaucaaccacaaguucugcaaccugagcgacgcccacaagaagaaccucuacgaccacgcccugauguccaucaucagcaccuuccaccuguccauccccaacuucaaccaguacgaggccaugagcugcgacuucaacgggggcaagaucuccgugcaguacaaccucagccacaccuacgcgaucgacgccgccaaccacugcgggaccaucgccaacggcgugcugcagacguucaugcggauggcguggggcggguccuacaucgcccuggacagcggcaagggguccugggacugcaucaugaccagcuaccaguaccucaucauccagaacaccaccugggaggaccacugccaguucucccgccccagccccaucggcuaccuggggcugcucagccagcggacgcgcgacaucuacaucucccggcgccggcgcggcaccuucaccuggacccugagcgacuccgagggcaacgagacgcccgggggcuacugccugacccgguggaugcucaucgaggccgagcugaagugcuucgggaacaccgccgucgccaagugcaacgagaagcacgacgaggaguucugcgacaugcugcgccucuucgacuucaacaagcaggcgauccggcgccugaagaccccggcccagaugagcauccagcugaucaacaaggccgugaacgcccucaucaacgaccagcugaucaugaagaaccaccuccgggacaucaugggcauccccuacugcaacuacuccaaguacugcuaccugaaccacacggugaccgggaagaccagccugccccgcugcugccuggucuccaacggcagcuaccucaacgagacccacuucuccgacgacaucgagcagcaggccgacaacaugaucacggagcugcugcagaaggaguacauggaccggcagggcaagaccccgcucgggcugguggaccuguucguguucagcaccuccuucuaccugaucagcaucuuccuccaccugguccgcauccccacccaccggcacgugaucggcaagcccugccccaagccgcaccgccugaaccacauggggaucugcuccugcggccucuacaagcaccccggggugcccgucaaguggaagcggugaggacuaguuauaagacugacuagcccgaugggccucccaacgggcccuccuccccuccuugcaccgagauuaaucaaaggcucuuuucagagccaccaaaaaaaaaaaaaaaaaaaaaaaaaaaaaaaaaaaaaaaaaaaaaaaaaaaaaaaaaaaaaaaaagaauu

SEQ ID NO: 26002 - RNA, 1655 nt, Artificial Sequence
  mRNA product Design i-3 (hSL-A64-N5) comprising derived and/or modified sequence from LASV(Lassa virus/H.sapiens-wt/NGA/2018/ISTH_0959;Clade II)__AVV65099__GPCmut3 (opt1)
aggagaaagcuuaccaugggccagaucaucaccuucuuccaggaggugccccacgucaucgaggaggugaugaacaucgugcugaucgcccucagccugcuggccauccucaaggggaucuacaacgucgugaccugcggccuguucgggcugguguccuuccuccugcugugcggccgcagcugcuccacgaccuacaagggggucuacgagcuccagacccuggagcuggacauggcgagccucaacaugaccaugccgcuguccugcacgaagaacaacagccaccacuacaucauggugggcaacgagaccggccuggagcucacccugaccaacacguccaucaucaaccacaaguucugcaaccugagcgacgcccacaagaagaaccucuacgaccacgcccugauguccaucaucagcaccuuccaccuguccauccccaacuucaaccaguacgaggccaugagcugcgacuucaacgggggcaagaucuccgugcaguacaaccucagccacgccuacgcgaucgacgccgccaaccacugcgggaccaucgccaacggcguccugcagaccuucaugcggauggcguggggcggguccuacaucgcccuggacagcggcaagggguccugggacugcaucaugacgagcuaccaguaccucaucauccagaacaccaccugggaggaccacugccaguucucccgccccagccccaucggcuaccuggggcugcucagccagcggacccgcgacaucuacaucucccggcgccggcgcggcacguucaccuggacccugagcgacuccgagggcaacgagacccccgggggcuacugccugacgcgguggaugcucaucgaggccgagcugaagugcuucgggaacaccgccguggccaagugcaacgagaagcacgacgaggaguucugcgacaugcugcgccucuucgacuucaacaagcaggcgauccggcgccugaagaccccggcccagaugagcauccagcugaucaacaaggccgugaacgcccucaucaacgaccagcugaucaugaagaaccaccuccgggacaucaugggcauccccuacugcaacuacuccaaguacugcuaccugaaccacaccgucacggggaagaccagccugccccgcugcugccugguguccaacggcagcuaccucaacgagacccacuucuccgacgacaucgagcagcaggccgacaacaugaucaccgagcugcugcagaaggaguacaucgaccggcagggcaagacgccgcucgggcugguggaccuguucgucuucagcaccuccuucuaccugaucagcaucuuccuccaccuggugaagauccccacccaccgccacgugaucggcaagcccugccccaagccgcaccggcugaaccacauggggaucugcuccugcggccucuacaagcaccccgggguccccgugaaguggaagcgcugaggacuaguuauaagacugacuagcccgaugggccucccaacgggcccuccuccccuccuugcaccgagauuaaucaaaggcucuuuucagagccaccaaaaaaaaaaaaaaaaaaaaaaaaaaaaaaaaaaaaaaaaaaaaaaaaaaaaaaaaaaaaaaaaagaauu

SEQ ID NO: 26003 - RNA, 1655 nt, Artificial Sequence
  mRNA product Design i-3 (hSL-A64-N5) comprising derived and/or modified sequence from LASV(LASV003-NIG-2008;Clade II)__AIT17580__GPCmut3 (opt1)
aggagaaagcuuaccaugggccagaucaucaccuucuuccaggaggugccccacgucaucgaggaggugaugaacaucgugcugaucgcccucagccugcuggccauccucaaggggaucuacaacgucgcgaccugcggccuguucgggcugguguccuuccuccugcugugcggccgcagcugcuccacgaccuacaaggggguguacgagcuccagacccuggagcuggacauggccagccucaacaugaccaugccgcuguccugcacgaagaacaacagccaccacuacaucauggucggcaacgagaccggccuggagcucacccugaccaacacguccaucaucaaccacaaguucugcaaccugagcgacgcccacaagaagaaccucuacgaccacgcccugauguccaucaucagcaccuuccaccuguccauccccaacuucaaccaguacgaggccaugagcugcgacuucaacgggggcaagaucuccgugcaguacaaccucagccacaccuacgcgguggacgccgccaaccacugcgggaccaucgccaacggcguccugcagacguucaugcggauggcguggggcggguccuacaucgcccuggacagcggcaagggguccugggacugcaucaugaccagcuaccaguaccucaucauccagaacaccaccugggaggaccacugccaguucucccgccccagccccaucggcuaccuggggcugcucagccagcggacgcgcgacaucuacaucucccggcgccggcgcggcaccuucaccuggacccugagcgacuccgagagcaacgagacgccgggcggguacugccugacccgguggaugcucaucgaggccgagcugaagugcuucggcaacaccgccguggccaagugcaacgagaagcacgacgaggaguucugcgacaugcugcgccucuucgacuucaacaagcaggcgauccggcgccugaaggcccccgcccagauguccauccagcugaucaacaaggccgugaacgcccucaucaacgaccagcugaucaugaagaaccaccuccgggacaucauggggauccccuacugcaacuacagcaaguacugcuaccugaaccacaccgucacgggccgcaccucccugccccggugcugccuggugagcaacggguccuaccucaacgagacccacuucagcgacgacaucgagcagcaggcggacaacaugaucaccgagcugcugcagaaggaguacauggaccgccagggcaagacgccgcucggccugguggaccuguucgucuucuccaccagcuucuaccugaucuccaucuuccuccaccuggugaagauccccacccaccggcacgugaucgggaagcccugccccaagccgcaccgccugaaccacaugggcaucugcagcugcgggcucuacaagcaccccggcguccccgugaaguggaagcggugaggacuaguuauaagacugacuagcccgaugggccucccaacgggcccuccuccccuccuugcaccgagauuaaucaaaggcucuuuucagagccaccaaaaaaaaaaaaaaaaaaaaaaaaaaaaaaaaaaaaaaaaaaaaaaaaaaaaaaaaaaaaaaaaagaauu

SEQ ID NO: 26004 - RNA, 1655 nt, Artificial Sequence
  mRNA product Design i-3 (hSL-A64-N5) comprising derived and/or modified sequence from LASV(LASV035-NIG-2009;Clade II)__AIT17588__GPCmut3 (opt1)
aggagaaagcuuaccaugggccagaucaucaccuucuuccaggaggugccccacgucaucgaggaggugaugaacaucgugcugaucgcccucagccugcuggccauccucaaggggaucuacaacgucgcgaccugcggccuguucgggcugguguccuuccuccugcugugcggccgcagcugcuccacgaccuacaaggggguguacgagcuccagacccuggagcuggacauggccagccucaacaugaccaugccgcuguccugcacgaagaacaacagccaccacuacaucauggucggcaacgagaccggccuggagcucacccugaccaacacguccaucaucaaccacaaguucugcaaccugagcgacgcccacaagaagaaccucuacgaccacgcccugauguccaucaucagcaccuuccaccuguccauccccaacuucaaccaguacgaggccaugagcugcgacuucaacgggggcaagaucuccgugcaguacaaccucagccacgcguacgccguggacgccgccaaccacugcgggaccaucgcgaacggcguccugcagaccuucaugcggauggccuggggcggguccuacaucgcccuggacagcggcaagggguccugggacugcaucaugacgagcuaccaguaccucaucauccagaacaccaccugggaggaccacugccaguucucccgccccagccccaucggcuaccuggggcugcucagccagcggacccgcgacaucuacaucucccggcgccggcgcggcacguucaccuggacccugagcgacuccgagggcaacgagacccccgggggcuacugccugacgcgguggaugcucaucgaggccgagcugaagugcuucgggaacaccgccguggcgaagugcaacgagaagcacgacgaggaguucugcgacaugcugcgccucuucgacuucaacaagcaggccauccggcgccugaaggccccggcccagaugagcauccagcugaucaacaaggccgugaacgcgcucaucaacgaccagcugaucaugaagaaccaccuccgggacaucaugggcauccccuacugcaacuacuccaaguacugcuaccugaaccacaccgucaccgggaagacgagccugccccgcugcugccugguguccaacggcagcuaccucaacgagacccacuucuccgacgacaucgagcagcaggccgacaacaugaucaccgagcugcugcagaaggaguacaucgaccggcagggcaagaccccgcucgggcugguggaccuguucgucuucagcacguccuucuaccugaucagcaucuuccuccaccuggugaagauccccacccaccgccacgugaucggcaagcccugccccaagccgcaccggcugaaccacauggggaucugcuccugcggccucuacaagcaccccgggguccccgugaaguggaagcgcugaggacuaguuauaagacugacuagcccgaugggccucccaacgggcccuccuccccuccuugcaccgagauuaaucaaaggcucuuuucagagccaccaaaaaaaaaaaaaaaaaaaaaaaaaaaaaaaaaaaaaaaaaaaaaaaaaaaaaaaaaaaaaaaaagaauu

SEQ ID NO: 26005 - RNA, 1655 nt, Artificial Sequence
  mRNA product Design i-3 (hSL-A64-N5) comprising derived and/or modified sequence from LASV(LASV1000-NIG-2009;Clade II)__AIT17782__GPCmut3 (opt1)
aggagaaagcuuaccaugggccagaucaucaccuucuuccaggaggugccccacgucaucgaggaggugaugaacaucgugcugaucgcccucagccugcuggccauccucaaggggaucuacaacgucgcgaccugcggccuguucgggcugguguccuuccuccugcugugcggccgcagcugcuccacgaccuacaaggggguguacgagcuccagacccuggagcuggacauggccagccucaacaugaccaugccgcuguccugcacgaagaacaacagccaccacuacaucauggucggcaacgagaccggccuggagcucacccugaccaacacguccaucaucaaccacaaguucugcaaccugagcgacgcccacaagaagaaccucuacgaccacgcccugauguccaucaucagcaccuuccaccuguccauccccaacuucaaccaguacgaggccaugagcugcgacuucaacgggggcaagaucuccgugcaguacaaccucagccacaccuacgcgguggacgccgccaaccacugcgggaccaucgccaacggcguccugcagacguucaugcggauggcguggggcggguccuacaucgcccuggacagcggcaagggguccugggacugcaucaugaccagcuaccaguaccucaucauccagaacaccaccugggaggaccacugccaguucucccgccccagccccaucggcuaccuggggcugcucagccagcggacgcgcgacaucuacaucucccggcgccggcgcggcaccuucaccuggacccugagcgacuccgagggcaacgagacgcccgggggcuacugccugacccgguggaugcucaucgaggccgagcugaagugcuucgggaacaccgccguggccaagugcaacgagaagcacgacgaggaguucugcgacaugcugcgccucuucgacuucaacaagcaggcgaucaagcggcugaagaccccggcccagaugagcauccagcugaucaacaaggccgugaacgcccucaucaacgaccagcugaucaugaagaaccaccuccgcgacaucaugggcauccccuacugcaacuacuccaaguacugcuaccugaaccacacggucaccgggaagaccagccugccccggugcugccugguguccaacggcagcuaccucaacgagacccacuucuccgacgacaucgagcagcaggccgacaacaugaucacggagcugcugcagaaggaguacaucgaccgccagggcaagaccccgcucgggcugguggaccuguucgucuucagcaccuccuucuaccugaucagcaucuuccuccaccuggugaagauccccacccaccggcacguggucggcaagcccugccccaagccgcaccgccugaaccacauggggaucugcuccugcggccucuacaagcaccccggggugcccgugaaguggaagcggugaggacuaguuauaagacugacuagcccgaugggccucccaacgggcccuccuccccuccuugcaccgagauuaaucaaaggcucuuuucagagccaccaaaaaaaaaaaaaaaaaaaaaaaaaaaaaaaaaaaaaaaaaaaaaaaaaaaaaaaaaaaaaaaaagaauu

SEQ ID NO: 26006 - RNA, 1655 nt, Artificial Sequence
  mRNA product Design i-3 (hSL-A64-N5) comprising derived and/or modified sequence from LASV(LASV221-NIG-2010;Clade II)__AIT17624__GPCmut3 (opt1)
aggagaaagcuuaccaugggccagaucaucaccuucuuccaggaggugccccacgucaucgaggaggugaugaacaucgugcugaucgcccucagccugcuggccauccucaaggggaucuacaacgucgcgaccugcggccuguucgggcugguguccuuccuccugcugugcggccgcagcugcuccacgaccuacaaggggguguacgagcuccagacccuggagcuggacauggccagccucaacaugaccaugccgcuguccugcacgaagaacaacagccaccacuacaucauggucggcaacgagaccggccuggagcucacccugaccaacacguccaucaucaaccacaaguucugcaaccugagcgacgcccacaagaagaaccucuacgaccacgcccugauguccaucaucagcaccuuccaccuguccauccccaacuucaaccaguacgaggccaugagcugcgacuucaacgggggcaagaucuccgugcaguacaaccucagccacaccuacgcgaucgacgccgccaaccacugcgggaccaucgccaacggcgugcugcagacguucaugcggauggcguggggcggguccuacaucgcccuggacagcggcaagggguccugggacugcaucaugaccagcuaccaguaccucaucauccagaacaccaccugggaggaccacugccaguucucccgccccagccccaucggcuaccuggggcugcucagccagcggacgcgcgacaucuacaucucccggcgccggcgcggcaccuucaccuggacccugagcgacuccgagggcaacgagacgcccgggggcuacugccugacccgguggaugcucaucgaggccgagcugaagugcuucgggaacaccgccgucgccaagugcaacgagaagcacgacgaggaguucugcgacaugcugcgccucuucgacuucaacaagcaggcgauccggcgccugaagaccccggcccagaugagcauccagcugaucaacaaggccgugaacgcccucaucaacgaccagcugaucaugaagaaccaccuccgggacaucaugggcauccccuacugcaacuacuccaaguacugcuaccugaaccacacggugaccgggaagaccagccugccccgcugcugccuggucuccaacggcagcuaccucaacgagacccacuucuccgacgacaucgagcagcaggccgacaacaugaucacggagaugcugcagaaggaguacauggaccggcagggcaagaccccgcuggggcucguggaccuguucguguucagcaccuccuucuaccugaucagcaucuuccugcaccucgucaagauccccacccaccgccacgugaucggcaagcccugccccaagccgcaccggcugaaccacauggggaucugcuccugcggccuguacaagcaccccggggugcccgucaaguggaagcgcugaggacuaguuauaagacugacuagcccgaugggccucccaacgggcccuccuccccuccuugcaccgagauuaaucaaaggcucuuuucagagccaccaaaaaaaaaaaaaaaaaaaaaaaaaaaaaaaaaaaaaaaaaaaaaaaaaaaaaaaaaaaaaaaaagaauu

SEQ ID NO: 26007 - RNA, 1655 nt, Artificial Sequence
  mRNA product Design i-3 (hSL-A64-N5) comprising derived and/or modified sequence from LASV(LASV237-NIG-2010;Clade II)__AIT17638__GPCmut3 (opt1)
aggagaaagcuuaccaugggccagaucaucaccuucuuccaggaggugccccacgucaucgaggaggugaugaacaucgugcugaucgcccucagccugcuggccauccucaaggggaucuacaacgucgcgaccugcggccuguucgggcugguguccuuccuccugcugugcggccgcagcugcuccacgaccuacaaggggguguacgagcuccagacccuggagcuggacauggccagccucaacaugaccaugccgcuguccugcacgaagaacaacagccaccacuacaucauggucggcaacgagaccggccuggagcucacccugaccaacacguccaucaucaaccacaaguucugcaaccugagcgacgcccacaagaaggaccucuacgaccacgcccugauguccaucaucagcaccuuccaccuguccauccccaacuucaaccaguacgaggccaugagcugcgacuucaacgggggcaagaucuccgugcaguacaaccucagccacaccuacgcgguggacgccgccaaccacugcgggaccaucgccaacggcguccugcagacguucaugcggauggcguggggcggguccuacaucgcccuggacagcggcaagggguccugggacugcaucaugaccagcuaccaguaccucaucauccagaacaccaccugggaggaccacugccaguucucccgccccagccccaucggcuaccuggggcugcucagccagcggacgcgcgacaucuacaucucccggcgccggcgcggcaccuucaccuggacccugagcgacuccgagggcaacgagacgcccgggggcuacugccugacccgguggaugcucaucgaggccgagcugaagugcuucgggaacaccgccguggccaagugcaacgagaagcacgacgaggaguucugcgacaugcugcgccucuucgacuucaacaagcaggcgauccggcgccugaagaccccggcccagaugagcauccagcugaucaacaaggccgugaacgcccucaucaacgaccagcugaucaugaagaaccaccuccgggacaucaugggcauccccuacugcaacuacuccaaguacugcuaccugaaccacacggucaccgggaagaccagccugccccgcugcugccugguguccaacggcagcuaccucaacgagacccacuucuccgacgacaucgagcagcaggccgacaacaugaucacggagcugcugcagaaggaguacauggaccggcagggcaagaccccgcucgggcugguggaccuguucgucuucagcaccuccuucuaccugaucagcaucuuccuccaccugaucaagauccccacccaccgccacaucacgggcaagcccugccccaagccgcaccggcugaaccacauggggaucugcuccugcggccucuacaagcaccccggggugcccgugaaguggaagcgcugaggacuaguuauaagacugacuagcccgaugggccucccaacgggcccuccuccccuccuugcaccgagauuaaucaaaggcucuuuucagagccaccaaaaaaaaaaaaaaaaaaaaaaaaaaaaaaaaaaaaaaaaaaaaaaaaaaaaaaaaaaaaaaaaagaauu

SEQ ID NO: 26008 - RNA, 1655 nt, Artificial Sequence
  mRNA product Design i-3 (hSL-A64-N5) comprising derived and/or modified sequence from LASV(LASV253-NIG-2011;Clade II)__AIT17670__GPCmut3 (opt1)
aggagaaagcuuaccaugggccagaucaucaccuucuuccaggaggugccccacgucaucgaggaggugaugaacaucgugcugaucgcccucagccugcuggccauccucaaggggaucuacaacgucgcgaccugcggccuguucgggcugguguccuuccuccugcugugcggccgcagcugcuccacgaccuacaaggggguguacgagcuccagacccuggagcuggacauggccagccucaacaugaccaugccgcuguccugcacgaagaacaacagccaccacuacaucauggucggcaacgagaccggccuggagcucacccugaccaacacguccaucaucaaccacaaguucugcaaccugagcgacgcccacaagaagaaccucuacgaccacgcccugauguccaucaucagcaccuuccaccuguccauccccaacuucaaccaguacgaggccaugagcugcgacuucaacgggggcaagaucuccgugcaguacaaccucagccacaccuacgcgguggacgccgccaaccacugcgggaccaucgccaacggcguccugcagacguucaugcggauggcguggggcggguccuacaucgcccuggacagcggcaagggguccugggacugcaucaugaccagcuaccaguaccucaucauccagaacaccaccugggaggaccacugccaguucucccgccccagccccaucggcuaccuggggcugcucagccagcggacgcgcgacaucuacaucucccggcgccggcgcggcaccuucaccuggacccugagcgacuccgagggcaacgagacgcccgggggcuacugccugacccgguggaugcucaucgaggccgagcugaagugcuucgggaacaccgccguggccaagugcaacgagaagcacgacgaggaguucugcgacaugcugcgccucuucgacuucaacaagcaggcgauccggcgccugaaggccccggcccagaugagcauccagcugaucaacaaggccgugaacgcccucaucaacgaccagcugaucaugaagaaccaccuccgggacaucaugggcauccccuacugcaacuacuccaaguacugcuaccugaaccacaccgucacggggcgcaccagccugccccggugcugccugguguccaacggcagcuaccucaacgagacccacuucuccgacgacaucgagcagcaggcggacaacaugaucaccgagcugcugcagaaggaguacaucgaccgccagggcaagacgccgcucgggcugguggaccuguucgucuucagcaccuccuucuaccugaucagcaucuuccuccaccuggugaagauccccacccaccggcacaucaucggcaagcccugccccaagccgcaccgccugaaccacauggggaucugcuccugcggccucuacaagcaccccggggugcccgucaaguggaagcggugaggacuaguuauaagacugacuagcccgaugggccucccaacgggcccuccuccccuccuugcaccgagauuaaucaaaggcucuuuucagagccaccaaaaaaaaaaaaaaaaaaaaaaaaaaaaaaaaaaaaaaaaaaaaaaaaaaaaaaaaaaaaaaaaagaauu

SEQ ID NO: 26009 - RNA, 1655 nt, Artificial Sequence
  mRNA product Design i-3 (hSL-A64-N5) comprising derived and/or modified sequence from LASV(LASV254-NIG-2011;Clade II)__AIT17674__GPCmut3 (opt1)
aggagaaagcuuaccaugggccagaucaucaccuucuuccaggaggugccccacgucaucgaggaggugaugaacaucgugcugaucgcccucagccugcuggccauccucaaggggaucuacaacgucgcgaccugcggccuguucgggcugguguccuuccuccugcugugcggccgcagcugcuccacgaccuacaaggggguguacgagcuccagacccuggagcuggacaugaccaaccucaacaugacgaugccgcugagcugcaccaagaacaacucccaccacuacaucauggucggcaacgagaccggccuggagcucacccugacgaacaccagcaucaucaaccacaaguucugcaaccuguccgacgcccacaagaagaaccucuacaaccacgcccugaugagcaucaucuccaccuuccaccugagcauccccaacuucaaccaguacgaggccauguccugcgacuucaacgggggcaagaucagcgugcaguacaaccucucccacagcuacgccguggacgcggccaaccacugcgggaccaucgccaacggcguccugcagacguucaugcggauggccuggggcggguccuacaucgcgcuggacagcggcaaggggaacugggacugcaucaugaccuccuaccaguaccucaucauccagaacaccaccugggaggaccacugccaguucagccgccccucccccaucggcuaccuggggcugcucagccagcggacgcgcgacaucuacaucagccggcgccggcgcggcaccuucaccuggacccuguccgacagcgagggcaacgagacgcccgggggcuacugccugacccgguggaugcucaucgaggccgagcugaagugcuucgggaacaccgccguggccaagugcaacgagaagcacgacgaggaguucugcgacaugcugcgccucuucgacuucaacaagcaggccauccggcgccugaagaccccggcgcaggccaacauccagcugaucaacaaggccgugaacgcccucaucaacgaccagcugaucaugaagaaccaccuccgggacaucaugggcauccccuacugcaacuacuccaaguacugcuaccugaaccacacggucaccgggaagaccagccugccccgcugcugccugguguccaacggcagcuaccucaacgagacccacuucuccgacgacaucgagcagcaggccgacaacaugaucacggagcugcugcagaaggaguacauggaccggcagggcaagaccccgcucgggcugguggaccuguucgucuucagcaccuccuucuaccugaucagcaucuuccuccaccuggugaagauccccacccaccgccacgugaucggcaagcccugccccaagccgcaccggcugaaccacauggggaucugcuccugcggccucuacaagcaccccgggguccccgugaaguggaagcgcugaggacuaguuauaagacugacuagcccgaugggccucccaacgggcccuccuccccuccuugcaccgagauuaaucaaaggcucuuuucagagccaccaaaaaaaaaaaaaaaaaaaaaaaaaaaaaaaaaaaaaaaaaaaaaaaaaaaaaaaaaaaaaaaaagaauu

SEQ ID NO: 26010 - RNA, 1655 nt, Artificial Sequence
  mRNA product Design i-3 (hSL-A64-N5) comprising derived and/or modified sequence from LASV(Nig08-A19;Clade III)__ADU56618__GPCmut3 (opt1)
aggagaaagcuuaccaugggccagaucgugaccuucuuccaggaggucccccacgugaucgaggaggugaugaacaucguccugaucgcccucagcauccuggccauccugaaggggcucuacaacaucgcgaccugcggccugaucgggcuggugacguuccuccugcuguccggccgcagcugcuccaugaccuacaaggggguguacgagcuccagacccuggagcugaacaugaacacccucaacaugacgaugccgcugagcugcaccaagaacaacucccaccacuacaucauggucggcaacgagaccggccuggagcucacccugacgaacaccagccugcuccaccacaaguucugcaaccuguccgacgcccacaagaagaaccuguacgaccacacccucaugagcaucaucuccaccuuccaccugagcauccccaacuucaaccaguacgaggccauguccugcgacuucaacgggggcaagaucacggugcaguacaaccugagccacuccuacgccaucgacgccgcgaaccacugcgggaccguggccaacggcguccuccagaccuucaugcggauggccuggggcgggagcuacaucgcccuggacuccggccgcgggaagugggacugcaucaugaccagcuaccaguaccugaucauccagaacacgaccugggaggaccacugccaguucucccggcccagccccaucggcuaccucgggcugcugucccagcgcacccgggacaucuacaucagccgccggcgccggggcaccuucacguggacccucagcgacuccgagggcaacgagacccccgggggcuacugccugacccgcuggaugcugaucgaggcggagcucaagugcuucgggaacacggccguggccaagugcaacgagaagcacgacgaggaguucugcgacaugcugcggcuguucgacuucaacaagcaggccauccgccggcucaaggccccggcgcagaugagcauccagcugaucaacaaggccgugaacgcccugaucaacgaccagcucaucaugaagaaccaccuccgcgacaucaugggcauccccuacugcaacuacuccaaguacugcuaccugaaccacaccagcaccgggcggaccucccugccccgcugcugccuggucagcaacggcuccuaccugaacgagacgcacuucagcgacgacaucgagcagcaggccgacaacaugaucaccgagaugcuccagaaggaguaccuggaccggcagggcaagaccccgcuggggcugguggaccucuucguguucuccaccagcuucuaccugaucuccaucuuccugcaccucgucaagauccccacgcaccgccacaucgugggcaagcccugccccaagccgcaccggcugaaccacauggggaucugcagcugcggccuguacaagcagcccggggugcccguccgcuggaagcggugaggacuaguuauaagacugacuagcccgaugggccucccaacgggcccuccuccccuccuugcaccgagauuaaucaaaggcucuuuucagagccaccaaaaaaaaaaaaaaaaaaaaaaaaaaaaaaaaaaaaaaaaaaaaaaaaaaaaaaaaaaaaaaaaagaauu

SEQ ID NO: 26011 - RNA, 1658 nt, Artificial Sequence
  mRNA product Design i-3 (hSL-A64-N5) comprising derived and/or modified sequence from LASV(G1180-SLE-2010;Clade IV)__AIT17168__GPCmut3 (opt1)
aggagaaagcuuaccaugggccagaucgugaccuucuuccaggaggucccccacgugaucgaggaggugaugaacaucguccugaucgcccucagcauccuggccgugcugaaggggcucuacaacuucgcgaccugcggccugguggggcugcucacguuccugcugcucugcggccgcuccugcaccgccagccgguacaagggggucuacgagcugcagacccuggagcucaacauggagacccugaacaugacgaugccgcuguccugcaccaagaacaacagccaccacuacaucauggugggcaacgagaccggccucgagcugacccugacgaacaccuccaucaucaaccacaaguucugcaaccucagcgacgcccacaagaagaaccuguacgaccacgcccugauguccaucaucagcaccuuccaccucuccauccccaacuucaaccaguacgaggccaugagcugcgacuucaacgggggcaagaucuccgugcaguacaaccugagccacuccuacgcgggggacgccgccaaccacugcggcaccgucgccaacggggugcugcagacguucaugcgcauggcguggggcggcagcuacaucgcccucgacuccgggcacggcagcugggacugcaucaugaccuccuaccaguaccugaucauccagaacaccaccugggaggaccacugccaguucagccggcccucccccaucggguaccugggccuccugagccagcgcacgcgggacaucuacaucagccgccggcgccggggcaccuucaccuggacccuguccgacagcgaggggaaggacacgccgggcggguacugccucacccgcuggaugcugaucgaggccgagcugaagugcuucggcaacaccgccguggccaagugcaacgagaagcacgacgaggaguucugcgacaugcuccggcuguucgacuucaacaagcaggcgauccagcgccugaaggcccccgcccagauguccauccagcucaucaacaaggccgucaacgcccugaucaacgaccagcugaucaugaagaaccaccuccgggacaucauggggauccccuacugcaacuacagcaaguacugcuaccugaaccacaccacgaccggcaagaccucccugcccaagugcugccucgugagcaacggcuccuaccugaacgagacccacuucagcgacgacaucgagcagcaggcggacaacaugaucacggagaugcugcagaaggaguacauggagcgccaggggaagaccccgcucggccugguggaccuguucgucuucuccaccagcuucuaccugaucuccaucuuccuccaccuggugaagauccccacccaccggcacaucgugggcaagagcugccccaagccccaccgccugaaccacauggggaucugcuccugcgggcucuacaagcagccgggcguccccgugaaguggaagcggugaggacuaguuauaagacugacuagcccgaugggccucccaacgggcccuccuccccuccuugcaccgagauuaaucaaaggcucuuuucagagccaccaaaaaaaaaaaaaaaaaaaaaaaaaaaaaaaaaaaaaaaaaaaaaaaaaaaaaaaaaaaaaaaaagaauu

SEQ ID NO: 26012 - RNA, 1658 nt, Artificial Sequence
  mRNA product Design i-3 (hSL-A64-N5) comprising derived and/or modified sequence from LASV(G1442-SLE-2011;Clade IV)__AIT17180__GPCmut3 (opt1)
aggagaaagcuuaccaugggccagaucgugaccuucuuccaggaggucccccacgugaucgaggaggugaugaacaucguccugaucgcccucagcauccuggccgugcugaaggggcucuacaacguggcgaccugcggccugaucgggcuggucacguuccuccugcugugcggccgcuccugcaccaccacccucuacaaggggguguacgagcugcagacgcuggagcucaacauggagacccugaacaugaccaugccgcugagcugcaccaagaacaacucccaccacuacauccgggugggcaacgagacgggccucgagcugacccugaccaacaccagcaucaucaaccacaaguucugcaaccucuccgacgcccacaagaagaaccuguacgaccacgcccugaugagcaucaucuccacguuccaccucagcauccccaacuucaaccaguacgaggccauguccugcgacuucaacgggggcaagaucagcguccaguacaaccugucccacagcuacgccggggacgcggccaaccacugcggcaccguggccaacggggugcugcagaccuucaugcgcauggccuggggcggcuccuacaucgcgcucgacagcgggcggggcaacugggacugcaucaugaccuccuaccaguaccugaucauccagaacacgaccugggacgaccacugccaguucagccgccccucccccaucggguaccugggccuccugagccagcggacccgcgacgucuacaucucccggcgccggcgcggcaccuucacguggacccugagcgacagcgaggggaaggacaccccgggcggguacugccucacccgguggaugcugaucgaggccgagcugaagugcuucggcaacacggccguggccaagugcaacgagaagcacgacgaggaguucugcgacaugcuccgccuguucgacuucaacaagcaggccauccagcggcugaaggcgcccgcccagauguccauccagcucaucaacaaggccgugaacgcccugaucaacgaccagcugaucaugaagaaccaccuccgcgacaucauggggauccccuacugcaacuacagcaaguacugcuaccugaacaacaccgccaccggcaagaccucccugcccaagugcugccucaucagcaacggcuccuaccugaacgagacgcacuucagcgacgacaucgagcaggaggcggacaacaugaucaccgagaugcugcagaaggaguacauggagcggcaggggaagaccccgcucggccuggucgaccuguucguguucuccaccagcuucuaccugaucuccaucuuccuccaccuggugaagauccccacgcaccgccacaucgucggcaagagcugccccaagccccaccggcugaaccacauggggaucugcuccugcgggcucuacaagcagccgggcgugcccgugcgcuggaagcggugaggacuaguuauaagacugacuagcccgaugggccucccaacgggcccuccuccccuccuugcaccgagauuaaucaaaggcucuuuucagagccaccaaaaaaaaaaaaaaaaaaaaaaaaaaaaaaaaaaaaaaaaaaaaaaaaaaaaaaaaaaaaaaaaagaauu

SEQ ID NO: 26013 - RNA, 1658 nt, Artificial Sequence
  mRNA product Design i-3 (hSL-A64-N5) comprising derived and/or modified sequence from LASV(G3010-SLE-2013;Clade IV)__AIT17344__GPCmut3 (opt1)
aggagaaagcuuaccaugggccagaucgugaccuucuuccaggaggucccccacgugaucgaggaggugaugaacaucguccugaucgcccucagcauccuggccgugcugaaggggcucuacaacuucgcgaccugcggccugguggggcuggucacguuccuccugcugugcggccgcuccugcaccaccagccucuacaaggggguguacgagcugcagacccuggagcucaacauggagacgcugaacaugaccaugccgcuguccugcaccaagaacaacagccaccacuacaucauggugggcaacgagaccggccucgagcugacgcugaccaacaccuccaucaucaaccacaaguucugcaaccucagcgacgcccacaagaagaaccuguacaaccacgcccugauguccaucaucagcaccuuccaccucuccauccccaacuucaaccaguacgaggccaugagcugcgacuucaacgggggcaagaucuccguccaguacaaccugagccacuccuacgccggggacgcggccagccacugcggcacgguggccaacggggugcugcagaccuucaugcggauggccuggggcggcuccuacaucgcgcucgacagcggguacggcaagugggacugcaucaugaccuccuaccaguaccugaucauccagaacaccacgugggaggaccacugccaguucagccgccccucccccaucggguaccugggccuccugagccagcggacccgcgacaucuacaucagccggcgccggcgcggcaccuucaccuggacgcuguccgacagcgaggggaaggacaccccgggcggguacugccucacccgguggaugcugaucgaggccgagcugaagugcuucggcaacaccgccgucgccaagugcaacgagaagcacgacgaggaguucugcgacaugcuccgccuguucgacuucaacaagcaggccauccagcggcugaagacgcccgcgcagauguccauccagcucaucaacaaggccgugaacgcccugaucaacgaccagcugaucaugaagaaccaccuccgcgacaucauggggauccccuacugcaacuacagcaaguacugcuaccugaaccacaccaccaccggcaagacgucccugcccaagugcugccucgugagcaacggcuccuaccugaacgagacccacuucagcgacgacaucgagcagcaggccgacaacaugaucaccgagaugcugcagaaggaguacauggagcggcaggggaagaccccgcucggccuggucgaccuguucguguucuccacgagcuucuaccugaucuccaucuuccuccaccuggugaagauccccacccaccgccacaucgucggcaagagcugccccaagccccaccggcugaaccacauggggaucugcuccugcgggcucuacaagcagccgggcgugcccgugcgcuggaagcggugaggacuaguuauaagacugacuagcccgaugggccucccaacgggcccuccuccccuccuugcaccgagauuaaucaaaggcucuuuucagagccaccaaaaaaaaaaaaaaaaaaaaaaaaaaaaaaaaaaaaaaaaaaaaaaaaaaaaaaaaaaaaaaaaagaauu

SEQ ID NO: 26014 - RNA, 1658 nt, Artificial Sequence
  mRNA product Design i-3 (hSL-A64-N5) comprising derived and/or modified sequence from LASV(G502-SLE-2009;Clade IV)__AIT17126__GPCmut3 (opt1)
aggagaaagcuuaccaugggccagaucgugaccuucuuccaggaggucccccacgugaucgaggaggugaugaacaucguccugaucgcccucagcauccuggccgugcugaaggggcucuacaacuucgcgaccugcggccugguggggcugcucacguuccugcugcucugcggccgcuccugcaccaccgggcuguacaagggcgucuacgagcugcagacccucgagcugaacauggagacgcugaacaugaccaugccgcucagcugcaccaagaacaacucccaccacuacaucauggugggcaacgagaccgggcuggagcugacgcucaccaacaccagcaucaucaaccacaaguucugcaaccuguccgacgcccacaagaagaaccuguacgaccacgcccucaugagcaucaucuccaccuuccaccugagcauccccaacuucaaccaguacgaggccauguccugcgacuucaacggcgggaagaucagcgugcaguacaaccugucccacagcuacgccggcgacgcggccgaccacugcgggacggucgccaacggcgugcuccagaccuucaugcggauggccuggggcggguccuacaucgcgcuggacagcggccgcgggcggugggacugcaucaugaccuccuaccaguaccugaucauccagaacaccacgugggaggaccacugccaguucagccgccccucccccaucggcuaccucggccugcugagccagcggacccgcgacaucuacaucucccggcgccggcgcgggaccuucaccuggacgcucagcgacagcgagggcaaggacacccccgggggcuacugccugacccgguggaugcugaucgaggccgagcucaagugcuucgggaacaccgccguggccaagugcaacgagaagcacgacgaggaguucugcgacaugcugcgccuguucgacuucaacaagcaggccauccagcggcucaaggcgccggcccagauguccauccagcugaucaacaaggccgucaacgcccugaucaacgaccagcucgugaugaagaaccaccuccgcgacaucaugggcauccccuacugcaacuacagccgguacugcuaccugaaccacacgaccaccggccgcaccucccugcccaagugcugccuggugagcaacggguccuaccugaacgagacgcacuucagcgacgacaucgagcagcaggccgacaacaugaucaccgagaugcuccagaaggaguacauggagcggcagggcaagaccccgcuggggcuggucgaccuguucguguucuccaccagcuucuaccucaucuccaucuuccugcaccuggugaagauccccacgcaccgccacaucgucggcaagagcugccccaagccccaccggcucaaccacauggggaucugcuccugcggccuguacaagcagccgggcgugcccgugaaguggaagcgcugaggacuaguuauaagacugacuagcccgaugggccucccaacgggcccuccuccccuccuugcaccgagauuaaucaaaggcucuuuucagagccaccaaaaaaaaaaaaaaaaaaaaaaaaaaaaaaaaaaaaaaaaaaaaaaaaaaaaaaaaaaaaaaaaagaauu

SEQ ID NO: 26015 - RNA, 1658 nt, Artificial Sequence
  mRNA product Design i-3 (hSL-A64-N5) comprising derived and/or modified sequence from LASV(G733-SLE-2010;Clade IV)__AIT17154__GPCmut3 (opt1)
aggagaaagcuuaccaugggccagaucgugaccuucuuccaggaggucccccacgugaucgaggaggugaugaacaucguccugaucgcccucagcauccuggccgugcugaaggggcucuacaacuucgcgaccugcggcaucguggggcuggucuccuuccugcuccugugcggccgcagcugcacgaccucccuguacaaggggguguacgagcuccagacccuggagcugaacauggagacccucaacaugacgaugccgcugagcugcaccaagaacaacucccaccacuacaucauggugggcaacgagaccggccuggagcucacccugacgaacaccagcaucaucaaccacaaguucugcaaccuguccgacgcccacaagaagaaccucuacgaccacgcccugaugagcaucaucuccaccuuccaccugagcauccccaacuucaaccaguacgaggccauguccugcgacuucaacgggggcaagaucagcguccaguacaaccucucccacagcuacgccggggacgcggccaaccacugcggcaccaucgccaacggggugcugcagacguucaugcggauggccuggggcggcuccuacaucgcgcuggacagcgggcgcgaccggugggacugcaucaugaccuccuaccaguaccucaucauccagaacaccaccugggaggaccacugccaguucagccgccccucccccaucggcuaccuggggcugcucagccagcggacgcgcgacaucuacaucagccggcgccggcgcggcaccuucaccuggacccuguccgacagcgagggcaaggacacgcccgggggcuacugccugacccgguggaugcucaucgaggccgagcugaagugcuucgggaacaccgccguggccaagugcaacgagaagcacgacgaggaguucugcgacaugcugcgccucuucgacuucaacaagcaggccauccagcggcugaaggcgccggcccagauguccauccagcugaucaacaaggccgucaacgcccucaucaacgaccagcugaucaugaagaaccaccuccgcgacaucaugggcauccccuacugcaacuacagcaaguacugcuaccugaaccacaccacgaccgggaagaccucccugcccaagugcugccuggugagcaacggcuccuaccucaacgagacccacuucagcgacgacaucgagcagcaggccgacaacaugaucacggagaugcugcagaaggaguacauggagcggcagggcaagaccccgcuggggcucguggaccuguucgucuucuccaccagcuucuaccugaucuccaucuuccugcaccucgugaagauccccacccaccgccacguggucggcaagagcugccccaagccccaccggcugaaccacauggggaucugcuccugcggccuguacgggcagccgggcgugcccgugaaguggaagcgcugaggacuaguuauaagacugacuagcccgaugggccucccaacgggcccuccuccccuccuugcaccgagauuaaucaaaggcucuuuucagagccaccaaaaaaaaaaaaaaaaaaaaaaaaaaaaaaaaaaaaaaaaaaaaaaaaaaaaaaaaaaaaaaaaagaauu

SEQ ID NO: 26016 - RNA, 1658 nt, Artificial Sequence
  mRNA product Design i-3 (hSL-A64-N5) comprising derived and/or modified sequence from MOPV/LASV reassortant(IGS-1;Clade IV)__AFY05576__GPCmut3 (opt1)
aggagaaagcuuaccaugggccagaucgugaccuucuuccaggaggucccccacgugaucgaggaggugaugaacaucguccugaucgcccucagcgugcuggccgugcugaaggggcucuacaacuucgcgaccugcggccuggucgggcuggugacguuccuccugcugugcggccgcuccugcaccaccagccucuacaaggggguguacgagcugcagacccuggagcucaacauggagacgcugaacaugaccaugccgcuguccugcaccaagaacaacagccaccacuacaucauggucggcaacgagaccggccucgagcugacgcugaccaacaccuccaucaucaaccacaaguucugcaaccucagcgacgcccacaagaagaaccuguacgaccacgcccugauguccaucaucagcaccuuccaccucuccauccccaacuucaaccaguacgaggccaugagcugcgacuucaacgggggcaagaucuccgugcaguacaaccugagccacuccuacgccggggacgcggccaaccacugcggcacgguggccaacgggguccugcagaccuucaugcggauggccuggggcggcagcuacaucgcgcucgacuccgggcgcggcaacugggacugcaucaugaccagcuaccaguaccugaucauccagaacaccacgugggaggaccacugccaguucucccggcccagccccaucggguaccugggccuccugucccagcgcacccgggacaucuacaucagccgccggcgccggggcaccuucaccuggacgcugagcgacuccgagggggaggacaccccgggcggguacugccucacccgcuggaugcugaucgaggccgagcugaagugcuucggcaacaccgccguggccaagugcaacgagaagcacgacgaggaguucugcgacaugcuccggcuguucgacuucaacaagcaggccauccagcgccugaaggcgcccgcccagaugagcauccagcucaucaacaaggccgugaacgcccugaucaacgaccagcugaucaugaagaaccaccuccgggacaucauggggauccccuacugcaacuacuccaaguacugcuaccugaaccacacgaccaccggccgcaccagccugcccaagugcugccucgucuccaacggcagcuaccugaacgagacgcacuucuccgacgacaucgagcagcaggccgacaacaugaucaccgagaugcugcagaaggaguacauggagcggcaggggaagaccccgcucggccugguggaccuguucguguucagcaccuccuucuaccugaucagcaucuuccuccaccuggucaagauccccacgcaccgccacaucguggggaaguccugccccaagccccaccggcugaaccacaugggcaucugcagcugcgggcucuacaagcagccgggcgugcccgucaaguggaagcgcugaggacuaguuauaagacugacuagcccgaugggccucccaacgggcccuccuccccuccuugcaccgagauuaaucaaaggcucuuuucagagccaccaaaaaaaaaaaaaaaaaaaaaaaaaaaaaaaaaaaaaaaaaaaaaaaaaaaaaaaaaaaaaaaaagaauu

SEQ ID NO: 26017 - RNA, 1658 nt, Artificial Sequence
  mRNA product Design i-3 (hSL-A64-N5) comprising derived and/or modified sequence from LASV(LM765-SLE-2012;Clade IV)__AIT17814__GPCmut3 (opt1)
aggagaaagcuuaccaugggccagaucgugaccuucuuccaggaggucccccacgugaucgaggaggugaugaacaucguccugaucgcccucagcauccuggccgugcugaaggggcucuacaacuucgcgaccugcggccugguggggcuggucacguuccuccugcugugcggccgcuccugcaccaccagccucuacaaggggguguacgagcugcagacccuggagcucaacauggagacgcugaacaugaccaugccgcuguccugcaccaagaacaacagccaccacuacaucauggugggcaacgagaccggccucgagcugacgcugaccaacaccuccaucaucgaccacaaguucugcaaccucagcgacgcccaccggaagaaccuguacgaccacgcccugauguccaucaucagcaccuuccaccucuccauccccaacuucaaccaguacgaggccaugagcugcgacuucaacgggggcaagaucuccguccaguacaaccugagccacuccuacgccaaggacgcggccgaccacugcgggacgguggccaacggcgugcugcagaccuucaugcgcauggccuggggcgggagcuacaucgcgcucgacuccggccgggggcgcugggacugcaucaugaccagcuaccaguaccugaucauccagaacaccacgugggaggaccacugccaguucucccggcccagccccaucggcuaccuggggcuccugucccagcgcacccgggacaucuacaucagccgccggcgccggggcaccuucaccuggacgcugagcgacuccgagggcaaggacacccccgggggcuacugccucacccgcuggaugcugaucgaggccgagcugaagugcuucgggaacaccgccgucgccaagugcaacgagaagcacgacgaggaguucugcgacaugcuccggcuguucgacuucaacaagcaggccauccagcgccugaaggcgccggcccagaugagcauccagcucaucaacaaggccgugaacgcccugaucaacgaccagcugaucaugaagaaccaccuccgggacaucaugggcauccccuacugcaacuacuccaaguacugcuaccugaaccacacgaccaccgggaagaccagccugcccaagugcugccucguguccaacggcagcuaccugaacgagacgcacuucuccgacgacaucgagcagcaggccgacaacaugaucaccgagaugcugcagaaggaguacauggagcgccagggcaagaccccgcucgggcuggucgaccuguucguguucagcaccuccuucuaccugaucagcaucuuccuccaccuggugaagauccccacgcaccggcacaucgucggcaagcccugccccaagccgcaccgccugaaccacauggggaucugcuccugcggccucuacaagcagcccggggugcccgugaaguggaagcggugaggacuaguuauaagacugacuagcccgaugggccucccaacgggcccuccuccccuccuugcaccgagauuaaucaaaggcucuuuucagagccaccaaaaaaaaaaaaaaaaaaaaaaaaaaaaaaaaaaaaaaaaaaaaaaaaaaaaaaaaaaaaaaaaagaauu

SEQ ID NO: 26018 - RNA, 1658 nt, Artificial Sequence
  mRNA product Design i-3 (hSL-A64-N5) comprising derived and/or modified sequence from LASV(LM776-SLE-2012;Clade IV)__AIT17824__GPCmut3 (opt1)
aggagaaagcuuaccaugggccagaucgugaccuucuuccaggaggucccccacgugaucgaggaggugaugaacaucguccugaucgcccucagcauccuggccgugcugaaggggcucuacaacuucgcgaccugcggccugguggggcuggucacguuccuccugcugugcggccgcuccugcaccaccagcguguacaaggggguguacgagcuccagacccuggagcugaacauggagacgcucaacaugaccaugccgcuguccugcaccaagaacaacagccaccacuacaucauggucggcaacgagaccggccuggagcucacgcugaccaacaccuccaucaucaaccacaaguucugcaaccugagcgacgcccacaagaagaaccucuacgaccacgcccugauguccaucaucagcaccuuccaccuguccauccccaacuucaaccaguacgaggccaugagcugcgacuucaacgggggcaagaucuccgugcaguacaaccucagccacuccuacgccggggacgcggccaaccacugcggcacgguggccaacgggguccugcagaccuucaugcggauggccuggggcggcagcuacaucgcgcuggacuccgggcacggcaagugggacugcaucaugaccagcuaccaguaccucaucauccagaacaccacgugggaggaccacugccaguucucccgccccagccccaucggguaccugggccugcucucccagcggacccgcgacaucuacaucagccggcgccggcgcggcaccuucaccuggacgcugagcgacuccgaggggaaggacaccccgggcggguacugccugacccgguggaugcucaucgaggccgagcugaagugcuucggcaacaccgccguggccaagugcaacgagaagcacgacgaggaguucugcgacaugcugcgccucuucgacuucaacaagcaggccauccagcggcugaaggcgcccgcccagaugagcauccagcugaucaacaaggccgugaacgcccucaucaacgaccagcugaucaugaagaaccaccuccgcgacaucauggggauccccuacugcaacuacuccaaguacugcuaccugaaccacacgaccaccggcaagaccagccugcccaagugcugccuggucuccaacggcagcuaccucaacgagacgcacuucuccgacgacaucgagcagcaggccgacaacaugaucaccgagaugcugcagaaggaguacauggagcggcaggggaagaccccgcugggccucguggaccuguucguguucagcaccuccuucuaccugaucagcaucuuccugcaccucgucaagauccccacgcaccgccacaucguggggaaguccugccccaagccccaccggcugaaccacaugggcaucugcagcugcgggcuguacaagcagccgggcgugcccguccgcuggaagcggugaggacuaguuauaagacugacuagcccgaugggccucccaacgggcccuccuccccuccuugcaccgagauuaaucaaaggcucuuuucagagccaccaaaaaaaaaaaaaaaaaaaaaaaaaaaaaaaaaaaaaaaaaaaaaaaaaaaaaaaaaaaaaaaaagaauu

SEQ ID NO: 26019 - RNA, 1658 nt, Artificial Sequence
  mRNA product Design i-3 (hSL-A64-N5) comprising derived and/or modified sequence from LASV(Mad39;Clade IV)__ANH09722__GPCmut3 (opt1)
aggagaaagcuuaccaugggccagaucgugaccuucuuccaggaggucccccacgugaucgaggaggugaugaacaucguccugaucgcccucagcauccuggccgugcugaaggggcucuacaacguggcgaccugcggccugaucgggcuggucacguuccuccugcugugcggccgcuccugcaccaccacccucuacaaggggguguacgagcugcaggcccuggagcucaacauggagacgcugaacaugaccaugccgcugagcugcaccaagaacaacucccaccacuacauccgggugggcaacgagaccggccucgagcugacgcugaccaacaccagccucaucaaccacaaguucugcaaccuguccgacgcccacaagaagaaccuguacgaccacgcccucaugagcaucaucuccaccuuccaccugagcauccccaacuucaaccaguacgaggccauguccugcgacuucaacgacgggaagaucagcguccaguacaaccugucccacacguacgcgggcgacaccgccaaccacugcgggaccguggccaacggcgugcuccagaccuucaugcgcauggccuggggcgggagcuacaucgcgcuggacuccggccgcgggggcugggacugcaucaugacgagcuaccaguaccugaucauccagaacaccaccugggaggaccacugccaguucucccggcccagccccaucggguaccucggccugcugucccagcggacccgcgacaucuacaucagccggcgccggcgcggcacguucaccuggacccucuccgacagcgaggggaaggacaccccgggcggguacugccugacgcgguggaugcugaucgaggccgagcucaagugcuucggcaacaccgccgucgccaagugcaacgagaagcacgacgaggaguucugcgacaugcugcgccuguucgacuucaacaagcaggccauccagcggcucaaggcgcccgcccagaugagcauccagcugaucaacaaggccgugaacgcccugaucaacgaccagcucaucaugaagaaccaccuccgcgacaucauggggauccccuacugcaacuacuccaaguacugcuaccugaaccacaccgugaccggcaagacgagccugcccaagugcugccuggucuccaacggcagcuaccugaacgagacccacuucuccgacgacaucgagcagcaggccgacaacaugaucaccgagaugcuccagaaggaguacauggagcggcaggggaagaccccgcugggccugguggaccuguucguguucagcacguccuucuaccucaucagcaucuuccugcaccuggucaagauccccacccaccgccacgugguggggaagcccugccccaagccgcaccggcucaaccacaugggcaucugcuccugcggguucuacaagcagcccggcguccccgugcgcuggaagcggugaggacuaguuauaagacugacuagcccgaugggccucccaacgggcccuccuccccuccuugcaccgagauuaaucaaaggcucuuuucagagccaccaaaaaaaaaaaaaaaaaaaaaaaaaaaaaaaaaaaaaaaaaaaaaaaaaaaaaaaaaaaaaaaaagaauu

SEQ ID NO: 26020 - RNA, 1658 nt, Artificial Sequence
  mRNA product Design i-3 (hSL-A64-N5) comprising derived and/or modified sequence from LASV(Z0947-SLE-2011;Clade IV)__AIT17840__GPCmut3 (opt1)
aggagaaagcuuaccaugggccagaucgugaccuucuuccaggaggucccccacgugaucgaggaggugaugaacaucguccugaucgcccucagcauccuggccgugcugaaggggcucuacaacuucgcgaccugcggccugguggggcuggucacguuccuccugcugugcggccgcuccugcaccaucagccucuacaaggggguguacgagcugcagacccuggagcucaacauggagacccugaacaugacgaugccgcuguccugcaccaagaacaacagccaccacuacaucauggugggcaacgagaccggccucgagcugacccugacgaacaccuccaucaucaaccacaaguucugcaaccucagcgacgcccacaagaagaaccuguacgaccacgcccugauguccaucaucagcaccuuccaccucuccauccccaacuucaaccaguacgaggccaugagcugcgacuucaacgggggcaagaucuccguccaguacaaccugagccacuccuacgccggggacgcggccaaccacugcggcaccguggccaacggggugcugcagacguucaugcggauggccuggggcggcagcuacaucgcgcucgacuccgggcgcgaccggugggacugcaucaugaccagcuaccaguaccugaucauccagaacaccaccugggaggaccacugccaguucucccgccccagccccaucggcuaccuggggcuccugucccagcggacgcgcgacaucuacaucagccggcgccggcgcggcaccuucaccuggacccugagcgacuccgagggcaaggacacgcccgggggcuacugccucacccgguggaugcugaucgaggccgagcugaagugcuucgggaacaccgccgucgccaagugcaacgagaagcacgacgaggaguucugcgacaugcuccgccuguucgacuucaacaagcaggccauccagcggcugaaggcgccggcccagaugagcauccagcucaucaacaaggccgugaacgcccugaucaacgaccagcugaucaugaagaaccaccuccgcgacaucaugggcauccccuacugcaacuacuccaaguacugcuaccugaaccacaccacgaccgggaagaccagccugcccaagugcugccucguguccaacggcagcuaccugaacgagacccacuucuccgacgacaucgagcagcaggccgacaacaugaucacggagaugcugcagaaggaguacauggagcggcagggcaagaccccgcucgggcuggucgaccuguucguguucagcaccuccuucuaccugaucagcaucuuccuccaccuggugaagauccccacccaccgccacaucgucggcaagcccugccccaagccgcaccggcugaaccacauggggaucugcuccugcggccucuacaagcagcccggggugcccgugaaguggaagcgcugaggacuaguuauaagacugacuagcccgaugggccucccaacgggcccuccuccccuccuugcaccgagauuaaucaaaggcucuuuucagagccaccaaaaaaaaaaaaaaaaaaaaaaaaaaaaaaaaaaaaaaaaaaaaaaaaaaaaaaaaaaaaaaaaagaauu

SEQ ID NO: 26021 - RNA, 1658 nt, Artificial Sequence
  mRNA product Design i-3 (hSL-A64-N5) comprising derived and/or modified sequence from LASV(Josiah;Clade IV)__NP_694870__GPCmut3 (opt4)
aggagaaagcuuaccaugggccagaucgugaccuucuuccaggaggugccccacgugaucgaggaggugaugaacaucgugcugaucgcccugagcgugcuggccgugcugaagggccuguacaacuucgccaccugcggccuggugggccuggugaccuuccugcugcugugcggcagaagcugcaccaccagccuguacaagggcguguacgagcugcagacccuggagcugaacauggagacccugaacaugaccaugccccugagcugcaccaagaacaacagccaccacuacaucauggugggcaacgagaccggccuggagcugacccugaccaacaccagcaucaucaaccacaaguucugcaaccugagcgacgcccacaagaagaaccuguacgaccacgcccugaugagcaucaucagcaccuuccaccugagcauccccaacuucaaccaguacgaggccaugagcugcgacuucaacggcggcaagaucagcgugcaguacaaccugagccacagcuacgccggcgacgccgccaaccacugcggcaccguggccaacggcgugcugcagaccuucaugagaauggccuggggcggcagcuacaucgcccuggacagcggcagaggcaacugggacugcaucaugaccagcuaccaguaccugaucauccagaacaccaccugggaggaccacugccaguucagcagacccagccccaucggcuaccugggccugcugagccagagaaccagagacaucuacaucagcagaagaagaagaggcaccuucaccuggacccugagcgacagcgagggcaaggacacccccggcggcuacugccugaccagauggaugcugaucgaggccgagcugaagugcuucggcaacaccgccguggccaagugcaacgagaagcacgacgaggaguucugcgacaugcugagacuguucgacuucaacaagcaggccauccagagacugaaggcccccgcccagaugagcauccagcugaucaacaaggccgugaacgcccugaucaacgaccagcugaucaugaagaaccaccugagagacaucaugggcauccccuacugcaacuacagcaaguacugcuaccugaaccacaccaccaccggcagaaccagccugcccaagugcugccuggugagcaacggcagcuaccugaacgagacccacuucagcgacgacaucgagcagcaggccgacaacaugaucaccgagaugcugcagaaggaguacauggagagacagggcaagaccccccugggccugguggaccuguucguguucagcaccagcuucuaccugaucagcaucuuccugcaccuggugaagauccccacccacagacacaucgugggcaagagcugccccaagccccacagacugaaccacaugggcaucugcagcugcggccuguacaagcagcccggcgugcccgugaaguggaagagaugaggacuaguuauaagacugacuagcccgaugggccucccaacgggcccuccuccccuccuugcaccgagauuaaucaaaggcucuuuucagagccaccaaaaaaaaaaaaaaaaaaaaaaaaaaaaaaaaaaaaaaaaaaaaaaaaaaaaaaaaaaaaaaaaagaauu

SEQ ID NO: 26022 - RNA, 1655 nt, Artificial Sequence
  mRNA product Design i-3 (hSL-A64-N5) comprising derived and/or modified sequence from LASV(LP;Clade I)__AAF86701__GPCmut3 (opt4)
aggagaaagcuuaccaugggccagaucaucaccuucuuccaggaggugccccacgugaucgaggaggugaugaacaucgugcugaucgcccugagccugcuggccauccugaagggccuguacaacaucgccaccugcggcaucaucggccugguggccuuccuguuccugugcggcaagagcugcagccugacccugaagggcggcuacgagcugcagacccuggagcugaacauggagacccugaacaugaccaugccccugagcugcaccaagaacagcagccaccacuacaucagagugggcaacgagaccggccuggagcugacccugaccaacaccagcaucaucaaccacaaguucugcaaccugagcgacgcccacaagaagaaccuguacgaccacgcccugaugagcaucaucagcaccuuccaccugagcauccccaacuucaaccaguacgaggccaugagcugcgacuucaacggcggcaagaucagcgugcaguacaaccugagccacagcuacgccggcgacgccgccgagcacugcggcaccguggccaacggcgugcugcagaccuucaugagaauggccuggggcggcagauacaucgcccuggacagcggcaagggcaacugggacugcaucaugaccagcuaccaguaccugaucauccagaacaccaccugggaggaccacugccaguucagcagacccagccccaucggcuaccugggccugcugagccagagaaccagagacaucuacaucagcagaagaagaagaggcaccuucaccuggacccugagcgacagcgagggcaacgagacccccggcggcuacugccugaccagauggaugcugaucgaggccgagcugaagugcuucggcaacaccgccguggccaagugcaacgagaagcacgacgaggaguucugcgacaugcugagacuguucgacuucaacaagcaggccaucagaagacugaaggcccccgcccagaugagcauccagcugaucaacaaggccgugaacgcccugaucaacgaccagcugaucaugaagaaccaccugagagacaucaugggcauccccuacugcaacuacagcaaguacugcuaccugaaccacaccagcagcggcagaaccagccugcccaagugcugccugaucagcaacggcagcuaccugaacgagacccaguucagcgacgacaucgagcagcaggccgacaacaugaucaccgagaugcugcagaaggaguacaucgagagacagggcaagaccccccugggccugguggacaucuucaucuucagcaccagcuucuaccugaucagcaucuuccugcaccugaucaagauccccacccacagacacaucgugggcaagcccugccccaagccccacagacugaaccacaugggcgugugcagcugcggccuguacaagcaccccggcgugcccaccaaguggaagagaugaggacuaguuauaagacugacuagcccgaugggccucccaacgggcccuccuccccuccuugcaccgagauuaaucaaaggcucuuuucagagccaccaaaaaaaaaaaaaaaaaaaaaaaaaaaaaaaaaaaaaaaaaaaaaaaaaaaaaaaaaaaaaaaaagaauu

SEQ ID NO: 26023 - RNA, 1655 nt, Artificial Sequence
  mRNA product Design i-3 (hSL-A64-N5) comprising derived and/or modified sequence from LASV(803213;Clade II)__AAF86703__GPCmut3 (opt4)
aggagaaagcuuaccaugggccagaucaucaccuucuuccaggaggugccccacgugaucgaggaggugaugaacaucgugcugaucgcccugagccugcuggccauccugaagggcaucuacaacguggccaccugcggccuguucggccugaucagcuuccugcugcugugcggcagaagcugcagcgugaccuacaagggcguguacgagcugcagacccuggagcugaacauggccaaccugaacaugaccaugccccugagcugcaccaagaacaacagccaccacuacaucauggugggcaacgagaccggccuggagcugacccugaccaacaccagcaucaucaaccacaaguucugcaaccugagcgacgcccacaagaagaaccuguacgaccacgcccugaugagcaucaucagcaccuuccaccugagcauccccaacuucaaccaguacgaggccaugagcugcgacuucaacggcggcaagaucagcgugcaguacaaccugagccacagcuucgccguggacgccgccaaccacugcggcaccaucgccaacggcgugcugcagaccuucaugagaauggccuggggcggcagcuacaucgcccuggacagcggcaagggcaacugggacugcaucaugaccagcuaccaguaccugaucauccagaacaccaccugggaggaccacugccaguucagcagacccagccccaucggcuaccugggccugcugagccagagaaccagagacaucuacaucagcagaagaagaagaggcaccuucaccuggacccugagcgacagcgagggcaacgaggcccccggcggcuacugccugaccagauggaugcugaucgaggccgagcugaagugcuucggcaacaccgccguggccaagugcaacgagaagcacgacgaggaguucugcgacaugcugagacuguucgacuucaacaagcaggccaucaagagacugaagacccccgcccagaugagcauccagcugaucaacaaggccgugaacgcccugaucaacgaccagcugaucaugaagaaccaccugagagacaucaugggcauccccuacugcaacuacagcagauacugcuaccugaaccacaccgugaccggcaagaccagccugcccagaugcugccuggugagcaacggcagcuaccugaacgagacccacuucagcgacgacaucgagcagcaggccgacaacaugaucaccgagaugcugcagaaggaguacauggacagacagggcaagaccccccugggccugguggaccuguucguguucagcaccagcuucuaccugaucagcaucuuccugcaccuggugaagauccccacccacagacacaucgugggcaagcccugccccaagccccacagacugaaccacaugggcaucugcagcugcggccuguacaagcaccccggcgugcccgugaaguggaagagaugaggacuaguuauaagacugacuagcccgaugggccucccaacgggcccuccuccccuccuugcaccgagauuaaucaaaggcucuuuucagagccaccaaaaaaaaaaaaaaaaaaaaaaaaaaaaaaaaaaaaaaaaaaaaaaaaaaaaaaaaaaaaaaaaagaauu

SEQ ID NO: 26024 - RNA, 1655 nt, Artificial Sequence
  mRNA product Design i-3 (hSL-A64-N5) comprising derived and/or modified sequence from LASV(GA391;Clade III)__CAA36645__GPCmut3 (opt4)
aggagaaagcuuaccaugggccagaucgugaccuucuuccaggaggugccccacgugaucgaggaggugaugaacaucgugcugaucgcccugagcauccuggccauccugaagggccuguacaacguggccaccugcggccugaucggccuggugaccuuccugcugcugagcggcagaagcugcagccugaucuacaagggcaccuacgagcugcagacccuggagcugaacauggagacccugaacaugaccaugccccugagcugcaccaagaacaacagccaccacuacaucagagugggcaacgagaccggccuggagcugacccugaccaacaccagcauccugaaccacaaguucugcaaccugagcgacgcccacaagagaaaccuguacgaccacagccugaugagcaucaucagcaccuuccaccugagcauccccaacuucaaccaguacgaggccaugagcugcgacuucaacggcggcaagaucaccgugcaguacaaccugagccacagcuucgccguggacgccgccggccacugcggcacccuggccaacggcgugcugcagaccuucaugagaauggccuggggcggcagcuacaucgcccuggacagcggcagaggcaacugggacugcaucaugaccagcuaccaguaccugaucauccagaacaccaccugggacgaccacugccaguucagcagacccagccccaucggcuaccugggccugcugagccagagaaccagagacaucuacaucagcagaagaagaagaggcaccuucaccuggacccugagcgacagcgagggcaacgagacccccggcggcuacugccugaccagauggaugcugaucgaggccgagcugaagugcuucggcaacaccgccguggccaagugcaacgagaagcacgacgaggaguucugcgacaugcugagacuguucgacuucaacaagcaggccaucagaagacugaagacccccgcccagaugagcauccagcugaucaacaaggccgugaacgcccugaucaacgaccagcugaucaugaagaaccaccugagagacaucaugggcauccccuacugcaacuacagcagauacugcuaccugaaccacaccagcaccggcaagaccagccugcccagaugcugccugaucagcaacggcagcuaccugaacgagaccaaguucagcgacgacaucgagcagcaggccgacaacaugaucaccgagaugcugcagaaggaguacaucgacagacagggcaagaccccccugggccugguggaccuguucguguucagcaccagcuucuaccugaucagcaucuuccugcaccuggugaagauccccacccacagacacaucgugggcaagcccugccccaagccccacagacugaaccacaugggcaucugcagcugcggccuguacaagcagcccggcgugcccgugagauggaagagaugaggacuaguuauaagacugacuagcccgaugggccucccaacgggcccuccuccccuccuugcaccgagauuaaucaaaggcucuuuucagagccaccaaaaaaaaaaaaaaaaaaaaaaaaaaaaaaaaaaaaaaaaaaaaaaaaaaaaaaaaaaaaaaaaagaauu

SEQ ID NO: 26025 - RNA, 1658 nt, Artificial Sequence
  mRNA product Design i-3 (hSL-A64-N5) comprising derived and/or modified sequence from LASV(AV;Clade V)__CCA30314__GPCmut3 (opt4)
aggagaaagcuuaccaugggccagaucgugaccuucuuccaggaggugccccacgugaucgaggaggugaugaacaucgugcugaucgcccugagcauccuggccgugcugaagggccuguacaacaucgccaccugcggccugaucggccugaucaccuuccugcugcugugcggcagaagcugcagcagcaaccuguacaagggcguguacgagcugcagagccuggaccugaacauggagacccugaacaugaccaugccccugagcugcaccaagaacaacagccaccacuacaucagagugggcaacgacaccggccuggagcugacccugaccaacaccagcauccugaaccacaaguucugcaaccugagcgacgcccacaagaaggaccuguacgaccacgcccugaugagcaucaucagcaccuuccaccugagcauccccaacuucaaccaguacgaggccaugagcugcgacuucaacggcggcaagaucagcgugcaguacaaccugagccacagcuacgccaucgacgccgccaaccacugcggcaccguggccaacggcauccugcagaccuucaugagaauggccuggggcggcagcuacaucgcccuggacagcggcagaggcaacugggacugcaucaugaccagcuaccaguaccugaucauccagaacaccaccugggagaaccacugccaguucagcagacccagccccaucggcuaccugggccugcugagccagagaaccagagacaucuacaucagcagaagaagaagaggcaccuucaccuggacccugagcgacagcgagggcaacgccacccccggcggcuacugccugaccagauggaugcugaucgaggccgagcugaagugcuucggcaacaccgccguggccaagugcaacgagaagcacgacgaggaguucugcgacaugcugagacuguucgacuucaacaagcaggccaucagcagacugaagagccccgcccagaugagcauccagcugaucaacaaggccgugaacgcccugaucaacgaccagcugaucaugaagaaccaccugagagacaucaugggcauccccuacugcaacuacagcaaguacugcuaccugaaccacaccaucaccggcaagaccagccugcccaagugcugccuggugagcaacggcagcuaccugaacgagacccacuucagcgacgacaucgagcagcaggccgacaacaugaucaccgagaugcugcagaaggaguacauggagagacagggcaagaccccccugggccugguggaccuguucguguucagcaccagcuucuaccugaucagcaucuuccugagacuggugaagauccccacccacagacacaucgugggcaagcccugccccaagccccacagacugaaccacaugggcaucugcagcugcggccuguacaagcagcccggcgugcccgugagauggaagagaugaggacuaguuauaagacugacuagcccgaugggccucccaacgggcccuccuccccuccuugcaccgagauuaaucaaaggcucuuuucagagccaccaaaaaaaaaaaaaaaaaaaaaaaaaaaaaaaaaaaaaaaaaaaaaaaaaaaaaaaaaaaaaaaaagaauu

SEQ ID NO: 26026 - RNA, 1655 nt, Artificial Sequence
  mRNA product Design i-3 (hSL-A64-N5) comprising derived and/or modified sequence from LASV(Togo/2016/7082;Clade VI)__AMR44577__GPCmut3 (opt4)
aggagaaagcuuaccaugggccagaucaucaccuucuuccaggaggugccccacgugaucgaggaggugaugaacaucgugcugaucgcccugagccugcuggccauccugaagggcguguacaacguggccaccugcggcaucaucggccuggugaccuuccuguuccugugcggcagaagcugcagccugaucuacaagggcagcuacgagcugcagacccuggagcugaacauggagacccugaacaugaccaugccccugagcugcaccaagaacagcagccaccacuacaucagagugggcaacgagaccggccuggagcugacccugaccaacaccagcaucaucaaccacaaguucugcaaccugagcgacgcccacaagagaaaccuguacgaccacgcccugaugagcauccugagcaccuuccaccugagcauccccaacuucaaccaguacgaggccaugagcugcgacuucaacggcggcaagaucagcgugcaguacaaccugagccacgccuacgccguggacgccgccgagcacugcggcaccguggccaacggcgugcugcagaccuucaugagaauggccuggggcggcagcuacaucgcccuggacagcggcagaggcaacugggacugcaucaugaccagcuaccaguaccugaucauccagaacaccaccugggaggaccacugccaguucagcagacccagccccaucggcuaccugggccugcugagccagagaaccagagacaucuacaucagcagaagaagaagaggcaccuucaccuggacccugagcgacagcgagggcaacgagacccccggcggcuacugccugaccagauggaugcugaucgaggccgagcugaagugcuucggcaacaccgccguggccaagugcaacgagaagcacgacgaggaguucugcgacaugcugagacuguucgacuucaacaagcaggccauccagagacugaagagccccgcccagaugagcauccagcugaucaacaaggccgugaacgcccugaucaacgaccagcugaucaugaagaaccaccugagagacaugaugggcauccccuacugcaacuacagcaaguacugcuaccugaaccacaccagcagcggcagaaccagccugcccaagugcugccuggugagcaacggcagcuaccugaacgagacccacuucagcgacgacaucgagcagcaggccgacaacaugaucaccgagaugcugcagaaggaguacaucgacagacagggcaagaccccccugggccugguggaccuguucguguucagcaccagcuucuaccugaucagcaucuuccugcaccugaucaagauccccacccacagacacaucgugggcaagcccugccccaagccccacagacugaaccacaugggcaucugcagcugcggccuguacaagcagcccggcgugcccaccagauggaagagaugaggacuaguuauaagacugacuagcccgaugggccucccaacgggcccuccuccccuccuugcaccgagauuaaucaaaggcucuuuucagagccaccaaaaaaaaaaaaaaaaaaaaaaaaaaaaaaaaaaaaaaaaaaaaaaaaaaaaaaaaaaaaaaaaagaauu

SEQ ID NO: 26027 - RNA, 1655 nt, Artificial Sequence
  mRNA product Design i-3 (hSL-A64-N5) comprising derived and/or modified sequence from LASV(KAK-428;Clade n.d. (VII))__ANH09740__GPCmut3 (opt4)
aggagaaagcuuaccaugggccagaucgugaccuucuuccaggaggugccccacgugaucgaggaggugaugaacaucgugcugaucgcccugagccugcuggccauccugaagggccuguacaacuucgccaccugcggcgugaucggccugaucaccuuccugcugcugugcggcagaagcugcagcgccaccuacaagggccaguacgagcugcagacccuggagcugaacauggagagccugaacaugaccaugccccugagcugcaccaagaacaacagccaccacuacaucagagccggcaacaacaccggccuggagcugacccugaccaacaccagcaucaucagccacaaguucugcaaccugagcgacgcccacaagaagaaccuguacgaccacacccugaugagcaucaucaccaccuuccaccugagcauccccaacuucaaccaguacgaggccaugagcugcgacuucaacggcggcaagaucagcauccaguacaaccugagccacagcuacgccggcgacgccgcccagcacugcggcaccguggccaacggcgugcugcagaccuucaugagaauggccuggggcggcagcuaccuggcccuggacagcggcagaagaggcugggacugcaucaucagcagcuaccaguaccugaucauccagaacaccaccugggacgaccacugccaguucagcagacccagccccaucggcuaccugggcuucgugagccagaagaccagagacaucuacaucagcagaagaagaagaggcaccuucaccuggacccugagcgacagcgagggccacgacaugcccggcggcuacugccugaccagauggaugcugaucgaggccgaccugaagugcuucggcaacaccgccguggccaagugcaacgagaagcacgacgaggaguucugcgacauguggagacuguucgacuucaacaagcaggccauccagagacugaaggcccccgcccagaugaacauccagcugaucaacaaggccgugaacgcccugaucaacgaccagcugaugaugaagaaccaccugagagacaucaugggcauccccuacugcaacuacagcaaguucugcuaccugaacaacaccaccaccggcagaaccagccugcccagaugcugccugaucagcaacggcagcuaccugaacgagacccacuucagcgacgacaucgagcagcaggccgacaacaugaucaccgagaugcugcagaaggaguacauggacagacagggcaagaccccccugggccugguggaccuguucguguucagcaccagcuucuaccugaucaccaucuuccugcaccuggugaagauccccacccacagacacaucgugggcaagcccugccccaagccccacagacugaaccacaugggcaucugcagcugcggccuguacaagcagcccggcgugcccgugagauggaagagaugaggacuaguuauaagacugacuagcccgaugggccucccaacgggcccuccuccccuccuugcaccgagauuaaucaaaggcucuuuucagagccaccaaaaaaaaaaaaaaaaaaaaaaaaaaaaaaaaaaaaaaaaaaaaaaaaaaaaaaaaaaaaaaaaagaauu

SEQ ID NO: 26028 - RNA, 1655 nt, Artificial Sequence; identical to SEQ ID NO: 26022
  mRNA product Design i-3 (hSL-A64-N5) comprising derived and/or modified sequence from LASV(Pinneo-NIG-1969;Clade I)__AIT17836__GPCmut3 (opt4)

SEQ ID NO: 26029 - RNA, 1655 nt, Artificial Sequence
  mRNA product Design i-3 (hSL-A64-N5) comprising derived and/or modified sequence from LASV(ISTH0009-NIG-2011;Clade II)__AIT17404__GPCmut3 (opt4)
aggagaaagcuuaccaugggccagaucaucaccuucuuccaggaggugccccacgugaucgaggaggugaugaacaucgugcugaucgcccugagccugcuggccauccugaagggcaucuacaacguggccaccugcggccuguucggccuggugagcuuccugcugcugugcggcagaagcugcagcaccaccuacaagggcguguacgagcugcagacccuggagcuggacauggccagccugaacaugaccaugccccugagcugcaccaagaacaacagccaccacuacaucauggugggcaacgagaccggccuggagcugacccugaccaacaccagcaucaucaaccacaaguucugcaaccugagcgacgcccacaagaagaaccuguacgaccacgcccugaugagcaucaucagcaccuuccaccugagcauccccaacuucaaccaguacgaggccaugagcugcgacuucaacggcggcaagaucagcgugcaguacaaccugagccacgccuacgccguggacgccgccaaccacugcggcaccaucgccaacggcgugcugcagaccuucaugagaauggccuggggcggcagcuacaucgcccuggacagcggcaagggcagcugggacugcaucaugaccagcuaccaguaccugaucauccagaacaccaccugggaggaccacugccaguucagcagacccagccccaucggcuaccugggccugcugagccagagaaccagagacaucuacaucagcagaagaagaagaggcaccuucaccuggacccugagcgacagcgagggcaacgagacccccggcggcuacugccugaccagauggaugcugaucgaggccgagcugaagugcuucggcaacaccgccguggccaagugcaacgagaagcacgacgaggaguucugcgacaugcugagacuguucgacuucaacaagcaggccaucagaagacugaagacccccgcccagaugagcauccagcugaucaacaaggccgugaacgcccugaucaacgaccagcugaucaugaagaaccaccugagagacaucaugggcauccccuacugcaacuacagcaaguacugcuaccugaaccacaccgugaccggcaagaccagccugcccagaugcugccuggugagcaacggcagcuaccugaacgagacccacuucagcgacgacaucgagcagcaggccgacaacaugaucaccgagcugcugcagaaggaguacauggacagacagggcaagaccccccugggccugguggaccuguucguguucagcaccagcuucuaccugaucagcaucuuccugcaccugaucaagauccccacccacagacacaucaccggcaagcccugccccaagccccacagacugaaccacaugggcaucugcagcugcggccuguacaagcaccccggcgugcccgugaaguggaagagaugaggacuaguuauaagacugacuagcccgaugggccucccaacgggcccuccuccccuccuugcaccgagauuaaucaaaggcucuuuucagagccaccaaaaaaaaaaaaaaaaaaaaaaaaaaaaaaaaaaaaaaaaaaaaaaaaaaaaaaaaaaaaaaaaagaauu

SEQ ID NO: 26030 - RNA, 1655 nt, Artificial Sequence
  mRNA product Design i-3 (hSL-A64-N5) comprising derived and/or modified sequence from LASV(ISTH2010-NIG-2012;Clade II)__AIT17482__GPCmut3 (opt4)
aggagaaagcuuaccaugggccagaucaucaccuucuuccaggaggugccccacgugaucgaggaggugaugaacaucgugcugaucgcccugagccugcuggccauccugaagggcaucuacaacguggccaccugcggccuguucggccuggugagcuuccugcugcugugcggcagaagcugcagcaccaccuacaagggcguguacgagcugcagacccuggagcuggacauggccagccugaacaugaccaugccccugagcugcaccaagaacaacagccaccacuacaucauggugggcaacgagaccggccuggagcugacccugaccaacaccagcaucaucaaccacaaguucugcaaccugagcgacgcccacaagaagaaccuguacgaccacgcccugaugagcaucaucagcaccuuccaccugagcauccccaacuucaaccaguacgaggccaugagcugcgacuucaacggcggcaagaucagcgugcaguacaaccugagccacgccuacgccguggacgccgccaaccacugcggcaccaucgccaacggcgugcugcagaccuucaugagaauggccuggggcggcagcuacaucgcccuggacagcggcaagggcagcugggacugcaucaugaccagcuaccaguaccugaucauccagaacaucaccugggaggaccacugccaguucagcagacccagccccaucggcuaccugggccugcugagccagagaaccagagacaucuacaucagcagaagaagaagaggcaccuucaccuggacccugagcgacagcgagggcaacgagacccccggcggcuacugccugaccagauggaugcugaucgaggccgagcugaagugcuucggcaacaccgccguggccaagugcaacgagaagcacgacgaggaguucugcgacaugcugagacuguucgacuucaacaagcaggccaucagaagacugaagacccccgcccagaugagcauccagcugaucaacaaggccgugaacgcccugaucaacgaccagcugaucaugaagaaccaccugagagacaucaugggcauccccuacugcaacuacagcaaguacugcuaccugaaccacaccgugaccggcaagaccagccugcccagaugcugccuggugagcaacggcagcuaccugaacgagacccacuucagcgacgacaucgagcagcaggccgacaacaugaucaccgagcugcugcagaaggaguacaucgacagacagggcaagaccccccugggccugguggaccuguucguguucagcaccagcuucuaccugaucagcaucuuccugcaccuggugaagauccccacccacagacacguggugggcaagcccugccccaagccccacagacugaaccacaugggcaucugcagcugcggccuguacaagcaccccggcgugcccgugaaguggaagagaugaggacuaguuauaagacugacuagcccgaugggccucccaacgggcccuccuccccuccuugcaccgagauuaaucaaaggcucuuuucagagccaccaaaaaaaaaaaaaaaaaaaaaaaaaaaaaaaaaaaaaaaaaaaaaaaaaaaaaaaaaaaaaaaaagaauu

SEQ ID NO: 26031 - RNA, 1655 nt, Artificial Sequence
  mRNA product Design i-3 (hSL-A64-N5) comprising derived and/or modified sequence from LASV(Lassa virus/H.sapiens-wt/NGA/2015/ISTH_0543;Clade II)__AVO03639__GPCmut3 (opt4)
aggagaaagcuuaccaugggccagaucaucaccuucuuccaggaggugccccacgugaucgaggaggugaugaacaucgugcugaucgcccugagccugcuggccauccugaagggcaucuacaacguggccaccugcggccuguucggccuggugagcuuccugcugcugugcggcagaagcugcagcaccaccuacaagggcguguacgagcugcagacccuggagcuggacauggccaaccugaacaugaccaugccccugagcugcaccaagaacaacagccaccacuacaucauggugggcaacgagaccggccuggagcugacccugaccaacaccagcaucaucaaccacaaguucugcaaccugagcgacgcccacaagaagaaccuguacgaccacgcccugaugagcaucaucagcaccuuccaccugagcauccccaacuucaaccaguacgaggccaugagcugcgacuucaacggcggcaagaucagcgugcaguacaaccugagccacaccuacgccguggacgccgccaaccacugcggcaccaucgccaacggcgugcugcagaccuucaugagaauggccuggggcggcagcuacaucgcccuggacagcggcaagggcagcugggacugcaucaugaccagcuaccaguaccuggugauccagaacaccaccugggaggaccacugccaguucagcagacccagccccaucggcuaccugggccugcugagccagagaaccagagacaucuacaucagcagaagaagaagaggcaccuucaccuggacccugagcgacagcgagggcaacgagacccccggcggcuacugccugaccagauggaugcugaucgaggccgagcugaagugcuucggcaacaccgccguggccaagugcaacgagaagcacgacgaggaguucugcgacaugcugagacuguucgacuucaacaagcaggccaucagaagacugaagacccccgcccagaugagcauccagcugaucaacaaggccgugaacgcccugaucaacgaccagcugaucaugaagaaccaccugagagacaucaugggcauccccuacugcaacuacagcaaguacugcuaccugaaccacaccgugaccggcaagaccagccugcccagaugcugccuggugagcaacggcagcuaccugaacgagacccacuucagcgacgacaucgagcagcaggccgacaacaugaucaccgagcugcugcagaaggaguacaucgacagacagggcaagaccccccugggccugguggaccuguucguguucagcaccagcuucuaccugaucagcaucuuccugcaccuggugaagauccccacccacagacacaucaccggcaagcccugccccaagccccacagacugaaccacaugggcaucugcagcugcggccuguacaagcaccccggcgugcccgugaaguggaagagaugaggacuaguuauaagacugacuagcccgaugggccucccaacgggcccuccuccccuccuugcaccgagauuaaucaaaggcucuuuucagagccaccaaaaaaaaaaaaaaaaaaaaaaaaaaaaaaaaaaaaaaaaaaaaaaaaaaaaaaaaaaaaaaaaagaauu

SEQ ID NO: 26032 - RNA, 1655 nt, Artificial Sequence
  mRNA product Design i-3 (hSL-A64-N5) comprising derived and/or modified sequence from LASV(Lassa virus/H.sapiens-wt/NGA/2016/ISTH_0009;Clade II)__AVO03571__GPCmut3 (opt4)
aggagaaagcuuaccaugggccagaucaucaccuucuuccaggaggugccccacgugaucgaggaggugaugaacaucgugcugaucgcccugagccugcuggccauccugaagggcaucuacaacguggccaccugcggccugcugggccuggugagcuuccugcugcugugcggcagaagcugcagcaccaccuacaagggcguguacgagcugcagacccuggagcuggacauggccagccugaacaugaccaugccccugagcugcaccaagaacaacagccaccacuacaucauggugggcaacgagaccggccuggagcugacccugaccaacaccagcaucaucaaccacaaguucugcaaccugagcgacgcccacaagaagaaccuguacgaccacgcccugaugagcaucaucagcaccuuccaccugagcauccccaacuucaaccaguacgaggccaugagcugcgacuucaacggcggcagaaucagcgugcaguacaaccugagccacagcuacgccguggacgccgccaaccacugcggcaccaucgccaacggcgugcugcagaccuucaugagaauggccuggggcggcagcuacaucgcccuggacagcggcaagggcagcugggacugcaucaugaccagcuaccaguaccugaucauccagaacaccaccugggaggaccacugccaguucagcagacccagccccaucggcuaccugggccugcugagccagagaaccagagacaucuacaucagcagaagaagaagaggcaccuucaccuggacccugagcgacagcgagggcaacgagacccccggcggcuacugccugaccagauggaugcugaucgaggccgagcugaagugcuucggcaacaccgccguggccaagugcaacgagaagcacgacgaggaguucugcgacaugcugagacuguucgacuucaacaagcaggccaucagaagacugaagacccccgcccagaugagcauccagcugaucaacaaggccgugaacgcccugaucaacgaccagcugaucaugaagaaccaccugagagacaucaugggcauccccuacugcaacuacagcaaguacugcuaccugaaccacaccgugaccggcaagaccagccugcccagaugcugccuggugagcaacggcagcuaccugaacgagacccacuucagcgacgacaucgagcagcaggccgacaacaugaucaccgagcugcugcagaaggaguacaucgacagacagggcaagaccccccugggccugguggaccuguucguguucagcaccagcuucuaccugaucagcaucuuccugcaccuggugaagauccccacccacagacacaucaccggcaagcccugccccaagccccacagacugaaccacaugggcaucugcagcugcggccuguacaaccaccccggcgugcccgugaaguggaagagaugaggacuaguuauaagacugacuagcccgaugggccucccaacgggcccuccuccccuccuugcaccgagauuaaucaaaggcucuuuucagagccaccaaaaaaaaaaaaaaaaaaaaaaaaaaaaaaaaaaaaaaaaaaaaaaaaaaaaaaaaaaaaaaaaagaauu

SEQ ID NO: 26033 - RNA, 1655 nt, Artificial Sequence
  mRNA product Design i-3 (hSL-A64-N5) comprising derived and/or modified sequence from LASV(Lassa virus/H.sapiens-wt/NGA/2016/ISTH_0017;Clade II)__AVO03567__GPCmut3 (opt4)
aggagaaagcuuaccaugggccagaucaucaccuucuuccaggaggugccccacgugaucgaggaggugaugaacaucgugcugaucgcccugagccugcuggccauccugaagggcaucuacaacguggccaccugcggccuguucggccuggugagcuuccugcugcugugcggcagaagcugcagcaccaccuacaagggcguguacgagcugcagacccuggagcuggacauggccagccugaacaugaccaugccccugagcugcaccaagaacaacagccaccacuacaucauggugggcaacgagaccggccuggagcugacccugaccaacaccagcaucaucaaccacaaguucugcaaccugagcgacgcccacaagaagaaccuguacgaccacgcccugaugagcaucaucagcaccuuccaccugagcauccccaacuucaaccaguacgaggccaugagcugcgacuucaacggcggcaagaucagcgugcaguacaaccugagccacaccuacgccaucgacgccgccaaccacugcggcaccaucgccaacggcgugcugcagaccuucaugagaauggccuggggcggcagcuacaucgcccuggacagcggcaagggcagcugggacugcaucaugaccagcuaccaguaccugaucauccagaacaccaccugggaggaccacugccaguucagcagacccagccccaucggcuaccugggccugcugagccagagaaccagagacaucuacaucagcagaagaagaagaggcaccuucaccuggacccugagcgacagcgagggcaacgagacccccggcggcuacugccugaccagauggaugcugaucgaggccgagcugaagugcuucggcaacaccgccguggccaagugcaacgagaagcacgacgaggaguucugcgacaugcugagacuguucgacuucaacaagcaggccaucagaagacugaagacccccgcccagaugagcauccagcugaucaacaaggccgugaacgcccugaucaacgaccagcugaucaugaagaaccaccugagagacaucaugggcauccccuacugcaacuacagcaaguacugcuaccugaaccacaccgugaccggcaagaccagccugcccagaugcugccuggugagcaacggcagcuaccugaacgagacccacuucagcgacgacaucgagcagcaggccgacaacaugaucaccgagcugcugcagaaggaguacauggacagacagggcaagaccccccugggccugguggaccuguucguguucagcaccagcuucuaccugaucagcaucuuccugcaccuggugagaauccccacccacagacacgugaucggcaagcccugccccaagccccacagacugaaccacaugggcaucugcagcugcggccuguacaagcaccccggcgugcccgugaaguggaagagaugaggacuaguuauaagacugacuagcccgaugggccucccaacgggcccuccuccccuccuugcaccgagauuaaucaaaggcucuuuucagagccaccaaaaaaaaaaaaaaaaaaaaaaaaaaaaaaaaaaaaaaaaaaaaaaaaaaaaaaaaaaaaaaaaagaauu

SEQ ID NO: 26034 - RNA, 1655 nt, Artificial Sequence
  mRNA product Design i-3 (hSL-A64-N5) comprising derived and/or modified sequence from LASV(Lassa virus/H.sapiens-wt/NGA/2018/ISTH_0959;Clade II)__AVV65099__GPCmut3 (opt4)
aggagaaagcuuaccaugggccagaucaucaccuucuuccaggaggugccccacgugaucgaggaggugaugaacaucgugcugaucgcccugagccugcuggccauccugaagggcaucuacaacguggugaccugcggccuguucggccuggugagcuuccugcugcugugcggcagaagcugcagcaccaccuacaagggcguguacgagcugcagacccuggagcuggacauggccagccugaacaugaccaugccccugagcugcaccaagaacaacagccaccacuacaucauggugggcaacgagaccggccuggagcugacccugaccaacaccagcaucaucaaccacaaguucugcaaccugagcgacgcccacaagaagaaccuguacgaccacgcccugaugagcaucaucagcaccuuccaccugagcauccccaacuucaaccaguacgaggccaugagcugcgacuucaacggcggcaagaucagcgugcaguacaaccugagccacgccuacgccaucgacgccgccaaccacugcggcaccaucgccaacggcgugcugcagaccuucaugagaauggccuggggcggcagcuacaucgcccuggacagcggcaagggcagcugggacugcaucaugaccagcuaccaguaccugaucauccagaacaccaccugggaggaccacugccaguucagcagacccagccccaucggcuaccugggccugcugagccagagaaccagagacaucuacaucagcagaagaagaagaggcaccuucaccuggacccugagcgacagcgagggcaacgagacccccggcggcuacugccugaccagauggaugcugaucgaggccgagcugaagugcuucggcaacaccgccguggccaagugcaacgagaagcacgacgaggaguucugcgacaugcugagacuguucgacuucaacaagcaggccaucagaagacugaagacccccgcccagaugagcauccagcugaucaacaaggccgugaacgcccugaucaacgaccagcugaucaugaagaaccaccugagagacaucaugggcauccccuacugcaacuacagcaaguacugcuaccugaaccacaccgugaccggcaagaccagccugcccagaugcugccuggugagcaacggcagcuaccugaacgagacccacuucagcgacgacaucgagcagcaggccgacaacaugaucaccgagcugcugcagaaggaguacaucgacagacagggcaagaccccccugggccugguggaccuguucguguucagcaccagcuucuaccugaucagcaucuuccugcaccuggugaagauccccacccacagacacgugaucggcaagcccugccccaagccccacagacugaaccacaugggcaucugcagcugcggccuguacaagcaccccggcgugcccgugaaguggaagagaugaggacuaguuauaagacugacuagcccgaugggccucccaacgggcccuccuccccuccuugcaccgagauuaaucaaaggcucuuuucagagccaccaaaaaaaaaaaaaaaaaaaaaaaaaaaaaaaaaaaaaaaaaaaaaaaaaaaaaaaaaaaaaaaaagaauu

SEQ ID NO: 26035 - RNA, 1655 nt, Artificial Sequence
  mRNA product Design i-3 (hSL-A64-N5) comprising derived and/or modified sequence from LASV(LASV003-NIG-2008;Clade II)__AIT17580__GPCmut3 (opt4)
aggagaaagcuuaccaugggccagaucaucaccuucuuccaggaggugccccacgugaucgaggaggugaugaacaucgugcugaucgcccugagccugcuggccauccugaagggcaucuacaacguggccaccugcggccuguucggccuggugagcuuccugcugcugugcggcagaagcugcagcaccaccuacaagggcguguacgagcugcagacccuggagcuggacauggccagccugaacaugaccaugccccugagcugcaccaagaacaacagccaccacuacaucauggugggcaacgagaccggccuggagcugacccugaccaacaccagcaucaucaaccacaaguucugcaaccugagcgacgcccacaagaagaaccuguacgaccacgcccugaugagcaucaucagcaccuuccaccugagcauccccaacuucaaccaguacgaggccaugagcugcgacuucaacggcggcaagaucagcgugcaguacaaccugagccacaccuacgccguggacgccgccaaccacugcggcaccaucgccaacggcgugcugcagaccuucaugagaauggccuggggcggcagcuacaucgcccuggacagcggcaagggcagcugggacugcaucaugaccagcuaccaguaccugaucauccagaacaccaccugggaggaccacugccaguucagcagacccagccccaucggcuaccugggccugcugagccagagaaccagagacaucuacaucagcagaagaagaagaggcaccuucaccuggacccugagcgacagcgagagcaacgagacccccggcggcuacugccugaccagauggaugcugaucgaggccgagcugaagugcuucggcaacaccgccguggccaagugcaacgagaagcacgacgaggaguucugcgacaugcugagacuguucgacuucaacaagcaggccaucagaagacugaaggcccccgcccagaugagcauccagcugaucaacaaggccgugaacgcccugaucaacgaccagcugaucaugaagaaccaccugagagacaucaugggcauccccuacugcaacuacagcaaguacugcuaccugaaccacaccgugaccggcagaaccagccugcccagaugcugccuggugagcaacggcagcuaccugaacgagacccacuucagcgacgacaucgagcagcaggccgacaacaugaucaccgagcugcugcagaaggaguacauggacagacagggcaagaccccccugggccugguggaccuguucguguucagcaccagcuucuaccugaucagcaucuuccugcaccuggugaagauccccacccacagacacgugaucggcaagcccugccccaagccccacagacugaaccacaugggcaucugcagcugcggccuguacaagcaccccggcgugcccgugaaguggaagagaugaggacuaguuauaagacugacuagcccgaugggccucccaacgggcccuccuccccuccuugcaccgagauuaaucaaaggcucuuuucagagccaccaaaaaaaaaaaaaaaaaaaaaaaaaaaaaaaaaaaaaaaaaaaaaaaaaaaaaaaaaaaaaaaaagaauu

SEQ ID NO: 26036 - RNA, 1655 nt, Artificial Sequence
  mRNA product Design i-3 (hSL-A64-N5) comprising derived and/or modified sequence from LASV(LASV035-NIG-2009;Clade II)__AIT17588__GPCmut3 (opt4)
aggagaaagcuuaccaugggccagaucaucaccuucuuccaggaggugccccacgugaucgaggaggugaugaacaucgugcugaucgcccugagccugcuggccauccugaagggcaucuacaacguggccaccugcggccuguucggccuggugagcuuccugcugcugugcggcagaagcugcagcaccaccuacaagggcguguacgagcugcagacccuggagcuggacauggccagccugaacaugaccaugccccugagcugcaccaagaacaacagccaccacuacaucauggugggcaacgagaccggccuggagcugacccugaccaacaccagcaucaucaaccacaaguucugcaaccugagcgacgcccacaagaagaaccuguacgaccacgcccugaugagcaucaucagcaccuuccaccugagcauccccaacuucaaccaguacgaggccaugagcugcgacuucaacggcggcaagaucagcgugcaguacaaccugagccacgccuacgccguggacgccgccaaccacugcggcaccaucgccaacggcgugcugcagaccuucaugagaauggccuggggcggcagcuacaucgcccuggacagcggcaagggcagcugggacugcaucaugaccagcuaccaguaccugaucauccagaacaccaccugggaggaccacugccaguucagcagacccagccccaucggcuaccugggccugcugagccagagaaccagagacaucuacaucagcagaagaagaagaggcaccuucaccuggacccugagcgacagcgagggcaacgagacccccggcggcuacugccugaccagauggaugcugaucgaggccgagcugaagugcuucggcaacaccgccguggccaagugcaacgagaagcacgacgaggaguucugcgacaugcugagacuguucgacuucaacaagcaggccaucagaagacugaaggcccccgcccagaugagcauccagcugaucaacaaggccgugaacgcccugaucaacgaccagcugaucaugaagaaccaccugagagacaucaugggcauccccuacugcaacuacagcaaguacugcuaccugaaccacaccgugaccggcaagaccagccugcccagaugcugccuggugagcaacggcagcuaccugaacgagacccacuucagcgacgacaucgagcagcaggccgacaacaugaucaccgagcugcugcagaaggaguacaucgacagacagggcaagaccccccugggccugguggaccuguucguguucagcaccagcuucuaccugaucagcaucuuccugcaccuggugaagauccccacccacagacacgugaucggcaagcccugccccaagccccacagacugaaccacaugggcaucugcagcugcggccuguacaagcaccccggcgugcccgugaaguggaagagaugaggacuaguuauaagacugacuagcccgaugggccucccaacgggcccuccuccccuccuugcaccgagauuaaucaaaggcucuuuucagagccaccaaaaaaaaaaaaaaaaaaaaaaaaaaaaaaaaaaaaaaaaaaaaaaaaaaaaaaaaaaaaaaaaagaauu

SEQ ID NO: 26037 - RNA, 1655 nt, Artificial Sequence
  mRNA product Design i-3 (hSL-A64-N5) comprising derived and/or modified sequence from LASV(LASV1000-NIG-2009;Clade II)__AIT17782__GPCmut3 (opt4)
aggagaaagcuuaccaugggccagaucaucaccuucuuccaggaggugccccacgugaucgaggaggugaugaacaucgugcugaucgcccugagccugcuggccauccugaagggcaucuacaacguggccaccugcggccuguucggccuggugagcuuccugcugcugugcggcagaagcugcagcaccaccuacaagggcguguacgagcugcagacccuggagcuggacauggccagccugaacaugaccaugccccugagcugcaccaagaacaacagccaccacuacaucauggugggcaacgagaccggccuggagcugacccugaccaacaccagcaucaucaaccacaaguucugcaaccugagcgacgcccacaagaagaaccuguacgaccacgcccugaugagcaucaucagcaccuuccaccugagcauccccaacuucaaccaguacgaggccaugagcugcgacuucaacggcggcaagaucagcgugcaguacaaccugagccacaccuacgccguggacgccgccaaccacugcggcaccaucgccaacggcgugcugcagaccuucaugagaauggccuggggcggcagcuacaucgcccuggacagcggcaagggcagcugggacugcaucaugaccagcuaccaguaccugaucauccagaacaccaccugggaggaccacugccaguucagcagacccagccccaucggcuaccugggccugcugagccagagaaccagagacaucuacaucagcagaagaagaagaggcaccuucaccuggacccugagcgacagcgagggcaacgagacccccggcggcuacugccugaccagauggaugcugaucgaggccgagcugaagugcuucggcaacaccgccguggccaagugcaacgagaagcacgacgaggaguucugcgacaugcugagacuguucgacuucaacaagcaggccaucaagagacugaagacccccgcccagaugagcauccagcugaucaacaaggccgugaacgcccugaucaacgaccagcugaucaugaagaaccaccugagagacaucaugggcauccccuacugcaacuacagcaaguacugcuaccugaaccacaccgugaccggcaagaccagccugcccagaugcugccuggugagcaacggcagcuaccugaacgagacccacuucagcgacgacaucgagcagcaggccgacaacaugaucaccgagcugcugcagaaggaguacaucgacagacagggcaagaccccccugggccugguggaccuguucguguucagcaccagcuucuaccugaucagcaucuuccugcaccuggugaagauccccacccacagacacguggugggcaagcccugccccaagccccacagacugaaccacaugggcaucugcagcugcggccuguacaagcaccccggcgugcccgugaaguggaagagaugaggacuaguuauaagacugacuagcccgaugggccucccaacgggcccuccuccccuccuugcaccgagauuaaucaaaggcucuuuucagagccaccaaaaaaaaaaaaaaaaaaaaaaaaaaaaaaaaaaaaaaaaaaaaaaaaaaaaaaaaaaaaaaaaagaauu

SEQ ID NO: 26038 - RNA, 1655 nt, Artificial Sequence
  mRNA product Design i-3 (hSL-A64-N5) comprising derived and/or modified sequence from LASV(LASV221-NIG-2010;Clade II)__AIT17624__GPCmut3 (opt4)
aggagaaagcuuaccaugggccagaucaucaccuucuuccaggaggugccccacgugaucgaggaggugaugaacaucgugcugaucgcccugagccugcuggccauccugaagggcaucuacaacguggccaccugcggccuguucggccuggugagcuuccugcugcugugcggcagaagcugcagcaccaccuacaagggcguguacgagcugcagacccuggagcuggacauggccagccugaacaugaccaugccccugagcugcaccaagaacaacagccaccacuacaucauggugggcaacgagaccggccuggagcugacccugaccaacaccagcaucaucaaccacaaguucugcaaccugagcgacgcccacaagaagaaccuguacgaccacgcccugaugagcaucaucagcaccuuccaccugagcauccccaacuucaaccaguacgaggccaugagcugcgacuucaacggcggcaagaucagcgugcaguacaaccugagccacaccuacgccaucgacgccgccaaccacugcggcaccaucgccaacggcgugcugcagaccuucaugagaauggccuggggcggcagcuacaucgcccuggacagcggcaagggcagcugggacugcaucaugaccagcuaccaguaccugaucauccagaacaccaccugggaggaccacugccaguucagcagacccagccccaucggcuaccugggccugcugagccagagaaccagagacaucuacaucagcagaagaagaagaggcaccuucaccuggacccugagcgacagcgagggcaacgagacccccggcggcuacugccugaccagauggaugcugaucgaggccgagcugaagugcuucggcaacaccgccguggccaagugcaacgagaagcacgacgaggaguucugcgacaugcugagacuguucgacuucaacaagcaggccaucagaagacugaagacccccgcccagaugagcauccagcugaucaacaaggccgugaacgcccugaucaacgaccagcugaucaugaagaaccaccugagagacaucaugggcauccccuacugcaacuacagcaaguacugcuaccugaaccacaccgugaccggcaagaccagccugcccagaugcugccuggugagcaacggcagcuaccugaacgagacccacuucagcgacgacaucgagcagcaggccgacaacaugaucaccgagaugcugcagaaggaguacauggacagacagggcaagaccccccugggccugguggaccuguucguguucagcaccagcuucuaccugaucagcaucuuccugcaccuggugaagauccccacccacagacacgugaucggcaagcccugccccaagccccacagacugaaccacaugggcaucugcagcugcggccuguacaagcaccccggcgugcccgugaaguggaagagaugaggacuaguuauaagacugacuagcccgaugggccucccaacgggcccuccuccccuccuugcaccgagauuaaucaaaggcucuuuucagagccaccaaaaaaaaaaaaaaaaaaaaaaaaaaaaaaaaaaaaaaaaaaaaaaaaaaaaaaaaaaaaaaaaagaauu

SEQ ID NO: 26039 - RNA, 1655 nt, Artificial Sequence
  mRNA product Design i-3 (hSL-A64-N5) comprising derived and/or modified sequence from LASV(LASV237-NIG-2010;Clade II)__AIT17638__GPCmut3 (opt4)
aggagaaagcuuaccaugggccagaucaucaccuucuuccaggaggugccccacgugaucgaggaggugaugaacaucgugcugaucgcccugagccugcuggccauccugaagggcaucuacaacguggccaccugcggccuguucggccuggugagcuuccugcugcugugcggcagaagcugcagcaccaccuacaagggcguguacgagcugcagacccuggagcuggacauggccagccugaacaugaccaugccccugagcugcaccaagaacaacagccaccacuacaucauggugggcaacgagaccggccuggagcugacccugaccaacaccagcaucaucaaccacaaguucugcaaccugagcgacgcccacaagaaggaccuguacgaccacgcccugaugagcaucaucagcaccuuccaccugagcauccccaacuucaaccaguacgaggccaugagcugcgacuucaacggcggcaagaucagcgugcaguacaaccugagccacaccuacgccguggacgccgccaaccacugcggcaccaucgccaacggcgugcugcagaccuucaugagaauggccuggggcggcagcuacaucgcccuggacagcggcaagggcagcugggacugcaucaugaccagcuaccaguaccugaucauccagaacaccaccugggaggaccacugccaguucagcagacccagccccaucggcuaccugggccugcugagccagagaaccagagacaucuacaucagcagaagaagaagaggcaccuucaccuggacccugagcgacagcgagggcaacgagacccccggcggcuacugccugaccagauggaugcugaucgaggccgagcugaagugcuucggcaacaccgccguggccaagugcaacgagaagcacgacgaggaguucugcgacaugcugagacuguucgacuucaacaagcaggccaucagaagacugaagacccccgcccagaugagcauccagcugaucaacaaggccgugaacgcccugaucaacgaccagcugaucaugaagaaccaccugagagacaucaugggcauccccuacugcaacuacagcaaguacugcuaccugaaccacaccgugaccggcaagaccagccugcccagaugcugccuggugagcaacggcagcuaccugaacgagacccacuucagcgacgacaucgagcagcaggccgacaacaugaucaccgagcugcugcagaaggaguacauggacagacagggcaagaccccccugggccugguggaccuguucguguucagcaccagcuucuaccugaucagcaucuuccugcaccugaucaagauccccacccacagacacaucaccggcaagcccugccccaagccccacagacugaaccacaugggcaucugcagcugcggccuguacaagcaccccggcgugcccgugaaguggaagagaugaggacuaguuauaagacugacuagcccgaugggccucccaacgggcccuccuccccuccuugcaccgagauuaaucaaaggcucuuuucagagccaccaaaaaaaaaaaaaaaaaaaaaaaaaaaaaaaaaaaaaaaaaaaaaaaaaaaaaaaaaaaaaaaaagaauu

SEQ ID NO: 26040 - RNA, 1655 nt, Artificial Sequence
  mRNA product Design i-3 (hSL-A64-N5) comprising derived and/or modified sequence from LASV(LASV253-NIG-2011;Clade II)__AIT17670__GPCmut3 (opt4)
aggagaaagcuuaccaugggccagaucaucaccuucuuccaggaggugccccacgugaucgaggaggugaugaacaucgugcugaucgcccugagccugcuggccauccugaagggcaucuacaacguggccaccugcggccuguucggccuggugagcuuccugcugcugugcggcagaagcugcagcaccaccuacaagggcguguacgagcugcagacccuggagcuggacauggccagccugaacaugaccaugccccugagcugcaccaagaacaacagccaccacuacaucauggugggcaacgagaccggccuggagcugacccugaccaacaccagcaucaucaaccacaaguucugcaaccugagcgacgcccacaagaagaaccuguacgaccacgcccugaugagcaucaucagcaccuuccaccugagcauccccaacuucaaccaguacgaggccaugagcugcgacuucaacggcggcaagaucagcgugcaguacaaccugagccacaccuacgccguggacgccgccaaccacugcggcaccaucgccaacggcgugcugcagaccuucaugagaauggccuggggcggcagcuacaucgcccuggacagcggcaagggcagcugggacugcaucaugaccagcuaccaguaccugaucauccagaacaccaccugggaggaccacugccaguucagcagacccagccccaucggcuaccugggccugcugagccagagaaccagagacaucuacaucagcagaagaagaagaggcaccuucaccuggacccugagcgacagcgagggcaacgagacccccggcggcuacugccugaccagauggaugcugaucgaggccgagcugaagugcuucggcaacaccgccguggccaagugcaacgagaagcacgacgaggaguucugcgacaugcugagacuguucgacuucaacaagcaggccaucagaagacugaaggcccccgcccagaugagcauccagcugaucaacaaggccgugaacgcccugaucaacgaccagcugaucaugaagaaccaccugagagacaucaugggcauccccuacugcaacuacagcaaguacugcuaccugaaccacaccgugaccggcagaaccagccugcccagaugcugccuggugagcaacggcagcuaccugaacgagacccacuucagcgacgacaucgagcagcaggccgacaacaugaucaccgagcugcugcagaaggaguacaucgacagacagggcaagaccccccugggccugguggaccuguucguguucagcaccagcuucuaccugaucagcaucuuccugcaccuggugaagauccccacccacagacacaucaucggcaagcccugccccaagccccacagacugaaccacaugggcaucugcagcugcggccuguacaagcaccccggcgugcccgugaaguggaagagaugaggacuaguuauaagacugacuagcccgaugggccucccaacgggcccuccuccccuccuugcaccgagauuaaucaaaggcucuuuucagagccaccaaaaaaaaaaaaaaaaaaaaaaaaaaaaaaaaaaaaaaaaaaaaaaaaaaaaaaaaaaaaaaaaagaauu

SEQ ID NO: 26041 - RNA, 1655 nt, Artificial Sequence
  mRNA product Design i-3 (hSL-A64-N5) comprising derived and/or modified sequence from LASV(LASV254-NIG-2011;Clade II)__AIT17674__GPCmut3 (opt4)
aggagaaagcuuaccaugggccagaucaucaccuucuuccaggaggugccccacgugaucgaggaggugaugaacaucgugcugaucgcccugagccugcuggccauccugaagggcaucuacaacguggccaccugcggccuguucggccuggugagcuuccugcugcugugcggcagaagcugcagcaccaccuacaagggcguguacgagcugcagacccuggagcuggacaugaccaaccugaacaugaccaugccccugagcugcaccaagaacaacagccaccacuacaucauggugggcaacgagaccggccuggagcugacccugaccaacaccagcaucaucaaccacaaguucugcaaccugagcgacgcccacaagaagaaccuguacaaccacgcccugaugagcaucaucagcaccuuccaccugagcauccccaacuucaaccaguacgaggccaugagcugcgacuucaacggcggcaagaucagcgugcaguacaaccugagccacagcuacgccguggacgccgccaaccacugcggcaccaucgccaacggcgugcugcagaccuucaugagaauggccuggggcggcagcuacaucgcccuggacagcggcaagggcaacugggacugcaucaugaccagcuaccaguaccugaucauccagaacaccaccugggaggaccacugccaguucagcagacccagccccaucggcuaccugggccugcugagccagagaaccagagacaucuacaucagcagaagaagaagaggcaccuucaccuggacccugagcgacagcgagggcaacgagacccccggcggcuacugccugaccagauggaugcugaucgaggccgagcugaagugcuucggcaacaccgccguggccaagugcaacgagaagcacgacgaggaguucugcgacaugcugagacuguucgacuucaacaagcaggccaucagaagacugaagacccccgcccaggccaacauccagcugaucaacaaggccgugaacgcccugaucaacgaccagcugaucaugaagaaccaccugagagacaucaugggcauccccuacugcaacuacagcaaguacugcuaccugaaccacaccgugaccggcaagaccagccugcccagaugcugccuggugagcaacggcagcuaccugaacgagacccacuucagcgacgacaucgagcagcaggccgacaacaugaucaccgagcugcugcagaaggaguacauggacagacagggcaagaccccccugggccugguggaccuguucguguucagcaccagcuucuaccugaucagcaucuuccugcaccuggugaagauccccacccacagacacgugaucggcaagcccugccccaagccccacagacugaaccacaugggcaucugcagcugcggccuguacaagcaccccggcgugcccgugaaguggaagagaugaggacuaguuauaagacugacuagcccgaugggccucccaacgggcccuccuccccuccuugcaccgagauuaaucaaaggcucuuuucagagccaccaaaaaaaaaaaaaaaaaaaaaaaaaaaaaaaaaaaaaaaaaaaaaaaaaaaaaaaaaaaaaaaaagaauu

SEQ ID NO: 26042 - RNA, 1655 nt, Artificial Sequence
  mRNA product Design i-3 (hSL-A64-N5) comprising derived and/or modified sequence from LASV(Nig08-A19;Clade III)__ADU56618__GPCmut3 (opt4)
aggagaaagcuuaccaugggccagaucgugaccuucuuccaggaggugccccacgugaucgaggaggugaugaacaucgugcugaucgcccugagcauccuggccauccugaagggccuguacaacaucgccaccugcggccugaucggccuggugaccuuccugcugcugagcggcagaagcugcagcaugaccuacaagggcguguacgagcugcagacccuggagcugaacaugaacacccugaacaugaccaugccccugagcugcaccaagaacaacagccaccacuacaucauggugggcaacgagaccggccuggagcugacccugaccaacaccagccugcugcaccacaaguucugcaaccugagcgacgcccacaagaagaaccuguacgaccacacccugaugagcaucaucagcaccuuccaccugagcauccccaacuucaaccaguacgaggccaugagcugcgacuucaacggcggcaagaucaccgugcaguacaaccugagccacagcuacgccaucgacgccgccaaccacugcggcaccguggccaacggcgugcugcagaccuucaugagaauggccuggggcggcagcuacaucgcccuggacagcggcagaggcaagugggacugcaucaugaccagcuaccaguaccugaucauccagaacaccaccugggaggaccacugccaguucagcagacccagccccaucggcuaccugggccugcugagccagagaaccagagacaucuacaucagcagaagaagaagaggcaccuucaccuggacccugagcgacagcgagggcaacgagacccccggcggcuacugccugaccagauggaugcugaucgaggccgagcugaagugcuucggcaacaccgccguggccaagugcaacgagaagcacgacgaggaguucugcgacaugcugagacuguucgacuucaacaagcaggccaucagaagacugaaggcccccgcccagaugagcauccagcugaucaacaaggccgugaacgcccugaucaacgaccagcugaucaugaagaaccaccugagagacaucaugggcauccccuacugcaacuacagcaaguacugcuaccugaaccacaccagcaccggcagaaccagccugcccagaugcugccuggugagcaacggcagcuaccugaacgagacccacuucagcgacgacaucgagcagcaggccgacaacaugaucaccgagaugcugcagaaggaguaccuggacagacagggcaagaccccccugggccugguggaccuguucguguucagcaccagcuucuaccugaucagcaucuuccugcaccuggugaagauccccacccacagacacaucgugggcaagcccugccccaagccccacagacugaaccacaugggcaucugcagcugcggccuguacaagcagcccggcgugcccgugagauggaagagaugaggacuaguuauaagacugacuagcccgaugggccucccaacgggcccuccuccccuccuugcaccgagauuaaucaaaggcucuuuucagagccaccaaaaaaaaaaaaaaaaaaaaaaaaaaaaaaaaaaaaaaaaaaaaaaaaaaaaaaaaaaaaaaaaagaauu

SEQ ID NO: 26043 - RNA, 1658 nt, Artificial Sequence
  mRNA product Design i-3 (hSL-A64-N5) comprising derived and/or modified sequence from LASV(G1180-SLE-2010;Clade IV)__AIT17168__GPCmut3 (opt4)
aggagaaagcuuaccaugggccagaucgugaccuucuuccaggaggugccccacgugaucgaggaggugaugaacaucgugcugaucgcccugagcauccuggccgugcugaagggccuguacaacuucgccaccugcggccuggugggccugcugaccuuccugcugcugugcggcagaagcugcaccgccagcagauacaagggcguguacgagcugcagacccuggagcugaacauggagacccugaacaugaccaugccccugagcugcaccaagaacaacagccaccacuacaucauggugggcaacgagaccggccuggagcugacccugaccaacaccagcaucaucaaccacaaguucugcaaccugagcgacgcccacaagaagaaccuguacgaccacgcccugaugagcaucaucagcaccuuccaccugagcauccccaacuucaaccaguacgaggccaugagcugcgacuucaacggcggcaagaucagcgugcaguacaaccugagccacagcuacgccggcgacgccgccaaccacugcggcaccguggccaacggcgugcugcagaccuucaugagaauggccuggggcggcagcuacaucgcccuggacagcggccacggcagcugggacugcaucaugaccagcuaccaguaccugaucauccagaacaccaccugggaggaccacugccaguucagcagacccagccccaucggcuaccugggccugcugagccagagaaccagagacaucuacaucagcagaagaagaagaggcaccuucaccuggacccugagcgacagcgagggcaaggacacccccggcggcuacugccugaccagauggaugcugaucgaggccgagcugaagugcuucggcaacaccgccguggccaagugcaacgagaagcacgacgaggaguucugcgacaugcugagacuguucgacuucaacaagcaggccauccagagacugaaggcccccgcccagaugagcauccagcugaucaacaaggccgugaacgcccugaucaacgaccagcugaucaugaagaaccaccugagagacaucaugggcauccccuacugcaacuacagcaaguacugcuaccugaaccacaccaccaccggcaagaccagccugcccaagugcugccuggugagcaacggcagcuaccugaacgagacccacuucagcgacgacaucgagcagcaggccgacaacaugaucaccgagaugcugcagaaggaguacauggagagacagggcaagaccccccugggccugguggaccuguucguguucagcaccagcuucuaccugaucagcaucuuccugcaccuggugaagauccccacccacagacacaucgugggcaagagcugccccaagccccacagacugaaccacaugggcaucugcagcugcggccuguacaagcagcccggcgugcccgugaaguggaagagaugaggacuaguuauaagacugacuagcccgaugggccucccaacgggcccuccuccccuccuugcaccgagauuaaucaaaggcucuuuucagagccaccaaaaaaaaaaaaaaaaaaaaaaaaaaaaaaaaaaaaaaaaaaaaaaaaaaaaaaaaaaaaaaaaagaauu

SEQ ID NO: 26044 - RNA, 1658 nt, Artificial Sequence
  mRNA product Design i-3 (hSL-A64-N5) comprising derived and/or modified sequence from LASV(G1442-SLE-2011;Clade IV)__AIT17180__GPCmut3 (opt4)
aggagaaagcuuaccaugggccagaucgugaccuucuuccaggaggugccccacgugaucgaggaggugaugaacaucgugcugaucgcccugagcauccuggccgugcugaagggccuguacaacguggccaccugcggccugaucggccuggugaccuuccugcugcugugcggcagaagcugcaccaccacccuguacaagggcguguacgagcugcagacccuggagcugaacauggagacccugaacaugaccaugccccugagcugcaccaagaacaacagccaccacuacaucagagugggcaacgagaccggccuggagcugacccugaccaacaccagcaucaucaaccacaaguucugcaaccugagcgacgcccacaagaagaaccuguacgaccacgcccugaugagcaucaucagcaccuuccaccugagcauccccaacuucaaccaguacgaggccaugagcugcgacuucaacggcggcaagaucagcgugcaguacaaccugagccacagcuacgccggcgacgccgccaaccacugcggcaccguggccaacggcgugcugcagaccuucaugagaauggccuggggcggcagcuacaucgcccuggacagcggcagaggcaacugggacugcaucaugaccagcuaccaguaccugaucauccagaacaccaccugggacgaccacugccaguucagcagacccagccccaucggcuaccugggccugcugagccagagaaccagagacguguacaucagcagaagaagaagaggcaccuucaccuggacccugagcgacagcgagggcaaggacacccccggcggcuacugccugaccagauggaugcugaucgaggccgagcugaagugcuucggcaacaccgccguggccaagugcaacgagaagcacgacgaggaguucugcgacaugcugagacuguucgacuucaacaagcaggccauccagagacugaaggcccccgcccagaugagcauccagcugaucaacaaggccgugaacgcccugaucaacgaccagcugaucaugaagaaccaccugagagacaucaugggcauccccuacugcaacuacagcaaguacugcuaccugaacaacaccgccaccggcaagaccagccugcccaagugcugccugaucagcaacggcagcuaccugaacgagacccacuucagcgacgacaucgagcaggaggccgacaacaugaucaccgagaugcugcagaaggaguacauggagagacagggcaagaccccccugggccugguggaccuguucguguucagcaccagcuucuaccugaucagcaucuuccugcaccuggugaagauccccacccacagacacaucgugggcaagagcugccccaagccccacagacugaaccacaugggcaucugcagcugcggccuguacaagcagcccggcgugcccgugagauggaagagaugaggacuaguuauaagacugacuagcccgaugggccucccaacgggcccuccuccccuccuugcaccgagauuaaucaaaggcucuuuucagagccaccaaaaaaaaaaaaaaaaaaaaaaaaaaaaaaaaaaaaaaaaaaaaaaaaaaaaaaaaaaaaaaaaagaauu

SEQ ID NO: 26045 - RNA, 1658 nt, Artificial Sequence
  mRNA product Design i-3 (hSL-A64-N5) comprising derived and/or modified sequence from LASV(G3010-SLE-2013;Clade IV)__AIT17344__GPCmut3 (opt4)
aggagaaagcuuaccaugggccagaucgugaccuucuuccaggaggugccccacgugaucgaggaggugaugaacaucgugcugaucgcccugagcauccuggccgugcugaagggccuguacaacuucgccaccugcggccuggugggccuggugaccuuccugcugcugugcggcagaagcugcaccaccagccuguacaagggcguguacgagcugcagacccuggagcugaacauggagacccugaacaugaccaugccccugagcugcaccaagaacaacagccaccacuacaucauggugggcaacgagaccggccuggagcugacccugaccaacaccagcaucaucaaccacaaguucugcaaccugagcgacgcccacaagaagaaccuguacaaccacgcccugaugagcaucaucagcaccuuccaccugagcauccccaacuucaaccaguacgaggccaugagcugcgacuucaacggcggcaagaucagcgugcaguacaaccugagccacagcuacgccggcgacgccgccagccacugcggcaccguggccaacggcgugcugcagaccuucaugagaauggccuggggcggcagcuacaucgcccuggacagcggcuacggcaagugggacugcaucaugaccagcuaccaguaccugaucauccagaacaccaccugggaggaccacugccaguucagcagacccagccccaucggcuaccugggccugcugagccagagaaccagagacaucuacaucagcagaagaagaagaggcaccuucaccuggacccugagcgacagcgagggcaaggacacccccggcggcuacugccugaccagauggaugcugaucgaggccgagcugaagugcuucggcaacaccgccguggccaagugcaacgagaagcacgacgaggaguucugcgacaugcugagacuguucgacuucaacaagcaggccauccagagacugaagacccccgcccagaugagcauccagcugaucaacaaggccgugaacgcccugaucaacgaccagcugaucaugaagaaccaccugagagacaucaugggcauccccuacugcaacuacagcaaguacugcuaccugaaccacaccaccaccggcaagaccagccugcccaagugcugccuggugagcaacggcagcuaccugaacgagacccacuucagcgacgacaucgagcagcaggccgacaacaugaucaccgagaugcugcagaaggaguacauggagagacagggcaagaccccccugggccugguggaccuguucguguucagcaccagcuucuaccugaucagcaucuuccugcaccuggugaagauccccacccacagacacaucgugggcaagagcugccccaagccccacagacugaaccacaugggcaucugcagcugcggccuguacaagcagcccggcgugcccgugagauggaagagaugaggacuaguuauaagacugacuagcccgaugggccucccaacgggcccuccuccccuccuugcaccgagauuaaucaaaggcucuuuucagagccaccaaaaaaaaaaaaaaaaaaaaaaaaaaaaaaaaaaaaaaaaaaaaaaaaaaaaaaaaaaaaaaaaagaauu

SEQ ID NO: 26046 - RNA, 1658 nt, Artificial Sequence
  mRNA product Design i-3 (hSL-A64-N5) comprising derived and/or modified sequence from LASV(G502-SLE-2009;Clade IV)__AIT17126__GPCmut3 (opt4)
aggagaaagcuuaccaugggccagaucgugaccuucuuccaggaggugccccacgugaucgaggaggugaugaacaucgugcugaucgcccugagcauccuggccgugcugaagggccuguacaacuucgccaccugcggccuggugggccugcugaccuuccugcugcugugcggcagaagcugcaccaccggccuguacaagggcguguacgagcugcagacccuggagcugaacauggagacccugaacaugaccaugccccugagcugcaccaagaacaacagccaccacuacaucauggugggcaacgagaccggccuggagcugacccugaccaacaccagcaucaucaaccacaaguucugcaaccugagcgacgcccacaagaagaaccuguacgaccacgcccugaugagcaucaucagcaccuuccaccugagcauccccaacuucaaccaguacgaggccaugagcugcgacuucaacggcggcaagaucagcgugcaguacaaccugagccacagcuacgccggcgacgccgccgaccacugcggcaccguggccaacggcgugcugcagaccuucaugagaauggccuggggcggcagcuacaucgcccuggacagcggcagaggcagaugggacugcaucaugaccagcuaccaguaccugaucauccagaacaccaccugggaggaccacugccaguucagcagacccagccccaucggcuaccugggccugcugagccagagaaccagagacaucuacaucagcagaagaagaagaggcaccuucaccuggacccugagcgacagcgagggcaaggacacccccggcggcuacugccugaccagauggaugcugaucgaggccgagcugaagugcuucggcaacaccgccguggccaagugcaacgagaagcacgacgaggaguucugcgacaugcugagacuguucgacuucaacaagcaggccauccagagacugaaggcccccgcccagaugagcauccagcugaucaacaaggccgugaacgcccugaucaacgaccagcuggugaugaagaaccaccugagagacaucaugggcauccccuacugcaacuacagcagauacugcuaccugaaccacaccaccaccggcagaaccagccugcccaagugcugccuggugagcaacggcagcuaccugaacgagacccacuucagcgacgacaucgagcagcaggccgacaacaugaucaccgagaugcugcagaaggaguacauggagagacagggcaagaccccccugggccugguggaccuguucguguucagcaccagcuucuaccugaucagcaucuuccugcaccuggugaagauccccacccacagacacaucgugggcaagagcugccccaagccccacagacugaaccacaugggcaucugcagcugcggccuguacaagcagcccggcgugcccgugaaguggaagagaugaggacuaguuauaagacugacuagcccgaugggccucccaacgggcccuccuccccuccuugcaccgagauuaaucaaaggcucuuuucagagccaccaaaaaaaaaaaaaaaaaaaaaaaaaaaaaaaaaaaaaaaaaaaaaaaaaaaaaaaaaaaaaaaaagaauu

SEQ ID NO: 26047 - RNA, 1658 nt, Artificial Sequence
  mRNA product Design i-3 (hSL-A64-N5) comprising derived and/or modified sequence from LASV(G733-SLE-2010;Clade IV)__AIT17154__GPCmut3 (opt4)
aggagaaagcuuaccaugggccagaucgugaccuucuuccaggaggugccccacgugaucgaggaggugaugaacaucgugcugaucgcccugagcauccuggccgugcugaagggccuguacaacuucgccaccugcggcaucgugggccuggugagcuuccugcugcugugcggcagaagcugcaccaccagccuguacaagggcguguacgagcugcagacccuggagcugaacauggagacccugaacaugaccaugccccugagcugcaccaagaacaacagccaccacuacaucauggugggcaacgagaccggccuggagcugacccugaccaacaccagcaucaucaaccacaaguucugcaaccugagcgacgcccacaagaagaaccuguacgaccacgcccugaugagcaucaucagcaccuuccaccugagcauccccaacuucaaccaguacgaggccaugagcugcgacuucaacggcggcaagaucagcgugcaguacaaccugagccacagcuacgccggcgacgccgccaaccacugcggcaccaucgccaacggcgugcugcagaccuucaugagaauggccuggggcggcagcuacaucgcccuggacagcggcagagacagaugggacugcaucaugaccagcuaccaguaccugaucauccagaacaccaccugggaggaccacugccaguucagcagacccagccccaucggcuaccugggccugcugagccagagaaccagagacaucuacaucagcagaagaagaagaggcaccuucaccuggacccugagcgacagcgagggcaaggacacccccggcggcuacugccugaccagauggaugcugaucgaggccgagcugaagugcuucggcaacaccgccguggccaagugcaacgagaagcacgacgaggaguucugcgacaugcugagacuguucgacuucaacaagcaggccauccagagacugaaggcccccgcccagaugagcauccagcugaucaacaaggccgugaacgcccugaucaacgaccagcugaucaugaagaaccaccugagagacaucaugggcauccccuacugcaacuacagcaaguacugcuaccugaaccacaccaccaccggcaagaccagccugcccaagugcugccuggugagcaacggcagcuaccugaacgagacccacuucagcgacgacaucgagcagcaggccgacaacaugaucaccgagaugcugcagaaggaguacauggagagacagggcaagaccccccugggccugguggaccuguucguguucagcaccagcuucuaccugaucagcaucuuccugcaccuggugaagauccccacccacagacacguggugggcaagagcugccccaagccccacagacugaaccacaugggcaucugcagcugcggccuguacggccagcccggcgugcccgugaaguggaagagaugaggacuaguuauaagacugacuagcccgaugggccucccaacgggcccuccuccccuccuugcaccgagauuaaucaaaggcucuuuucagagccaccaaaaaaaaaaaaaaaaaaaaaaaaaaaaaaaaaaaaaaaaaaaaaaaaaaaaaaaaaaaaaaaaagaauu

SEQ ID NO: 26048 - RNA, 1658 nt, Artificial Sequence
  mRNA product Design i-3 (hSL-A64-N5) comprising derived and/or modified sequence from MOPV/LASV reassortant(IGS-1;Clade IV)__AFY05576__GPCmut3 (opt4)
aggagaaagcuuaccaugggccagaucgugaccuucuuccaggaggugccccacgugaucgaggaggugaugaacaucgugcugaucgcccugagcgugcuggccgugcugaagggccuguacaacuucgccaccugcggccuggugggccuggugaccuuccugcugcugugcggcagaagcugcaccaccagccuguacaagggcguguacgagcugcagacccuggagcugaacauggagacccugaacaugaccaugccccugagcugcaccaagaacaacagccaccacuacaucauggugggcaacgagaccggccuggagcugacccugaccaacaccagcaucaucaaccacaaguucugcaaccugagcgacgcccacaagaagaaccuguacgaccacgcccugaugagcaucaucagcaccuuccaccugagcauccccaacuucaaccaguacgaggccaugagcugcgacuucaacggcggcaagaucagcgugcaguacaaccugagccacagcuacgccggcgacgccgccaaccacugcggcaccguggccaacggcgugcugcagaccuucaugagaauggccuggggcggcagcuacaucgcccuggacagcggcagaggcaacugggacugcaucaugaccagcuaccaguaccugaucauccagaacaccaccugggaggaccacugccaguucagcagacccagccccaucggcuaccugggccugcugagccagagaaccagagacaucuacaucagcagaagaagaagaggcaccuucaccuggacccugagcgacagcgagggcgaggacacccccggcggcuacugccugaccagauggaugcugaucgaggccgagcugaagugcuucggcaacaccgccguggccaagugcaacgagaagcacgacgaggaguucugcgacaugcugagacuguucgacuucaacaagcaggccauccagagacugaaggcccccgcccagaugagcauccagcugaucaacaaggccgugaacgcccugaucaacgaccagcugaucaugaagaaccaccugagagacaucaugggcauccccuacugcaacuacagcaaguacugcuaccugaaccacaccaccaccggcagaaccagccugcccaagugcugccuggugagcaacggcagcuaccugaacgagacccacuucagcgacgacaucgagcagcaggccgacaacaugaucaccgagaugcugcagaaggaguacauggagagacagggcaagaccccccugggccugguggaccuguucguguucagcaccagcuucuaccugaucagcaucuuccugcaccuggugaagauccccacccacagacacaucgugggcaagagcugccccaagccccacagacugaaccacaugggcaucugcagcugcggccuguacaagcagcccggcgugcccgugaaguggaagagaugaggacuaguuauaagacugacuagcccgaugggccucccaacgggcccuccuccccuccuugcaccgagauuaaucaaaggcucuuuucagagccaccaaaaaaaaaaaaaaaaaaaaaaaaaaaaaaaaaaaaaaaaaaaaaaaaaaaaaaaaaaaaaaaaagaauu

SEQ ID NO: 26049 - RNA, 1658 nt, Artificial Sequence
  mRNA product Design i-3 (hSL-A64-N5) comprising derived and/or modified sequence from LASV(LM765-SLE-2012;Clade IV)__AIT17814__GPCmut3 (opt4)
aggagaaagcuuaccaugggccagaucgugaccuucuuccaggaggugccccacgugaucgaggaggugaugaacaucgugcugaucgcccugagcauccuggccgugcugaagggccuguacaacuucgccaccugcggccuggugggccuggugaccuuccugcugcugugcggcagaagcugcaccaccagccuguacaagggcguguacgagcugcagacccuggagcugaacauggagacccugaacaugaccaugccccugagcugcaccaagaacaacagccaccacuacaucauggugggcaacgagaccggccuggagcugacccugaccaacaccagcaucaucgaccacaaguucugcaaccugagcgacgcccacagaaagaaccuguacgaccacgcccugaugagcaucaucagcaccuuccaccugagcauccccaacuucaaccaguacgaggccaugagcugcgacuucaacggcggcaagaucagcgugcaguacaaccugagccacagcuacgccaaggacgccgccgaccacugcggcaccguggccaacggcgugcugcagaccuucaugagaauggccuggggcggcagcuacaucgcccuggacagcggcagaggcagaugggacugcaucaugaccagcuaccaguaccugaucauccagaacaccaccugggaggaccacugccaguucagcagacccagccccaucggcuaccugggccugcugagccagagaaccagagacaucuacaucagcagaagaagaagaggcaccuucaccuggacccugagcgacagcgagggcaaggacacccccggcggcuacugccugaccagauggaugcugaucgaggccgagcugaagugcuucggcaacaccgccguggccaagugcaacgagaagcacgacgaggaguucugcgacaugcugagacuguucgacuucaacaagcaggccauccagagacugaaggcccccgcccagaugagcauccagcugaucaacaaggccgugaacgcccugaucaacgaccagcugaucaugaagaaccaccugagagacaucaugggcauccccuacugcaacuacagcaaguacugcuaccugaaccacaccaccaccggcaagaccagccugcccaagugcugccuggugagcaacggcagcuaccugaacgagacccacuucagcgacgacaucgagcagcaggccgacaacaugaucaccgagaugcugcagaaggaguacauggagagacagggcaagaccccccugggccugguggaccuguucguguucagcaccagcuucuaccugaucagcaucuuccugcaccuggugaagauccccacccacagacacaucgugggcaagcccugccccaagccccacagacugaaccacaugggcaucugcagcugcggccuguacaagcagcccggcgugcccgugaaguggaagagaugaggacuaguuauaagacugacuagcccgaugggccucccaacgggcccuccuccccuccuugcaccgagauuaaucaaaggcucuuuucagagccaccaaaaaaaaaaaaaaaaaaaaaaaaaaaaaaaaaaaaaaaaaaaaaaaaaaaaaaaaaaaaaaaaagaauu

SEQ ID NO: 26050 - RNA, 1658 nt, Artificial Sequence
  mRNA product Design i-3 (hSL-A64-N5) comprising derived and/or modified sequence from LASV(LM776-SLE-2012;Clade IV)__AIT17824__GPCmut3 (opt4)
aggagaaagcuuaccaugggccagaucgugaccuucuuccaggaggugccccacgugaucgaggaggugaugaacaucgugcugaucgcccugagcauccuggccgugcugaagggccuguacaacuucgccaccugcggccuggugggccuggugaccuuccugcugcugugcggcagaagcugcaccaccagcguguacaagggcguguacgagcugcagacccuggagcugaacauggagacccugaacaugaccaugccccugagcugcaccaagaacaacagccaccacuacaucauggugggcaacgagaccggccuggagcugacccugaccaacaccagcaucaucaaccacaaguucugcaaccugagcgacgcccacaagaagaaccuguacgaccacgcccugaugagcaucaucagcaccuuccaccugagcauccccaacuucaaccaguacgaggccaugagcugcgacuucaacggcggcaagaucagcgugcaguacaaccugagccacagcuacgccggcgacgccgccaaccacugcggcaccguggccaacggcgugcugcagaccuucaugagaauggccuggggcggcagcuacaucgcccuggacagcggccacggcaagugggacugcaucaugaccagcuaccaguaccugaucauccagaacaccaccugggaggaccacugccaguucagcagacccagccccaucggcuaccugggccugcugagccagagaaccagagacaucuacaucagcagaagaagaagaggcaccuucaccuggacccugagcgacagcgagggcaaggacacccccggcggcuacugccugaccagauggaugcugaucgaggccgagcugaagugcuucggcaacaccgccguggccaagugcaacgagaagcacgacgaggaguucugcgacaugcugagacuguucgacuucaacaagcaggccauccagagacugaaggcccccgcccagaugagcauccagcugaucaacaaggccgugaacgcccugaucaacgaccagcugaucaugaagaaccaccugagagacaucaugggcauccccuacugcaacuacagcaaguacugcuaccugaaccacaccaccaccggcaagaccagccugcccaagugcugccuggugagcaacggcagcuaccugaacgagacccacuucagcgacgacaucgagcagcaggccgacaacaugaucaccgagaugcugcagaaggaguacauggagagacagggcaagaccccccugggccugguggaccuguucguguucagcaccagcuucuaccugaucagcaucuuccugcaccuggugaagauccccacccacagacacaucgugggcaagagcugccccaagccccacagacugaaccacaugggcaucugcagcugcggccuguacaagcagcccggcgugcccgugagauggaagagaugaggacuaguuauaagacugacuagcccgaugggccucccaacgggcccuccuccccuccuugcaccgagauuaaucaaaggcucuuuucagagccaccaaaaaaaaaaaaaaaaaaaaaaaaaaaaaaaaaaaaaaaaaaaaaaaaaaaaaaaaaaaaaaaaagaauu

SEQ ID NO: 26051 - RNA, 1658 nt, Artificial Sequence
  mRNA product Design i-3 (hSL-A64-N5) comprising derived and/or modified sequence from LASV(Mad39;Clade IV)__ANH09722__GPCmut3 (opt4)
aggagaaagcuuaccaugggccagaucgugaccuucuuccaggaggugccccacgugaucgaggaggugaugaacaucgugcugaucgcccugagcauccuggccgugcugaagggccuguacaacguggccaccugcggccugaucggccuggugaccuuccugcugcugugcggcagaagcugcaccaccacccuguacaagggcguguacgagcugcaggcccuggagcugaacauggagacccugaacaugaccaugccccugagcugcaccaagaacaacagccaccacuacaucagagugggcaacgagaccggccuggagcugacccugaccaacaccagccugaucaaccacaaguucugcaaccugagcgacgcccacaagaagaaccuguacgaccacgcccugaugagcaucaucagcaccuuccaccugagcauccccaacuucaaccaguacgaggccaugagcugcgacuucaacgacggcaagaucagcgugcaguacaaccugagccacaccuacgccggcgacaccgccaaccacugcggcaccguggccaacggcgugcugcagaccuucaugagaauggccuggggcggcagcuacaucgcccuggacagcggcagaggcggcugggacugcaucaugaccagcuaccaguaccugaucauccagaacaccaccugggaggaccacugccaguucagcagacccagccccaucggcuaccugggccugcugagccagagaaccagagacaucuacaucagcagaagaagaagaggcaccuucaccuggacccugagcgacagcgagggcaaggacacccccggcggcuacugccugaccagauggaugcugaucgaggccgagcugaagugcuucggcaacaccgccguggccaagugcaacgagaagcacgacgaggaguucugcgacaugcugagacuguucgacuucaacaagcaggccauccagagacugaaggcccccgcccagaugagcauccagcugaucaacaaggccgugaacgcccugaucaacgaccagcugaucaugaagaaccaccugagagacaucaugggcauccccuacugcaacuacagcaaguacugcuaccugaaccacaccgugaccggcaagaccagccugcccaagugcugccuggugagcaacggcagcuaccugaacgagacccacuucagcgacgacaucgagcagcaggccgacaacaugaucaccgagaugcugcagaaggaguacauggagagacagggcaagaccccccugggccugguggaccuguucguguucagcaccagcuucuaccugaucagcaucuuccugcaccuggugaagauccccacccacagacacguggugggcaagcccugccccaagccccacagacugaaccacaugggcaucugcagcugcggcuucuacaagcagcccggcgugcccgugagauggaagagaugaggacuaguuauaagacugacuagcccgaugggccucccaacgggcccuccuccccuccuugcaccgagauuaaucaaaggcucuuuucagagccaccaaaaaaaaaaaaaaaaaaaaaaaaaaaaaaaaaaaaaaaaaaaaaaaaaaaaaaaaaaaaaaaaagaauu

SEQ ID NO: 26052 - RNA, 1658 nt, Artificial Sequence
  mRNA product Design i-3 (hSL-A64-N5) comprising derived and/or modified sequence from LASV(Z0947-SLE-2011;Clade IV)__AIT17840__GPCmut3 (opt4)
aggagaaagcuuaccaugggccagaucgugaccuucuuccaggaggugccccacgugaucgaggaggugaugaacaucgugcugaucgcccugagcauccuggccgugcugaagggccuguacaacuucgccaccugcggccuggugggccuggugaccuuccugcugcugugcggcagaagcugcaccaucagccuguacaagggcguguacgagcugcagacccuggagcugaacauggagacccugaacaugaccaugccccugagcugcaccaagaacaacagccaccacuacaucauggugggcaacgagaccggccuggagcugacccugaccaacaccagcaucaucaaccacaaguucugcaaccugagcgacgcccacaagaagaaccuguacgaccacgcccugaugagcaucaucagcaccuuccaccugagcauccccaacuucaaccaguacgaggccaugagcugcgacuucaacggcggcaagaucagcgugcaguacaaccugagccacagcuacgccggcgacgccgccaaccacugcggcaccguggccaacggcgugcugcagaccuucaugagaauggccuggggcggcagcuacaucgcccuggacagcggcagagacagaugggacugcaucaugaccagcuaccaguaccugaucauccagaacaccaccugggaggaccacugccaguucagcagacccagccccaucggcuaccugggccugcugagccagagaaccagagacaucuacaucagcagaagaagaagaggcaccuucaccuggacccugagcgacagcgagggcaaggacacccccggcggcuacugccugaccagauggaugcugaucgaggccgagcugaagugcuucggcaacaccgccguggccaagugcaacgagaagcacgacgaggaguucugcgacaugcugagacuguucgacuucaacaagcaggccauccagagacugaaggcccccgcccagaugagcauccagcugaucaacaaggccgugaacgcccugaucaacgaccagcugaucaugaagaaccaccugagagacaucaugggcauccccuacugcaacuacagcaaguacugcuaccugaaccacaccaccaccggcaagaccagccugcccaagugcugccuggugagcaacggcagcuaccugaacgagacccacuucagcgacgacaucgagcagcaggccgacaacaugaucaccgagaugcugcagaaggaguacauggagagacagggcaagaccccccugggccugguggaccuguucguguucagcaccagcuucuaccugaucagcaucuuccugcaccuggugaagauccccacccacagacacaucgugggcaagcccugccccaagccccacagacugaaccacaugggcaucugcagcugcggccuguacaagcagcccggcgugcccgugaaguggaagagaugaggacuaguuauaagacugacuagcccgaugggccucccaacgggcccuccuccccuccuugcaccgagauuaaucaaaggcucuuuucagagccaccaaaaaaaaaaaaaaaaaaaaaaaaaaaaaaaaaaaaaaaaaaaaaaaaaaaaaaaaaaaaaaaaagaauu

SEQ ID NO: 26053 - RNA, 1658 nt, Artificial Sequence
  mRNA product Design i-3 (hSL-A64-N5) comprising derived and/or modified sequence from LASV(Josiah;Clade IV)__NP_694870__GPCmut3 (opt5)
aggagaaagcuuaccaugggccagaucgugaccuucuuucaagaggucccccacguuauugaagaggugaugaacaucgugcugauugcccucagcguccuggcugugcuuaaggggcuguacaauuucgccacaugcggacucguuggccuggugacguuucuucugcucugugggagauccugcaccacaucucuguauaaaggagucuacgaacugcagacccucgagcugaacauggaaacacuuaauaugaccaugccucugagcuguacaaagaacaauucccaucacuauaucauggugggcaacgagaccgggcucgagcugacgcuuaccaauacaucuauuaucaaccauaaauucugcaaucugagcgacgcgcacaagaaaaaccucuacgaucaugcucugauguccaucauuucuaccuuucaccugagcaucccgaauuucaaccaguaugaagccauguccugugacuuuaauggaggcaagauuagcguucaguacaaccucucucacuccuaugccggcgaugcugccaaucauugcgggacaguggcuaacggaguccugcaaaccuucaugcggauggccuggggcgggagcuacaucgcgcuugacucuggacgcggcaacugggauuguauuaugacguccuaccaguaucugaucauucagaauacaaccugggaggaccacugccaguuuagcagacccucuccuaucggguaccucggacugcuuucccaacggacacgcgauaucuauauuagcagacggcgcagaggcaccuucaccuggacacuguccgacucugaaggcaaggauacgcccgggggauacugucucacccgguggaugcugaucgaggccgagcugaaaugcuuuggcaacacagcuguggccaaguguaaugaaaaacaugacgaggaguucugcgauaugcuccgccuguuugacuucaacaagcaggcuauucagagacuuaaagccccugcgcagaugagcauccaacugauuaauaaggccgugaacgcucucaucaaugaucagcugaucaugaagaaccaccuucgggacauuauggggauccccuauugcaauuacuccaaauauuguuaccugaaccacaccacaaccggacgcacgagccucccuaagugcugucuggucucuaauggcuccuaccugaacgaaacacauuucagcgacgauauugaacagcaagccgacaauaugaucaccgagaugcuccagaaagaguauauggaaagacaggggaagaccccgcugggacuuguugaucuguuuguguucucuaccagcuuuuaccucauuuccaucuuccugcaccuggugaaaauccccacacaucggcacauugucggcaagucuugcccuaaaccccaucgccuuaaccacaugggcaucuguagcugcgggcucuauaagcagccuggagugcccguuaaguggaaaagaugaggacuaguuauaagacugacuagcccgaugggccucccaacgggcccuccuccccuccuugcaccgagauuaaucaaaggcucuuuucagagccaccaaaaaaaaaaaaaaaaaaaaaaaaaaaaaaaaaaaaaaaaaaaaaaaaaaaaaaaaaaaaaaaaagaauu

SEQ ID NO: 26054 - RNA, 1655 nt, Artificial Sequence
  mRNA product Design i-3 (hSL-A64-N5) comprising derived and/or modified sequence from LASV(LP;Clade I)__AAF86701__GPCmut3 (opt5)
aggagaaagcuuaccaugggccagaucauuaccuucuuucaagaggugccccacgucaucgaagagguuaugaacauugugcugaucgcccucagccugcuugcuauucugaaggggcucuacaauaucgccacaugcggaaucauuggccugguggcguuccuuuuucugugugggaaauccugcucucucacgcugaagggaggcuaugaacugcagacccucgagcugaacauggaaacacuuaauaugaccaugccucugagcuguaccaaaaacuccucucaucacuacaucagagucgggaaugagacaggacucgagcugacacuuaccaacacgagcauuaucaaucauaaguucugcaaccuguccgacgcucacaaaaagaaucucuaugaucaugcccugaugucuauuaucagcaccuuucaccuguccauuccgaacuucaaucaguacgaagccaugagcugugacuuuaacggcggcaagaucucugugcaguauaaucucucccacagcuacgcuggggaugccgcugagcauugcggaacaguugccaacggcgugcugcaaaccuucaugcggauggcguggggagggcgcuauaucgcccuugacucuggcaaagggaauugggauuguauuaugacauccuaccaguaccugaucauucagaacaccacgugggaagaccacugccaguuuagcagacccucuccuaucggauaucucggccugcuuucccaacggacacgcgauauuuacaucagcagacggcgcagaggcaccuucacauggacccuguccgacucugaggggaacgagacccccggaggcuauugucucacacgguggaugcugaucgaagcugagcugaagugcuuugggaauacggccgucgcuaaauguaacgaaaagcaugaugaggaguucugcgacaugcuccgccuguuugauuucaauaaacaggccauuagacggcuuaaggcgccugcccagaugagcauccagcugauuaacaaggcugugaaugcccucaucaacgaccaacugauuaugaaaaaucaccuucgcgauaucaugggaauccccuacugcaacuauuccaaguacuguuaucugaaucacaccagcucuggcagaacaucccucccuaaaugcugucugauuagcaacgggucuuaccugaaugaaacccaguucagcgacgacaucgagcagcaagcugauaacaugauuacagaaaugcuccagaaggaguacaucgaacggcagggaaaaaccccgcugggccuuguugacauuuuuaucuucuccacgucuuuuuaucugauuagcaucuuccuccaucugaucaagauucccacacaccgccauaucgugggcaaaccuugccccaagccucacagacugaaucauaugggggucuguuccugcggacuuuacaagcaccccggcgugccgaccaaauggaagcggugaggacuaguuauaagacugacuagcccgaugggccucccaacgggcccuccuccccuccuugcaccgagauuaaucaaaggcucuuuucagagccaccaaaaaaaaaaaaaaaaaaaaaaaaaaaaaaaaaaaaaaaaaaaaaaaaaaaaaaaaaaaaaaaaagaauu

SEQ ID NO: 26055 - RNA, 1655 nt, Artificial Sequence
  mRNA product Design i-3 (hSL-A64-N5) comprising derived and/or modified sequence from LASV(803213;Clade II)__AAF86703__GPCmut3 (opt5)
aggagaaagcuuaccaugggccagaucauuaccuucuuucaagaggugccccacgucaucgaagagguuaugaacauugugcugaucgcccucagccugcuugcuauucugaaggggaucuacaauguggccacaugcggacucuucggccugaucuccuuucuucugcucugugggagaucuugcagcgucacguauaaaggaguguacgaacugcagacccuggagcucaacauggcgaaucugaacaugacaaugccucuuuccuguaccaagaauaacucucaucacuauauuaugguuggcaaugaaacagggcuggagcucacccugacaaacaccagcaucauuaaucauaaauucugcaaccuuuccgacgcucacaagaaaaaucuguacgaucaugcccucaugucuaucauuagcacguuucaccuguccaucccgaacuucaaucaguaugaggccaugagcugugacuuuaacggaggcaagauuucugugcaguacaaucugucccacagcuucgcugucgaugccgcuaaccauugcggcaccaucgccaacggggugcuccaaacauuuaugcggauggcguggggaggcucuuauaucgcccuggacuccgggaagggaaauugggauuguauuaugaccagcuaccaguaccuuaucauucagaacacaaccugggaagaccacugccaguucucucgccccuccccuaucggcuaucuggggcuccugagccaaagaacgcgggauauuuacaucucccgcagacggcgcggaacauuuaccuggacacuuucugacagcgagggcaaugaagcucccggcggguauugucugaccagauggaugcucaucgaggccgagcugaaaugcuucggaaacaccgcuguugccaaguguaaugaaaaacaugaugaggaauuuugcgacaugcugcgccucuucgauuucaacaagcaggcgauuaaacggcugaagacgccugcccagauguccauccagcuuauuaauaaggcugugaacgcccugaucaaugaccaacucauuaugaaaaaccaccugagagauaucaugggcauccccuacugcaauuauagccgguacuguuaucuuaaccacacagucaccgggaagacaucucugccucgcugcugucucguguccaauggaagcuaccugaacgagacccauuuuucugacgacauugaacagcaggcugauaauaugaucacagagaugcugcaaaaagaguacauggacagacagggcaagaccccgcucgggcugguggaucuuuucgucuuuagcacguccuucuaucugauuucuaucuuucuccaccugguuaaaauucccacacaucggcacaucgugggaaagccuugccccaaaccucaucgccugaaccacaugggcauuuguagcugcggccuuuacaagcaccccggggugccggucaaguggaaaagaugaggacuaguuauaagacugacuagcccgaugggccucccaacgggcccuccuccccuccuugcaccgagauuaaucaaaggcucuuuucagagccaccaaaaaaaaaaaaaaaaaaaaaaaaaaaaaaaaaaaaaaaaaaaaaaaaaaaaaaaaaaaaaaaaagaauu

SEQ ID NO: 26056 - RNA, 1655 nt, Artificial Sequence
  mRNA product Design i-3 (hSL-A64-N5) comprising derived and/or modified sequence from LASV(GA391;Clade III)__CAA36645__GPCmut3 (opt5)
aggagaaagcuuaccaugggccagaucgugaccuucuuucaagaggucccccacguuauugaagaggugaugaacaucgugcugauugcccucagcauccuggcuauucuuaaggggcuguacaaugucgccacaugcggacucaucggccuggugacguuccuucugcucuccgggagaucuuguagccugaucuauaaaggaaccuacgaacugcagacacucgagcugaacauggaaacccuuaauaugacaaugccucuguccugcaccaagaacaauucucaucacuauauucggguuggcaacgagacagggcucgagcugacccuuacgaauaccagcauccugaaccauaaauuuuguaaucucuccgacgcgcacaagcgcaaccuguacgaucauucucugaugagcauuaucuccacauuccaccucagcauuccgaauuuuaaccaguaugaagcuaugucuugcgacuucaauggaggcaaaaucaccgugcaguacaaccugucccacagcuuugccgucgaugccgcuggccauugugggacacuugccaauggagugcugcaaaccuucaugagaauggcuuggggcgggucuuauauugcccucgacuccggacggggcaacugggauugcaucaugacgagcuaccaguaccugaucauucagaacacaaccugggacgaucacugucaguuuucucgccccuccccuaucggguaucuuggacugcucagccaaagaacacgggacauuuacaucucccgcagacggcgcggcaccuucaccuggacacugucugauagcgagggcaaugaaacgcccgggggauauugccugaccagauggaugcucauugaggcggagcugaaguguuuuggcaacacagccguugcuaagugcaaugaaaaacaugacgaggaguucugugauaugcuucggcuguuugacuucaacaagcaggccauccgcagacucaaaaccccugcucagauguccauccagcugauuaauaaggccgugaacgcgcuuaucaaugaucaacugauuaugaaaaaccaccuccgggacaucauggggauucccuacugcaauuauagccgcuacugcuaucugaaccacacaucuaccggaaagacgucccugccuagauguugccucaucagcaauggcucuuaccugaacgaaacaaaguucagcgacgauaucgaacagcaggccgacaauaugauuaccgagaugcuucaaaaagaguacaucgaucggcaggggaagaccccgcugggacucgucgaccuguuuguguucuccacaucuuuuuaucugauuagcaucuuccuucaucucgugaaaauucccacccacagacauaucgucggcaagccuugucccaaaccucaccgccugaaccauaugggcauuugcuccugugggcuguacaagcagcccggaguuccggugcgguggaaaagaugaggacuaguuauaagacugacuagcccgaugggccucccaacgggcccuccuccccuccuugcaccgagauuaaucaaaggcucuuuucagagccaccaaaaaaaaaaaaaaaaaaaaaaaaaaaaaaaaaaaaaaaaaaaaaaaaaaaaaaaaaaaaaaaaagaauu

SEQ ID NO: 26057 - RNA, 1658 nt, Artificial Sequence
  mRNA product Design i-3 (hSL-A64-N5) comprising derived and/or modified sequence from LASV(AV;Clade V)__CCA30314__GPCmut3 (opt5)
aggagaaagcuuaccaugggccagaucgugaccuucuuucaagaggucccccacguuauugaagaggugaugaacaucgugcugauugcccucagcauccuggcuguccuuaaggggcuguacaauauugccacaugcggacucaucggccugaucacguuccuucugcucugugggagauccugcucuagcaaccuguauaaaggaguguacgaacugcagucccucgaccugaauauggagacccuuaacaugacaaugccucugucuuguaccaagaauaacagccaucacuauauucggguuggcaaugauacagggcucgaacugacccuuacaaacaccuccauccugaaucauaaauuuugcaaccucucugacgcgcacaagaaagaucuguacgaccaugcucugaugagcauuaucuccacguuccaccucagcauuccgaauuuuaaccaguaugaggccaugucuugugauuucaauggaggcaagaucuccgugcaguacaaccugagccacucuuaugccauugacgcugccaaucauugcggcaccgucgcuaacgggauccuucaaacauuuaugcgcauggccuggggaggcuccuacaucgcgcuggauagcgggagaggaaacugggacuguauuaugaccucuuaccaguaucucaucauucagaauacaaccugggagaaccacugccaguucucccggcccagcccuaucggcuaccuggggcuucugucccaacgcacgagagauauuuauaucucucggcgcagacggggaacauuuaccuggacacucagcgacuccgaaggcaaugccacccccggcggguacugucugacccgcuggaugcugaucgaggcugaacucaagugcuucggaaacacagccguggcuaaauguaaugagaagcaugaugaggaauuuugcgacaugcugagacuuuucgauuuuaacaaacaggccauuagccggcugaagucuccugcgcagauguccauccagcucauuaauaaagccguuaacgcucugaucaaugaccaacuuauuaugaagaaccaucugcgcgacaucaugggcauccccuauugcaauuacagcaaguauuguuaccucaaccacacgauuaccgggaaaacaucucugccuaagugcugucuggugagcaauggauccuaccucaacgagacccacuucucugaugacaucgaacagcaggccgauaauaugauuacagagaugcugcaaaaagaauauauggagagacagggcaagaccccgcuugggcuggucgaccucuucguguuuagcacguccuucuaccugaucagcauuuuucugcggcuugugaaaauccccacacaccgccauauugucggaaagccuugccccaaaccucacagacucaaccauaugggcaucuguucuugcggccuguauaagcagcccgggguuccggugcgguggaagagaugaggacuaguuauaagacugacuagcccgaugggccucccaacgggcccuccuccccuccuugcaccgagauuaaucaaaggcucuuuucagagccaccaaaaaaaaaaaaaaaaaaaaaaaaaaaaaaaaaaaaaaaaaaaaaaaaaaaaaaaaaaaaaaaaagaauu

SEQ ID NO: 26058 - RNA, 1655 nt, Artificial Sequence
  mRNA product Design i-3 (hSL-A64-N5) comprising derived and/or modified sequence from LASV(Togo/2016/7082;Clade VI)__AMR44577__GPCmut3 (opt5)
aggagaaagcuuaccaugggccagaucauuaccuucuuucaagaggugccccacgucaucgaagagguuaugaacauugugcugaucgcccucagccugcuugcuauucugaaggggguguacaaugucgccacaugcggaaucaucggccucgugacguuccuguuucuuugugggagauccugcucucugauuuauaaaggaagcuacgaacuccagacccuggagcugaacauggaaacacucaauaugaccaugccucuguccuguacaaagaacucuagccaucacuauauccggguuggcaaugagaccgggcuugagcugacacucaccaacacguccauuaucaaucauaaauucugcaaccugucugacgcgcacaagcgcaaucuuuacgaucaugcucugaugagcauucucuccaccuuucaccugagcaucccgaacuucaaucaguaugaagccaugucuugugacuuuaacggaggcaaaauuuccgugcaguacaaucugagccacgccuaugcugucgaugccgcugagcauugcggcacaguggccaacgggguucuccaaaccuucaugagaauggcguggggaggcucuuacaucgcccuggacuccgggcggggaaauugggauuguaucaugacaagcuaccaguaucuuauuauccagaacaccacgugggaagaccacugccaguuuucucgccccuccccuauuggcuaccuggggcuccugagccaaagaacacgggauaucuauauuucccgcagacggcgcggaaccuucacauggacccuuucugacagcgagggcaacgagacccccggcggguacugucugacaagauggaugcucaucgaagcugagcugaagugcuuuggaaauacggccguggcuaaguguaacgaaaaacaugaugaggaguucugcgacaugcugcggcucuuugauuucaauaagcaggccauccagcgccugaaauccccugcgcagaugagcauucaacuuaucaacaaggccgucaaugcucugauuaacgaccagcucaucaugaaaaaucaccugagagauaugaugggcauucccuauugcaacuacucuaaguauuguuaccuuaaucacaccuccagcgggcggacaucucugccuaagugcugucucgugagcaacggauccuaccugaaugaaacccauuucucugacgacaucgagcagcaagccgauaacaugaucacagaaaugcugcagaaagaguauauugaccgccagggcaagaccccgcucgggcugguggaucuuuuugucuucagcacguccuuuuaccugaucagcauuuuccuccaccugaucaaaauucccacacauagacacaucguuggaaagccuugccccaaaccucaucggcugaaucacaugggcauuuguucuugcggccuuuauaagcagcccggggugccgaccagauggaaacgcugaggacuaguuauaagacugacuagcccgaugggccucccaacgggcccuccuccccuccuugcaccgagauuaaucaaaggcucuuuucagagccaccaaaaaaaaaaaaaaaaaaaaaaaaaaaaaaaaaaaaaaaaaaaaaaaaaaaaaaaaaaaaaaaaagaauu

SEQ ID NO: 26059 - RNA, 1655 nt, Artificial Sequence
  mRNA product Design i-3 (hSL-A64-N5) comprising derived and/or modified sequence from LASV(KAK-428;Clade n.d. (VII))__ANH09740__GPCmut3 (opt5)
aggagaaagcuuaccaugggccagaucgugaccuucuuucaagaggucccccacguuauugaagaggugaugaacaucgugcugauugcccucagccugcuugcuauccugaaggggcucuacaauuucgccacaugcggagucauuggccugaucacguuucuucugcucugugggagauccugcucugcgaccuauaaaggacaguacgaacugcagacacuggagcucaacauggaaagccugaauaugaccaugccucuuuccuguacaaagaacaauucucaucacuauauccgggcuggcaacaauaccgggcuggagcucacacugaccaacacgagcauuaucucccauaaauucugcaaucuuucugacgcccacaagaaaaaccuguacgaucauacccucaugagcauuaucacaaccuuucaccuguccauuccgaauuucaaccaguaugaggccaugagcugugacuuuaauggaggcaagaucucuauucaauacaaccugucccacagcuaugcuggcgaugccgcucagcauugcgggacaguggccaauggaguucuccagaccuucaugcgcauggcguggggcgggucuuaccuggcccuugacuccggaagacggggcugggauuguaucaucagcucuuaccaguaucugauuauccaaaacacgacaugggacgaucacugccaguuuucccgccccagcccuauuggguaccucggauucgugucccagaagaccagagacaucuauauuucucggcgcagacggggcacauuuaccuggacccugagcgauuccgaaggccaugacaugcccgggggauacugucuuacacgcuggaugcugaucgaggcugaucucaaaugcuucggcaacacggccgucgcuaaguguaaugaaaaacacgacgaggaguuuugcgauauguggagacuguucgacuucaacaagcaggccauccaacggcugaaagcgccugcccagaugaauauucagcucaucaacaaggcugugaaugcccugauuaacgaccaacuuaugaugaagaaucaucugcgcgauaucauggggauucccuauugcaacuacagcaaauuuuguuaucucaauaacaccacaaccggaagaacaucucugccucggugcugucuuaucuccaauggcagcuaccugaacgaaacccacuucucugacgauaucgagcagcaggcugacaauaugauuacggaaaugcuccagaaggaguacauggaucgccaagggaaaacaccgcugggacugguugaccucuuuguguucagcaccuccuuuuaucugaucaccauuuuccuucaccuggucaagauccccacacauagacacauugugggcaaaccuugccccaagccucaucggcucaaccacaugggcaucuguucuugcgggcuguacaaacagcccggagugccggucagauggaagcgcugaggacuaguuauaagacugacuagcccgaugggccucccaacgggcccuccuccccuccuugcaccgagauuaaucaaaggcucuuuucagagccaccaaaaaaaaaaaaaaaaaaaaaaaaaaaaaaaaaaaaaaaaaaaaaaaaaaaaaaaaaaaaaaaaagaauu

SEQ ID NO: 26060 - RNA, 1655 nt, Artificial Sequence; identical to SEQ ID NO: 26054
  mRNA product Design i-3 (hSL-A64-N5) comprising derived and/or modified sequence from LASV(Pinneo-NIG-1969;Clade I)__AIT17836__GPCmut3 (opt5)

SEQ ID NO: 26061 - RNA, 1655 nt, Artificial Sequence
  mRNA product Design i-3 (hSL-A64-N5) comprising derived and/or modified sequence from LASV(ISTH0009-NIG-2011;Clade II)__AIT17404__GPCmut3 (opt5)
aggagaaagcuuaccaugggccagaucauuaccuucuuucaagaggugccccacgucaucgaagagguuaugaacauugugcugaucgcccucagccugcuugcuauucugaaggggaucuacaauguggccacaugcggacucuucggccuggucuccuuucuucugcucugugggagaucuugcagcacgaccuauaaaggaguguacgaacugcagacacuggagcucgacauggcgucccugaacaugaccaugccucuuucuuguacaaagaauaacagccaucacuauaucaugguuggcaaugaaaccgggcuggagcucacacugaccaacacguccauuaucaaucauaaauucugcaaccuuucugaugcucacaagaaaaaucuguacgaccaugcccucaugagcauuaucuccaccuuucaccugagcauuccgaacuucaaucaguaugaggccaugucuugugauuuuaacggaggcaagaucuccgugcaguacaaucugagccacgcuuaugccgucgacgcugccaaccauugcggcacaauugcgaauggggugcuccaaaccuucaugcggauggccuggggaggcucuuacaucgcucuggauuccgggaagggaagcugggacuguaucaugacaucuuaccaguaucuuauuauccagaacaccacgugggaagaucacugccaguuuucccgccccagcccuauuggcuaccuggggcuccugucccaaagaacacgggacaucuauauuucucgcagacggcgcggaaccuucacauggacccuuagcgauuccgagggcaacgaaacccccggcggguacugucugacaagauggaugcucaucgaggccgagcugaaaugcuuuggaaauacggcuguugccaaguguaacgaaaaacaugacgaggaguucugcgauaugcugcggcucuuugacuucaauaagcaggcgauccgcagacugaaaaccccugcccagaugagcauucagcuuaucaacaaggcugugaaugcccugauuaacgaucaacucaucaugaagaaucaucugcgggacauuaugggcauccccuauugcaacuacucuaaauauuguuaccuuaaucacacagucaccgggaagacaucccugccucgcugcugucucgugagcaacggaucuuaccugaaugaaacccacuucagcgacgauaucgaacagcaggcugacaacaugauuacggagcugcuccaaaaagaguauauggauagacagggcaagacaccgcuggggcuuguggaccuguuugucuucuccaccucuuuuuaccucaucagcauuuuccugcaccugaucaaaauucccacccaucggcacaucacaggaaagccuugccccaaaccucaucgccuuaaucacaugggcauuuguuccugcggccucuauaagcaccccgggguuccggugaaguggaaaagaugaggacuaguuauaagacugacuagcccgaugggccucccaacgggcccuccuccccuccuugcaccgagauuaaucaaaggcucuuuucagagccaccaaaaaaaaaaaaaaaaaaaaaaaaaaaaaaaaaaaaaaaaaaaaaaaaaaaaaaaaaaaaaaaaagaauu

SEQ ID NO: 26062 - RNA, 1655 nt, Artificial Sequence
  mRNA product Design i-3 (hSL-A64-N5) comprising derived and/or modified sequence from LASV(ISTH2010-NIG-2012;Clade II)__AIT17482__GPCmut3 (opt5)
aggagaaagcuuaccaugggccagaucauuaccuucuuucaagaggugccccacgucaucgaagagguuaugaacauugugcugaucgcccucagccugcuugcuauucugaaggggaucuacaauguggccacaugcggacucuucggccuggucuccuuucuucugcucugugggagaucuugcagcacgaccuauaaaggaguguacgaacugcagacacuggagcucgacauggcgucccugaacaugaccaugccucuuucuuguacaaagaauaacagccaucacuauaucaugguuggcaaugaaaccgggcuggagcucacacugaccaacacguccauuaucaaucauaaauucugcaaccuuucugaugcucacaagaaaaaucuguacgaccaugcccucaugagcauuaucuccaccuuucaccugagcauuccgaacuucaaucaguaugaggccaugucuugugauuuuaacggaggcaagaucuccgugcaguacaaucugagccacgcuuaugccgucgacgcugccaaccauugcggcacaauugcgaauggggugcuccaaaccuucaugcggauggccuggggaggcucuuacaucgcucuggauuccgggaagggaagcugggacuguaucaugacaucuuaccaguaucuuauuauccagaacauuaccugggaagaucacugccaguuuucccgccccagcccuaucggcuaccuggggcuccugucccaaagaacgcgggacauuuauaucucucgcagacggcgcggaacauucaccuggacacuuagcgauuccgagggcaacgaaacccccggcggguacugucugaccagauggaugcucaucgaggccgagcugaaaugcuuuggaaauacagcuguugccaaguguaacgaaaaacaugacgaggaguucugcgauaugcugcggcucuuugacuucaauaagcaggcgauucgcagacugaaaacgccugcccagaugagcauccagcuuauuaacaaggcugugaaugcccugaucaacgaucaacucauuaugaagaaucaucugcgggacaucaugggcauccccuauugcaacuacucuaaauauuguuaccuuaaucacaccgucacagggaagaccucccugccucgcugcugucucgugagcaacggaucuuaccugaaugaaacacacuucagcgacgauauugaacagcaggcugacaacaugaucaccgagcugcuccaaaaagaguauauugauagacagggcaagacgccgcuggggcuuguggaccuguuugucuucuccacaucuuuuuaccucaucagcauuuuccugcaccugguuaaaauccccacccaucggcacguggugggaaagccuugccccaaaccucaucgccuuaaucacaugggcauuuguuccugcggccucuauaagcaccccggggucccggugaaguggaaaagaugaggacuaguuauaagacugacuagcccgaugggccucccaacgggcccuccuccccuccuugcaccgagauuaaucaaaggcucuuuucagagccaccaaaaaaaaaaaaaaaaaaaaaaaaaaaaaaaaaaaaaaaaaaaaaaaaaaaaaaaaaaaaaaaaagaauu

SEQ ID NO: 26063 - RNA, 1655 nt, Artificial Sequence
  mRNA product Design i-3 (hSL-A64-N5) comprising derived and/or modified sequence from LASV(Lassa virus/H.sapiens-wt/NGA/2015/ISTH_0543;Clade II)__AVO03639__GPCmut3 (opt5)
aggagaaagcuuaccaugggccagaucauuaccuucuuucaagaggugccccacgucaucgaagagguuaugaacauugugcugaucgcccucagccugcuugcuauucugaaggggaucuacaauguggccacaugcggacucuucggccuggucuccuuucuucugcucugugggagaucuugcagcacgaccuauaaaggaguguacgaacugcagacacuggagcucgacauggcgaaccugaauaugaccaugccucuuuccuguacaaagaacaauucucaucacuauaucaugguuggcaacgaaaccgggcuggagcucacacugaccaauacgagcauuaucaaccauaaauucugcaaucuuuccgaugcucacaagaaaaaccuguacgaccaugcccucaugucuauuaucagcaccuuucaccuguccauuccgaauuucaaccaguaugaggccaugagcugugauuuuaauggaggcaagaucucugugcaguacaaccugucccacacauaugcugucgacgccgcuaaucauugcggcaccauugccaacggggugcuccaaacauucaugcggauggcguggggaggcagcuacaucgcccuggauucugggaagggauccugggacuguaucaugaccagcuaccaguaucuuguuauucagaacacgacaugggaagaucacugccaguuuucucgccccuccccuaucggcuaccuggggcuccugagccaaagaacccgggacauuuauaucucccgcagacggcgcggaacauucaccuggacccuuucugauagcgagggcaaugaaacacccggcggguacugucugacgagauggaugcucauugaggcugagcugaaaugcuuuggaaacaccgccguggcuaaguguaaugaaaaacaugacgaggaguucugcgauaugcugcggcucuuugacuucaacaagcaggccauccgcagacugaaaaccccugcgcagauguccauccagcuuauuaauaaggccgucaacgcucugaucaaugaucaacucauuaugaagaaccaucugcgggacaucaugggcauucccuauugcaauuacagcaaauauuguuaccuuaaccacacagugacagggaagaccucucugccucgcugcugucucguguccaauggaagcuaccugaacgaaacgcacuucucugacgauaucgaacagcaggccgacaauaugaucacagagcugcuccaaaaagaguauauugauagacagggcaagaccccgcuggggcuugucgaccuguuuguuuucagcaccuccuuuuaccucaucucuauuuuccugcaccuggugaaaauccccacacaucggcacauuaccggaaagccuugccccaaaccucaucgccuuaaccacaugggcaucuguagcugcggccucuauaagcaccccggggugccggucaaguggaaaagaugaggacuaguuauaagacugacuagcccgaugggccucccaacgggcccuccuccccuccuugcaccgagauuaaucaaaggcucuuuucagagccaccaaaaaaaaaaaaaaaaaaaaaaaaaaaaaaaaaaaaaaaaaaaaaaaaaaaaaaaaaaaaaaaaagaauu

SEQ ID NO: 26064 - RNA, 1655 nt, Artificial Sequence
  mRNA product Design i-3 (hSL-A64-N5) comprising derived and/or modified sequence from LASV(Lassa virus/H.sapiens-wt/NGA/2016/ISTH_0009;Clade II)__AVO03571__GPCmut3 (opt5)
aggagaaagcuuaccaugggccagaucauuaccuucuuucaagaggugccccacgucaucgaagagguuaugaacauugugcugaucgcccucagccugcuugcuauucugaaggggaucuacaauguggccacaugcggacuccugggccuugucuccuuccugcuccugugugggagaucuugcagcacgaccuauaaaggaguguacgaacugcagacacucgagcuggacauggcgucccuuaacaugaccaugccucugucuuguacaaagaauaacagccaucacuauaucaugguuggcaaugaaaccgggcucgagcugacacuuaccaacacguccauuaucaaucauaaauuuugcaaccugucugaugcucacaagaaaaaucucuacgaccaugcccugaugagcauuaucuccaccuuccaccugagcauuccgaacuuuaaucaguaugaggccaugucuugugauuucaacggaggccggaucuccgugcaguacaaucucagccacucuuaugcugucgacgccgcuaaccauugcggcacaauugccaauggggugcugcaaaccuuuaugcgcauggcguggggaggcuccuacaucgcccuugauagcgggaagggaucuugggacuguaucaugacauccuaccaguaucugauuauccagaacaccacgugggaagaucacugccaguucagcagacccuccccuauuggcuaccucgggcugcuuucucaacggacacgcgacaucuauauuagcagacggcgcagaggaaccuuuacauggacccuguccgauagcgagggcaacgaaacccccggcggguacugucucacacgguggaugcugaucgaggcugagcugaagugcuucggaaauacggccguugcuaaauguaacgaaaagcaugacgaggaauuuugcgauaugcuccgccuguucgacuuuaauaaacaggccaucagacggcuuaagaccccugcgcagaugucuauucagcugaucaacaaagccgugaaugcucucauuaacgaucaacugaucaugaagaaucaccuucgcgacauuaugggcauccccuauugcaacuacuccaaguauuguuaccugaaucacacagucaccgggaaaacaagccucccuagaugcugucuggugucuaacggaagcuaccugaaugagacccauuucuccgacgauaucgaacagcaggccgacaacaugauuacggagcuccugcaaaaggaguauaucgaucggcagggcaaaacaccgcuugggcugguggaccucuucgucuuuucuaccagcuucuaccugauuuccaucuuucugcaccuuguuaagauucccacccaucgccacaucacaggaaaaccuugccccaagccucauagacucaaucacaugggcauuuguagcugcggccuguauaaccaccccggggugccggugaaauggaagcggugaggacuaguuauaagacugacuagcccgaugggccucccaacgggcccuccuccccuccuugcaccgagauuaaucaaaggcucuuuucagagccaccaaaaaaaaaaaaaaaaaaaaaaaaaaaaaaaaaaaaaaaaaaaaaaaaaaaaaaaaaaaaaaaaagaauu

SEQ ID NO: 26065 - RNA, 1655 nt, Artificial Sequence
  mRNA product Design i-3 (hSL-A64-N5) comprising derived and/or modified sequence from LASV(Lassa virus/H.sapiens-wt/NGA/2016/ISTH_0017;Clade II)__AVO03567__GPCmut3 (opt5)
aggagaaagcuuaccaugggccagaucauuaccuucuuucaagaggugccccacgucaucgaagagguuaugaacauugugcugaucgcccucagccugcuugcuauucugaaggggaucuacaauguggccacaugcggacucuucggccuggucuccuuucuucugcucugugggagaucuugcagcacgaccuauaaaggaguguacgaacugcagacacuggagcucgacauggcgucccugaacaugaccaugccucuuucuuguacaaagaauaacagccaucacuauaucaugguuggcaaugaaaccgggcuggagcucacacugaccaacacguccauuaucaaucauaaauucugcaaccuuucugaugcucacaagaaaaaucuguacgaccaugcccucaugagcauuaucuccaccuuucaccugagcauuccgaacuucaaucaguaugaggccaugucuugugauuuuaacggaggcaagaucuccgugcaguacaaucugagccacacauaugcuauugacgccgcuaaccauugcggcaccaucgccaaugggguccuccaaacauucaugcggauggcguggggaggcucuuacaucgcccuggauuccgggaagggaagcugggacuguauuaugaccucuuaccaguaucuuaucauucagaacacgacaugggaagaucacugccaguuuucccgccccagcccuaucggcuaccuggggcuccugucccaaagaacccgggacauuuauaucucucgcagacggcgcggaacauucaccuggacccuuagcgauuccgagggcaacgaaacacccggcggguacugucugacgagauggaugcucaucgaggcugagcugaaaugcuuuggaaauaccgccguggcuaaguguaacgaaaaacaugacgaggaguucugcgauaugcugcggcucuuugacuucaauaagcaggccauucgcagacugaaaaccccugcgcagaugagcauccagcuuauuaacaaggccguuaaugcucugaucaacgaucaacucauuaugaagaaucaucugcgggacaucaugggcauccccuauugcaacuacucuaaauauuguuaccuuaaucacacagugacagggaagaccucccugccucgcugcugucucgucagcaacggaucuuaccugaaugaaacgcacuucagcgacgauauugaacagcaggccgacaacaugaucacagagcugcuccaaaaagaguauauggauagacagggcaagaccccgcuggggcuuguggaccuguuuguguucuccaccucuuuuuaccucauuagcaucuuccugcaccugguccggauucccacacaucgccacguuaucggaaaaccuugccccaagccucauagacuuaaucacaugggcauuuguuccugcggccucuauaaacaccccggggugccggugaaguggaagcggugaggacuaguuauaagacugacuagcccgaugggccucccaacgggcccuccuccccuccuugcaccgagauuaaucaaaggcucuuuucagagccaccaaaaaaaaaaaaaaaaaaaaaaaaaaaaaaaaaaaaaaaaaaaaaaaaaaaaaaaaaaaaaaaaagaauu

SEQ ID NO: 26066 - RNA, 1655 nt, Artificial Sequence
  mRNA product Design i-3 (hSL-A64-N5) comprising derived and/or modified sequence from LASV(Lassa virus/H.sapiens-wt/NGA/2018/ISTH_0959;Clade II)__AVV65099__GPCmut3 (opt5)
aggagaaagcuuaccaugggccagaucauuaccuucuuucaagaggugccccacgucaucgaagagguuaugaacauugugcugaucgcccucagccugcuugcuauucugaaggggaucuacaauguggucacaugcggacucuucggccugguguccuuucuucugcucugugggagaucuugcagcacgaccuauaaaggaguuuacgaacugcagacacuggagcucgacauggccucccugaacaugaccaugccucuuucuuguacaaagaauaacagccaucacuauaucauggugggcaaugaaaccgggcuggagcucacacugaccaacacguccauuaucaaucauaaauucugcaaccuuucugaugcgcacaagaaaaaucuguacgaccaugcucucaugagcauuaucuccaccuuucaccugagcauuccgaacuucaaucaguaugaggccaugucuugugauuuuaacggaggcaagaucuccguccaguacaaucugagccacgccuaugcuauugacgccgcuaaccauugcggcacaaucgccaauggggugcuccaaaccuucaugcggauggcguggggaggcucuuacaucgcccuggauuccgggaagggaagcugggacuguauuaugacaucuuaccaguaucuuaucauucagaacaccacgugggaagaucacugccaguuuucccgccccagcccuaucggcuaccuggggcuccugucccaaagaacacgggacauuuauaucucucgcagacggcgcggaaccuucacauggacccuuagcgauuccgagggcaacgaaacccccggcggguacugucugacaagauggaugcucaucgaggcugagcugaaaugcuuuggaaauacggccguugcuaaguguaacgaaaaacaugacgaggaguucugcgauaugcugcggcucuuugacuucaauaagcaggccauucgcagacugaaaaccccugcgcagaugagcauccagcuuauuaacaaggccgugaaugcucugaucaacgaucaacucauuaugaagaaucaucugcgggacaucaugggcauccccuauugcaacuacucuaaauauuguuaccuuaaucacacagucaccgggaagacaucccugccucgcugcugucucgugagcaacggaucuuaccugaaugaaacccacuucagcgacgauauugaacagcaggccgacaacaugaucacggagcugcuccaaaaagaguauauugauagacagggcaagacaccgcuggggcuuguggaccuguuugucuucuccaccucuuuuuaccucaucagcauuuuccugcaccugguuaaaauccccacccaucggcacgugauuggaaagccuugccccaaaccucaucgccuuaaucacaugggcaucuguuccugcggccucuauaagcaccccggggugccggucaaguggaaaagaugaggacuaguuauaagacugacuagcccgaugggccucccaacgggcccuccuccccuccuugcaccgagauuaaucaaaggcucuuuucagagccaccaaaaaaaaaaaaaaaaaaaaaaaaaaaaaaaaaaaaaaaaaaaaaaaaaaaaaaaaaaaaaaaaagaauu

SEQ ID NO: 26067 - RNA, 1655 nt, Artificial Sequence
  mRNA product Design i-3 (hSL-A64-N5) comprising derived and/or modified sequence from LASV(LASV003-NIG-2008;Clade II)__AIT17580__GPCmut3 (opt5)
aggagaaagcuuaccaugggccagaucauuaccuucuuucaagaggugccccacgucaucgaagagguuaugaacauugugcugaucgcccucagccugcuugcuauucugaaggggaucuacaauguggccacaugcggacucuucggccuggucuccuuucuucugcucugugggagaucuugcagcacgaccuauaaaggaguguacgaacugcagacacuggagcucgacauggcgucccugaacaugaccaugccucuuucuuguacaaagaauaacagccaucacuauaucaugguuggcaaugaaaccgggcuggagcucacacugaccaacacguccauuaucaaucauaaauucugcaaccuuucugaugcucacaagaaaaaucuguacgaccaugcccucaugagcauuaucuccaccuuucaccugagcauuccgaacuucaaucaguaugaggccaugucuugugauuuuaacggaggcaagaucuccgugcaguacaaucugagccacacauaugcugucgacgccgcuaaccauugcggcaccauugccaauggggugcuccaaacauucaugcggauggcguggggaggcucuuacaucgcccuggauuccgggaagggaagcugggacuguaucaugaccucuuaccaguaucuuauuauccagaacacgacaugggaagaucacugccaguuuucccgccccagcccuauuggcuaccuggggcuccugucccaaagaacccgggacaucuauauuucucgcagacggcgcggaacauucaccuggacccuuagcgauuccgagagcaacgaaacacccggcggcuacugucugacgagauggaugcucaucgaggcugagcugaaaugcuuugggaauaccgccguugcuaaguguaacgaaaaacaugacgaggaguucugcgauaugcugcggcucuuugacuucaauaagcaggccauccgcagacugaaagcgccugcccagaugucuauucagcuuaucaacaaggcugugaaugcccugauuaacgaucaacucaucaugaagaaucaucugcgggacauuaugggaauccccuauugcaacuacuccaaauauuguuaccuuaaucacacagucaccggccgcacaagccugccuagaugcugucucgugucuaacgggagcuaccugaaugaaacccacuucuccgacgauaucgaacagcaggcugacaacaugauuacggagcugcuccaaaaggaguauauggaucggcagggaaaaacaccgcugggccuuguggaccuguuugucuucucuaccagcuuuuaccucaucuccauuuuccugcaccugguuaagauccccacccaucgccacgugauugggaaaccuugccccaagccucauagacuuaaucacaugggaaucuguagcugcggccucuauaaacaccccggcgugccggucaaguggaagcggugaggacuaguuauaagacugacuagcccgaugggccucccaacgggcccuccuccccuccuugcaccgagauuaaucaaaggcucuuuucagagccaccaaaaaaaaaaaaaaaaaaaaaaaaaaaaaaaaaaaaaaaaaaaaaaaaaaaaaaaaaaaaaaaaagaauu

SEQ ID NO: 26068 - RNA, 1655 nt, Artificial Sequence
  mRNA product Design i-3 (hSL-A64-N5) comprising derived and/or modified sequence from LASV(LASV035-NIG-2009;Clade II)__AIT17588__GPCmut3 (opt5)
aggagaaagcuuaccaugggccagaucauuaccuucuuucaagaggugccccacgucaucgaagagguuaugaacauugugcugaucgcccucagccugcuugcuauucugaaggggaucuacaauguggccacaugcggacucuucggccuggucuccuuucuucugcucugugggagaucuugcagcacgaccuauaaaggaguguacgaacugcagacacuggagcucgacauggcgucccugaacaugaccaugccucuuucuuguacaaagaauaacagccaucacuauaucaugguuggcaaugaaaccgggcuggagcucacacugaccaacacguccauuaucaaucauaaauucugcaaccuuucugaugcucacaagaaaaaucuguacgaccaugcccucaugagcauuaucuccaccuuucaccugagcauuccgaacuucaaucaguaugaggccaugucuugugauuuuaacggaggcaagaucuccgugcaguacaaucugagccacgcuuaugccgucgacgcugccaaccauugcggcacaauugcgaauggggugcuccaaaccuucaugcggauggccuggggaggcucuuacaucgcucuggauuccgggaagggaagcugggacuguaucaugacaucuuaccaguaucuuauuauccagaacaccacgugggaagaucacugccaguuuucccgccccagcccuauuggcuaccuggggcuccugucccaaagaacacgggacaucuauauuucucgcagacggcgcggaaccuucacauggacccuuagcgauuccgagggcaacgaaacccccggcggguacugucugacaagauggaugcucaucgaggccgagcugaaaugcuuuggaaauacggcuguugccaaguguaacgaaaaacaugacgaggaguucugcgauaugcugcggcucuuugacuucaauaagcaggcgauccgcagacugaaagccccugcucagaugagcauucagcuuaucaacaaggccgugaaugcucugauuaacgaucaacucaucaugaagaaucaucugcgggacauuaugggcauccccuauugcaacuacucuaaauauuguuaccuuaaucacaccgucacagggaagaccucccugccucgcugcugucucgugagcaacggaucuuaccugaaugaaacacacuucagcgacgauaucgaacagcaggccgacaacaugauuaccgagcugcuccaaaaagaguauaucgauagacagggcaagacgccgcuggggcuuguggaccuguuugucuucuccacaucuuuuuaccucauuagcaucuuccugcaccugguuaaaauucccacccaucggcacgugaucggaaagccuugccccaaaccucaucgccuuaaucacaugggcauuuguuccugcggccucuauaagcaccccggggugccggucaaguggaaaagaugaggacuaguuauaagacugacuagcccgaugggccucccaacgggcccuccuccccuccuugcaccgagauuaaucaaaggcucuuuucagagccaccaaaaaaaaaaaaaaaaaaaaaaaaaaaaaaaaaaaaaaaaaaaaaaaaaaaaaaaaaaaaaaaaagaauu

SEQ ID NO: 26069 - RNA, 1655 nt, Artificial Sequence
  mRNA product Design i-3 (hSL-A64-N5) comprising derived and/or modified sequence from LASV(LASV1000-NIG-2009;Clade II)__AIT17782__GPCmut3 (opt5)
aggagaaagcuuaccaugggccagaucauuaccuucuuucaagaggugccccacgucaucgaagagguuaugaacauugugcugaucgcccucagccugcuugcuauucugaaggggaucuacaauguggccacaugcggacucuucggccuggucuccuuucuucugcucugugggagaucuugcagcacgaccuauaaaggaguguacgaacugcagacacuggagcucgacauggcgucccugaacaugaccaugccucuuucuuguacaaagaauaacagccaucacuauaucaugguuggcaaugaaaccgggcuggagcucacacugaccaacacguccauuaucaaucauaaauucugcaaccuuucugaugcucacaagaaaaaucuguacgaccaugcccucaugagcauuaucuccaccuuucaccugagcauuccgaacuucaaucaguaugaggccaugucuugugauuuuaacggaggcaagaucuccgugcaguacaaucugagccacacauaugcugucgacgccgcuaaccauugcggcaccauugccaauggggugcuccaaacauucaugcggauggcguggggaggcucuuacaucgcccuggauuccgggaagggaagcugggacuguaucaugaccucuuaccaguaucuuauuauccagaacacgacaugggaagaucacugccaguuuucccgccccagcccuauuggcuaccuggggcuccugucccaaagaacccgggacaucuauauuucucgcagacggcgcggaacauucaccuggacccuuagcgauuccgagggcaacgaaacacccggcggguacugucugacgagauggaugcucaucgaggcugagcugaaaugcuuuggaaauaccgccguugcuaaguguaacgaaaaacaugacgaggaguucugcgauaugcugcggcucuuugacuucaauaagcaggccaucaaacgccugaagaccccugcgcagaugagcauucagcuuaucaacaaggccgugaaugcucugauuaacgaucaacucaucaugaaaaaucaccugagagacauuaugggcauccccuauugcaacuacucuaaguauuguuaccuuaaucacacagucacagggaaaaccucccugccucggugcugucucgugagcaacggaucuuaccugaaugaaacgcauuucagcgacgauaucgaacagcaggccgacaacaugauuacagagcugcuccaaaaggaguauaucgaucgccagggcaaaaccccgcuggggcuuguggaccuguuugucuucuccaccucuuuuuaccucauuagcaucuuccugcaccugguuaagauucccacacauagacacguggugggaaaaccuugccccaagccucaucggcuuaaucacaugggcaucuguuccugcggccucuauaagcaccccggggucccggugaaauggaagcgcugaggacuaguuauaagacugacuagcccgaugggccucccaacgggcccuccuccccuccuugcaccgagauuaaucaaaggcucuuuucagagccaccaaaaaaaaaaaaaaaaaaaaaaaaaaaaaaaaaaaaaaaaaaaaaaaaaaaaaaaaaaaaaaaaagaauu

SEQ ID NO: 26070 - RNA, 1655 nt, Artificial Sequence
  mRNA product Design i-3 (hSL-A64-N5) comprising derived and/or modified sequence from LASV(LASV221-NIG-2010;Clade II)__AIT17624__GPCmut3 (opt5)
aggagaaagcuuaccaugggccagaucauuaccuucuuucaagaggugccccacgucaucgaagagguuaugaacauugugcugaucgcccucagccugcuugcuauucugaaggggaucuacaauguggccacaugcggacucuucggccuggucuccuuucuucugcucugugggagaucuugcagcacgaccuauaaaggaguguacgaacugcagacacuggagcucgacauggcgucccugaacaugaccaugccucuuucuuguacaaagaauaacagccaucacuauaucaugguuggcaaugaaaccgggcuggagcucacacugaccaacacguccauuaucaaucauaaauucugcaaccuuucugaugcucacaagaaaaaucuguacgaccaugcccucaugagcauuaucuccaccuuucaccugagcauuccgaacuucaaucaguaugaggccaugucuugugauuuuaacggaggcaagaucuccgugcaguacaaucugagccacacauaugcuauugacgccgcuaaccauugcggcaccaucgccaaugggguccuccaaacauucaugcggauggcguggggaggcucuuacaucgcccuggauuccgggaagggaagcugggacuguauuaugaccucuuaccaguaucuuaucauucagaacacgacaugggaagaucacugccaguuuucccgccccagcccuaucggcuaccuggggcuccugucccaaagaacccgggacauuuauaucucucgcagacggcgcggaacauucaccuggacccuuagcgauuccgagggcaacgaaacacccggcggguacugucugacgagauggaugcucaucgaggcugagcugaaaugcuuuggaaauaccgccguggcuaaguguaacgaaaaacaugacgaggaguucugcgauaugcugcggcucuuugacuucaauaagcaggccauucgcagacugaaaaccccugcgcagaugagcauccagcuuauuaacaaggccguuaaugcucugaucaacgaucaacucauuaugaagaaucaucugcgggacaucaugggcauccccuauugcaacuacucuaaauauuguuaccuuaaucacacagugacagggaagaccucccugccucgcugcugucucgucagcaacggaucuuaccugaaugaaacgcacuucagcgacgauauugaacagcaggccgacaacaugaucacagagaugcugcaaaaagaguauauggauagacagggcaagaccccgcucgggcugguggaccuuuuuguguucuccaccucuuuuuaccugauuagcaucuuccuccaccuggucaaaauucccacacaucggcacguuaucggaaagccuugccccaaaccucaucgccugaaucacaugggcauuuguuccugcggccuuuauaagcaccccggggugccggugaaguggaaaagaugaggacuaguuauaagacugacuagcccgaugggccucccaacgggcccuccuccccuccuugcaccgagauuaaucaaaggcucuuuucagagccaccaaaaaaaaaaaaaaaaaaaaaaaaaaaaaaaaaaaaaaaaaaaaaaaaaaaaaaaaaaaaaaaaagaauu

SEQ ID NO: 26071 - RNA, 1655 nt, Artificial Sequence
  mRNA product Design i-3 (hSL-A64-N5) comprising derived and/or modified sequence from LASV(LASV237-NIG-2010;Clade II)__AIT17638__GPCmut3 (opt5)
aggagaaagcuuaccaugggccagaucauuaccuucuuucaagaggugccccacgucaucgaagagguuaugaacauugugcugaucgcccucagccugcuugcuauucugaaggggaucuacaauguggccacaugcggacucuucggccuggucuccuuucuucugcucugugggagaucuugcagcacgaccuauaaaggaguguacgaacugcagacacuggagcucgacauggcgucccugaacaugaccaugccucuuucuuguacaaagaauaacagccaucacuauaucaugguuggcaaugaaaccgggcuggagcucacacugaccaacacguccauuaucaaucauaaauucugcaaccuuucugaugcucacaagaaagaccuguacgaucaugcccucaugagcauuaucuccaccuuucaccugagcauuccgaauuucaaccaguaugaggccaugucuugugacuuuaauggaggcaagaucuccgugcaguacaaccugagccacacauaugcugucgaugccgcuaaucauugcggcaccauugccaacggggugcuccaaacauucaugcggauggcguggggaggcucuuacaucgcccuggacuccgggaagggaagcugggauuguaucaugaccucuuaccaguaucuuauuauccagaauacgacaugggaagaccacugccaguuuucccgccccagcccuauuggcuaccuggggcuccugucccaaagaacccgggauaucuauauuucucgcagacggcgcggaacauucaccuggacccuuagcgacuccgagggcaacgaaacacccggcggguacugucugacgagauggaugcucaucgaggcugagcugaaaugcuuuggaaacaccgccguugcuaaguguaaugaaaaacaugaugaggaguucugcgacaugcugcggcucuuugauuucaacaagcaggccauccgcagacugaaaaccccugcgcagaugagcauucagcuuaucaauaaggccgugaacgcucugauuaaugaccaacucaucaugaagaaccaucugcgggacauuaugggcauccccuauugcaauuacucuaaauauuguuaccuuaaccacacagucacagggaagaccucccugccucgcugcugucucgugagcaauggaucuuaccugaacgaaacgcacuucagcgaugacaucgaacagcaggccgauaauaugauuacagagcugcuccaaaaagaguauauggacagacagggcaagaccccgcuggggcuuguggaucuguuugucuucuccaccucuuuuuaccucaucagcauuuuccugcaccugaucaaaauucccacacaucggcacaucaccggaaagccuugccccaaaccucaucgccuuaaccacaugggcauuuguuccugcggccucuauaagcaccccgggguuccggugaaguggaaaagaugaggacuaguuauaagacugacuagcccgaugggccucccaacgggcccuccuccccuccuugcaccgagauuaaucaaaggcucuuuucagagccaccaaaaaaaaaaaaaaaaaaaaaaaaaaaaaaaaaaaaaaaaaaaaaaaaaaaaaaaaaaaaaaaaagaauu

SEQ ID NO: 26072 - RNA, 1655 nt, Artificial Sequence
  mRNA product Design i-3 (hSL-A64-N5) comprising derived and/or modified sequence from LASV(LASV253-NIG-2011;Clade II)__AIT17670__GPCmut3 (opt5)
aggagaaagcuuaccaugggccagaucauuaccuucuuucaagaggugccccacgucaucgaagagguuaugaacauugugcugaucgcccucagccugcuugcuauucugaaggggaucuacaauguggccacaugcggacucuucggccuggucuccuuucuucugcucugugggagaucuugcagcacgaccuauaaaggaguguacgaacugcagacacuggagcucgacauggcgucccugaacaugaccaugccucuuucuuguacaaagaauaacagccaucacuauaucaugguuggcaaugaaaccgggcuggagcucacacugaccaacacguccauuaucaaucauaaauucugcaaccuuucugaugcucacaagaaaaaucuguacgaccaugcccucaugagcauuaucuccaccuuucaccugagcauuccgaacuucaaucaguaugaggccaugucuugugauuuuaacggaggcaagaucuccgugcaguacaaucugagccacacauaugcugucgacgccgcuaaccauugcggcaccauugccaauggggugcuccaaacauucaugcggauggcguggggaggcucuuacaucgcccuggauuccgggaagggaagcugggacuguaucaugaccucuuaccaguaucuuauuauccagaacacgacaugggaagaucacugccaguuuucccgccccagcccuauuggcuaccuggggcuccugucccaaagaacccgggacaucuauauuucucgcagacggcgcggaacauucaccuggacccuuagcgauuccgagggcaacgaaacacccggcggguacugucugacgagauggaugcucaucgaggcugagcugaaaugcuuuggaaauaccgccguugcuaaguguaacgaaaaacaugacgaggaguucugcgauaugcugcggcucuuugacuucaauaagcaggccauccgcagacugaaagcgccugcccagaugagcauucagcuuaucaacaaggcugugaaugcccugauuaacgaucaacucaucaugaagaaucaucugcgggacauuaugggcauccccuauugcaacuacucuaaauauuguuaccuuaaucacacagucaccgggcgcacaucccugccuagaugcugucucgugagcaacggaucuuaccugaaugaaacccacuucagcgacgauaucgaacagcaggcugacaacaugauuacggagcugcuccaaaaggaguauaucgaucggcagggcaaaacaccgcuggggcuuguggaccuguuugucuucuccaccucuuuuuaccucauuagcaucuuccugcaccugguuaagauucccacccaucgccacaucauuggaaaaccuugccccaagccucauagacuuaaucacaugggcaucuguuccugcggccucuauaaacaccccggggugccggugaaguggaagcggugaggacuaguuauaagacugacuagcccgaugggccucccaacgggcccuccuccccuccuugcaccgagauuaaucaaaggcucuuuucagagccaccaaaaaaaaaaaaaaaaaaaaaaaaaaaaaaaaaaaaaaaaaaaaaaaaaaaaaaaaaaaaaaaaagaauu

SEQ ID NO: 26073 - RNA, 1655 nt, Artificial Sequence
  mRNA product Design i-3 (hSL-A64-N5) comprising derived and/or modified sequence from LASV(LASV254-NIG-2011;Clade II)__AIT17674__GPCmut3 (opt5)
aggagaaagcuuaccaugggccagaucauuaccuucuuucaagaggugccccacgucaucgaagagguuaugaacauugugcugaucgcccucagccugcuugcuauucugaaggggaucuacaauguggccacaugcggacucuucggccuggucuccuuucuucugcucugugggagaucuugcagcacgaccuauaaaggaguguacgaacugcagacacuggagcucgacaugaccaaccugaauaugacaaugccucuuuccuguaccaagaacaauucucaucacuauaucaugguuggcaacgaaacagggcuggagcucacccugacgaauaccagcauuaucaaccauaaauucugcaaucuuuccgaugcgcacaagaaaaaccuguacaaucaugcucucaugucuauuaucagcacauuucaccuguccauuccgaacuucaaucaguaugaggccaugagcugugacuuuaacggaggcaagaucucugugcaguacaaucugucccacagcuaugccgucgaugcugccaaccauugcggcaccauugcuaacggggugcuccaaacauucaugcggauggccuggggaggcucuuacaucgcgcuggacuccgggaagggaaauugggauuguaucaugaccagcuaccaguaucuuauuauccagaacacgacaugggaagaccacugccaguuuucucgccccuccccuauuggcuaccuggggcuccugagccaaagaacccgggauaucuauauuucccgcagacggcgcggaacauucaccuggacccuuucugacagcgagggcaaugaaacacccggcggguacugucugacgagauggaugcucaucgaggccgagcugaaaugcuuuggaaacaccgcuguugccaaguguaaugaaaaacaugaugaggaguucugcgacaugcugcggcucuuugauuucaacaagcaggcuauccgcagacugaaaaccccugcccaggcgaauauucagcuuaucaacaaggccgugaaugcucugauuaacgaccaacucaucaugaagaaucaucugcgggauauuaugggcauccccuauugcaacuacuccaaauauuguuaccuuaaucacacagucacagggaagaccagccugccucgcugcugucucgugucuaacggauccuaccugaaugaaacgcacuucagcgacgacaucgaacagcaggccgauaacaugauuacagagcugcuccaaaaagaguauauggacagacagggcaagaccccgcuggggcuuguggaucuguuugucuucucuaccagcuuuuaccucaucuccauuuuccugcaccugguuaaaauccccacacaucggcacgugauuggaaagccuugccccaaaccucaucgccuuaaccacaugggcaucuguucuugcggccucuauaagcaccccggggugccggucaaguggaaaagaugaggacuaguuauaagacugacuagcccgaugggccucccaacgggcccuccuccccuccuugcaccgagauuaaucaaaggcucuuuucagagccaccaaaaaaaaaaaaaaaaaaaaaaaaaaaaaaaaaaaaaaaaaaaaaaaaaaaaaaaaaaaaaaaaagaauu

SEQ ID NO: 26074 - RNA, 1655 nt, Artificial Sequence
  mRNA product Design i-3 (hSL-A64-N5) comprising derived and/or modified sequence from LASV(Nig08-A19;Clade III)__ADU56618__GPCmut3 (opt5)
aggagaaagcuuaccaugggccagaucgugaccuucuuucaagaggucccccacguuauugaagaggugaugaacaucgugcugauugcccucagcauccuggcuauucuuaaggggcuguacaauaucgccacaugcggacucaucggccuggucacguuccuucugcucuccgggagaucuuguagcaugaccuauaaaggaguguacgaacugcagacacuggagcucaacaugaauacccugaacaugacaaugccucuuuccugcaccaagaauaacucucaucacuauauuaugguuggcaaugaaacagggcuggagcucacccugacgaacaccagccuucugcaucacaaauuuuguaaucucuccgacgcgcauaagaaaaaccuguacgaucacacacugaugucuaucauuagcaccuuccaccucuccaucccgaauuuuaaccaguaugaggcuaugagcugcgacuucaauggaggcaagauuacagugcaguacaaccugucucauuccuaugccaucgaugccgcuaaucacuguggcaccgucgccaacggggugcuucaaacguuuaugcggauggcuuggggaggcagcuacauugcccuggacucugggcgcggaaagugggauugcaucaugacauccuaccaguaucucaucauucagaacaccacaugggaagaccauugucaguucagcagacccucuccuaucggcuaccuggggcuucugucccaacggacccgcgauauuuauaucagcagacggcgcagaggaaccuuuacauggacgcucuccgacucugagggcaaugaaacccccggcggguacugccugacacgguggaugcugauugaggcggagcucaaauguuucggaaacaccgccguugcuaagugcaaugaaaaacacgaugaggaauuuugugacaugcugcgccuuuucgauuuuaacaagcaggccaucagacggcugaaagcuccugcccagaugagcauccagcucauuaauaaggcggugaacgcccugaucaaugaccaacuuauuaugaagaaccaucugcgcgauaucaugggcauucccuauugcaauuacuccaaauauugcuaccucaaccacacaagcaccgggagaacgucucugccucgguguugccuggucuccaauggaagcuaccucaacgagacacacuucucugacgacaucgaacagcaggcugauaauaugaucaccgagaugcugcaaaaggaguaucuugaccgccagggcaaaaccccgcuggggcucguggaucuguucguguuuagcacauccuucuaccugauuucuaucuuucuucaucucgucaagauucccacccacagacauaucguuggaaaaccuugucccaagccucaccggcugaaccacaugggcauuugcagcuguggccuguauaaacagcccggggugccggugagauggaagcgcugaggacuaguuauaagacugacuagcccgaugggccucccaacgggcccuccuccccuccuugcaccgagauuaaucaaaggcucuuuucagagccaccaaaaaaaaaaaaaaaaaaaaaaaaaaaaaaaaaaaaaaaaaaaaaaaaaaaaaaaaaaaaaaaaagaauu

SEQ ID NO: 26075 - RNA, 1658 nt, Artificial Sequence
  mRNA product Design i-3 (hSL-A64-N5) comprising derived and/or modified sequence from LASV(G1180-SLE-2010;Clade IV)__AIT17168__GPCmut3 (opt5)
aggagaaagcuuaccaugggccagaucgugaccuucuuucaagaggucccccacguuauugaagaggugaugaacaucgugcugauugcccucagcauccuggcuguccuuaaggggcuguacaauuucgccacaugcggacucgugggccugcuuacguuucugcuccugugugggagauccugcaccgcgucucgguauaaaggaguuuacgaacugcagacacucgagcugaacauggaaacccuuaauaugacaaugccucugagcuguaccaagaacaauucccaucacuauauuauggugggcaacgagacagggcucgagcugacccuuacgaauaccucuaucaucaaccauaaauucugcaaucugagcgacgcucacaagaaaaaccucuacgaucaugcccugauguccauuaucucuacauuucaccugagcauuccgaauuucaaccaguaugaagccauguccugugacuuuaauggaggcaagaucagcguccaguacaaccucucucacuccuaugcuggcgaugccgcuaaucauugcgggaccguggccaacggaguucugcaaacauucaugcgcauggcguggggcgggagcuacauugcccuugacucuggacacggcuccugggauuguaucaugaccagcuaccaguaucugauuauccagaacacgacaugggaggaccauugccaguuuucuagacccuccccuaucggguaccucggacugcuuagccaacggacccgcgauauuuauaucuccagacggcgcagaggcacauucaccuggacccugucugacagcgaaggcaaggauacacccgggggauacugucucacgcgguggaugcugauugaggcugagcugaaaugcuuuggcaauaccgccguggcuaaguguaacgaaaaacacgacgaggaguucugcgauaugcuccgccuguuugacuucaauaagcaggccauccagagacuuaaagcgccugcccagauguccauucaacugaucaacaaggcugucaaugcccucaucaacgaucagcugauuaugaagaaucaccuucgggacaucauggggauucccuauugcaacuacagcaaauauuguuaccugaaucauacaaccacaggaaagaccucucucccuaaaugcugucugguguccaacggcagcuaccugaaugaaacgcacuucucugacgauaucgaacagcaagcugacaacaugauuacagagaugcuccagaaggaguauauggaacgccaggggaaaaccccgcugggacuuguggaucuguuugucuucagcaccuccuuuuaccucaucucuaucuuccugcaucugguuaagauucccacacacagacauaucgugggcaaaagcugcccuaagccccaccggcuuaaucacaugggcauuuguuccugcgggcucuauaagcagccuggagugcccgucaaauggaagcgcugaggacuaguuauaagacugacuagcccgaugggccucccaacgggcccuccuccccuccuugcaccgagauuaaucaaaggcucuuuucagagccaccaaaaaaaaaaaaaaaaaaaaaaaaaaaaaaaaaaaaaaaaaaaaaaaaaaaaaaaaaaaaaaaaagaauu

SEQ ID NO: 26076 - RNA, 1658 nt, Artificial Sequence
  mRNA product Design i-3 (hSL-A64-N5) comprising derived and/or modified sequence from LASV(G1442-SLE-2011;Clade IV)__AIT17180__GPCmut3 (opt5)
aggagaaagcuuaccaugggccagaucgugaccuucuuucaagaggucccccacguuauugaagaggugaugaacaucgugcugauugcccucagcauccuggcuguccuuaaggggcuguacaauguggccacaugcggacucauuggccugguuacguuccuucugcucugugggagauccugcaccacaacccuguauaaaggaguguacgaacugcagacacucgagcugaacauggaaacccuuaauaugacaaugccucugucuuguaccaagaacaauagccaucacuauauccgggucggcaacgagacggggcucgagcugacccuuacaaauaccuccaucauuaaccauaaauuuugcaaucugucugacgcgcacaagaaaaaccucuacgaucaugcucugaugagcaucauuuccacauuccaccugucuaucccgaauuuuaaccaguaugaagccaugagcugugacuucaauggaggcaagauuuccgugcaguacaaccucagccacucuuaugccggcgaugcugccaaucauugcgggaccguugcuaacggagugcugcaaacguuuaugcgcauggccuggggcggguccuacaucgcgcuugacagcggaagaggcaacugggauuguauuaugacaucuuaccaguaucugaucauccagaauaccacaugggacgaucacugccaguucucccggcccagcccuauuggguaccucggacugcuuucucaacgcaccagagacgucuauaucucccggcgcagacggggcaccuuuacauggacgcugagcgauuccgagggcaaggacacccccgggggauacugucucacacgcuggaugcugauugaagccgagcugaaaugcuucggcaacaccgcuguggccaaguguaaugagaaacaugaugaagaguuuugcgacaugcucagacuguucgauuuuaacaagcaggcuauccagcggcuuaaagccccugcgcagaugucuauucaacugaucaauaaggccgugaacgcucucaucaaugaccagcugauuaugaagaaccaccuucgcgacaucauggggauucccuauugcaauuacagcaaauauuguuaccugaacaauacagccaccggaaagacgucccucccuaaaugcugucugaucagcaacggcucuuaccugaaugaaacacacuucuccgaugacauugagcaggaagcugauaacaugaucaccgagaugcuccaaaaggaguauauggaaagacaggggaaaaccccgcugggacuugucgaccuguucguuuuuagcacaucuuucuaccucaucagcauuuuucugcaucuggugaagauccccacccaccggcauauugugggcaaauccugcccuaagccccaccgccuuaaucauaugggcaucuguucuugcgggcucuauaagcagccuggaguccccgugagauggaaacggugaggacuaguuauaagacugacuagcccgaugggccucccaacgggcccuccuccccuccuugcaccgagauuaaucaaaggcucuuuucagagccaccaaaaaaaaaaaaaaaaaaaaaaaaaaaaaaaaaaaaaaaaaaaaaaaaaaaaaaaaaaaaaaaaagaauu

SEQ ID NO: 26077 - RNA, 1658 nt, Artificial Sequence
  mRNA product Design i-3 (hSL-A64-N5) comprising derived and/or modified sequence from LASV(G3010-SLE-2013;Clade IV)__AIT17344__GPCmut3 (opt5)
aggagaaagcuuaccaugggccagaucgugaccuucuuucaagaggucccccacguuauugaagaggugaugaacaucgugcugauugcccucagcauccuggcuguccuuaaggggcuguacaauuucgccacaugcggacucgugggccugguuacguuucuucugcucugugggagauccugcaccacaucucuguauaaaggaguguacgaacugcagacccucgagcugaacauggaaacacuuaauaugaccaugccucugagcuguacaaagaacaauucccaucacuauauuauggucggcaacgagaccgggcucgagcugacgcuuaccaauacaucuaucaucaaccauaaauucugcaaucugagcgacgcgcacaagaaaaaccucuacaaucaugcucugauguccauuaucucuaccuuucaccugagcauuccgaacuucaaucaguaugaagccauguccugugauuuuaacggaggcaagaucagcgugcaguacaaucucucucacuccuaugccggcgacgcugccagccauugcgggacaguugcuaacggagugcugcaaaccuucaugcggauggccuggggcgggucuuacauugcgcuugauuccggauacggcaagugggacuguaucaugacgagcuaucaguaccugauuauccagaacacaaccugggaggaucacugccaguuuucucgccccuccccuaucggguaucucggacugcuuagccaaagaacacgggacauuuacaucucccgcagacggcgcggcaccuucaccuggacacugucugauagcgaaggcaaagacacgcccgggggauauugucucaccagauggaugcugauugaggccgagcugaagugcuuuggcaauacagcugucgccaaauguaacgaaaagcaugaugaggaguucugcgacaugcuccggcuguuugauuucaauaaacaggcuauccagcgccuuaagaccccugcccagauguccauucaacugaucaacaaggcggugaaugcccucaucaacgaccagcugauuaugaaaaaucaccuuagagauaucauggggauucccuacugcaacuauagcaaguacuguuaccugaaucacacaaccacgggaaaaacaucucucccuaagugcugucugguguccaacggcagcuaucugaaugaaacccauuucucugacgacaucgaacagcaagcugauaacaugauuaccgagaugcuccagaaagaguacauggaacggcaggggaagacaccgcugggacuugucgaccuguuuguuuucagcaccuccuuuuaucucaucucuaucuuccugcaccuggugaaaauucccacacaucgccacaucgugggcaagagcugcccuaagccccauagacuuaaucacaugggcauuuguuccugcgggcucuacaaacagccuggaguccccgugcgguggaagcgcugaggacuaguuauaagacugacuagcccgaugggccucccaacgggcccuccuccccuccuugcaccgagauuaaucaaaggcucuuuucagagccaccaaaaaaaaaaaaaaaaaaaaaaaaaaaaaaaaaaaaaaaaaaaaaaaaaaaaaaaaaaaaaaaaagaauu

SEQ ID NO: 26078 - RNA, 1658 nt, Artificial Sequence
  mRNA product Design i-3 (hSL-A64-N5) comprising derived and/or modified sequence from LASV(G502-SLE-2009;Clade IV)__AIT17126__GPCmut3 (opt5)
aggagaaagcuuaccaugggccagaucgugaccuucuuucaagaggucccccacguuauugaagaggugaugaacaucgugcugauugcccucagcauccuggcuguccuuaaggggcuguacaauuucgccacaugcggacucgugggccugcuuacguuucugcuccugugugggagauccugcaccacaggacuguauaaaggcguuuacgaacuccagacccuggagcuuaacauggaaacacugaauaugaccaugccucucucuuguacaaagaacaauagccaucacuauauuaugguggggaacgagaccggacuggagcuuacgcugaccaauacauccaucaucaaccauaaauucugcaaucucucugacgcgcacaagaaaaaccuguacgaucaugcucugaugagcauuaucuccaccuuucaccucucuauuccgaauuucaaccaguaugaagccaugagcugugacuuuaauggcggcaagaucuccguccaguacaaccugagccacucuuaugccggggaugcugccgaccauugcggaacaguggcuaauggcguucuucaaaccuucaugcggauggccuggggaggguccuacauugcgcuggauagcggccgcgggagaugggacuguaucaugacgucuuaccaguaucucauuauccagaacacaaccugggaggaucacugccaguuuucccggcccagcccuaucggauaccugggccuucugucucaacgcacaagagacauuuauaucucccggcgcagacggggcaccuucaccuggacacucagcgauuccgaagggaaggacacgcccggaggcuacugucugacccgcuggaugcugauugaggccgagcucaaaugcuuugggaacacagcuguggccaaguguaaugaaaaacaugaugaggaguucugcgacaugcugagacuuuuugauuucaacaagcaggcuauccagcggcugaaagccccugcgcagaugucuauucaacucaucaauaaggccgucaacgcucugaucaaugaccagcuugugaugaagaaccaucugcgcgacauuaugggaauccccuauugcaauuacagcagauauuguuaccucaaccacaccacaaccggccggacgucccugccuaaaugcugucuggugagcaaugggucuuaccucaacgaaacacacuucuccgaugacauugaacagcaagccgauaauaugaucaccgagaugcugcagaaggaguauauggaacgccagggaaaaaccccgcuuggccuggucgaccucuuuguuuucagcacaucuuuuuaccugauuagcaucuuccugcaccuugugaagauccccacccauagacacauugugggcaaauccugcccuaagccccaucggcucaaccacauggggaucuguucuugcggacuguauaaacagccuggcguccccgugaaguggaagagaugaggacuaguuauaagacugacuagcccgaugggccucccaacgggcccuccuccccuccuugcaccgagauuaaucaaaggcucuuuucagagccaccaaaaaaaaaaaaaaaaaaaaaaaaaaaaaaaaaaaaaaaaaaaaaaaaaaaaaaaaaaaaaaaaagaauu

SEQ ID NO: 26079 - RNA, 1658 nt, Artificial Sequence
  mRNA product Design i-3 (hSL-A64-N5) comprising derived and/or modified sequence from LASV(G733-SLE-2010;Clade IV)__AIT17154__GPCmut3 (opt5)
aggagaaagcuuaccaugggccagaucgugaccuucuuucaagaggucccccacguuauugaagaggugaugaacaucgugcugauugcccucagcauccuggcuguccuuaaggggcuguacaauuucgccacaugcggaauugugggccucguuuccuuucugcuucugugugggagaucuugcacgaccagccucuauaaaggaguguacgaacugcagacacuggagcucaacauggaaacccugaauaugacaaugccucuuuccuguaccaagaacaauucucaucacuauaucauggucggcaacgagacagggcuggagcucacccugacgaauaccagcaucauuaaccauaaauucugcaaucuuuccgacgcgcacaagaaaaaccuguacgaucaugcucucaugucuaucauuagcacauuucaccuguccaucccgaauuucaaccaguaugaagccaugagcugugacuuuaauggaggcaagauuucugugcaguacaaccugucccacagcuaugccggcgaugcugccaaucauugcgggaccaucgcuaacggaguucuccaaacauucaugcggauggccuggggcgggucuuacauugcgcuggacuccggacgcgauagaugggacuguaucaugaccagcuaccaguaucuuaucauucagaacacgacaugggaggaucacugccaguuuucucggcccuccccuaucggcuaccuggggcuccugagccaacgcaccagagacauuuauaucucccggcgcagacggggaacauucaccuggacccuuucugauagcgaaggcaaggacacacccggcggguacugucugacgcgcuggaugcucauugaggccgagcugaaaugcuuuggaaauaccgcuguggccaaguguaacgaaaaacaugaugaggaguucugcgacaugcugagacucuuugauuucaauaagcaggcuauccagcggcugaaagccccugcgcagauguccauccaacuuauuaacaaggccgucaaugcucugaucaacgaccagcucauuaugaagaaucaucugcgcgacaucaugggcauucccuauugcaacuacagcaaauauuguuaccuuaaucacacaaccacagggaagaccucucugccuaaaugcugucucguguccaacggaagcuaccugaaugaaacgcacuucucugaugacaucgaacagcaagccgauaacaugaucacagagaugcugcagaaggaguauauggaaagacagggcaaaaccccgcucgggcugguggaccuuuuugucuucagcaccuccuuuuaccugauuucuaucuuccuccaccugguuaagauucccacacaucggcacguggugggaaaaagcugcccuaagccccaucgccugaaucacaugggcaucuguuccugcggccuuuaugggcagccuggaguccccgugaaguggaaaagaugaggacuaguuauaagacugacuagcccgaugggccucccaacgggcccuccuccccuccuugcaccgagauuaaucaaaggcucuuuucagagccaccaaaaaaaaaaaaaaaaaaaaaaaaaaaaaaaaaaaaaaaaaaaaaaaaaaaaaaaaaaaaaaaaagaauu

SEQ ID NO: 26080 - RNA, 1658 nt, Artificial Sequence
  mRNA product Design i-3 (hSL-A64-N5) comprising derived and/or modified sequence from MOPV/LASV reassortant(IGS-1;Clade IV)__AFY05576__GPCmut3 (opt5)
aggagaaagcuuaccaugggccagaucgugaccuucuuucaagaggucccccacguuauugaagaggugaugaacaucgugcugauugcccucagcguccuggcugugcuuaaggggcuguacaauuucgccacaugcggacucguuggccuggugacguuucuucugcucugugggagauccugcaccacaucucuguauaaaggagucuacgaacugcagacccucgagcugaacauggaaacacuuaauaugaccaugccucugagcuguacaaagaacaauucccaucacuauaucauggugggcaacgagaccgggcucgagcugacgcuuaccaauacaucuauuaucaaccauaaauucugcaaucugagcgacgcgcacaagaaaaaccucuacgaucaugcucugauguccaucauuucuaccuuucaccugagcaucccgaauuucaaccaguaugaagccauguccugugacuuuaauggaggcaagauuagcguucaguacaaccucucucacuccuaugccggcgaugcugccaaucauugcgggacaguggcuaacggaguccugcaaaccuucaugcggauggccuggggcgggagcuacaucgcgcuugacucuggacgcggcaacugggauuguauuaugacguccuaccaguaucugaucauucagaauacaaccugggaggaccacugccaguuuagcagacccucuccuaucggguaccucggacugcuuucccaacggacacgcgauaucuauauuagcagacggcgcagaggcaccuucaccuggacacuguccgacucugaaggcgaggauacgcccgggggauacugucucacccgguggaugcugaucgaggccgaacugaagugcuuuggcaacacagcuguggccaaauguaaugagaagcaugacgaagaguucugcgauaugcuccgccuguuugacuucaacaaacaggcuauucagagacuuaaggccccugcgcagaugagcauccaacugauuaauaaagccgugaacgcucucaucaaugaucagcugaucaugaagaaccaccuucgggacauuauggggauccccuauugcaauuacuccaaguauuguuaccugaaccacaccacaaccggacgcacgagccucccuaaaugcugucuggucucuaauggcuccuaccugaacgaaacacauuucagcgacgauauugagcagcaagccgacaauaugaucaccgagaugcuccagaaggaauauauggagagacaggggaaaaccccgcugggacuuguugaucuguuuguguucucuaccagcuuuuaccucauuuccaucuuccugcaccuggugaagauccccacacaucggcacauugucggcaaaucuugcccuaagccccaucgccuuaaccacaugggcaucuguagcugcgggcucuauaaacagccuggagugcccguuaaguggaagagaugaggacuaguuauaagacugacuagcccgaugggccucccaacgggcccuccuccccuccuugcaccgagauuaaucaaaggcucuuuucagagccaccaaaaaaaaaaaaaaaaaaaaaaaaaaaaaaaaaaaaaaaaaaaaaaaaaaaaaaaaaaaaaaaaagaauu

SEQ ID NO: 26081 - RNA, 1658 nt, Artificial Sequence
  mRNA product Design i-3 (hSL-A64-N5) comprising derived and/or modified sequence from LASV(LM765-SLE-2012;Clade IV)__AIT17814__GPCmut3 (opt5)
aggagaaagcuuaccaugggccagaucgugaccuucuuucaagaggucccccacguuauugaagaggugaugaacaucgugcugauugcccucagcauccuggcuguccuuaaggggcuguacaauuucgccacaugcggacucgugggccugguuacguuucuucugcucugugggagauccugcaccacaucucuguauaaaggaguguacgaacugcagacccucgagcugaacauggaaacacuuaauaugaccaugccucugagcuguacaaagaacaauucccaucacuauauuauggucggcaacgagaccgggcucgagcugacgcuuaccaauacaucuaucaucgaccauaaauucugcaaccugagcgaugcgcaccggaagaaucucuacgaccaugcucugauguccauuaucucuaccuuucaccugagcauuccgaacuucaaucaguaugaagccauguccugugauuuuaacggaggcaaaaucagcgugcaguacaaucucucucacuccuaugccaaggacgcugccgaucauugcggcacaguugcuaacggggugcugcaaaccuucaugcgcauggccuggggaggcagcuacauugcgcuugacucugggagaggacggugggauuguaucaugacguccuaccaguaucugauuauccagaauacaaccugggaggaccacugccaguuuagccgccccucuccuaucggcuaccucgggcugcuuucccaaagaacacgggauauuuauaucagccgcagacggcgcggaaccuucaccuggacacuguccgacucugaaggcaaggauacgcccggcggguacugucucaccagauggaugcugauugaggccgagcugaaaugcuuuggaaacacagcugucgccaaguguaacgaaaaacaugacgaggaguucugcgauaugcuccggcuguuugacuucaauaagcaggcuauccagcgccuuaaagccccugcgcagaugagcauucaacugaucaacaaggccgugaaugcucucaucaacgaccagcugauuaugaagaaucaccuuagagauaucaugggcauucccuauugcaacuacuccaaauauuguuaccugaaucacaccacaaccgggaagacgagccucccuaaaugcugucuggugucuaacggauccuaccugaaugaaacacauuucagcgacgauaucgaacagcaagccgacaacaugauuaccgagaugcuccagaaggaguauauggaacggcagggcaaaaccccgcuggggcuugucgaucuguuuguuuucucuaccagcuuuuaccucaucuccaucuuccugcaccuggugaagauucccacacaucgccacaucgugggaaaaccuugccccaagccucauagacuuaaucacaugggcauuuguucuugcggccucuauaagcagcccggggucccggugaaauggaagcggugaggacuaguuauaagacugacuagcccgaugggccucccaacgggcccuccuccccuccuugcaccgagauuaaucaaaggcucuuuucagagccaccaaaaaaaaaaaaaaaaaaaaaaaaaaaaaaaaaaaaaaaaaaaaaaaaaaaaaaaaaaaaaaaaagaauu

SEQ ID NO: 26082 - RNA, 1658 nt, Artificial Sequence
  mRNA product Design i-3 (hSL-A64-N5) comprising derived and/or modified sequence from LASV(LM776-SLE-2012;Clade IV)__AIT17824__GPCmut3 (opt5)
aggagaaagcuuaccaugggccagaucgugaccuucuuucaagaggucccccacguuauugaagaggugaugaacaucgugcugauugcccucagcauccuggcuguccuuaaggggcuguacaauuucgccacaugcggacucgugggccugguuacguuucuucugcucugugggagauccugcaccacaucuguguauaaaggagucuacgaacugcagacccuggagcucaacauggaaacacugaauaugaccaugccucuuagcuguacaaagaacaauucccaucacuauauuauggugggcaacgagaccgggcuggagcucacgcugaccaauacaucuaucaucaaccauaaauucugcaaucuuagcgacgcgcacaagaaaaaccuguacgaucaugcucucauguccauuaucucuaccuuucaccugagcauuccgaauuucaaccaguaugaagccauguccugugacuuuaauggaggcaagaucagcguucaguacaaccugucucacuccuaugccggcgaugcugccaaucauugcgggacaguggcuaacggaguccuccaaaccuucaugcggauggccuggggcgggagcuacauugcgcuggacucuggacacggcaagugggauuguaucaugacguccuaccaguaucuuauuauccagaacacaaccugggaggaccauugccaguuuagccgccccucuccuaucggguaccugggacuccugucccaaagaacacgggauauuuauaucagccgcagacggcgcggcaccuucaccuggacacuuuccgacucugaaggcaaagauacgcccgggggauacugucugaccagauggaugcucauugaggccgagcugaagugcuuuggcaauacagcuguggccaaauguaacgaaaagcacgacgaggaguucugcgauaugcugcggcucuuugacuucaauaaacaggcuauccagcgccugaaggccccugcgcagaugagcauucaacuuaucaacaaggccgugaaugcucugaucaacgaucagcucauuaugaaaaaucaccugagagacaucauggggauucccuauugcaacuacuccaaguauuguuaccuuaaucauaccacaaccggaaaaacgagccugccuaagugcugucucgucucuaacggcuccuaccugaaugaaacacacuucagcgacgauaucgaacagcaagccgacaacaugauuaccgagaugcugcagaaagaguauauggaacggcaggggaagaccccgcucggacugguugaucuuuuuguguucucuaccagcuuuuaccugaucuccaucuuccuccaucuggugaaaauucccacacaccgccauaucgucggcaagucuugcccuaagccccacagacugaaucacaugggcauuuguagcugcgggcuuuauaaacagccuggagugcccguucgguggaagcgcugaggacuaguuauaagacugacuagcccgaugggccucccaacgggcccuccuccccuccuugcaccgagauuaaucaaaggcucuuuucagagccaccaaaaaaaaaaaaaaaaaaaaaaaaaaaaaaaaaaaaaaaaaaaaaaaaaaaaaaaaaaaaaaaaagaauu

SEQ ID NO: 26083 - RNA, 1658 nt, Artificial Sequence
  mRNA product Design i-3 (hSL-A64-N5) comprising derived and/or modified sequence from LASV(Mad39;Clade IV)__ANH09722__GPCmut3 (opt5)
aggagaaagcuuaccaugggccagaucgugaccuucuuucaagaggucccccacguuauugaagaggugaugaacaucgugcugauugcccucagcauccuggcuguccuuaaggggcuguacaauguggccacaugcggacucauuggccugguuacguuccuucugcucugugggagauccugcaccacaacccuguauaaaggaguguacgaacugcaggcgcucgagcugaacauggaaacacuuaauaugaccaugccucugucuuguacaaagaacaauagccaucacuauauccgggucggcaacgagaccgggcucgagcugacgcuuaccaauacaucccugaucaaccauaaauuuugcaaucucucugacgcucacaagaaaaaccuguacgaucaugcccugaugagcauuaucuccaccuuccaccucucuauuccgaauuuuaaccaguaugaagccaugagcugugacuucaaugauggaaagaucuccgugcaguacaaccugagccacacauaugcuggcgacaccgccaaucauugcggcacgguugcuaacggggugcuucaaacauuuaugcgcauggccuggggaggcucuuacauugcgcuggauuccgggagaggaggcugggacuguaucaugaccagcuaccaguaucucauuauccagaacacaaccugggaggaucacugccaguucucucggcccuccccuaucggguaccugggacuucugagccaacgcaccagagacauuuauaucucucggcgcagacggggcacauuuacguggacccucuccgauagcgaaggcaaggacacacccgggggauacugucugacccgcuggaugcugauugaggccgagcucaaaugcuucggcaauacagcugucgccaaguguaacgaaaaacaugaugaggaauuuugcgacaugcugagacuuuucgauuuuaauaagcaggcuauccagcggcugaaagccccugcgcagauguccauucaacucaucaacaaggccgugaaugcucugaucaacgaccagcuuauuaugaagaaucaucugcgcgacaucauggggauucccuauugcaacuacucuaaauauuguuaccucaaucacaccgugacgggaaagacaagccugccuaaaugcugucuggucuccaacggcagcuaccucaaugagacccacuucucugaugacaucgaacagcaagccgauaacaugauuaccgagaugcugcagaaggaguauauggaaagacaggggaaaacaccgcuuggacugguugaccucuucguguuuuccaccagcuucuaccugaucucuaucuuucugcaccuugugaagauucccacacaucggcacgucgugggcaaaccuugccccaagccucaucgccucaaucacaugggcaucuguagcugcggguucuauaagcagcccggaguuccggugagauggaaacggugaggacuaguuauaagacugacuagcccgaugggccucccaacgggcccuccuccccuccuugcaccgagauuaaucaaaggcucuuuucagagccaccaaaaaaaaaaaaaaaaaaaaaaaaaaaaaaaaaaaaaaaaaaaaaaaaaaaaaaaaaaaaaaaaagaauu

SEQ ID NO: 26084 - RNA, 1658 nt, Artificial Sequence
  mRNA product Design i-3 (hSL-A64-N5) comprising derived and/or modified sequence from LASV(Z0947-SLE-2011;Clade IV)__AIT17840__GPCmut3 (opt5)
aggagaaagcuuaccaugggccagaucgugaccuucuuucaagaggucccccacguuauugaagaggugaugaacaucgugcugauugcccucagcauccuggcuguccuuaaggggcuguacaauuucgccacaugcggacucgugggccugguuacguuucuucugcucugugggagauccugcaccauuucucuguauaaaggaguguacgaacugcagacacucgagcugaacauggaaacccuuaauaugacaaugccucugagcuguaccaagaacaauucccaucacuauaucauggucggcaacgagacagggcucgagcugacccuuacgaauaccucuaucauuaaccauaaauucugcaaucugagcgacgcgcacaagaaaaaccucuacgaucaugcucugauguccaucauuucuacauuucaccugagcaucccgaauuucaaccaguaugaagccauguccugugacuuuaauggaggcaagauuagcgugcaguacaaccucucucacuccuaugccggcgaugcugccaaucauugcgggaccguugcuaacggagugcugcaaacauucaugcggauggccuggggcgggagcuacaucgcgcuugacucuggacgcgauagaugggacuguauuaugaccuccuaccaguaucugaucauccagaacacgacaugggaggaucacugccaguuuagccggcccucuccuauuggcuaccucgggcugcuuucccaacgcaccagagacaucuauauuagccggcgcagacggggaacauucaccuggacccuguccgauucugaaggcaaggacacacccggcggguacugucucacgcgcuggaugcugaucgaggccgagcugaaaugcuuuggaaauaccgcugucgccaaguguaacgaaaaacaugaugaggaguucugcgacaugcucagacuguuugauuucaauaagcaggcuauucagcggcuuaaagccccugcgcagaugagcauccaacugaucaacaaggccgugaaugcucucauuaacgaccagcugaucaugaagaaucaccuucgcgacauuaugggcauccccuauugcaacuacuccaaauauuguuaccugaaucacacaaccacagggaagaccagccucccuaaaugcugucuggugucuaacggauccuaccugaaugaaacgcauuucagcgaugacauugaacagcaagccgauaacaugaucacagagaugcuccagaaggaguauauggaaagacagggcaaaaccccgcuggggcuugucgaccuguuuguuuucucuaccagcuuuuaccucaucuccauuuuccugcaccuggugaagauccccacacaucggcacauugugggaaaaccuugccccaagccucaucgccuuaaucacaugggcaucuguucuugcggccucuauaagcagcccggggucccggugaaauggaagagaugaggacuaguuauaagacugacuagcccgaugggccucccaacgggcccuccuccccuccuugcaccgagauuaaucaaaggcucuuuucagagccaccaaaaaaaaaaaaaaaaaaaaaaaaaaaaaaaaaaaaaaaaaaaaaaaaaaaaaaaaaaaaaaaaagaauu

SEQ ID NO: 26085 - RNA, 1689 nt, Artificial Sequence
  mRNA product Design i-3 (hSL-A100) comprising derived and/or modified sequence from LASV(Josiah;Clade IV)__NP_694870__GPCmut3 (opt1)
aggagaaagcuuaccaugggccagaucgugaccuucuuccaggaggucccccacgugaucgaggaggugaugaacaucguccugaucgcccucagcgugcuggccgugcugaaggggcucuacaacuucgcgaccugcggccuggucgggcuggugacguuccuccugcugugcggccgcuccugcaccaccagccucuacaaggggguguacgagcugcagacccuggagcucaacauggagacgcugaacaugaccaugccgcuguccugcaccaagaacaacagccaccacuacaucauggucggcaacgagaccggccucgagcugacgcugaccaacaccuccaucaucaaccacaaguucugcaaccucagcgacgcccacaagaagaaccuguacgaccacgcccugauguccaucaucagcaccuuccaccucuccauccccaacuucaaccaguacgaggccaugagcugcgacuucaacgggggcaagaucuccgugcaguacaaccugagccacuccuacgccggggacgcggccaaccacugcggcacgguggccaacgggguccugcagaccuucaugcggauggccuggggcggcagcuacaucgcgcucgacuccgggcgcggcaacugggacugcaucaugaccagcuaccaguaccugaucauccagaacaccacgugggaggaccacugccaguucucccggcccagccccaucggguaccugggccuccugucccagcgcacccgggacaucuacaucagccgccggcgccggggcaccuucaccuggacgcugagcgacuccgaggggaaggacaccccgggcggguacugccugacccgcuggaugcucaucgaggccgagcugaagugcuucggcaacaccgccguggccaagugcaacgagaagcacgacgaggaguucugcgacaugcugcggcuguucgacuucaacaagcaggccauccagcgccugaaggcgcccgcccagaugagcauccagcugaucaacaaggccgugaacgcccucaucaacgaccagcugaucaugaagaaccaccuccgggacaucauggggauccccuacugcaacuacuccaaguacugcuaccucaaccacacgaccaccggccgcaccagccugcccaagugcugccuggucuccaacggcagcuaccucaacgagacgcacuucuccgacgacaucgagcagcaggccgacaacaugaucaccgagaugcugcagaaggaguacauggagcggcaggggaagacgccccugggccucguggaccuguucguguucagcaccuccuucuaccugaucagcaucuuccugcaccucgucaagaucccgacccaccgccacaucguggggaaguccugccccaagccccaccggcugaaccacaugggcaucugcagcugcgggcuguacaagcagcccggcgugccggucaaguggaagcgcugaggacuaguuauaagacugacuagcccgaugggccucccaacgggcccuccuccccuccuugcaccgagauuaaucaaaggcucuuuucagagccaccaaaaaaaaaaaaaaaaaaaaaaaaaaaaaaaaaaaaaaaaaaaaaaaaaaaaaaaaaaaaaaaaaaaaaaaaaaaaaaaaaaaaaaaaaaaaaaaaaaaaa

SEQ ID NO: 26086 - RNA, 1686 nt, Artificial Sequence
  mRNA product Design i-3 (hSL-A100) comprising derived and/or modified sequence from LASV(LP;Clade I)__AAF86701__GPCmut3 (opt1)
aggagaaagcuuaccaugggccagaucaucaccuucuuccaggaggugccccacgucaucgaggaggugaugaacaucgugcugaucgcccucagccugcuggccauccucaaggggcuguacaacaucgcgaccugcggcaucaucgggcuggucgccuuccucuuccugugcggcaaguccugcagccugacgcucaagggcggguacgagcugcagacccuggagcucaacauggagacccugaacaugaccaugccgcuguccugcacgaagaacagcucccaccacuacauccgcgugggcaacgagaccgggcucgagcugacccugaccaacacgagcaucaucaaccacaaguucugcaaccucuccgacgcccacaagaagaaccuguacgaccacgcccugaugagcaucaucuccaccuuccaccucagcauccccaacuucaaccaguacgaggccauguccugcgacuucaacggcgggaagaucagcgugcaguacaaccugucccacagcuacgcgggcgacgccgccgagcacugcgggaccgucgccaacggcgugcugcagaccuucaugcggauggcguggggcgggcgcuacaucgcccucgacuccggcaaggggaacugggacugcaucaugacgagcuaccaguaccugaucauccagaacaccaccugggaggaccacugccaguucucccggcccagccccaucggcuaccugggccuccugucccagcgcacccgggacaucuacaucagccgccggcgccgggggacguucaccuggacccugagcgacuccgagggcaacgagacccccgggggcuacugccugacgcgcuggaugcucaucgaggccgagcugaagugcuucgggaacaccgccguggccaagugcaacgagaagcacgacgaggaguucugcgacaugcugcggcuguucgacuucaacaagcaggcgauccgccggcugaaggcccccgcccagaugagcauccagcugaucaacaaggccgucaacgcccucaucaacgaccagcugaucaugaagaaccaccuccgcgacaucaugggcauccccuacugcaacuacuccaaguacugcuaccucaaccacaccagcuccggccggaccagccugcccaagugcugccugaucuccaacgggagcuaccucaacgagacgcaguucuccgacgacaucgagcagcaggcggacaacaugaucaccgagaugcugcagaaggaguacaucgagcgccagggcaagaccccgcuggggcucguggacaucuucaucuucagcaccuccuucuaccugaucagcaucuuccugcaccugaucaagaucccgacgcaccggcacaucgugggcaagcccugccccaagccccaccgccucaaccacaugggggucugcuccugcggccuguacaagcacccgggcgugcccaccaaguggaagcggugaggacuaguuauaagacugacuagcccgaugggccucccaacgggcccuccuccccuccuugcaccgagauuaaucaaaggcucuuuucagagccaccaaaaaaaaaaaaaaaaaaaaaaaaaaaaaaaaaaaaaaaaaaaaaaaaaaaaaaaaaaaaaaaaaaaaaaaaaaaaaaaaaaaaaaaaaaaaaaaaaaaaa

SEQ ID NO: 26087 - RNA, 1686 nt, Artificial Sequence
  mRNA product Design i-3 (hSL-A100) comprising derived and/or modified sequence from LASV(803213;Clade II)__AAF86703__GPCmut3 (opt1)
aggagaaagcuuaccaugggccagaucaucaccuucuuccaggaggugccccacgucaucgaggaggugaugaacaucgugcugaucgcccucagccugcuggccauccucaaggggaucuacaacgucgcgaccugcggccuguucgggcugaucuccuuccuccugcugugcggccgcagcugcuccgugacguacaaggggguguacgagcuccagacccuggagcugaacauggccaaccucaacaugaccaugccgcugagcugcaccaagaacaacucccaccacuacaucauggucggcaacgagacgggccuggagcucacccugaccaacaccagcaucaucaaccacaaguucugcaaccuguccgacgcccacaagaagaaccucuacgaccacgcccugaugagcaucaucuccacguuccaccugagcauccccaacuucaaccaguacgaggccauguccugcgacuucaacgggggcaagaucagcgugcaguacaaccucucccacagcuucgcgguggacgccgccaaccacugcgggaccaucgccaacggcguccugcagaccuucaugcggauggcguggggcggguccuacaucgcccuggacagcggcaaggggaacugggacugcaucaugaccuccuaccaguaccucaucauccagaacacgaccugggaggaccacugccaguucagccgccccucccccaucggcuaccuggggcugcucagccagcggacccgcgacaucuacaucagccggcgccgccggggcaccuucacguggacccucuccgacagcgagggcaacgaggcccccgggggcuacugccugacccgguggaugcugaucgaggccgagcucaagugcuucgggaacaccgccguggcgaagugcaacgagaagcacgacgaggaguucugcgacaugcugcgccuguucgacuucaacaagcaggccaucaagcggcucaagacgcccgcccagauguccauccagcugaucaacaaggccgugaacgcccugaucaacgaccagcucaucaugaagaaccaccuccgcgacaucaugggcauccccuacugcaacuacagccgguacugcuaccugaaccacaccgucaccgggaagaccucccugccccgcugcugccuggugagcaacggcuccuaccugaacgagacgcacuucagcgacgacaucgagcagcaggcggacaacaugaucaccgagaugcuccagaaggaguacauggaccggcagggcaagaccccgcuggggcugguggaccucuucgucuucuccaccagcuucuaccugaucuccaucuuccugcaccuggugaagaucccgacgcaccgccacaucgugggcaagcccugccccaagccccaccggcucaaccacauggggaucugcagcugcggccuguacaagcacccggggguccccgugaaguggaagcgcugaggacuaguuauaagacugacuagcccgaugggccucccaacgggcccuccuccccuccuugcaccgagauuaaucaaaggcucuuuucagagccaccaaaaaaaaaaaaaaaaaaaaaaaaaaaaaaaaaaaaaaaaaaaaaaaaaaaaaaaaaaaaaaaaaaaaaaaaaaaaaaaaaaaaaaaaaaaaaaaaaaaaa

SEQ ID NO: 26088 - RNA, 1686 nt, Artificial Sequence
  mRNA product Design i-3 (hSL-A100) comprising derived and/or modified sequence from LASV(GA391;Clade III)__CAA36645__GPCmut3 (opt1)
aggagaaagcuuaccaugggccagaucgugaccuucuuccaggaggucccccacgugaucgaggaggugaugaacaucguccugaucgcccucagcauccuggccauccugaaggggcucuacaacguggcgaccugcggccugaucgggcuggugacguuccuccugcuguccggccgcagcugcucccucaucuacaaggggaccuacgagcugcagacccuggagcucaacauggagacccugaacaugacgaugccgcugagcugcaccaagaacaacucccaccacuacauccgggucggcaacgagaccggccucgagcugacccugacgaacaccagcauccucaaccacaaguucugcaaccuguccgacgcccacaagcgcaaccuguacgaccacagccucauguccaucaucagcaccuuccaccuguccauccccaacuucaaccaguacgaggccaugagcugcgacuucaacgggggcaagaucaccgugcaguacaaccugucccacagcuucgccguggacgccgcggggcacugcggcacgcucgccaacgggguccugcagaccuucaugcggauggccuggggcggcuccuacaucgcccuggacagcgggcgcggcaacugggacugcaucaugaccuccuaccaguaccucaucauccagaacaccacgugggacgaccacugccaguucagccggcccucccccaucggguaccugggccugcucagccagcgcacccgggacaucuacaucagccgccggcgccggggcaccuucaccuggacgcucuccgacagcgaggggaacgagaccccgggcggguacugccugacccgcuggaugcugaucgaggcggagcucaagugcuucggcaacaccgccguggccaagugcaacgagaagcacgacgaggaguucugcgacaugcugcggcuguucgacuucaacaagcaggccauccgccggcucaagacgcccgcccagauguccauccagcugaucaacaaggcggugaacgcccugaucaacgaccagcucaucaugaagaaccaccuccgcgacaucauggggauccccuacugcaacuacagccgguacugcuaccugaaccacaccuccaccggcaagaccagccugccccgcugcugccugaucuccaacggcagcuaccugaacgagacgaaguucuccgacgacaucgagcagcaggccgacaacaugaucaccgagaugcuccagaaggaguacaucgaccggcaggggaagacgccccugggccuggucgaccuguucguguucagcaccuccuucuaccucaucagcaucuuccugcaccuggugaagaucccgacccaccgccacaucgucgggaagcccugccccaagccccaccggcucaaccacaugggcaucugcuccugcgggcuguacaagcagccgggcgugcccgugcgcuggaagcggugaggacuaguuauaagacugacuagcccgaugggccucccaacgggcccuccuccccuccuugcaccgagauuaaucaaaggcucuuuucagagccaccaaaaaaaaaaaaaaaaaaaaaaaaaaaaaaaaaaaaaaaaaaaaaaaaaaaaaaaaaaaaaaaaaaaaaaaaaaaaaaaaaaaaaaaaaaaaaaaaaaaaa

SEQ ID NO: 26089 - RNA, 1689 nt, Artificial Sequence
  mRNA product Design i-3 (hSL-A100) comprising derived and/or modified sequence from LASV(AV;Clade V)__CCA30314__GPCmut3 (opt1)
aggagaaagcuuaccaugggccagaucgugaccuucuuccaggaggucccccacgugaucgaggaggugaugaacaucguccugaucgcccucagcauccuggccgugcugaaggggcucuacaacaucgcgaccugcggccugaucgggcugaucacguuccuccugcugugcggccgcuccugcagcuccaaccucuacaaggggguguacgagcugcagagccuggaccucaacauggagacccugaacaugaccaugccgcuguccugcaccaagaacaacagccaccacuacauccgggucggcaacgacacgggccucgagcugacccugaccaacaccuccauccucaaccacaaguucugcaaccugagcgacgcccacaagaaggaccuguacgaccacgcccucauguccaucaucagcacguuccaccuguccauccccaacuucaaccaguacgaggccaugagcugcgacuucaacgggggcaagaucuccgugcaguacaaccugagccacuccuacgccaucgacgcggccaaccacugcgggaccguggccaacggcauccuccagaccuucaugcgcauggccuggggcgggagcuacaucgcgcuggacuccggccgggggaacugggacugcaucaugaccagcuaccaguaccugaucauccagaacacgaccugggagaaccacugccaguucucccgccccagccccaucggcuaccucgggcugcugagccagcggacccgcgacaucuacaucucccggcgccgccggggcaccuucacguggacccugagcgacuccgagggcaacgccacccccgggggcuacugccucacccgguggaugcugaucgaggccgagcugaagugcuucgggaacacggccgucgccaagugcaacgagaagcacgacgaggaguucugcgacaugcuccgccuguucgacuucaacaagcaggcgaucagccggcugaagucccccgcccagaugagcauccagcucaucaacaaggccgugaacgcccugaucaacgaccagcugaucaugaagaaccaccuccgcgacaucaugggcauccccuacugcaacuacuccaaguacugcuaccugaaccacaccaucaccgggaagaccagccugcccaagugcugccucguguccaacggcagcuaccugaacgagacgcacuucuccgacgacaucgagcagcaggccgacaacaugaucaccgagaugcugcagaaggaguacauggagcggcagggcaagaccccgcucgggcuggucgaccuguucguguucagcaccuccuucuaccugaucagcaucuuccuccgccuggugaagaucccgacgcaccggcacaucgucggcaagcccugccccaagccccaccgccugaaccacauggggaucugcuccugcggccucuacaagcagccgggggugcccgugcgguggaagcgcugaggacuaguuauaagacugacuagcccgaugggccucccaacgggcccuccuccccuccuugcaccgagauuaaucaaaggcucuuuucagagccaccaaaaaaaaaaaaaaaaaaaaaaaaaaaaaaaaaaaaaaaaaaaaaaaaaaaaaaaaaaaaaaaaaaaaaaaaaaaaaaaaaaaaaaaaaaaaaaaaaaaaa

SEQ ID NO: 26090 - RNA, 1686 nt, Artificial Sequence
  mRNA product Design i-3 (hSL-A100) comprising derived and/or modified sequence from LASV(Togo/2016/7082;Clade VI)__AMR44577__GPCmut3 (opt1)
aggagaaagcuuaccaugggccagaucaucaccuucuuccaggaggugccccacgucaucgaggaggugaugaacaucgugcugaucgcccucagccugcuggccauccucaagggggucuacaacguggcgaccugcggcaucaucgggcuggugacguuccuguuccucugcggccgcuccugcagccugaucuacaagggguccuacgagcugcagacccucgagcugaacauggagacccugaacaugaccaugccgcucagcugcacgaagaacuccagccaccacuacauccgggucggcaacgagaccggccuggagcugacccucaccaacacguccaucaucaaccacaaguucugcaaccugagcgacgcccacaagcgcaaccuguacgaccacgcccucauguccauccugagcaccuuccaccuguccauccccaacuucaaccaguacgaggccaugagcugcgacuucaacgggggcaagaucuccgugcaguacaaccucagccacgccuacgcgguggacgccgccgagcacugcgggaccgucgccaacggcgugcugcagaccuucaugcggauggcguggggcggguccuacaucgcccuggacagcggccgcgggaacugggacugcaucaugacguccuaccaguaccucaucauccagaacaccaccugggaggaccacugccaguucagccggcccucccccaucggcuaccuggggcugcucagccagcgcacccgggacaucuacaucagccgccggcgccggggcacguucaccuggacccucuccgacagcgagggcaacgagacccccgggggcuacugccugacgcgcuggaugcugaucgaggccgagcucaagugcuucgggaacaccgccguggccaagugcaacgagaagcacgacgaggaguucugcgacaugcugcggcuguucgacuucaacaagcaggcgauccagcgccucaagucccccgcccagaugagcauccagcugaucaacaaggccgucaacgcccugaucaacgaccagcucaucaugaagaaccaccuccgggacaugaugggcauccccuacugcaacuacuccaaguacugcuaccugaaccacaccagcuccgggcgcaccagccugcccaagugcugccugguguccaacggcagcuaccugaacgagacgcacuucuccgacgacaucgagcagcaggccgacaacaugaucaccgagaugcuccagaaggaguacaucgaccggcagggcaagaccccgcuggggcugguggaccucuucgucuucagcaccuccuucuaccugaucagcaucuuccugcaccugaucaagaucccgacgcaccgccacaucgugggcaagcccugccccaagccccaccggcucaaccacauggggaucugcuccugcggccuguacaagcagccgggggugcccacccgcuggaagcggugaggacuaguuauaagacugacuagcccgaugggccucccaacgggcccuccuccccuccuugcaccgagauuaaucaaaggcucuuuucagagccaccaaaaaaaaaaaaaaaaaaaaaaaaaaaaaaaaaaaaaaaaaaaaaaaaaaaaaaaaaaaaaaaaaaaaaaaaaaaaaaaaaaaaaaaaaaaaaaaaaaaaa

SEQ ID NO: 26091 - RNA, 1686 nt, Artificial Sequence
  mRNA product Design i-3 (hSL-A100) comprising derived and/or modified sequence from LASV(KAK-428;Clade n.d. (VII))__ANH09740__GPCmut3 (opt1)
aggagaaagcuuaccaugggccagaucgugaccuucuuccaggaggucccccacgugaucgaggaggugaugaacaucguccugaucgcccucagccugcuggccauccucaaggggcuguacaacuucgcgaccugcggcgugaucgggcugaucacguuccuccugcugugcggccgcuccugcagcgccaccuacaaggggcaguacgagcuccagacccuggagcugaacauggagucccucaacaugaccaugccgcugagcugcacgaagaacaacucccaccacuacauccgggccggcaacaacaccggccuggagcucacccugaccaacacgagcaucaucucccacaaguucugcaaccugagcgacgcccacaagaagaaccucuacgaccacacccugauguccaucaucaccaccuuccaccugagcauccccaacuucaaccaguacgaggccauguccugcgacuucaacgggggcaagaucagcauccaguacaaccucucccacagcuacgcgggggacgccgcccagcacugcggcacgguggccaacgggguccugcagaccuucaugcgcauggcguggggcggcuccuaccuggcccucgacagcgggcggcgcggcugggacugcaucaucuccagcuaccaguaccugaucauccagaacaccaccugggacgaccacugccaguucucccggcccagccccaucggguaccugggcuucgugagccagaagacgcgcgacaucuacaucucccggcgccgccggggcaccuucaccuggacccugagcgacuccgaggggcacgacaugccgggcggguacugccucacgcgguggaugcugaucgaggccgaccugaagugcuucggcaacaccgccguggccaagugcaacgagaagcacgacgaggaguucugcgacauguggcgccucuucgacuucaacaagcaggcgauccagcggcugaaggcccccgcccagaugaacauccagcugaucaacaaggccgucaacgcccucaucaacgaccagcugaugaugaagaaccaccuccgcgacaucauggggauccccuacugcaacuacagcaaguucugcuaccugaacaacaccaccacgggccggaccucccugccccgcugcugccugaucagcaacggcuccuaccucaacgagacccacuucagcgacgacaucgagcagcaggcggacaacaugaucaccgagaugcugcagaaggaguacauggaccggcaggggaagacgccccugggccucguggaccuguucguguucuccaccagcuucuaccugaucaccaucuuccuccaccuggucaagaucccgacccaccgccacaucguggggaagcccugccccaagccccaccggcugaaccacaugggcaucugcuccugcgggcuguacaagcagccgggcgugcccguccgcuggaagcggugaggacuaguuauaagacugacuagcccgaugggccucccaacgggcccuccuccccuccuugcaccgagauuaaucaaaggcucuuuucagagccaccaaaaaaaaaaaaaaaaaaaaaaaaaaaaaaaaaaaaaaaaaaaaaaaaaaaaaaaaaaaaaaaaaaaaaaaaaaaaaaaaaaaaaaaaaaaaaaaaaaaaa

SEQ ID NO: 26092 - RNA, 1686 nt, Artificial Sequence; identical to SEQ ID NO: 26086
  mRNA product Design i-3 (hSL-A100) comprising derived and/or modified sequence from LASV(Pinneo-NIG-1969;Clade I)__AIT17836__GPCmut3 (opt1)

SEQ ID NO: 26093 - RNA, 1686 nt, Artificial Sequence
  mRNA product Design i-3 (hSL-A100) comprising derived and/or modified sequence from LASV(ISTH0009-NIG-2011;Clade II)__AIT17404__GPCmut3 (opt1)
aggagaaagcuuaccaugggccagaucaucaccuucuuccaggaggugccccacgucaucgaggaggugaugaacaucgugcugaucgcccucagccugcuggccauccucaaggggaucuacaacgucgcgaccugcggccuguucgggcugguguccuuccuccugcugugcggccgcagcugcuccacgaccuacaaggggguguacgagcuccagacccuggagcuggacauggccagccucaacaugaccaugccgcuguccugcacgaagaacaacagccaccacuacaucauggucggcaacgagaccggccuggagcucacccugaccaacacguccaucaucaaccacaaguucugcaaccugagcgacgcccacaagaagaaccucuacgaccacgcccugauguccaucaucagcaccuuccaccuguccauccccaacuucaaccaguacgaggccaugagcugcgacuucaacgggggcaagaucuccgugcaguacaaccucagccacgcguacgccguggacgccgccaaccacugcgggaccaucgcgaacggcguccugcagaccuucaugcggauggccuggggcggguccuacaucgcccuggacagcggcaagggguccugggacugcaucaugacgagcuaccaguaccucaucauccagaacaccaccugggaggaccacugccaguucucccgccccagccccaucggcuaccuggggcugcucagccagcggacccgcgacaucuacaucucccggcgccgccggggcacguucaccuggacccucagcgacuccgagggcaacgagacccccgggggcuacugccugacgcgguggaugcugaucgaggccgagcucaagugcuucgggaacaccgccguggcgaagugcaacgagaagcacgacgaggaguucugcgacaugcugcgccuguucgacuucaacaagcaggccauccggcgccucaagacccccgcccagaugagcauccagcugaucaacaaggccgugaacgcccugaucaacgaccagcucaucaugaagaaccaccuccgggacaucaugggcaucccguacugcaacuacuccaaguacugcuaccugaaccacaccgucacggggaagaccagccugccccgcugcugccugguguccaacggcagcuaccugaacgagacccacuucuccgacgacaucgagcagcaggcggacaacaugaucaccgagcuccugcagaaggaguacauggaccggcagggcaagacgccccuggggcucguggaccuguucgucuucagcaccuccuucuaccugaucagcaucuuccugcaccucaucaagaucccgacccaccgccacaucaccggcaagcccugccccaagccccaccggcugaaccacauggggaucugcuccugcggccuguacaagcacccgggggugcccgugaaguggaagcgcugaggacuaguuauaagacugacuagcccgaugggccucccaacgggcccuccuccccuccuugcaccgagauuaaucaaaggcucuuuucagagccaccaaaaaaaaaaaaaaaaaaaaaaaaaaaaaaaaaaaaaaaaaaaaaaaaaaaaaaaaaaaaaaaaaaaaaaaaaaaaaaaaaaaaaaaaaaaaaaaaaaaaa

SEQ ID NO: 26094 - RNA, 1686 nt, Artificial Sequence
  mRNA product Design i-3 (hSL-A100) comprising derived and/or modified sequence from LASV(ISTH2010-NIG-2012;Clade II)__AIT17482__GPCmut3 (opt1)
aggagaaagcuuaccaugggccagaucaucaccuucuuccaggaggugccccacgucaucgaggaggugaugaacaucgugcugaucgcccucagccugcuggccauccucaaggggaucuacaacgucgcgaccugcggccuguucgggcugguguccuuccuccugcugugcggccgcagcugcuccacgaccuacaaggggguguacgagcuccagacccuggagcuggacauggccagccucaacaugaccaugccgcuguccugcacgaagaacaacagccaccacuacaucauggucggcaacgagaccggccuggagcucacccugaccaacacguccaucaucaaccacaaguucugcaaccugagcgacgcccacaagaagaaccucuacgaccacgcccugauguccaucaucagcaccuuccaccuguccauccccaacuucaaccaguacgaggccaugagcugcgacuucaacgggggcaagaucuccgugcaguacaaccucagccacgcguacgccguggacgccgccaaccacugcgggaccaucgcgaacggcguccugcagaccuucaugcggauggccuggggcggguccuacaucgcccuggacagcggcaagggguccugggacugcaucaugacgagcuaccaguaccucaucauccagaacaucaccugggaggaccacugccaguucucccgccccagccccaucggcuaccuggggcugcucagccagcggacccgcgacaucuacaucucccggcgccgccggggcaccuucacguggacccucagcgacuccgagggcaacgagacccccgggggcuacugccugacccgguggaugcugaucgaggccgagcucaagugcuucgggaacacggccguggcgaagugcaacgagaagcacgacgaggaguucugcgacaugcugcgccuguucgacuucaacaagcaggccauccggcgccucaagacccccgcccagaugagcauccagcugaucaacaaggccgugaacgcccugaucaacgaccagcucaucaugaagaaccaccuccgggacaucaugggcauccccuacugcaacuacuccaaguacugcuaccugaaccacaccgucaccgggaagacgagccugccccgcugcugccugguguccaacggcagcuaccugaacgagacccacuucuccgacgacaucgagcagcaggcggacaacaugaucaccgagcuccugcagaaggaguacaucgaccggcagggcaagaccccgcuggggcucguggaccuguucgucuucagcacguccuucuaccugaucagcaucuuccugcaccucgugaagaucccgacccaccgccacguggucggcaagcccugccccaagccccaccggcugaaccacauggggaucugcuccugcggccuguacaagcacccgggggugcccgugaaguggaagcgcugaggacuaguuauaagacugacuagcccgaugggccucccaacgggcccuccuccccuccuugcaccgagauuaaucaaaggcucuuuucagagccaccaaaaaaaaaaaaaaaaaaaaaaaaaaaaaaaaaaaaaaaaaaaaaaaaaaaaaaaaaaaaaaaaaaaaaaaaaaaaaaaaaaaaaaaaaaaaaaaaaaaaa

SEQ ID NO: 26095 - RNA, 1686 nt, Artificial Sequence
  mRNA product Design i-3 (hSL-A100) comprising derived and/or modified sequence from LASV(Lassa virus/H.sapiens-wt/NGA/2015/ISTH_0543;Clade II)__AVO03639__GPCmut3 (opt1)
aggagaaagcuuaccaugggccagaucaucaccuucuuccaggaggugccccacgucaucgaggaggugaugaacaucgugcugaucgcccucagccugcuggccauccucaaggggaucuacaacgucgcgaccugcggccuguucgggcugguguccuuccuccugcugugcggccgcagcugcuccacgaccuacaaggggguguacgagcuccagacccuggagcuggacauggccaaccucaacaugaccaugccgcugagcugcacgaagaacaacucccaccacuacaucauggucggcaacgagaccggccuggagcucacccugaccaacacgagcaucaucaaccacaaguucugcaaccuguccgacgcccacaagaagaaccucuacgaccacgcccugaugagcaucaucuccaccuuccaccugagcauccccaacuucaaccaguacgaggccauguccugcgacuucaacgggggcaagaucagcgugcaguacaaccucucccacaccuacgcgguggacgccgccaaccacugcgggaccaucgccaacggcguccugcagacguucaugcggauggcguggggcgggagcuacaucgcccuggacuccggcaaggggagcugggacugcaucaugaccuccuaccaguaccucgugauccagaacaccaccugggaggaccacugccaguucagccgccccucccccaucggcuaccuggggcugcucagccagcggacgcgcgacaucuacaucagccggcgccgccggggcaccuucaccuggacccucuccgacagcgagggcaacgagacgcccgggggcuacugccugacccgguggaugcugaucgaggccgagcucaagugcuucgggaacaccgccguggccaagugcaacgagaagcacgacgaggaguucugcgacaugcugcgccuguucgacuucaacaagcaggcgauccggcgccucaagacccccgcccagauguccauccagcugaucaacaaggccgucaacgcccugaucaacgaccagcucaucaugaagaaccaccuccgggacaucaugggcauccccuacugcaacuacagcaaguacugcuaccugaaccacacggugaccgggaagaccucccugccccgcugcugccuggugagcaacggcuccuaccugaacgagacccacuucagcgacgacaucgagcagcaggccgacaacaugaucacggagcuccugcagaaggaguacaucgaccggcagggcaagaccccgcuggggcucgucgaccuguucguguucuccaccagcuucuaccugaucuccaucuuccugcaccucgugaagaucccgacccaccgccacaucacgggcaagcccugccccaagccccaccggcugaaccacauggggaucugcagcugcggccuguacaagcacccggggguccccgugaaguggaagcgcugaggacuaguuauaagacugacuagcccgaugggccucccaacgggcccuccuccccuccuugcaccgagauuaaucaaaggcucuuuucagagccaccaaaaaaaaaaaaaaaaaaaaaaaaaaaaaaaaaaaaaaaaaaaaaaaaaaaaaaaaaaaaaaaaaaaaaaaaaaaaaaaaaaaaaaaaaaaaaaaaaaaaa

SEQ ID NO: 26096 - RNA, 1686 nt, Artificial Sequence
  mRNA product Design i-3 (hSL-A100) comprising derived and/or modified sequence from LASV(Lassa virus/H.sapiens-wt/NGA/2016/ISTH_0009;Clade II)__AVO03571__GPCmut3 (opt1)
aggagaaagcuuaccaugggccagaucaucaccuucuuccaggaggugccccacgucaucgaggaggugaugaacaucgugcugaucgcccucagccugcuggccauccucaaggggaucuacaacgucgcgaccugcggccugcuggggcucguguccuuccugcugcucugcggccgcagcugcuccacgaccuacaaggggguguacgagcugcagacccuggagcucgacauggccagccugaacaugaccaugccgcuguccugcacgaagaacaacagccaccacuacaucauggucggcaacgagaccggccucgagcugacccugaccaacacguccaucaucaaccacaaguucugcaaccucagcgacgcccacaagaagaaccuguacgaccacgcccugauguccaucaucagcaccuuccaccucuccauccccaacuucaaccaguacgaggccaugagcugcgacuucaacgggggccggaucuccgugcaguacaaccugagccacuccuacgcgguggacgccgccaaccacugcgggaccaucgccaacggcguccugcagaccuucaugcgcauggcguggggcgggagcuacaucgcccucgacuccggcaaggggagcugggacugcaucaugacguccuaccaguaccugaucauccagaacaccaccugggaggaccacugccaguucagccggcccagccccaucggcuaccuggggcuccugucccagcgcacccgggacaucuacaucagccgccggcgccggggcacguucaccuggacccuguccgacagcgagggcaacgagacccccgggggcuacugccugacgcgcuggaugcucaucgaggccgagcugaagugcuucgggaacaccgccguggccaagugcaacgagaagcacgacgaggaguucugcgacaugcugcggcuguucgacuucaacaagcaggcgauccgccggcugaagacccccgcccagauguccauccagcugaucaacaaggccgugaacgcccucaucaacgaccagcugaucaugaagaaccaccuccgcgacaucaugggcaucccguacugcaacuacagcaaguacugcuaccucaaccacaccgucacggggaagaccucccugccccggugcugccuggugagcaacggcuccuaccucaacgagacccacuucagcgacgacaucgagcagcaggccgacaacaugaucaccgagcugcugcagaaggaguacaucgaccgccagggcaagacgccccucgggcugguggaccuguucgucuucuccaccagcuucuaccugaucuccaucuuccuccaccuggugaagaucccgacccaccggcacaucaccggcaagcccugccccaagccccaccgccugaaccacauggggaucugcagcugcggccucuacaaccacccgggggugcccgucaaguggaagcggugaggacuaguuauaagacugacuagcccgaugggccucccaacgggcccuccuccccuccuugcaccgagauuaaucaaaggcucuuuucagagccaccaaaaaaaaaaaaaaaaaaaaaaaaaaaaaaaaaaaaaaaaaaaaaaaaaaaaaaaaaaaaaaaaaaaaaaaaaaaaaaaaaaaaaaaaaaaaaaaaaaaaa

SEQ ID NO: 26097 - RNA, 1686 nt, Artificial Sequence
  mRNA product Design i-3 (hSL-A100) comprising derived and/or modified sequence from LASV(Lassa virus/H.sapiens-wt/NGA/2016/ISTH_0017;Clade II)__AVO03567__GPCmut3 (opt1)
aggagaaagcuuaccaugggccagaucaucaccuucuuccaggaggugccccacgucaucgaggaggugaugaacaucgugcugaucgcccucagccugcuggccauccucaaggggaucuacaacgucgcgaccugcggccuguucgggcugguguccuuccuccugcugugcggccgcagcugcuccacgaccuacaaggggguguacgagcuccagacccuggagcuggacauggccagccucaacaugaccaugccgcuguccugcacgaagaacaacagccaccacuacaucauggucggcaacgagaccggccuggagcucacccugaccaacacguccaucaucaaccacaaguucugcaaccugagcgacgcccacaagaagaaccucuacgaccacgcccugauguccaucaucagcaccuuccaccuguccauccccaacuucaaccaguacgaggccaugagcugcgacuucaacgggggcaagaucuccgugcaguacaaccucagccacaccuacgcgaucgacgccgccaaccacugcgggaccaucgccaacggcgugcugcagacguucaugcggauggcguggggcggguccuacaucgcccuggacagcggcaagggguccugggacugcaucaugaccagcuaccaguaccucaucauccagaacaccaccugggaggaccacugccaguucucccgccccagccccaucggcuaccuggggcugcucagccagcggacgcgcgacaucuacaucucccggcgccgccggggcaccuucaccuggacccucagcgacuccgagggcaacgagacgcccgggggcuacugccugacccgguggaugcugaucgaggccgagcucaagugcuucgggaacaccgccgucgccaagugcaacgagaagcacgacgaggaguucugcgacaugcugcgccuguucgacuucaacaagcaggcgauccggcgccucaagacccccgcccagaugagcauccagcugaucaacaaggccgugaacgcccugaucaacgaccagcucaucaugaagaaccaccuccgggacaucaugggcauccccuacugcaacuacuccaaguacugcuaccugaaccacacggugaccgggaagaccagccugccccgcugcugccuggucuccaacggcagcuaccugaacgagacccacuucuccgacgacaucgagcagcaggccgacaacaugaucacggagcuccugcagaaggaguacauggaccggcagggcaagaccccgcuggggcucguggaccuguucguguucagcaccuccuucuaccugaucagcaucuuccugcaccucguccgcaucccgacccaccggcacgugaucggcaagcccugccccaagccccaccgccugaaccacauggggaucugcuccugcggccuguacaagcacccgggggugcccgucaaguggaagcggugaggacuaguuauaagacugacuagcccgaugggccucccaacgggcccuccuccccuccuugcaccgagauuaaucaaaggcucuuuucagagccaccaaaaaaaaaaaaaaaaaaaaaaaaaaaaaaaaaaaaaaaaaaaaaaaaaaaaaaaaaaaaaaaaaaaaaaaaaaaaaaaaaaaaaaaaaaaaaaaaaaaaa

SEQ ID NO: 26098 - RNA, 1686 nt, Artificial Sequence
  mRNA product Design i-3 (hSL-A100) comprising derived and/or modified sequence from LASV(Lassa virus/H.sapiens-wt/NGA/2018/ISTH_0959;Clade II)__AVV65099__GPCmut3 (opt1)
aggagaaagcuuaccaugggccagaucaucaccuucuuccaggaggugccccacgucaucgaggaggugaugaacaucgugcugaucgcccucagccugcuggccauccucaaggggaucuacaacgucgugaccugcggccuguucgggcugguguccuuccuccugcugugcggccgcagcugcuccacgaccuacaagggggucuacgagcuccagacccuggagcuggacauggcgagccucaacaugaccaugccgcuguccugcacgaagaacaacagccaccacuacaucauggugggcaacgagaccggccuggagcucacccugaccaacacguccaucaucaaccacaaguucugcaaccugagcgacgcccacaagaagaaccucuacgaccacgcccugauguccaucaucagcaccuuccaccuguccauccccaacuucaaccaguacgaggccaugagcugcgacuucaacgggggcaagaucuccgugcaguacaaccucagccacgccuacgcgaucgacgccgccaaccacugcgggaccaucgccaacggcguccugcagaccuucaugcggauggcguggggcggguccuacaucgcccuggacagcggcaagggguccugggacugcaucaugacgagcuaccaguaccucaucauccagaacaccaccugggaggaccacugccaguucucccgccccagccccaucggcuaccuggggcugcucagccagcggacccgcgacaucuacaucucccggcgccgccggggcacguucaccuggacccucagcgacuccgagggcaacgagacccccgggggcuacugccugacgcgguggaugcugaucgaggccgagcucaagugcuucgggaacaccgccguggccaagugcaacgagaagcacgacgaggaguucugcgacaugcugcgccuguucgacuucaacaagcaggcgauccggcgccucaagacccccgcccagaugagcauccagcugaucaacaaggccgugaacgcccugaucaacgaccagcucaucaugaagaaccaccuccgggacaucaugggcaucccguacugcaacuacuccaaguacugcuaccugaaccacaccgucacggggaagaccagccugccccgcugcugccugguguccaacggcagcuaccugaacgagacccacuucuccgacgacaucgagcagcaggccgacaacaugaucaccgagcuccugcagaaggaguacaucgaccggcagggcaagacgccccuggggcucguggaccuguucgucuucagcaccuccuucuaccugaucagcaucuuccugcaccucgugaagaucccgacccaccgccacgugaucggcaagcccugccccaagccccaccggcugaaccacauggggaucugcuccugcggccuguacaagcacccggggguccccgugaaguggaagcgcugaggacuaguuauaagacugacuagcccgaugggccucccaacgggcccuccuccccuccuugcaccgagauuaaucaaaggcucuuuucagagccaccaaaaaaaaaaaaaaaaaaaaaaaaaaaaaaaaaaaaaaaaaaaaaaaaaaaaaaaaaaaaaaaaaaaaaaaaaaaaaaaaaaaaaaaaaaaaaaaaaaaaa

SEQ ID NO: 26099 - RNA, 1686 nt, Artificial Sequence
  mRNA product Design i-3 (hSL-A100) comprising derived and/or modified sequence from LASV(LASV003-NIG-2008;Clade II)__AIT17580__GPCmut3 (opt1)
aggagaaagcuuaccaugggccagaucaucaccuucuuccaggaggugccccacgucaucgaggaggugaugaacaucgugcugaucgcccucagccugcuggccauccucaaggggaucuacaacgucgcgaccugcggccuguucgggcugguguccuuccuccugcugugcggccgcagcugcuccacgaccuacaaggggguguacgagcuccagacccuggagcuggacauggccagccucaacaugaccaugccgcuguccugcacgaagaacaacagccaccacuacaucauggucggcaacgagaccggccuggagcucacccugaccaacacguccaucaucaaccacaaguucugcaaccugagcgacgcccacaagaagaaccucuacgaccacgcccugauguccaucaucagcaccuuccaccuguccauccccaacuucaaccaguacgaggccaugagcugcgacuucaacgggggcaagaucuccgugcaguacaaccucagccacaccuacgcgguggacgccgccaaccacugcgggaccaucgccaacggcguccugcagacguucaugcggauggcguggggcggguccuacaucgcccuggacagcggcaagggguccugggacugcaucaugaccagcuaccaguaccucaucauccagaacaccaccugggaggaccacugccaguucucccgccccagccccaucggcuaccuggggcugcucagccagcggacgcgcgacaucuacaucucccggcgccgccggggcaccuucaccuggacccucagcgacuccgagagcaacgagacgccgggcggguacugccugacccgguggaugcugaucgaggccgagcucaagugcuucggcaacaccgccguggccaagugcaacgagaagcacgacgaggaguucugcgacaugcugcgccuguucgacuucaacaagcaggcgauccggcgccucaaggcccccgcccagauguccauccagcugaucaacaaggccgugaacgcccugaucaacgaccagcucaucaugaagaaccaccuccgggacaucauggggauccccuacugcaacuacagcaaguacugcuaccugaaccacaccgucacgggccgcaccucccugccccggugcugccuggugagcaacggguccuaccugaacgagacccacuucagcgacgacaucgagcagcaggcggacaacaugaucaccgagcuccugcagaaggaguacauggaccgccagggcaagacgccccugggccucguggaccuguucgucuucuccaccagcuucuaccugaucuccaucuuccugcaccucgugaagaucccgacccaccggcacgugaucgggaagcccugccccaagccccaccgccugaaccacaugggcaucugcagcugcgggcuguacaagcacccgggcguccccgugaaguggaagcggugaggacuaguuauaagacugacuagcccgaugggccucccaacgggcccuccuccccuccuugcaccgagauuaaucaaaggcucuuuucagagccaccaaaaaaaaaaaaaaaaaaaaaaaaaaaaaaaaaaaaaaaaaaaaaaaaaaaaaaaaaaaaaaaaaaaaaaaaaaaaaaaaaaaaaaaaaaaaaaaaaaaaa

SEQ ID NO: 26100 - RNA, 1686 nt, Artificial Sequence
  mRNA product Design i-3 (hSL-A100) comprising derived and/or modified sequence from LASV(LASV035-NIG-2009;Clade II)__AIT17588__GPCmut3 (opt1)
aggagaaagcuuaccaugggccagaucaucaccuucuuccaggaggugccccacgucaucgaggaggugaugaacaucgugcugaucgcccucagccugcuggccauccucaaggggaucuacaacgucgcgaccugcggccuguucgggcugguguccuuccuccugcugugcggccgcagcugcuccacgaccuacaaggggguguacgagcuccagacccuggagcuggacauggccagccucaacaugaccaugccgcuguccugcacgaagaacaacagccaccacuacaucauggucggcaacgagaccggccuggagcucacccugaccaacacguccaucaucaaccacaaguucugcaaccugagcgacgcccacaagaagaaccucuacgaccacgcccugauguccaucaucagcaccuuccaccuguccauccccaacuucaaccaguacgaggccaugagcugcgacuucaacgggggcaagaucuccgugcaguacaaccucagccacgcguacgccguggacgccgccaaccacugcgggaccaucgcgaacggcguccugcagaccuucaugcggauggccuggggcggguccuacaucgcccuggacagcggcaagggguccugggacugcaucaugacgagcuaccaguaccucaucauccagaacaccaccugggaggaccacugccaguucucccgccccagccccaucggcuaccuggggcugcucagccagcggacccgcgacaucuacaucucccggcgccgccggggcacguucaccuggacccucagcgacuccgagggcaacgagacccccgggggcuacugccugacgcgguggaugcugaucgaggccgagcucaagugcuucgggaacaccgccguggcgaagugcaacgagaagcacgacgaggaguucugcgacaugcugcgccuguucgacuucaacaagcaggccauccggcgccucaaggcccccgcccagaugagcauccagcugaucaacaaggccgugaacgcgcugaucaacgaccagcucaucaugaagaaccaccuccgggacaucaugggcauccccuacugcaacuacuccaaguacugcuaccugaaccacaccgucaccgggaagacgagccugccccgcugcugccugguguccaacggcagcuaccugaacgagacccacuucuccgacgacaucgagcagcaggccgacaacaugaucaccgagcuccugcagaaggaguacaucgaccggcagggcaagaccccgcuggggcucguggaccuguucgucuucagcacguccuucuaccugaucagcaucuuccugcaccucgugaagaucccgacccaccgccacgugaucggcaagcccugccccaagccccaccggcugaaccacauggggaucugcuccugcggccuguacaagcacccggggguccccgugaaguggaagcgcugaggacuaguuauaagacugacuagcccgaugggccucccaacgggcccuccuccccuccuugcaccgagauuaaucaaaggcucuuuucagagccaccaaaaaaaaaaaaaaaaaaaaaaaaaaaaaaaaaaaaaaaaaaaaaaaaaaaaaaaaaaaaaaaaaaaaaaaaaaaaaaaaaaaaaaaaaaaaaaaaaaaaa

SEQ ID NO: 26101 - RNA, 1686 nt, Artificial Sequence
  mRNA product Design i-3 (hSL-A100) comprising derived and/or modified sequence from LASV(LASV1000-NIG-2009;Clade II)__AIT17782__GPCmut3 (opt1)
aggagaaagcuuaccaugggccagaucaucaccuucuuccaggaggugccccacgucaucgaggaggugaugaacaucgugcugaucgcccucagccugcuggccauccucaaggggaucuacaacgucgcgaccugcggccuguucgggcugguguccuuccuccugcugugcggccgcagcugcuccacgaccuacaaggggguguacgagcuccagacccuggagcuggacauggccagccucaacaugaccaugccgcuguccugcacgaagaacaacagccaccacuacaucauggucggcaacgagaccggccuggagcucacccugaccaacacguccaucaucaaccacaaguucugcaaccugagcgacgcccacaagaagaaccucuacgaccacgcccugauguccaucaucagcaccuuccaccuguccauccccaacuucaaccaguacgaggccaugagcugcgacuucaacgggggcaagaucuccgugcaguacaaccucagccacaccuacgcgguggacgccgccaaccacugcgggaccaucgccaacggcguccugcagacguucaugcggauggcguggggcggguccuacaucgcccuggacagcggcaagggguccugggacugcaucaugaccagcuaccaguaccucaucauccagaacaccaccugggaggaccacugccaguucucccgccccagccccaucggcuaccuggggcugcucagccagcggacgcgcgacaucuacaucucccggcgccgccggggcaccuucaccuggacccucagcgacuccgagggcaacgagacgcccgggggcuacugccugacccgguggaugcugaucgaggccgagcucaagugcuucgggaacaccgccguggccaagugcaacgagaagcacgacgaggaguucugcgacaugcugcgccuguucgacuucaacaagcaggcgaucaagcggcucaagacccccgcccagaugagcauccagcugaucaacaaggccgugaacgcccugaucaacgaccagcucaucaugaagaaccaccuccgcgacaucaugggcauccccuacugcaacuacuccaaguacugcuaccugaaccacacggucaccgggaagaccagccugccccggugcugccugguguccaacggcagcuaccugaacgagacccacuucuccgacgacaucgagcagcaggccgacaacaugaucacggagcuccugcagaaggaguacaucgaccgccagggcaagaccccgcuggggcucguggaccuguucgucuucagcaccuccuucuaccugaucagcaucuuccugcaccucgugaagaucccgacccaccggcacguggucggcaagcccugccccaagccccaccgccugaaccacauggggaucugcuccugcggccuguacaagcacccgggggugcccgugaaguggaagcggugaggacuaguuauaagacugacuagcccgaugggccucccaacgggcccuccuccccuccuugcaccgagauuaaucaaaggcucuuuucagagccaccaaaaaaaaaaaaaaaaaaaaaaaaaaaaaaaaaaaaaaaaaaaaaaaaaaaaaaaaaaaaaaaaaaaaaaaaaaaaaaaaaaaaaaaaaaaaaaaaaaaaa

SEQ ID NO: 26102 - RNA, 1686 nt, Artificial Sequence
  mRNA product Design i-3 (hSL-A100) comprising derived and/or modified sequence from LASV(LASV221-NIG-2010;Clade II)__AIT17624__GPCmut3 (opt1)
aggagaaagcuuaccaugggccagaucaucaccuucuuccaggaggugccccacgucaucgaggaggugaugaacaucgugcugaucgcccucagccugcuggccauccucaaggggaucuacaacgucgcgaccugcggccuguucgggcugguguccuuccuccugcugugcggccgcagcugcuccacgaccuacaaggggguguacgagcuccagacccuggagcuggacauggccagccucaacaugaccaugccgcuguccugcacgaagaacaacagccaccacuacaucauggucggcaacgagaccggccuggagcucacccugaccaacacguccaucaucaaccacaaguucugcaaccugagcgacgcccacaagaagaaccucuacgaccacgcccugauguccaucaucagcaccuuccaccuguccauccccaacuucaaccaguacgaggccaugagcugcgacuucaacgggggcaagaucuccgugcaguacaaccucagccacaccuacgcgaucgacgccgccaaccacugcgggaccaucgccaacggcgugcugcagacguucaugcggauggcguggggcggguccuacaucgcccuggacagcggcaagggguccugggacugcaucaugaccagcuaccaguaccucaucauccagaacaccaccugggaggaccacugccaguucucccgccccagccccaucggcuaccuggggcugcucagccagcggacgcgcgacaucuacaucucccggcgccgccggggcaccuucaccuggacccucagcgacuccgagggcaacgagacgcccgggggcuacugccugacccgguggaugcugaucgaggccgagcucaagugcuucgggaacaccgccgucgccaagugcaacgagaagcacgacgaggaguucugcgacaugcugcgccuguucgacuucaacaagcaggcgauccggcgccucaagacccccgcccagaugagcauccagcugaucaacaaggccgugaacgcccugaucaacgaccagcucaucaugaagaaccaccuccgggacaucaugggcauccccuacugcaacuacuccaaguacugcuaccugaaccacacggugaccgggaagaccagccugccccgcugcugccuggucuccaacggcagcuaccugaacgagacccacuucuccgacgacaucgagcagcaggccgacaacaugaucacggagaugcuccagaaggaguacauggaccggcagggcaagaccccgcuggggcugguggaccucuucguguucagcaccuccuucuaccugaucagcaucuuccugcaccuggucaagaucccgacccaccgccacgugaucggcaagcccugccccaagccccaccggcucaaccacauggggaucugcuccugcggccuguacaagcacccgggggugcccgucaaguggaagcgcugaggacuaguuauaagacugacuagcccgaugggccucccaacgggcccuccuccccuccuugcaccgagauuaaucaaaggcucuuuucagagccaccaaaaaaaaaaaaaaaaaaaaaaaaaaaaaaaaaaaaaaaaaaaaaaaaaaaaaaaaaaaaaaaaaaaaaaaaaaaaaaaaaaaaaaaaaaaaaaaaaaaaa

SEQ ID NO: 26103 - RNA, 1686 nt, Artificial Sequence
  mRNA product Design i-3 (hSL-A100) comprising derived and/or modified sequence from LASV(LASV237-NIG-2010;Clade II)__AIT17638__GPCmut3 (opt1)
aggagaaagcuuaccaugggccagaucaucaccuucuuccaggaggugccccacgucaucgaggaggugaugaacaucgugcugaucgcccucagccugcuggccauccucaaggggaucuacaacgucgcgaccugcggccuguucgggcugguguccuuccuccugcugugcggccgcagcugcuccacgaccuacaaggggguguacgagcuccagacccuggagcuggacauggccagccucaacaugaccaugccgcuguccugcacgaagaacaacagccaccacuacaucauggucggcaacgagaccggccuggagcucacccugaccaacacguccaucaucaaccacaaguucugcaaccugagcgacgcccacaagaaggaccucuacgaccacgcccugauguccaucaucagcaccuuccaccuguccauccccaacuucaaccaguacgaggccaugagcugcgacuucaacgggggcaagaucuccgugcaguacaaccucagccacaccuacgcgguggacgccgccaaccacugcgggaccaucgccaacggcguccugcagacguucaugcggauggcguggggcggguccuacaucgcccuggacagcggcaagggguccugggacugcaucaugaccagcuaccaguaccucaucauccagaacaccaccugggaggaccacugccaguucucccgccccagccccaucggcuaccuggggcugcucagccagcggacgcgcgacaucuacaucucccggcgccgccggggcaccuucaccuggacccucagcgacuccgagggcaacgagacgcccgggggcuacugccugacccgguggaugcugaucgaggccgagcucaagugcuucgggaacaccgccguggccaagugcaacgagaagcacgacgaggaguucugcgacaugcugcgccuguucgacuucaacaagcaggcgauccggcgccucaagacccccgcccagaugagcauccagcugaucaacaaggccgugaacgcccugaucaacgaccagcucaucaugaagaaccaccuccgggacaucaugggcauccccuacugcaacuacuccaaguacugcuaccugaaccacacggucaccgggaagaccagccugccccgcugcugccugguguccaacggcagcuaccugaacgagacccacuucuccgacgacaucgagcagcaggccgacaacaugaucacggagcuccugcagaaggaguacauggaccggcagggcaagaccccgcuggggcucguggaccuguucgucuucagcaccuccuucuaccugaucagcaucuuccugcaccucaucaagaucccgacccaccgccacaucacgggcaagcccugccccaagccccaccggcugaaccacauggggaucugcuccugcggccuguacaagcacccgggggugcccgugaaguggaagcgcugaggacuaguuauaagacugacuagcccgaugggccucccaacgggcccuccuccccuccuugcaccgagauuaaucaaaggcucuuuucagagccaccaaaaaaaaaaaaaaaaaaaaaaaaaaaaaaaaaaaaaaaaaaaaaaaaaaaaaaaaaaaaaaaaaaaaaaaaaaaaaaaaaaaaaaaaaaaaaaaaaaaaa

SEQ ID NO: 26104 - RNA, 1686 nt, Artificial Sequence
  mRNA product Design i-3 (hSL-A100) comprising derived and/or modified sequence from LASV(LASV253-NIG-2011;Clade II)__AIT17670__GPCmut3 (opt1)
aggagaaagcuuaccaugggccagaucaucaccuucuuccaggaggugccccacgucaucgaggaggugaugaacaucgugcugaucgcccucagccugcuggccauccucaaggggaucuacaacgucgcgaccugcggccuguucgggcugguguccuuccuccugcugugcggccgcagcugcuccacgaccuacaaggggguguacgagcuccagacccuggagcuggacauggccagccucaacaugaccaugccgcuguccugcacgaagaacaacagccaccacuacaucauggucggcaacgagaccggccuggagcucacccugaccaacacguccaucaucaaccacaaguucugcaaccugagcgacgcccacaagaagaaccucuacgaccacgcccugauguccaucaucagcaccuuccaccuguccauccccaacuucaaccaguacgaggccaugagcugcgacuucaacgggggcaagaucuccgugcaguacaaccucagccacaccuacgcgguggacgccgccaaccacugcgggaccaucgccaacggcguccugcagacguucaugcggauggcguggggcggguccuacaucgcccuggacagcggcaagggguccugggacugcaucaugaccagcuaccaguaccucaucauccagaacaccaccugggaggaccacugccaguucucccgccccagccccaucggcuaccuggggcugcucagccagcggacgcgcgacaucuacaucucccggcgccgccggggcaccuucaccuggacccucagcgacuccgagggcaacgagacgcccgggggcuacugccugacccgguggaugcugaucgaggccgagcucaagugcuucgggaacaccgccguggccaagugcaacgagaagcacgacgaggaguucugcgacaugcugcgccuguucgacuucaacaagcaggcgauccggcgccucaaggcccccgcccagaugagcauccagcugaucaacaaggccgugaacgcccugaucaacgaccagcucaucaugaagaaccaccuccgggacaucaugggcaucccguacugcaacuacuccaaguacugcuaccugaaccacaccgucacggggcgcaccagccugccccggugcugccugguguccaacggcagcuaccugaacgagacccacuucuccgacgacaucgagcagcaggcggacaacaugaucaccgagcuccugcagaaggaguacaucgaccgccagggcaagacgccccuggggcucguggaccuguucgucuucagcaccuccuucuaccugaucagcaucuuccugcaccucgugaagaucccgacccaccggcacaucaucggcaagcccugccccaagccccaccgccugaaccacauggggaucugcuccugcggccuguacaagcacccgggggugcccgucaaguggaagcggugaggacuaguuauaagacugacuagcccgaugggccucccaacgggcccuccuccccuccuugcaccgagauuaaucaaaggcucuuuucagagccaccaaaaaaaaaaaaaaaaaaaaaaaaaaaaaaaaaaaaaaaaaaaaaaaaaaaaaaaaaaaaaaaaaaaaaaaaaaaaaaaaaaaaaaaaaaaaaaaaaaaaa

SEQ ID NO: 26105 - RNA, 1686 nt, Artificial Sequence
  mRNA product Design i-3 (hSL-A100) comprising derived and/or modified sequence from LASV(LASV254-NIG-2011;Clade II)__AIT17674__GPCmut3 (opt1)
aggagaaagcuuaccaugggccagaucaucaccuucuuccaggaggugccccacgucaucgaggaggugaugaacaucgugcugaucgcccucagccugcuggccauccucaaggggaucuacaacgucgcgaccugcggccuguucgggcugguguccuuccuccugcugugcggccgcagcugcuccacgaccuacaaggggguguacgagcuccagacccuggagcuggacaugaccaaccucaacaugacgaugccgcugagcugcaccaagaacaacucccaccacuacaucauggucggcaacgagaccggccuggagcucacccugacgaacaccagcaucaucaaccacaaguucugcaaccuguccgacgcccacaagaagaaccucuacaaccacgcccugaugagcaucaucuccaccuuccaccugagcauccccaacuucaaccaguacgaggccauguccugcgacuucaacgggggcaagaucagcgugcaguacaaccucucccacagcuacgccguggacgcggccaaccacugcgggaccaucgccaacggcguccugcagacguucaugcggauggccuggggcggguccuacaucgcgcuggacagcggcaaggggaacugggacugcaucaugaccuccuaccaguaccucaucauccagaacaccaccugggaggaccacugccaguucagccgccccucccccaucggcuaccuggggcugcucagccagcggacgcgcgacaucuacaucagccggcgccgccggggcaccuucaccuggacccucuccgacagcgagggcaacgagacgcccgggggcuacugccugacccgguggaugcugaucgaggccgagcucaagugcuucgggaacaccgccguggccaagugcaacgagaagcacgacgaggaguucugcgacaugcugcgccuguucgacuucaacaagcaggccauccggcgccucaagacccccgcgcaggccaacauccagcugaucaacaaggccgugaacgcccugaucaacgaccagcucaucaugaagaaccaccuccgggacaucaugggcauccccuacugcaacuacuccaaguacugcuaccugaaccacacggucaccgggaagaccagccugccccgcugcugccugguguccaacggcagcuaccugaacgagacccacuucuccgacgacaucgagcagcaggccgacaacaugaucacggagcuccugcagaaggaguacauggaccggcagggcaagaccccgcuggggcucguggaccuguucgucuucagcaccuccuucuaccugaucagcaucuuccugcaccucgugaagaucccgacccaccgccacgugaucggcaagcccugccccaagccccaccggcugaaccacauggggaucugcuccugcggccuguacaagcacccggggguccccgugaaguggaagcgcugaggacuaguuauaagacugacuagcccgaugggccucccaacgggcccuccuccccuccuugcaccgagauuaaucaaaggcucuuuucagagccaccaaaaaaaaaaaaaaaaaaaaaaaaaaaaaaaaaaaaaaaaaaaaaaaaaaaaaaaaaaaaaaaaaaaaaaaaaaaaaaaaaaaaaaaaaaaaaaaaaaaaa

SEQ ID NO: 26106 - RNA, 1686 nt, Artificial Sequence
  mRNA product Design i-3 (hSL-A100) comprising derived and/or modified sequence from LASV(Nig08-A19;Clade III)__ADU56618__GPCmut3 (opt1)
aggagaaagcuuaccaugggccagaucgugaccuucuuccaggaggucccccacgugaucgaggaggugaugaacaucguccugaucgcccucagcauccuggccauccugaaggggcucuacaacaucgcgaccugcggccugaucgggcuggugacguuccuccugcuguccggccgcagcugcuccaugaccuacaaggggguguacgagcuccagacccuggagcugaacaugaacacccucaacaugacgaugccgcugagcugcaccaagaacaacucccaccacuacaucauggucggcaacgagaccggccuggagcucacccugacgaacaccagccugcuccaccacaaguucugcaaccuguccgacgcccacaagaagaaccuguacgaccacacccucaugagcaucaucuccaccuuccaccugagcauccccaacuucaaccaguacgaggccauguccugcgacuucaacgggggcaagaucacggugcaguacaaccugagccacuccuacgccaucgacgccgcgaaccacugcgggaccguggccaacggcguccuccagaccuucaugcggauggccuggggcgggagcuacaucgcccuggacuccggccgcgggaagugggacugcaucaugaccagcuaccaguaccugaucauccagaacacgaccugggaggaccacugccaguucucccggcccagccccaucggcuaccucgggcugcugucccagcgcacccgggacaucuacaucagccgccggcgccggggcaccuucacguggacccugagcgacuccgagggcaacgagacccccgggggcuacugccucacccgcuggaugcugaucgaggcggagcugaagugcuucgggaacacggccguggccaagugcaacgagaagcacgacgaggaguucugcgacaugcuccggcuguucgacuucaacaagcaggccauccgccggcugaaggcccccgcgcagaugagcauccagcucaucaacaaggccgugaacgcccugaucaacgaccagcugaucaugaagaaccaccuccgcgacaucaugggcauccccuacugcaacuacuccaaguacugcuaccugaaccacaccagcaccgggcggaccucccugccccgcugcugccucgucagcaacggcuccuaccugaacgagacgcacuucagcgacgacaucgagcagcaggccgacaacaugaucaccgagaugcugcagaaggaguaccucgaccggcagggcaagaccccgcuggggcugguggaccuguucguguucuccaccagcuucuaccucaucuccaucuuccugcaccuggucaagaucccgacgcaccgccacaucgugggcaagcccugccccaagccccaccggcucaaccacauggggaucugcagcugcggccuguacaagcagccgggggugcccguccgcuggaagcggugaggacuaguuauaagacugacuagcccgaugggccucccaacgggcccuccuccccuccuugcaccgagauuaaucaaaggcucuuuucagagccaccaaaaaaaaaaaaaaaaaaaaaaaaaaaaaaaaaaaaaaaaaaaaaaaaaaaaaaaaaaaaaaaaaaaaaaaaaaaaaaaaaaaaaaaaaaaaaaaaaaaaa

SEQ ID NO: 26107 - RNA, 1689 nt, Artificial Sequence
  mRNA product Design i-3 (hSL-A100) comprising derived and/or modified sequence from LASV(G1180-SLE-2010;Clade IV)__AIT17168__GPCmut3 (opt1)
aggagaaagcuuaccaugggccagaucgugaccuucuuccaggaggucccccacgugaucgaggaggugaugaacaucguccugaucgcccucagcauccuggccgugcugaaggggcucuacaacuucgcgaccugcggccugguggggcugcucaccuuccugcugcucugcggccgcuccugcaccgccagccgguacaagggggucuacgagcugcagacccuggagcucaacauggagacccugaacaugacgaugccgcuguccugcaccaagaacaacagccaccacuacaucauggugggcaacgagaccggccucgagcugacccugacgaacaccuccaucaucaaccacaaguucugcaaccucagcgacgcccacaagaagaaccuguacgaccacgcccugauguccaucaucagcaccuuccaccucuccauccccaacuucaaccaguacgaggccaugagcugcgacuucaacgggggcaagaucuccgugcaguacaaccugagccacuccuacgcgggggacgccgccaaccacugcggcaccgucgccaacggggugcugcagacguucaugcgcauggcguggggcggcagcuacaucgcccucgacuccgggcacggcagcugggacugcaucaugaccuccuaccaguaccugaucauccagaacaccaccugggaggaccacugccaguucagccggcccucccccaucggguaccugggccuccugagccagcgcacgcgggacaucuacaucagccgccggcgccggggcaccuucaccuggacccuguccgacagcgaggggaaggacacgccgggcggguacugccugacccgcuggaugcucaucgaggccgagcugaagugcuucggcaacaccgccguggccaagugcaacgagaagcacgacgaggaguucugcgacaugcugcggcuguucgacuucaacaagcaggcgauccagcgccugaaggcccccgcccagauguccauccagcugaucaacaaggccgucaacgcccucaucaacgaccagcugaucaugaagaaccaccuccgggacaucauggggauccccuacugcaacuacagcaaguacugcuaccucaaccacaccacgaccggcaagaccucccugcccaagugcugccuggugagcaacggcuccuaccucaacgagacccacuucagcgacgacaucgagcagcaggcggacaacaugaucacggagaugcugcagaaggaguacauggagcgccaggggaagacgccccugggccucguggaccuguucgucuucuccaccagcuucuaccugaucuccaucuuccugcaccucgugaagaucccgacccaccggcacaucgugggcaagagcugccccaagccccaccgccugaaccacauggggaucugcuccugcgggcuguacaagcagcccggcgucccggugaaguggaagcggugaggacuaguuauaagacugacuagcccgaugggccucccaacgggcccuccuccccuccuugcaccgagauuaaucaaaggcucuuuucagagccaccaaaaaaaaaaaaaaaaaaaaaaaaaaaaaaaaaaaaaaaaaaaaaaaaaaaaaaaaaaaaaaaaaaaaaaaaaaaaaaaaaaaaaaaaaaaaaaaaaaaaa

SEQ ID NO: 26108 - RNA, 1689 nt, Artificial Sequence
  mRNA product Design i-3 (hSL-A100) comprising derived and/or modified sequence from LASV(G1442-SLE-2011;Clade IV)__AIT17180__GPCmut3 (opt1)
aggagaaagcuuaccaugggccagaucgugaccuucuuccaggaggucccccacgugaucgaggaggugaugaacaucguccugaucgcccucagcauccuggccgugcugaaggggcucuacaacguggcgaccugcggccugaucgggcuggucacguuccuccugcugugcggccgcuccugcaccaccacccucuacaaggggguguacgagcugcagacgcuggagcucaacauggagacccugaacaugaccaugccgcugagcugcaccaagaacaacucccaccacuacauccgggugggcaacgagacgggccucgagcugacccugaccaacaccagcaucaucaaccacaaguucugcaaccucuccgacgcccacaagaagaaccuguacgaccacgcccugaugagcaucaucuccacguuccaccucagcauccccaacuucaaccaguacgaggccauguccugcgacuucaacgggggcaagaucagcguccaguacaaccugucccacagcuacgccggggacgcggccaaccacugcggcaccguggccaacggggugcugcagaccuucaugcgcauggccuggggcggcuccuacaucgcgcucgacagcgggcggggcaacugggacugcaucaugaccuccuaccaguaccugaucauccagaacacgaccugggacgaccacugccaguucagccgccccucccccaucggguaccugggccuccugagccagcggacccgcgacgucuacaucucccggcgccgccggggcaccuucacguggacccugagcgacagcgaggggaaggacaccccgggcggguacugccugacccgguggaugcucaucgaggccgagcugaagugcuucggcaacacggccguggccaagugcaacgagaagcacgacgaggaguucugcgacaugcugcgccucuucgacuucaacaagcaggccauccagcggcugaaggcgcccgcccagauguccauccagcugaucaacaaggccgugaacgcccucaucaacgaccagcugaucaugaagaaccaccuccgcgacaucauggggauccccuacugcaacuacagcaaguacugcuaccugaacaacaccgccaccggcaagaccucccugcccaagugcugccugaucagcaacggcuccuaccucaacgagacgcacuucagcgacgacaucgagcaggaggcggacaacaugaucaccgagaugcugcagaaggaguacauggagcggcaggggaagacgccccugggccucgucgaccuguucguguucuccaccagcuucuaccugaucuccaucuuccugcaccucgugaagaucccgacccaccgccacaucgucggcaagagcugccccaagccccaccggcugaaccacauggggaucugcuccugcgggcuguacaagcagcccggcgugccggugcgcuggaagcggugaggacuaguuauaagacugacuagcccgaugggccucccaacgggcccuccuccccuccuugcaccgagauuaaucaaaggcucuuuucagagccaccaaaaaaaaaaaaaaaaaaaaaaaaaaaaaaaaaaaaaaaaaaaaaaaaaaaaaaaaaaaaaaaaaaaaaaaaaaaaaaaaaaaaaaaaaaaaaaaaaaaaa

SEQ ID NO: 26109 - RNA, 1689 nt, Artificial Sequence
  mRNA product Design i-3 (hSL-A100) comprising derived and/or modified sequence from LASV(G3010-SLE-2013;Clade IV)__AIT17344__GPCmut3 (opt1)
aggagaaagcuuaccaugggccagaucgugaccuucuuccaggaggucccccacgugaucgaggaggugaugaacaucguccugaucgcccucagcauccuggccgugcugaaggggcucuacaacuucgcgaccugcggccugguggggcuggucacguuccuccugcugugcggccgcuccugcaccaccagccucuacaaggggguguacgagcugcagacccuggagcucaacauggagacgcugaacaugaccaugccgcuguccugcaccaagaacaacagccaccacuacaucauggugggcaacgagaccggccucgagcugacgcugaccaacaccuccaucaucaaccacaaguucugcaaccucagcgacgcccacaagaagaaccuguacaaccacgcccugauguccaucaucagcaccuuccaccucuccauccccaacuucaaccaguacgaggccaugagcugcgacuucaacgggggcaagaucuccguccaguacaaccugagccacuccuacgccggggacgcggccagccacugcggcacgguggccaacggggugcugcagaccuucaugcggauggccuggggcggcuccuacaucgcgcucgacagcggguacggcaagugggacugcaucaugaccuccuaccaguaccugaucauccagaacaccacgugggaggaccacugccaguucagccgccccucccccaucggguaccugggccuccugagccagcggacccgcgacaucuacaucagccggcgccgccggggcaccuucaccuggacgcuguccgacagcgaggggaaggacaccccgggcggguacugccugacccgguggaugcucaucgaggccgagcugaagugcuucggcaacaccgccgucgccaagugcaacgagaagcacgacgaggaguucugcgacaugcugcgccucuucgacuucaacaagcaggccauccagcggcugaagacgcccgcgcagauguccauccagcugaucaacaaggccgugaacgcccucaucaacgaccagcugaucaugaagaaccaccuccgcgacaucauggggauccccuacugcaacuacagcaaguacugcuaccugaaccacaccaccaccggcaagacgucccugcccaagugcugccuggugagcaacggcuccuaccucaacgagacccacuucagcgacgacaucgagcagcaggccgacaacaugaucaccgagaugcugcagaaggaguacauggagcggcaggggaagacgccccugggccucgucgaccuguucguguucuccaccagcuucuaccugaucuccaucuuccugcaccucgugaagaucccgacccaccgccacaucgucggcaagagcugccccaagccccaccggcugaaccacauggggaucugcuccugcgggcuguacaagcagcccggcgugccggugcgcuggaagcggugaggacuaguuauaagacugacuagcccgaugggccucccaacgggcccuccuccccuccuugcaccgagauuaaucaaaggcucuuuucagagccaccaaaaaaaaaaaaaaaaaaaaaaaaaaaaaaaaaaaaaaaaaaaaaaaaaaaaaaaaaaaaaaaaaaaaaaaaaaaaaaaaaaaaaaaaaaaaaaaaaaaaa

SEQ ID NO: 26110 - RNA, 1689 nt, Artificial Sequence
  mRNA product Design i-3 (hSL-A100) comprising derived and/or modified sequence from LASV(G502-SLE-2009;Clade IV)__AIT17126__GPCmut3 (opt1)
aggagaaagcuuaccaugggccagaucgugaccuucuuccaggaggucccccacgugaucgaggaggugaugaacaucguccugaucgcccucagcauccuggccgugcugaaggggcucuacaacuucgcgaccugcggccugguggggcugcucacguuccugcugcucugcggccgcuccugcaccaccgggcuguacaagggcgucuacgagcugcagacccucgagcugaacauggagacgcugaacaugaccaugccgcucagcugcaccaagaacaacucccaccacuacaucauggugggcaacgagaccgggcuggagcugacgcucaccaacaccagcaucaucaaccacaaguucugcaaccuguccgacgcccacaagaagaaccuguacgaccacgcccucaugagcaucaucuccaccuuccaccugagcauccccaacuucaaccaguacgaggccauguccugcgacuucaacggcgggaagaucagcgugcaguacaaccugucccacagcuacgccggcgacgcggccgaccacugcgggacggucgccaacggcgugcuccagaccuucaugcggauggccuggggcggguccuacaucgcgcuggacagcggccgcgggcggugggacugcaucaugaccuccuaccaguaccugaucauccagaacaccacgugggaggaccacugccaguucagccgccccucccccaucggcuaccucggccugcugagccagcggacccgcgacaucuacaucucccggcgccgccgggggaccuucaccuggacgcugagcgacagcgagggcaaggacacccccgggggcuacugccucacccgguggaugcugaucgaggccgagcugaagugcuucgggaacaccgccguggccaagugcaacgagaagcacgacgaggaguucugcgacaugcuccgccuguucgacuucaacaagcaggccauccagcggcugaaggcgcccgcccagauguccauccagcucaucaacaaggccgucaacgcccugaucaacgaccagcuggugaugaagaaccaccuccgcgacaucaugggcauccccuacugcaacuacagccgguacugcuaccugaaccacacgaccaccggccgcaccucccugcccaagugcugccucgugagcaacggguccuaccugaacgagacgcacuucagcgacgacaucgagcagcaggccgacaacaugaucaccgagaugcugcagaaggaguacauggagcggcagggcaagaccccgcucgggcuggucgaccuguucguguucuccaccagcuucuaccugaucuccaucuuccuccaccuggugaagaucccgacgcaccgccacaucgucggcaagagcugccccaagccccaccggcugaaccacauggggaucugcuccugcggccucuacaagcagcccggcgugccggugaaguggaagcgcugaggacuaguuauaagacugacuagcccgaugggccucccaacgggcccuccuccccuccuugcaccgagauuaaucaaaggcucuuuucagagccaccaaaaaaaaaaaaaaaaaaaaaaaaaaaaaaaaaaaaaaaaaaaaaaaaaaaaaaaaaaaaaaaaaaaaaaaaaaaaaaaaaaaaaaaaaaaaaaaaaaaaa

SEQ ID NO: 26111 - RNA, 1689 nt, Artificial Sequence
  mRNA product Design i-3 (hSL-A100) comprising derived and/or modified sequence from LASV(G733-SLE-2010;Clade IV)__AIT17154__GPCmut3 (opt1)
aggagaaagcuuaccaugggccagaucgugaccuucuuccaggaggucccccacgugaucgaggaggugaugaacaucguccugaucgcccucagcauccuggccgugcugaaggggcucuacaacuucgcgaccugcggcaucguggggcuggucuccuuccugcuccugugcggccgcagcugcacgaccucccuguacaaggggguguacgagcuccagacccuggagcugaacauggagacccucaacaugacgaugccgcugagcugcaccaagaacaacucccaccacuacaucauggugggcaacgagaccggccuggagcucacccugacgaacaccagcaucaucaaccacaaguucugcaaccuguccgacgcccacaagaagaaccucuacgaccacgcccugaugagcaucaucuccaccuuccaccugagcauccccaacuucaaccaguacgaggccauguccugcgacuucaacgggggcaagaucagcguccaguacaaccucucccacagcuacgccggggacgcggccaaccacugcggcaccaucgccaacggggugcugcagacguucaugcggauggccuggggcggcuccuacaucgcgcuggacagcgggcgcgaccggugggacugcaucaugaccuccuaccaguaccucaucauccagaacaccaccugggaggaccacugccaguucagccgccccucccccaucggcuaccuggggcugcucagccagcggacgcgcgacaucuacaucagccggcgccgccggggcaccuucaccuggacccucuccgacagcgagggcaaggacacgcccgggggcuacugccugacccgguggaugcugaucgaggccgagcucaagugcuucgggaacaccgccguggccaagugcaacgagaagcacgacgaggaguucugcgacaugcugcgccuguucgacuucaacaagcaggccauccagcggcucaaggcgcccgcccagauguccauccagcugaucaacaaggccgucaacgcccugaucaacgaccagcucaucaugaagaaccaccuccgcgacaucaugggcauccccuacugcaacuacagcaaguacugcuaccugaaccacaccacgaccgggaagaccucccugcccaagugcugccuggugagcaacggcuccuaccugaacgagacccacuucagcgacgacaucgagcagcaggccgacaacaugaucacggagaugcuccagaaggaguacauggagcggcagggcaagaccccgcuggggcugguggaccucuucgucuucuccaccagcuucuaccugaucuccaucuuccugcaccuggugaagaucccgacccaccgccacguggucggcaagagcugccccaagccccaccggcucaaccacauggggaucugcuccugcggccuguacgggcagcccggcgugccggugaaguggaagcgcugaggacuaguuauaagacugacuagcccgaugggccucccaacgggcccuccuccccuccuugcaccgagauuaaucaaaggcucuuuucagagccaccaaaaaaaaaaaaaaaaaaaaaaaaaaaaaaaaaaaaaaaaaaaaaaaaaaaaaaaaaaaaaaaaaaaaaaaaaaaaaaaaaaaaaaaaaaaaaaaaaaaaa

SEQ ID NO: 26112 - RNA, 1689 nt, Artificial Sequence
  mRNA product Design i-3 (hSL-A100) comprising derived and/or modified sequence from MOPV/LASV reassortant(IGS-1;Clade IV)__AFY05576__GPCmut3 (opt1)
aggagaaagcuuaccaugggccagaucgugaccuucuuccaggaggucccccacgugaucgaggaggugaugaacaucguccugaucgcccucagcgugcuggccgugcugaaggggcucuacaacuucgcgaccugcggccuggucgggcuggugacguuccuccugcugugcggccgcuccugcaccaccagccucuacaaggggguguacgagcugcagacccuggagcucaacauggagacgcugaacaugaccaugccgcuguccugcaccaagaacaacagccaccacuacaucauggucggcaacgagaccggccucgagcugacgcugaccaacaccuccaucaucaaccacaaguucugcaaccucagcgacgcccacaagaagaaccuguacgaccacgcccugauguccaucaucagcaccuuccaccucuccauccccaacuucaaccaguacgaggccaugagcugcgacuucaacgggggcaagaucuccgugcaguacaaccugagccacuccuacgccggggacgcggccaaccacugcggcacgguggccaacgggguccugcagaccuucaugcggauggccuggggcggcagcuacaucgcgcucgacuccgggcgcggcaacugggacugcaucaugaccagcuaccaguaccugaucauccagaacaccacgugggaggaccacugccaguucucccggcccagccccaucggguaccugggccuccugucccagcgcacccgggacaucuacaucagccgccggcgccggggcaccuucaccuggacgcugagcgacuccgagggggaggacaccccgggcggguacugccugacccgcuggaugcucaucgaggccgagcugaagugcuucggcaacaccgccguggccaagugcaacgagaagcacgacgaggaguucugcgacaugcugcggcuguucgacuucaacaagcaggccauccagcgccugaaggcgcccgcccagaugagcauccagcugaucaacaaggccgugaacgcccucaucaacgaccagcugaucaugaagaaccaccuccgggacaucauggggauccccuacugcaacuacuccaaguacugcuaccucaaccacacgaccaccggccgcaccagccugcccaagugcugccuggucuccaacggcagcuaccucaacgagacgcacuucuccgacgacaucgagcagcaggccgacaacaugaucaccgagaugcugcagaaggaguacauggagcggcaggggaagacgccccugggccucguggaccuguucguguucagcaccuccuucuaccugaucagcaucuuccugcaccucgucaagaucccgacccaccgccacaucguggggaaguccugccccaagccccaccggcugaaccacaugggcaucugcagcugcgggcuguacaagcagcccggcgugccggucaaguggaagcgcugaggacuaguuauaagacugacuagcccgaugggccucccaacgggcccuccuccccuccuugcaccgagauuaaucaaaggcucuuuucagagccaccaaaaaaaaaaaaaaaaaaaaaaaaaaaaaaaaaaaaaaaaaaaaaaaaaaaaaaaaaaaaaaaaaaaaaaaaaaaaaaaaaaaaaaaaaaaaaaaaaaaaa

SEQ ID NO: 26113 - RNA, 1689 nt, Artificial Sequence
  mRNA product Design i-3 (hSL-A100) comprising derived and/or modified sequence from LASV(LM765-SLE-2012;Clade IV)__AIT17814__GPCmut3 (opt1)
aggagaaagcuuaccaugggccagaucgugaccuucuuccaggaggucccccacgugaucgaggaggugaugaacaucguccugaucgcccucagcauccuggccgugcugaaggggcucuacaacuucgcgaccugcggccugguggggcuggucacguuccuccugcugugcggccgcuccugcaccaccagccucuacaaggggguguacgagcugcagacccuggagcucaacauggagacgcugaacaugaccaugccgcuguccugcaccaagaacaacagccaccacuacaucauggugggcaacgagaccggccucgagcugacgcugaccaacaccuccaucaucgaccacaaguucugcaaccucagcgacgcccaccggaagaaccuguacgaccacgcccugauguccaucaucagcaccuuccaccucuccauccccaacuucaaccaguacgaggccaugagcugcgacuucaacgggggcaagaucuccguccaguacaaccugagccacuccuacgccaaggacgcggccgaccacugcgggacgguggccaacggcgugcugcagaccuucaugcgcauggccuggggcgggagcuacaucgcgcucgacuccggccgggggcgcugggacugcaucaugaccagcuaccaguaccugaucauccagaacaccacgugggaggaccacugccaguucucccggcccagccccaucggcuaccuggggcuccugucccagcgcacccgggacaucuacaucagccgccggcgccggggcaccuucaccuggacgcugagcgacuccgagggcaaggacacccccgggggcuacugccugacccgcuggaugcucaucgaggccgagcugaagugcuucgggaacaccgccgucgccaagugcaacgagaagcacgacgaggaguucugcgacaugcugcggcuguucgacuucaacaagcaggccauccagcgccugaaggcgcccgcccagaugagcauccagcugaucaacaaggccgugaacgcccucaucaacgaccagcugaucaugaagaaccaccuccgggacaucaugggcauccccuacugcaacuacuccaaguacugcuaccucaaccacacgaccaccgggaagaccagccugcccaagugcugccugguguccaacggcagcuaccucaacgagacgcacuucuccgacgacaucgagcagcaggccgacaacaugaucaccgagaugcugcagaaggaguacauggagcgccagggcaagaccccgcuggggcucgucgaccuguucguguucagcaccuccuucuaccugaucagcaucuuccugcaccucgugaagaucccgacgcaccggcacaucgucggcaagcccugccccaagccccaccgccugaaccacauggggaucugcuccugcggccuguacaagcagccgggggugcccgugaaguggaagcggugaggacuaguuauaagacugacuagcccgaugggccucccaacgggcccuccuccccuccuugcaccgagauuaaucaaaggcucuuuucagagccaccaaaaaaaaaaaaaaaaaaaaaaaaaaaaaaaaaaaaaaaaaaaaaaaaaaaaaaaaaaaaaaaaaaaaaaaaaaaaaaaaaaaaaaaaaaaaaaaaaaaaa

SEQ ID NO: 26114 - RNA, 1689 nt, Artificial Sequence
  mRNA product Design i-3 (hSL-A100) comprising derived and/or modified sequence from LASV(LM776-SLE-2012;Clade IV)__AIT17824__GPCmut3 (opt1)
aggagaaagcuuaccaugggccagaucgugaccuucuuccaggaggucccccacgugaucgaggaggugaugaacaucguccugaucgcccucagcauccuggccgugcugaaggggcucuacaacuucgcgaccugcggccugguggggcuggucacguuccuccugcugugcggccgcuccugcaccaccagcguguacaaggggguguacgagcuccagacccuggagcugaacauggagacgcucaacaugaccaugccgcuguccugcaccaagaacaacagccaccacuacaucauggucggcaacgagaccggccuggagcucacgcugaccaacaccuccaucaucaaccacaaguucugcaaccugagcgacgcccacaagaagaaccucuacgaccacgcccugauguccaucaucagcaccuuccaccuguccauccccaacuucaaccaguacgaggccaugagcugcgacuucaacgggggcaagaucuccgugcaguacaaccucagccacuccuacgccggggacgcggccaaccacugcggcacgguggccaacgggguccugcagaccuucaugcggauggccuggggcggcagcuacaucgcgcuggacuccgggcacggcaagugggacugcaucaugaccagcuaccaguaccucaucauccagaacaccacgugggaggaccacugccaguucucccgccccagccccaucggguaccugggccugcucucccagcggacccgcgacaucuacaucagccggcgccgccggggcaccuucaccuggacgcucagcgacuccgaggggaaggacaccccgggcggguacugccugacccgguggaugcugaucgaggccgagcucaagugcuucggcaacaccgccguggccaagugcaacgagaagcacgacgaggaguucugcgacaugcugcgccuguucgacuucaacaagcaggccauccagcggcucaaggcgcccgcccagaugagcauccagcugaucaacaaggccgugaacgcccugaucaacgaccagcucaucaugaagaaccaccuccgcgacaucauggggauccccuacugcaacuacuccaaguacugcuaccugaaccacacgaccaccggcaagaccagccugcccaagugcugccuggucuccaacggcagcuaccugaacgagacgcacuucuccgacgacaucgagcagcaggccgacaacaugaucaccgagaugcuccagaaggaguacauggagcggcaggggaagacgccccugggccugguggaccucuucguguucagcaccuccuucuaccugaucagcaucuuccugcaccuggucaagaucccgacccaccgccacaucguggggaaguccugccccaagccccaccggcucaaccacaugggcaucugcagcugcgggcuguacaagcagcccggcgugccgguccgcuggaagcggugaggacuaguuauaagacugacuagcccgaugggccucccaacgggcccuccuccccuccuugcaccgagauuaaucaaaggcucuuuucagagccaccaaaaaaaaaaaaaaaaaaaaaaaaaaaaaaaaaaaaaaaaaaaaaaaaaaaaaaaaaaaaaaaaaaaaaaaaaaaaaaaaaaaaaaaaaaaaaaaaaaaaa

SEQ ID NO: 26115 - RNA, 1689 nt, Artificial Sequence
  mRNA product Design i-3 (hSL-A100) comprising derived and/or modified sequence from LASV(Mad39;Clade IV)__ANH09722__GPCmut3 (opt1)
aggagaaagcuuaccaugggccagaucgugaccuucuuccaggaggucccccacgugaucgaggaggugaugaacaucguccugaucgcccucagcauccuggccgugcugaaggggcucuacaacguggcgaccugcggccugaucgggcuggucacguuccuccugcugugcggccgcuccugcaccaccacccucuacaaggggguguacgagcugcaggcccuggagcucaacauggagacgcugaacaugaccaugccgcugagcugcaccaagaacaacucccaccacuacauccgggugggcaacgagaccggccucgagcugacgcugaccaacaccagccucaucaaccacaaguucugcaaccuguccgacgcccacaagaagaaccuguacgaccacgcccucaugagcaucaucuccaccuuccaccugagcauccccaacuucaaccaguacgaggccauguccugcgacuucaacgacgggaagaucagcguccaguacaaccugucccacacguacgcgggcgacaccgccaaccacugcgggaccguggccaacggcgugcuccagaccuucaugcgcauggccuggggcgggagcuacaucgcgcuggacuccggccgcgggggcugggacugcaucaugacgagcuaccaguaccugaucauccagaacaccaccugggaggaccacugccaguucucccggcccagccccaucggguaccucggccugcugucccagcggacccgcgacaucuacaucagccggcgccgccggggcacguucaccuggacccuguccgacagcgaggggaaggacaccccgggcggguacugccucacgcgguggaugcugaucgaggccgagcugaagugcuucggcaacaccgccgucgccaagugcaacgagaagcacgacgaggaguucugcgacaugcuccgccuguucgacuucaacaagcaggccauccagcggcugaaggcgcccgcccagaugagcauccagcucaucaacaaggccgugaacgcccugaucaacgaccagcugaucaugaagaaccaccuccgcgacaucauggggauccccuacugcaacuacuccaaguacugcuaccugaaccacaccgugaccggcaagacgagccugcccaagugcugccucgucuccaacggcagcuaccugaacgagacccacuucuccgacgacaucgagcagcaggccgacaacaugaucaccgagaugcugcagaaggaguacauggagcggcaggggaagacgccccucggccugguggaccuguucguguucagcaccuccuucuaccugaucagcaucuuccuccaccuggucaagaucccgacccaccgccacgugguggggaagcccugccccaagccccaccggcugaaccacaugggcaucugcuccugcggguucuacaagcagccgggcguccccgugcgcuggaagcggugaggacuaguuauaagacugacuagcccgaugggccucccaacgggcccuccuccccuccuugcaccgagauuaaucaaaggcucuuuucagagccaccaaaaaaaaaaaaaaaaaaaaaaaaaaaaaaaaaaaaaaaaaaaaaaaaaaaaaaaaaaaaaaaaaaaaaaaaaaaaaaaaaaaaaaaaaaaaaaaaaaaaa

SEQ ID NO: 26116 - RNA, 1689 nt, Artificial Sequence
  mRNA product Design i-3 (hSL-A100) comprising derived and/or modified sequence from LASV(Z0947-SLE-2011;Clade IV)__AIT17840__GPCmut3 (opt1)
aggagaaagcuuaccaugggccagaucgugaccuucuuccaggaggucccccacgugaucgaggaggugaugaacaucguccugaucgcccucagcauccuggccgugcugaaggggcucuacaacuucgcgaccugcggccugguggggcuggucacguuccuccugcugugcggccgcuccugcaccaucagccucuacaaggggguguacgagcugcagacccuggagcucaacauggagacccugaacaugacgaugccgcuguccugcaccaagaacaacagccaccacuacaucauggugggcaacgagaccggccucgagcugacccugacgaacaccuccaucaucaaccacaaguucugcaaccucagcgacgcccacaagaagaaccuguacgaccacgcccugauguccaucaucagcaccuuccaccucuccauccccaacuucaaccaguacgaggccaugagcugcgacuucaacgggggcaagaucuccguccaguacaaccugagccacuccuacgccggggacgcggccaaccacugcggcaccguggccaacggggugcugcagacguucaugcggauggccuggggcggcagcuacaucgcgcucgacuccgggcgcgaccggugggacugcaucaugaccagcuaccaguaccugaucauccagaacaccaccugggaggaccacugccaguucucccgccccagccccaucggcuaccuggggcuccugucccagcggacgcgcgacaucuacaucagccggcgccgccggggcaccuucaccuggacccugagcgacuccgagggcaaggacacgcccgggggcuacugccugacccgguggaugcucaucgaggccgagcugaagugcuucgggaacaccgccgucgccaagugcaacgagaagcacgacgaggaguucugcgacaugcugcgccucuucgacuucaacaagcaggccauccagcggcugaaggcgcccgcccagaugagcauccagcugaucaacaaggccgugaacgcccucaucaacgaccagcugaucaugaagaaccaccuccgcgacaucaugggcauccccuacugcaacuacuccaaguacugcuaccugaaccacaccacgaccgggaagaccagccugcccaagugcugccugguguccaacggcagcuaccucaacgagacccacuucuccgacgacaucgagcagcaggccgacaacaugaucacggagaugcugcagaaggaguacauggagcggcagggcaagaccccgcuggggcucgucgaccuguucguguucagcaccuccuucuaccugaucagcaucuuccugcaccucgugaagaucccgacccaccgccacaucgucggcaagcccugccccaagccccaccggcugaaccacauggggaucugcuccugcggccuguacaagcagccgggggugcccgugaaguggaagcgcugaggacuaguuauaagacugacuagcccgaugggccucccaacgggcccuccuccccuccuugcaccgagauuaaucaaaggcucuuuucagagccaccaaaaaaaaaaaaaaaaaaaaaaaaaaaaaaaaaaaaaaaaaaaaaaaaaaaaaaaaaaaaaaaaaaaaaaaaaaaaaaaaaaaaaaaaaaaaaaaaaaaaa

SEQ ID NO: 26117 - RNA, 1689 nt, Artificial Sequence
  mRNA product Design i-3 (hSL-A100) comprising derived and/or modified sequence from LASV(Josiah;Clade IV)__NP_694870__GPCmut3 (opt1)
aggagaaagcuuaccaugggccagaucgugaccuucuuccaggaggucccccacgugaucgaggaggugaugaacaucguccugaucgcccucagcgugcuggccgugcugaaggggcucuacaacuucgcgaccugcggccuggucgggcuggugacguuccuccugcugugcggccgcuccugcaccaccagccucuacaaggggguguacgagcugcagacccuggagcucaacauggagacgcugaacaugaccaugccgcuguccugcaccaagaacaacagccaccacuacaucauggucggcaacgagaccggccucgagcugacgcugaccaacaccuccaucaucaaccacaaguucugcaaccucagcgacgcccacaagaagaaccuguacgaccacgcccugauguccaucaucagcaccuuccaccucuccauccccaacuucaaccaguacgaggccaugagcugcgacuucaacgggggcaagaucuccgugcaguacaaccugagccacuccuacgccggggacgcggccaaccacugcggcacgguggccaacgggguccugcagaccuucaugcggauggccuggggcggcagcuacaucgcgcucgacuccgggcgcggcaacugggacugcaucaugaccagcuaccaguaccugaucauccagaacaccacgugggaggaccacugccaguucucccggcccagccccaucggguaccugggccuccugucccagcgcacccgggacaucuacaucagccgccggcgccggggcaccuucaccuggacgcugagcgacuccgaggggaaggacaccccgggcggguacugccucacccgcuggaugcugaucgaggccgagcugaagugcuucggcaacaccgccguggccaagugcaacgagaagcacgacgaggaguucugcgacaugcuccggcuguucgacuucaacaagcaggccauccagcgccugaaggcgcccgcccagaugagcauccagcucaucaacaaggccgugaacgcccugaucaacgaccagcugaucaugaagaaccaccuccgggacaucauggggauccccuacugcaacuacuccaaguacugcuaccugaaccacacgaccaccggccgcaccagccugcccaagugcugccucgucuccaacggcagcuaccugaacgagacgcacuucuccgacgacaucgagcagcaggccgacaacaugaucaccgagaugcugcagaaggaguacauggagcggcaggggaagaccccgcucggccugguggaccuguucguguucagcaccuccuucuaccugaucagcaucuuccuccaccuggucaagauccccacgcaccgccacaucguggggaaguccugccccaagccccaccggcugaaccacaugggcaucugcagcugcgggcucuacaagcagccgggcgugcccgucaaguggaagcgcugaggacuaguuauaagacugacuagcccgaugggccucccaacgggcccuccuccccuccuugcaccgagauuaaucaaaggcucuuuucagagccaccaaaaaaaaaaaaaaaaaaaaaaaaaaaaaaaaaaaaaaaaaaaaaaaaaaaaaaaaaaaaaaaaaaaaaaaaaaaaaaaaaaaaaaaaaaaaaaaaaaaaa

SEQ ID NO: 26118 - RNA, 1686 nt, Artificial Sequence
  mRNA product Design i-3 (hSL-A100) comprising derived and/or modified sequence from LASV(LP;Clade I)__AAF86701__GPCmut3 (opt1)
aggagaaagcuuaccaugggccagaucaucaccuucuuccaggaggugccccacgucaucgaggaggugaugaacaucgugcugaucgcccucagccugcuggccauccucaaggggcuguacaacaucgcgaccugcggcaucaucgggcuggucgccuuccucuuccugugcggcaaguccugcagccugacgcucaagggcggguacgagcugcagacccuggagcucaacauggagacccugaacaugaccaugccgcuguccugcacgaagaacagcucccaccacuacauccgcgugggcaacgagaccgggcucgagcugacccugaccaacacgagcaucaucaaccacaaguucugcaaccucuccgacgcccacaagaagaaccuguacgaccacgcccugaugagcaucaucuccaccuuccaccucagcauccccaacuucaaccaguacgaggccauguccugcgacuucaacggcgggaagaucagcgugcaguacaaccugucccacagcuacgcgggcgacgccgccgagcacugcgggaccgucgccaacggcgugcugcagaccuucaugcggauggcguggggcgggcgcuacaucgcccucgacuccggcaaggggaacugggacugcaucaugacgagcuaccaguaccugaucauccagaacaccaccugggaggaccacugccaguucucccggcccagccccaucggcuaccugggccuccugucccagcgcacccgggacaucuacaucagccgccggcgccgggggacguucaccuggacccugagcgacuccgagggcaacgagacccccgggggcuacugccucacgcgcuggaugcugaucgaggccgagcugaagugcuucgggaacaccgccguggccaagugcaacgagaagcacgacgaggaguucugcgacaugcuccggcuguucgacuucaacaagcaggcgauccgccggcugaaggccccggcccagaugagcauccagcucaucaacaaggccgucaacgcccugaucaacgaccagcugaucaugaagaaccaccuccgcgacaucaugggcauccccuacugcaacuacuccaaguacugcuaccugaaccacaccagcuccggccggaccagccugcccaagugcugccucaucuccaacgggagcuaccugaacgagacgcaguucuccgacgacaucgagcagcaggcggacaacaugaucaccgagaugcugcagaaggaguacaucgagcgccagggcaagaccccgcucgggcugguggacaucuucaucuucagcaccuccuucuaccugaucagcaucuuccugcaccucaucaagauccccacgcaccggcacaucgugggcaagcccugccccaagccgcaccgccugaaccacaugggggucugcuccugcggccuguacaagcaccccggcgugcccaccaaguggaagcggugaggacuaguuauaagacugacuagcccgaugggccucccaacgggcccuccuccccuccuugcaccgagauuaaucaaaggcucuuuucagagccaccaaaaaaaaaaaaaaaaaaaaaaaaaaaaaaaaaaaaaaaaaaaaaaaaaaaaaaaaaaaaaaaaaaaaaaaaaaaaaaaaaaaaaaaaaaaaaaaaaaaaa

SEQ ID NO: 26119 - RNA, 1686 nt, Artificial Sequence
  mRNA product Design i-3 (hSL-A100) comprising derived and/or modified sequence from LASV(803213;Clade II)__AAF86703__GPCmut3 (opt1)
aggagaaagcuuaccaugggccagaucaucaccuucuuccaggaggugccccacgucaucgaggaggugaugaacaucgugcugaucgcccucagccugcuggccauccucaaggggaucuacaacgucgcgaccugcggccuguucgggcugaucuccuuccuccugcugugcggccgcagcugcuccgugacguacaaggggguguacgagcuccagacccuggagcugaacauggccaaccucaacaugaccaugccgcugagcugcaccaagaacaacucccaccacuacaucauggucggcaacgagacgggccuggagcucacccugaccaacaccagcaucaucaaccacaaguucugcaaccuguccgacgcccacaagaagaaccucuacgaccacgcccugaugagcaucaucuccacguuccaccugagcauccccaacuucaaccaguacgaggccauguccugcgacuucaacgggggcaagaucagcgugcaguacaaccucucccacagcuucgcgguggacgccgccaaccacugcgggaccaucgccaacggcguccugcagaccuucaugcggauggcguggggcggguccuacaucgcccuggacagcggcaaggggaacugggacugcaucaugaccuccuaccaguaccucaucauccagaacacgaccugggaggaccacugccaguucagccgccccucccccaucggcuaccuggggcugcucagccagcggacccgcgacaucuacaucagccggcgccggcgcggcaccuucacguggacccuguccgacagcgagggcaacgaggcccccgggggcuacugccugacccgguggaugcucaucgaggccgagcugaagugcuucgggaacaccgccguggcgaagugcaacgagaagcacgacgaggaguucugcgacaugcugcgccucuucgacuucaacaagcaggccaucaagcggcugaagacgccggcccagauguccauccagcugaucaacaaggccgugaacgcccucaucaacgaccagcugaucaugaagaaccaccuccgcgacaucaugggcauccccuacugcaacuacagccgguacugcuaccugaaccacaccgucaccgggaagaccucccugccccgcugcugccuggugagcaacggcuccuaccucaacgagacgcacuucagcgacgacaucgagcagcaggcggacaacaugaucaccgagaugcugcagaaggaguacauggaccggcagggcaagaccccgcuggggcucguggaccuguucgucuucuccaccagcuucuaccugaucuccaucuuccugcaccucgugaagauccccacgcaccgccacaucgugggcaagcccugccccaagccgcaccggcugaaccacauggggaucugcagcugcggccuguacaagcaccccgggguccccgugaaguggaagcgcugaggacuaguuauaagacugacuagcccgaugggccucccaacgggcccuccuccccuccuugcaccgagauuaaucaaaggcucuuuucagagccaccaaaaaaaaaaaaaaaaaaaaaaaaaaaaaaaaaaaaaaaaaaaaaaaaaaaaaaaaaaaaaaaaaaaaaaaaaaaaaaaaaaaaaaaaaaaaaaaaaaaaa

SEQ ID NO: 26120 - RNA, 1686 nt, Artificial Sequence
  mRNA product Design i-3 (hSL-A100) comprising derived and/or modified sequence from LASV(GA391;Clade III)__CAA36645__GPCmut3 (opt1)
aggagaaagcuuaccaugggccagaucgugaccuucuuccaggaggucccccacgugaucgaggaggugaugaacaucguccugaucgcccucagcauccuggccauccugaaggggcucuacaacguggcgaccugcggccugaucgggcuggugacguuccuccugcuguccggccgcagcugcucccucaucuacaaggggaccuacgagcugcagacccuggagcucaacauggagacccugaacaugacgaugccgcugagcugcaccaagaacaacucccaccacuacauccgggucggcaacgagaccggccucgagcugacccugacgaacaccagcauccucaaccacaaguucugcaaccuguccgacgcccacaagcgcaaccuguacgaccacagccucauguccaucaucagcaccuuccaccuguccauccccaacuucaaccaguacgaggccaugagcugcgacuucaacgggggcaagaucaccgugcaguacaaccugucccacagcuucgccguggacgccgcggggcacugcggcacgcucgccaacgggguccugcagaccuucaugcggauggccuggggcggcuccuacaucgcccuggacagcgggcgcggcaacugggacugcaucaugaccuccuaccaguaccucaucauccagaacaccacgugggacgaccacugccaguucagccggcccucccccaucggguaccugggccugcucagccagcgcacccgggacaucuacaucagccgccggcgccggggcaccuucaccuggacgcuguccgacagcgaggggaacgagaccccgggcggguacugccugacccgcuggaugcucaucgaggcggagcugaagugcuucggcaacaccgccguggccaagugcaacgagaagcacgacgaggaguucugcgacaugcugcggcuguucgacuucaacaagcaggccauccgccggcugaagacgcccgcccagauguccauccagcugaucaacaaggcggugaacgcccucaucaacgaccagcugaucaugaagaaccaccuccgcgacaucauggggauccccuacugcaacuacagccgguacugcuaccucaaccacaccuccaccggcaagaccagccugccccgcugcugccugaucuccaacggcagcuaccucaacgagacgaaguucuccgacgacaucgagcagcaggccgacaacaugaucaccgagaugcugcagaaggaguacaucgaccggcaggggaagaccccgcugggccuggucgaccucuucguguucagcaccuccuucuaccugaucagcaucuuccugcaccucgugaagauccccacgcaccgccacaucgucgggaagcccugccccaagccgcaccggcugaaccacaugggcaucugcuccugcgggcuguacaagcagcccggcgugcccgugcgcuggaagcgcugaggacuaguuauaagacugacuagcccgaugggccucccaacgggcccuccuccccuccuugcaccgagauuaaucaaaggcucuuuucagagccaccaaaaaaaaaaaaaaaaaaaaaaaaaaaaaaaaaaaaaaaaaaaaaaaaaaaaaaaaaaaaaaaaaaaaaaaaaaaaaaaaaaaaaaaaaaaaaaaaaaaaa

SEQ ID NO: 26121 - RNA, 1689 nt, Artificial Sequence
  mRNA product Design i-3 (hSL-A100) comprising derived and/or modified sequence from LASV(AV;Clade V)__CCA30314__GPCmut3 (opt1)
aggagaaagcuuaccaugggccagaucgugaccuucuuccaggaggucccccacgugaucgaggaggugaugaacaucguccugaucgcccucagcauccuggccgugcugaaggggcucuacaacaucgcgaccugcggccugaucgggcugaucacguuccuccugcugugcggccgcuccugcagcuccaaccucuacaaggggguguacgagcugcagagccuggaccucaacauggagacccugaacaugaccaugccgcuguccugcaccaagaacaacagccaccacuacauccgggucggcaacgacacgggccucgagcugacccugaccaacaccuccauccucaaccacaaguucugcaaccugagcgacgcccacaagaaggaccuguacgaccacgcccucauguccaucaucagcacguuccaccuguccauccccaacuucaaccaguacgaggccaugagcugcgacuucaacgggggcaagaucuccgugcaguacaaccugagccacuccuacgccaucgacgcggccaaccacugcgggaccguggccaacggcauccuccagaccuucaugcgcauggccuggggcgggagcuacaucgcgcuggacuccggccgggggaacugggacugcaucaugaccagcuaccaguaccugaucauccagaacacgaccugggagaaccacugccaguucucccgccccagccccaucggcuaccucgggcugcugagccagcggacccgcgacaucuacaucucccggcgccggcgcggcaccuucacguggacccucagcgacuccgagggcaacgccacccccgggggcuacugccugacccgguggaugcugaucgaggccgagcucaagugcuucgggaacacggccgucgccaagugcaacgagaagcacgacgaggaguucugcgacaugcugcgccuguucgacuucaacaagcaggcgaucagccggcucaaguccccggcccagaugagcauccagcugaucaacaaggccgugaacgcccugaucaacgaccagcucaucaugaagaaccaccuccgcgacaucaugggcauccccuacugcaacuacuccaaguacugcuaccugaaccacaccaucaccgggaagaccagccugcccaagugcugccugguguccaacggcagcuaccugaacgagacgcacuucuccgacgacaucgagcagcaggccgacaacaugaucaccgagaugcuccagaaggaguacauggagcggcagggcaagaccccgcuggggcuggucgaccuguucguguucagcaccuccuucuaccucaucagcaucuuccugcgccuggugaagauccccacgcaccggcacaucgucggcaagcccugccccaagccgcaccgccucaaccacauggggaucugcuccugcggccuguacaagcagcccggggugcccgugcgguggaagcgcugaggacuaguuauaagacugacuagcccgaugggccucccaacgggcccuccuccccuccuugcaccgagauuaaucaaaggcucuuuucagagccaccaaaaaaaaaaaaaaaaaaaaaaaaaaaaaaaaaaaaaaaaaaaaaaaaaaaaaaaaaaaaaaaaaaaaaaaaaaaaaaaaaaaaaaaaaaaaaaaaaaaaa

SEQ ID NO: 26122 - RNA, 1686 nt, Artificial Sequence
  mRNA product Design i-3 (hSL-A100) comprising derived and/or modified sequence from LASV(Togo/2016/7082;Clade VI)__AMR44577__GPCmut3 (opt1)
aggagaaagcuuaccaugggccagaucaucaccuucuuccaggaggugccccacgucaucgaggaggugaugaacaucgugcugaucgcccucagccugcuggccauccucaagggggucuacaacguggcgaccugcggcaucaucgggcuggugacguuccuguuccucugcggccgcuccugcagccugaucuacaagggguccuacgagcugcagacccucgagcugaacauggagacccugaacaugaccaugccgcucagcugcacgaagaacuccagccaccacuacauccgggucggcaacgagaccggccuggagcugacccucaccaacacguccaucaucaaccacaaguucugcaaccugagcgacgcccacaagcgcaaccuguacgaccacgcccucauguccauccugagcaccuuccaccuguccauccccaacuucaaccaguacgaggccaugagcugcgacuucaacgggggcaagaucuccgugcaguacaaccucagccacgccuacgcgguggacgccgccgagcacugcgggaccgucgccaacggcgugcugcagaccuucaugcggauggcguggggcggguccuacaucgcccuggacagcggccgcgggaacugggacugcaucaugacguccuaccaguaccucaucauccagaacaccaccugggaggaccacugccaguucagccggcccucccccaucggcuaccuggggcugcucagccagcgcacccgggacaucuacaucagccgccggcgccggggcacguucaccuggacccuguccgacagcgagggcaacgagacccccgggggcuacugccugacgcgcuggaugcucaucgaggccgagcugaagugcuucgggaacaccgccguggccaagugcaacgagaagcacgacgaggaguucugcgacaugcugcggcuguucgacuucaacaagcaggcgauccagcgccugaaguccccggcccagaugagcauccagcugaucaacaaggccgucaacgcccucaucaacgaccagcugaucaugaagaaccaccuccgggacaugaugggcauccccuacugcaacuacuccaaguacugcuaccucaaccacaccagcuccgggcgcaccagccugcccaagugcugccugguguccaacggcagcuaccucaacgagacgcacuucuccgacgacaucgagcagcaggccgacaacaugaucaccgagaugcugcagaaggaguacaucgaccggcagggcaagaccccgcuggggcucguggaccuguucgucuucagcaccuccuucuaccugaucagcaucuuccugcaccucaucaagauccccacgcaccgccacaucgugggcaagcccugccccaagccgcaccggcugaaccacauggggaucugcuccugcggccuguacaagcagcccggggugcccacccgcuggaagcggugaggacuaguuauaagacugacuagcccgaugggccucccaacgggcccuccuccccuccuugcaccgagauuaaucaaaggcucuuuucagagccaccaaaaaaaaaaaaaaaaaaaaaaaaaaaaaaaaaaaaaaaaaaaaaaaaaaaaaaaaaaaaaaaaaaaaaaaaaaaaaaaaaaaaaaaaaaaaaaaaaaaaa

SEQ ID NO: 26123 - RNA, 1686 nt, Artificial Sequence
  mRNA product Design i-3 (hSL-A100) comprising derived and/or modified sequence from LASV(KAK-428;Clade n.d. (VII))__ANH09740__GPCmut3 (opt1)
aggagaaagcuuaccaugggccagaucgugaccuucuuccaggaggucccccacgugaucgaggaggugaugaacaucguccugaucgcccucagccugcuggccauccucaaggggcuguacaacuucgcgaccugcggcgugaucgggcugaucacguuccuccugcugugcggccgcuccugcagcgccaccuacaaggggcaguacgagcuccagacccuggagcugaacauggagucccucaacaugaccaugccgcugagcugcacgaagaacaacucccaccacuacauccgggccggcaacaacaccggccuggagcucacccugaccaacacgagcaucaucucccacaaguucugcaaccugagcgacgcccacaagaagaaccucuacgaccacacccugauguccaucaucaccaccuuccaccugagcauccccaacuucaaccaguacgaggccauguccugcgacuucaacgggggcaagaucagcauccaguacaaccucucccacagcuacgcgggggacgccgcccagcacugcggcacgguggccaacgggguccugcagaccuucaugcgcauggcguggggcggcuccuaccuggcccucgacagcgggcggcgcggcugggacugcaucaucuccagcuaccaguaccugaucauccagaacaccaccugggacgaccacugccaguucucccggcccagccccaucggguaccugggcuucgugagccagaagacgcgcgacaucuacaucucccggcgccggcgcggcaccuucaccuggacccucagcgacuccgaggggcacgacaugccgggcggguacugccugacgcgguggaugcugaucgaggccgaccucaagugcuucggcaacaccgccguggccaagugcaacgagaagcacgacgaggaguucugcgacauguggcgccuguucgacuucaacaagcaggcgauccagcggcugaaggcccccgcccagaugaacauccagcucaucaacaaggccgucaacgcccugaucaacgaccagcugaugaugaagaaccaccuccgcgacaucauggggauccccuacugcaacuacagcaaguucugcuaccugaacaacaccaccacgggccggaccucccugccccgcugcugccucaucagcaacggcuccuaccugaacgagacccacuucagcgacgacaucgagcagcaggcggacaacaugaucaccgagaugcugcagaaggaguacauggaccggcaggggaagacgccgcucggccugguggaccuguucguguucuccaccagcuucuaccucaucaccaucuuccugcaccuggucaagauccccacccaccgccacaucguggggaagcccugccccaagccgcaccggcugaaccacaugggcaucugcuccugcgggcucuacaagcagcccggcgugcccguccgcuggaagcggugaggacuaguuauaagacugacuagcccgaugggccucccaacgggcccuccuccccuccuugcaccgagauuaaucaaaggcucuuuucagagccaccaaaaaaaaaaaaaaaaaaaaaaaaaaaaaaaaaaaaaaaaaaaaaaaaaaaaaaaaaaaaaaaaaaaaaaaaaaaaaaaaaaaaaaaaaaaaaaaaaaaaa

SEQ ID NO: 26124 - RNA, 1686 nt, Artificial Sequence; identical to SEQ ID NO: 26118
  mRNA product Design i-3 (hSL-A100) comprising derived and/or modified sequence from LASV(Pinneo-NIG-1969;Clade I)__AIT17836__GPCmut3 (opt1)

SEQ ID NO: 26125 - RNA, 1686 nt, Artificial Sequence
  mRNA product Design i-3 (hSL-A100) comprising derived and/or modified sequence from LASV(ISTH0009-NIG-2011;Clade II)__AIT17404__GPCmut3 (opt1)
aggagaaagcuuaccaugggccagaucaucaccuucuuccaggaggugccccacgucaucgaggaggugaugaacaucgugcugaucgcccucagccugcuggccauccucaaggggaucuacaacgucgcgaccugcggccuguucgggcugguguccuuccuccugcugugcggccgcagcugcuccacgaccuacaaggggguguacgagcuccagacccuggagcuggacauggccagccucaacaugaccaugccgcuguccugcacgaagaacaacagccaccacuacaucauggucggcaacgagaccggccuggagcucacccugaccaacacguccaucaucaaccacaaguucugcaaccugagcgacgcccacaagaagaaccucuacgaccacgcccugauguccaucaucagcaccuuccaccuguccauccccaacuucaaccaguacgaggccaugagcugcgacuucaacgggggcaagaucuccgugcaguacaaccucagccacgcguacgccguggacgccgccaaccacugcgggaccaucgcgaacggcguccugcagaccuucaugcggauggccuggggcggguccuacaucgcccuggacagcggcaagggguccugggacugcaucaugacgagcuaccaguaccucaucauccagaacaccaccugggaggaccacugccaguucucccgccccagccccaucggcuaccuggggcugcucagccagcggacccgcgacaucuacaucucccggcgccggcgcggcacguucaccuggacccugagcgacuccgagggcaacgagacccccgggggcuacugccugacgcgguggaugcucaucgaggccgagcugaagugcuucgggaacaccgccguggcgaagugcaacgagaagcacgacgaggaguucugcgacaugcugcgccucuucgacuucaacaagcaggccauccggcgccugaagaccccggcccagaugagcauccagcugaucaacaaggccgugaacgcccucaucaacgaccagcugaucaugaagaaccaccuccgggacaucaugggcauccccuacugcaacuacuccaaguacugcuaccugaaccacaccgucacggggaagaccagccugccccgcugcugccugguguccaacggcagcuaccucaacgagacccacuucuccgacgacaucgagcagcaggcggacaacaugaucaccgagcugcugcagaaggaguacauggaccggcagggcaagacgccgcucgggcugguggaccuguucgucuucagcaccuccuucuaccugaucagcaucuuccuccaccugaucaagauccccacccaccgccacaucaccggcaagcccugccccaagccgcaccggcugaaccacauggggaucugcuccugcggccucuacaagcaccccggggugcccgugaaguggaagcgcugaggacuaguuauaagacugacuagcccgaugggccucccaacgggcccuccuccccuccuugcaccgagauuaaucaaaggcucuuuucagagccaccaaaaaaaaaaaaaaaaaaaaaaaaaaaaaaaaaaaaaaaaaaaaaaaaaaaaaaaaaaaaaaaaaaaaaaaaaaaaaaaaaaaaaaaaaaaaaaaaaaaaa

SEQ ID NO: 26126 - RNA, 1686 nt, Artificial Sequence
  mRNA product Design i-3 (hSL-A100) comprising derived and/or modified sequence from LASV(ISTH2010-NIG-2012;Clade II)__AIT17482__GPCmut3 (opt1)
aggagaaagcuuaccaugggccagaucaucaccuucuuccaggaggugccccacgucaucgaggaggugaugaacaucgugcugaucgcccucagccugcuggccauccucaaggggaucuacaacgucgcgaccugcggccuguucgggcugguguccuuccuccugcugugcggccgcagcugcuccacgaccuacaaggggguguacgagcuccagacccuggagcuggacauggccagccucaacaugaccaugccgcuguccugcacgaagaacaacagccaccacuacaucauggucggcaacgagaccggccuggagcucacccugaccaacacguccaucaucaaccacaaguucugcaaccugagcgacgcccacaagaagaaccucuacgaccacgcccugauguccaucaucagcaccuuccaccuguccauccccaacuucaaccaguacgaggccaugagcugcgacuucaacgggggcaagaucuccgugcaguacaaccucagccacgcguacgccguggacgccgccaaccacugcgggaccaucgcgaacggcguccugcagaccuucaugcggauggccuggggcggguccuacaucgcccuggacagcggcaagggguccugggacugcaucaugacgagcuaccaguaccucaucauccagaacaucaccugggaggaccacugccaguucucccgccccagccccaucggcuaccuggggcugcucagccagcggacccgcgacaucuacaucucccggcgccggcgcggcaccuucacguggacccugagcgacuccgagggcaacgagacccccgggggcuacugccugacccgguggaugcucaucgaggccgagcugaagugcuucgggaacacggccguggcgaagugcaacgagaagcacgacgaggaguucugcgacaugcugcgccucuucgacuucaacaagcaggccauccggcgccugaagaccccggcccagaugagcauccagcugaucaacaaggccgugaacgcccucaucaacgaccagcugaucaugaagaaccaccuccgggacaucaugggcauccccuacugcaacuacuccaaguacugcuaccugaaccacaccgucaccgggaagacgagccugccccgcugcugccugguguccaacggcagcuaccucaacgagacccacuucuccgacgacaucgagcagcaggcggacaacaugaucaccgagcugcugcagaaggaguacaucgaccggcagggcaagaccccgcucgggcugguggaccuguucgucuucagcacguccuucuaccugaucagcaucuuccuccaccuggugaagauccccacccaccgccacguggucggcaagcccugccccaagccgcaccggcugaaccacauggggaucugcuccugcggccucuacaagcaccccggggugcccgugaaguggaagcgcugaggacuaguuauaagacugacuagcccgaugggccucccaacgggcccuccuccccuccuugcaccgagauuaaucaaaggcucuuuucagagccaccaaaaaaaaaaaaaaaaaaaaaaaaaaaaaaaaaaaaaaaaaaaaaaaaaaaaaaaaaaaaaaaaaaaaaaaaaaaaaaaaaaaaaaaaaaaaaaaaaaaaa

SEQ ID NO: 26127 - RNA, 1686 nt, Artificial Sequence
  mRNA product Design i-3 (hSL-A100) comprising derived and/or modified sequence from LASV(Lassa virus/H.sapiens-wt/NGA/2015/ISTH_0543;Clade II)__AVO03639__GPCmut3 (opt1)
aggagaaagcuuaccaugggccagaucaucaccuucuuccaggaggugccccacgucaucgaggaggugaugaacaucgugcugaucgcccucagccugcuggccauccucaaggggaucuacaacgucgcgaccugcggccuguucgggcugguguccuuccuccugcugugcggccgcagcugcuccacgaccuacaaggggguguacgagcuccagacccuggagcuggacauggccaaccucaacaugaccaugccgcugagcugcacgaagaacaacucccaccacuacaucauggucggcaacgagaccggccuggagcucacccugaccaacacgagcaucaucaaccacaaguucugcaaccuguccgacgcccacaagaagaaccucuacgaccacgcccugaugagcaucaucuccaccuuccaccugagcauccccaacuucaaccaguacgaggccauguccugcgacuucaacgggggcaagaucagcgugcaguacaaccucucccacaccuacgcgguggacgccgccaaccacugcgggaccaucgccaacggcguccugcagacguucaugcggauggcguggggcgggagcuacaucgcccuggacuccggcaaggggagcugggacugcaucaugaccuccuaccaguaccucgugauccagaacaccaccugggaggaccacugccaguucagccgccccucccccaucggcuaccuggggcugcucagccagcggacgcgcgacaucuacaucagccggcgccggcgcggcaccuucaccuggacccuguccgacagcgagggcaacgagacgcccgggggcuacugccugacccgguggaugcucaucgaggccgagcugaagugcuucgggaacaccgccguggccaagugcaacgagaagcacgacgaggaguucugcgacaugcugcgccucuucgacuucaacaagcaggcgauccggcgccugaagaccccggcccagauguccauccagcugaucaacaaggccgucaacgcccucaucaacgaccagcugaucaugaagaaccaccuccgggacaucaugggcauccccuacugcaacuacagcaaguacugcuaccugaaccacacggugaccgggaagaccucccugccccgcugcugccuggugagcaacggcuccuaccucaacgagacccacuucagcgacgacaucgagcagcaggccgacaacaugaucacggagcugcugcagaaggaguacaucgaccggcagggcaagaccccgcucgggcuggucgaccuguucguguucuccaccagcuucuaccugaucuccaucuuccuccaccuggugaagauccccacccaccgccacaucacgggcaagcccugccccaagccgcaccggcugaaccacauggggaucugcagcugcggccucuacaagcaccccgggguccccgugaaguggaagcgcugaggacuaguuauaagacugacuagcccgaugggccucccaacgggcccuccuccccuccuugcaccgagauuaaucaaaggcucuuuucagagccaccaaaaaaaaaaaaaaaaaaaaaaaaaaaaaaaaaaaaaaaaaaaaaaaaaaaaaaaaaaaaaaaaaaaaaaaaaaaaaaaaaaaaaaaaaaaaaaaaaaaaa

SEQ ID NO: 26128 - RNA, 1686 nt, Artificial Sequence
  mRNA product Design i-3 (hSL-A100) comprising derived and/or modified sequence from LASV(Lassa virus/H.sapiens-wt/NGA/2016/ISTH_0009;Clade II)__AVO03571__GPCmut3 (opt1)
aggagaaagcuuaccaugggccagaucaucaccuucuuccaggaggugccccacgucaucgaggaggugaugaacaucgugcugaucgcccucagccugcuggccauccucaaggggaucuacaacgucgcgaccugcggccugcuggggcucguguccuuccugcugcucugcggccgcagcugcuccacgaccuacaaggggguguacgagcugcagacccuggagcucgacauggccagccugaacaugaccaugccgcuguccugcacgaagaacaacagccaccacuacaucauggucggcaacgagaccggccucgagcugacccugaccaacacguccaucaucaaccacaaguucugcaaccucagcgacgcccacaagaagaaccuguacgaccacgcccugauguccaucaucagcaccuuccaccucuccauccccaacuucaaccaguacgaggccaugagcugcgacuucaacgggggccggaucuccgugcaguacaaccugagccacuccuacgcgguggacgccgccaaccacugcgggaccaucgccaacggcguccugcagaccuucaugcgcauggcguggggcgggagcuacaucgcccucgacuccggcaaggggagcugggacugcaucaugacguccuaccaguaccugaucauccagaacaccaccugggaggaccacugccaguucagccggcccagccccaucggcuaccuggggcuccugucccagcgcacccgggacaucuacaucagccgccggcgccggggcacguucaccuggacccuguccgacagcgagggcaacgagacccccgggggcuacugccucacgcgcuggaugcugaucgaggccgagcugaagugcuucgggaacaccgccguggccaagugcaacgagaagcacgacgaggaguucugcgacaugcuccggcuguucgacuucaacaagcaggcgauccgccggcugaagaccccggcccagauguccauccagcucaucaacaaggccgugaacgcccugaucaacgaccagcugaucaugaagaaccaccuccgcgacaucaugggcauccccuacugcaacuacagcaaguacugcuaccugaaccacaccgucacggggaagaccucccugccccggugcugccucgugagcaacggcuccuaccugaacgagacccacuucagcgacgacaucgagcagcaggccgacaacaugaucaccgagcugcuccagaaggaguacaucgaccgccagggcaagacgccgcuggggcugguggaccuguucgucuucuccaccagcuucuaccucaucuccaucuuccugcaccuggugaagauccccacccaccggcacaucaccggcaagcccugccccaagccgcaccgccucaaccacauggggaucugcagcugcggccuguacaaccaccccggggugcccgucaaguggaagcggugaggacuaguuauaagacugacuagcccgaugggccucccaacgggcccuccuccccuccuugcaccgagauuaaucaaaggcucuuuucagagccaccaaaaaaaaaaaaaaaaaaaaaaaaaaaaaaaaaaaaaaaaaaaaaaaaaaaaaaaaaaaaaaaaaaaaaaaaaaaaaaaaaaaaaaaaaaaaaaaaaaaaa

SEQ ID NO: 26129 - RNA, 1686 nt, Artificial Sequence
  mRNA product Design i-3 (hSL-A100) comprising derived and/or modified sequence from LASV(Lassa virus/H.sapiens-wt/NGA/2016/ISTH_0017;Clade II)__AVO03567__GPCmut3 (opt1)
aggagaaagcuuaccaugggccagaucaucaccuucuuccaggaggugccccacgucaucgaggaggugaugaacaucgugcugaucgcccucagccugcuggccauccucaaggggaucuacaacgucgcgaccugcggccuguucgggcugguguccuuccuccugcugugcggccgcagcugcuccacgaccuacaaggggguguacgagcuccagacccuggagcuggacauggccagccucaacaugaccaugccgcuguccugcacgaagaacaacagccaccacuacaucauggucggcaacgagaccggccuggagcucacccugaccaacacguccaucaucaaccacaaguucugcaaccugagcgacgcccacaagaagaaccucuacgaccacgcccugauguccaucaucagcaccuuccaccuguccauccccaacuucaaccaguacgaggccaugagcugcgacuucaacgggggcaagaucuccgugcaguacaaccucagccacaccuacgcgaucgacgccgccaaccacugcgggaccaucgccaacggcgugcugcagacguucaugcggauggcguggggcggguccuacaucgcccuggacagcggcaagggguccugggacugcaucaugaccagcuaccaguaccucaucauccagaacaccaccugggaggaccacugccaguucucccgccccagccccaucggcuaccuggggcugcucagccagcggacgcgcgacaucuacaucucccggcgccggcgcggcaccuucaccuggacccugagcgacuccgagggcaacgagacgcccgggggcuacugccugacccgguggaugcucaucgaggccgagcugaagugcuucgggaacaccgccgucgccaagugcaacgagaagcacgacgaggaguucugcgacaugcugcgccucuucgacuucaacaagcaggcgauccggcgccugaagaccccggcccagaugagcauccagcugaucaacaaggccgugaacgcccucaucaacgaccagcugaucaugaagaaccaccuccgggacaucaugggcauccccuacugcaacuacuccaaguacugcuaccugaaccacacggugaccgggaagaccagccugccccgcugcugccuggucuccaacggcagcuaccucaacgagacccacuucuccgacgacaucgagcagcaggccgacaacaugaucacggagcugcugcagaaggaguacauggaccggcagggcaagaccccgcucgggcugguggaccuguucguguucagcaccuccuucuaccugaucagcaucuuccuccaccugguccgcauccccacccaccggcacgugaucggcaagcccugccccaagccgcaccgccugaaccacauggggaucugcuccugcggccucuacaagcaccccggggugcccgucaaguggaagcggugaggacuaguuauaagacugacuagcccgaugggccucccaacgggcccuccuccccuccuugcaccgagauuaaucaaaggcucuuuucagagccaccaaaaaaaaaaaaaaaaaaaaaaaaaaaaaaaaaaaaaaaaaaaaaaaaaaaaaaaaaaaaaaaaaaaaaaaaaaaaaaaaaaaaaaaaaaaaaaaaaaaaa

SEQ ID NO: 26130 - RNA, 1686 nt, Artificial Sequence
  mRNA product Design i-3 (hSL-A100) comprising derived and/or modified sequence from LASV(Lassa virus/H.sapiens-wt/NGA/2018/ISTH_0959;Clade II)__AVV65099__GPCmut3 (opt1)
aggagaaagcuuaccaugggccagaucaucaccuucuuccaggaggugccccacgucaucgaggaggugaugaacaucgugcugaucgcccucagccugcuggccauccucaaggggaucuacaacgucgugaccugcggccuguucgggcugguguccuuccuccugcugugcggccgcagcugcuccacgaccuacaagggggucuacgagcuccagacccuggagcuggacauggcgagccucaacaugaccaugccgcuguccugcacgaagaacaacagccaccacuacaucauggugggcaacgagaccggccuggagcucacccugaccaacacguccaucaucaaccacaaguucugcaaccugagcgacgcccacaagaagaaccucuacgaccacgcccugauguccaucaucagcaccuuccaccuguccauccccaacuucaaccaguacgaggccaugagcugcgacuucaacgggggcaagaucuccgugcaguacaaccucagccacgccuacgcgaucgacgccgccaaccacugcgggaccaucgccaacggcguccugcagaccuucaugcggauggcguggggcggguccuacaucgcccuggacagcggcaagggguccugggacugcaucaugacgagcuaccaguaccucaucauccagaacaccaccugggaggaccacugccaguucucccgccccagccccaucggcuaccuggggcugcucagccagcggacccgcgacaucuacaucucccggcgccggcgcggcacguucaccuggacccugagcgacuccgagggcaacgagacccccgggggcuacugccugacgcgguggaugcucaucgaggccgagcugaagugcuucgggaacaccgccguggccaagugcaacgagaagcacgacgaggaguucugcgacaugcugcgccucuucgacuucaacaagcaggcgauccggcgccugaagaccccggcccagaugagcauccagcugaucaacaaggccgugaacgcccucaucaacgaccagcugaucaugaagaaccaccuccgggacaucaugggcauccccuacugcaacuacuccaaguacugcuaccugaaccacaccgucacggggaagaccagccugccccgcugcugccugguguccaacggcagcuaccucaacgagacccacuucuccgacgacaucgagcagcaggccgacaacaugaucaccgagcugcugcagaaggaguacaucgaccggcagggcaagacgccgcucgggcugguggaccuguucgucuucagcaccuccuucuaccugaucagcaucuuccuccaccuggugaagauccccacccaccgccacgugaucggcaagcccugccccaagccgcaccggcugaaccacauggggaucugcuccugcggccucuacaagcaccccgggguccccgugaaguggaagcgcugaggacuaguuauaagacugacuagcccgaugggccucccaacgggcccuccuccccuccuugcaccgagauuaaucaaaggcucuuuucagagccaccaaaaaaaaaaaaaaaaaaaaaaaaaaaaaaaaaaaaaaaaaaaaaaaaaaaaaaaaaaaaaaaaaaaaaaaaaaaaaaaaaaaaaaaaaaaaaaaaaaaaa

SEQ ID NO: 26131 - RNA, 1686 nt, Artificial Sequence
  mRNA product Design i-3 (hSL-A100) comprising derived and/or modified sequence from LASV(LASV003-NIG-2008;Clade II)__AIT17580__GPCmut3 (opt1)
aggagaaagcuuaccaugggccagaucaucaccuucuuccaggaggugccccacgucaucgaggaggugaugaacaucgugcugaucgcccucagccugcuggccauccucaaggggaucuacaacgucgcgaccugcggccuguucgggcugguguccuuccuccugcugugcggccgcagcugcuccacgaccuacaaggggguguacgagcuccagacccuggagcuggacauggccagccucaacaugaccaugccgcuguccugcacgaagaacaacagccaccacuacaucauggucggcaacgagaccggccuggagcucacccugaccaacacguccaucaucaaccacaaguucugcaaccugagcgacgcccacaagaagaaccucuacgaccacgcccugauguccaucaucagcaccuuccaccuguccauccccaacuucaaccaguacgaggccaugagcugcgacuucaacgggggcaagaucuccgugcaguacaaccucagccacaccuacgcgguggacgccgccaaccacugcgggaccaucgccaacggcguccugcagacguucaugcggauggcguggggcggguccuacaucgcccuggacagcggcaagggguccugggacugcaucaugaccagcuaccaguaccucaucauccagaacaccaccugggaggaccacugccaguucucccgccccagccccaucggcuaccuggggcugcucagccagcggacgcgcgacaucuacaucucccggcgccggcgcggcaccuucaccuggacccugagcgacuccgagagcaacgagacgccgggcggguacugccugacccgguggaugcucaucgaggccgagcugaagugcuucggcaacaccgccguggccaagugcaacgagaagcacgacgaggaguucugcgacaugcugcgccucuucgacuucaacaagcaggcgauccggcgccugaaggcccccgcccagauguccauccagcugaucaacaaggccgugaacgcccucaucaacgaccagcugaucaugaagaaccaccuccgggacaucauggggauccccuacugcaacuacagcaaguacugcuaccugaaccacaccgucacgggccgcaccucccugccccggugcugccuggugagcaacggguccuaccucaacgagacccacuucagcgacgacaucgagcagcaggcggacaacaugaucaccgagcugcugcagaaggaguacauggaccgccagggcaagacgccgcucggccugguggaccuguucgucuucuccaccagcuucuaccugaucuccaucuuccuccaccuggugaagauccccacccaccggcacgugaucgggaagcccugccccaagccgcaccgccugaaccacaugggcaucugcagcugcgggcucuacaagcaccccggcguccccgugaaguggaagcggugaggacuaguuauaagacugacuagcccgaugggccucccaacgggcccuccuccccuccuugcaccgagauuaaucaaaggcucuuuucagagccaccaaaaaaaaaaaaaaaaaaaaaaaaaaaaaaaaaaaaaaaaaaaaaaaaaaaaaaaaaaaaaaaaaaaaaaaaaaaaaaaaaaaaaaaaaaaaaaaaaaaaa

SEQ ID NO: 26132 - RNA, 1686 nt, Artificial Sequence
  mRNA product Design i-3 (hSL-A100) comprising derived and/or modified sequence from LASV(LASV035-NIG-2009;Clade II)__AIT17588__GPCmut3 (opt1)
aggagaaagcuuaccaugggccagaucaucaccuucuuccaggaggugccccacgucaucgaggaggugaugaacaucgugcugaucgcccucagccugcuggccauccucaaggggaucuacaacgucgcgaccugcggccuguucgggcugguguccuuccuccugcugugcggccgcagcugcuccacgaccuacaaggggguguacgagcuccagacccuggagcuggacauggccagccucaacaugaccaugccgcuguccugcacgaagaacaacagccaccacuacaucauggucggcaacgagaccggccuggagcucacccugaccaacacguccaucaucaaccacaaguucugcaaccugagcgacgcccacaagaagaaccucuacgaccacgcccugauguccaucaucagcaccuuccaccuguccauccccaacuucaaccaguacgaggccaugagcugcgacuucaacgggggcaagaucuccgugcaguacaaccucagccacgcguacgccguggacgccgccaaccacugcgggaccaucgcgaacggcguccugcagaccuucaugcggauggccuggggcggguccuacaucgcccuggacagcggcaagggguccugggacugcaucaugacgagcuaccaguaccucaucauccagaacaccaccugggaggaccacugccaguucucccgccccagccccaucggcuaccuggggcugcucagccagcggacccgcgacaucuacaucucccggcgccggcgcggcacguucaccuggacccugagcgacuccgagggcaacgagacccccgggggcuacugccugacgcgguggaugcucaucgaggccgagcugaagugcuucgggaacaccgccguggcgaagugcaacgagaagcacgacgaggaguucugcgacaugcugcgccucuucgacuucaacaagcaggccauccggcgccugaaggccccggcccagaugagcauccagcugaucaacaaggccgugaacgcgcucaucaacgaccagcugaucaugaagaaccaccuccgggacaucaugggcauccccuacugcaacuacuccaaguacugcuaccugaaccacaccgucaccgggaagacgagccugccccgcugcugccugguguccaacggcagcuaccucaacgagacccacuucuccgacgacaucgagcagcaggccgacaacaugaucaccgagcugcugcagaaggaguacaucgaccggcagggcaagaccccgcucgggcugguggaccuguucgucuucagcacguccuucuaccugaucagcaucuuccuccaccuggugaagauccccacccaccgccacgugaucggcaagcccugccccaagccgcaccggcugaaccacauggggaucugcuccugcggccucuacaagcaccccgggguccccgugaaguggaagcgcugaggacuaguuauaagacugacuagcccgaugggccucccaacgggcccuccuccccuccuugcaccgagauuaaucaaaggcucuuuucagagccaccaaaaaaaaaaaaaaaaaaaaaaaaaaaaaaaaaaaaaaaaaaaaaaaaaaaaaaaaaaaaaaaaaaaaaaaaaaaaaaaaaaaaaaaaaaaaaaaaaaaaa

SEQ ID NO: 26133 - RNA, 1686 nt, Artificial Sequence
  mRNA product Design i-3 (hSL-A100) comprising derived and/or modified sequence from LASV(LASV1000-NIG-2009;Clade II)__AIT17782__GPCmut3 (opt1)
aggagaaagcuuaccaugggccagaucaucaccuucuuccaggaggugccccacgucaucgaggaggugaugaacaucgugcugaucgcccucagccugcuggccauccucaaggggaucuacaacgucgcgaccugcggccuguucgggcugguguccuuccuccugcugugcggccgcagcugcuccacgaccuacaaggggguguacgagcuccagacccuggagcuggacauggccagccucaacaugaccaugccgcuguccugcacgaagaacaacagccaccacuacaucauggucggcaacgagaccggccuggagcucacccugaccaacacguccaucaucaaccacaaguucugcaaccugagcgacgcccacaagaagaaccucuacgaccacgcccugauguccaucaucagcaccuuccaccuguccauccccaacuucaaccaguacgaggccaugagcugcgacuucaacgggggcaagaucuccgugcaguacaaccucagccacaccuacgcgguggacgccgccaaccacugcgggaccaucgccaacggcguccugcagacguucaugcggauggcguggggcggguccuacaucgcccuggacagcggcaagggguccugggacugcaucaugaccagcuaccaguaccucaucauccagaacaccaccugggaggaccacugccaguucucccgccccagccccaucggcuaccuggggcugcucagccagcggacgcgcgacaucuacaucucccggcgccggcgcggcaccuucaccuggacccugagcgacuccgagggcaacgagacgcccgggggcuacugccugacccgguggaugcucaucgaggccgagcugaagugcuucgggaacaccgccguggccaagugcaacgagaagcacgacgaggaguucugcgacaugcugcgccucuucgacuucaacaagcaggcgaucaagcggcugaagaccccggcccagaugagcauccagcugaucaacaaggccgugaacgcccucaucaacgaccagcugaucaugaagaaccaccuccgcgacaucaugggcauccccuacugcaacuacuccaaguacugcuaccugaaccacacggucaccgggaagaccagccugccccggugcugccugguguccaacggcagcuaccucaacgagacccacuucuccgacgacaucgagcagcaggccgacaacaugaucacggagcugcugcagaaggaguacaucgaccgccagggcaagaccccgcucgggcugguggaccuguucgucuucagcaccuccuucuaccugaucagcaucuuccuccaccuggugaagauccccacccaccggcacguggucggcaagcccugccccaagccgcaccgccugaaccacauggggaucugcuccugcggccucuacaagcaccccggggugcccgugaaguggaagcggugaggacuaguuauaagacugacuagcccgaugggccucccaacgggcccuccuccccuccuugcaccgagauuaaucaaaggcucuuuucagagccaccaaaaaaaaaaaaaaaaaaaaaaaaaaaaaaaaaaaaaaaaaaaaaaaaaaaaaaaaaaaaaaaaaaaaaaaaaaaaaaaaaaaaaaaaaaaaaaaaaaaaa

SEQ ID NO: 26134 - RNA, 1686 nt, Artificial Sequence
  mRNA product Design i-3 (hSL-A100) comprising derived and/or modified sequence from LASV(LASV221-NIG-2010;Clade II)__AIT17624__GPCmut3 (opt1)
aggagaaagcuuaccaugggccagaucaucaccuucuuccaggaggugccccacgucaucgaggaggugaugaacaucgugcugaucgcccucagccugcuggccauccucaaggggaucuacaacgucgcgaccugcggccuguucgggcugguguccuuccuccugcugugcggccgcagcugcuccacgaccuacaaggggguguacgagcuccagacccuggagcuggacauggccagccucaacaugaccaugccgcuguccugcacgaagaacaacagccaccacuacaucauggucggcaacgagaccggccuggagcucacccugaccaacacguccaucaucaaccacaaguucugcaaccugagcgacgcccacaagaagaaccucuacgaccacgcccugauguccaucaucagcaccuuccaccuguccauccccaacuucaaccaguacgaggccaugagcugcgacuucaacgggggcaagaucuccgugcaguacaaccucagccacaccuacgcgaucgacgccgccaaccacugcgggaccaucgccaacggcgugcugcagacguucaugcggauggcguggggcggguccuacaucgcccuggacagcggcaagggguccugggacugcaucaugaccagcuaccaguaccucaucauccagaacaccaccugggaggaccacugccaguucucccgccccagccccaucggcuaccuggggcugcucagccagcggacgcgcgacaucuacaucucccggcgccggcgcggcaccuucaccuggacccugagcgacuccgagggcaacgagacgcccgggggcuacugccugacccgguggaugcucaucgaggccgagcugaagugcuucgggaacaccgccgucgccaagugcaacgagaagcacgacgaggaguucugcgacaugcugcgccucuucgacuucaacaagcaggcgauccggcgccugaagaccccggcccagaugagcauccagcugaucaacaaggccgugaacgcccucaucaacgaccagcugaucaugaagaaccaccuccgggacaucaugggcauccccuacugcaacuacuccaaguacugcuaccugaaccacacggugaccgggaagaccagccugccccgcugcugccuggucuccaacggcagcuaccucaacgagacccacuucuccgacgacaucgagcagcaggccgacaacaugaucacggagaugcugcagaaggaguacauggaccggcagggcaagaccccgcuggggcucguggaccuguucguguucagcaccuccuucuaccugaucagcaucuuccugcaccucgucaagauccccacccaccgccacgugaucggcaagcccugccccaagccgcaccggcugaaccacauggggaucugcuccugcggccuguacaagcaccccggggugcccgucaaguggaagcgcugaggacuaguuauaagacugacuagcccgaugggccucccaacgggcccuccuccccuccuugcaccgagauuaaucaaaggcucuuuucagagccaccaaaaaaaaaaaaaaaaaaaaaaaaaaaaaaaaaaaaaaaaaaaaaaaaaaaaaaaaaaaaaaaaaaaaaaaaaaaaaaaaaaaaaaaaaaaaaaaaaaaaa

SEQ ID NO: 26135 - RNA, 1686 nt, Artificial Sequence
  mRNA product Design i-3 (hSL-A100) comprising derived and/or modified sequence from LASV(LASV237-NIG-2010;Clade II)__AIT17638__GPCmut3 (opt1)
aggagaaagcuuaccaugggccagaucaucaccuucuuccaggaggugccccacgucaucgaggaggugaugaacaucgugcugaucgcccucagccugcuggccauccucaaggggaucuacaacgucgcgaccugcggccuguucgggcugguguccuuccuccugcugugcggccgcagcugcuccacgaccuacaaggggguguacgagcuccagacccuggagcuggacauggccagccucaacaugaccaugccgcuguccugcacgaagaacaacagccaccacuacaucauggucggcaacgagaccggccuggagcucacccugaccaacacguccaucaucaaccacaaguucugcaaccugagcgacgcccacaagaaggaccucuacgaccacgcccugauguccaucaucagcaccuuccaccuguccauccccaacuucaaccaguacgaggccaugagcugcgacuucaacgggggcaagaucuccgugcaguacaaccucagccacaccuacgcgguggacgccgccaaccacugcgggaccaucgccaacggcguccugcagacguucaugcggauggcguggggcggguccuacaucgcccuggacagcggcaagggguccugggacugcaucaugaccagcuaccaguaccucaucauccagaacaccaccugggaggaccacugccaguucucccgccccagccccaucggcuaccuggggcugcucagccagcggacgcgcgacaucuacaucucccggcgccggcgcggcaccuucaccuggacccugagcgacuccgagggcaacgagacgcccgggggcuacugccugacccgguggaugcucaucgaggccgagcugaagugcuucgggaacaccgccguggccaagugcaacgagaagcacgacgaggaguucugcgacaugcugcgccucuucgacuucaacaagcaggcgauccggcgccugaagaccccggcccagaugagcauccagcugaucaacaaggccgugaacgcccucaucaacgaccagcugaucaugaagaaccaccuccgggacaucaugggcauccccuacugcaacuacuccaaguacugcuaccugaaccacacggucaccgggaagaccagccugccccgcugcugccugguguccaacggcagcuaccucaacgagacccacuucuccgacgacaucgagcagcaggccgacaacaugaucacggagcugcugcagaaggaguacauggaccggcagggcaagaccccgcucgggcugguggaccuguucgucuucagcaccuccuucuaccugaucagcaucuuccuccaccugaucaagauccccacccaccgccacaucacgggcaagcccugccccaagccgcaccggcugaaccacauggggaucugcuccugcggccucuacaagcaccccggggugcccgugaaguggaagcgcugaggacuaguuauaagacugacuagcccgaugggccucccaacgggcccuccuccccuccuugcaccgagauuaaucaaaggcucuuuucagagccaccaaaaaaaaaaaaaaaaaaaaaaaaaaaaaaaaaaaaaaaaaaaaaaaaaaaaaaaaaaaaaaaaaaaaaaaaaaaaaaaaaaaaaaaaaaaaaaaaaaaaa

SEQ ID NO: 26136 - RNA, 1686 nt, Artificial Sequence
  mRNA product Design i-3 (hSL-A100) comprising derived and/or modified sequence from LASV(LASV253-NIG-2011;Clade II)__AIT17670__GPCmut3 (opt1)
aggagaaagcuuaccaugggccagaucaucaccuucuuccaggaggugccccacgucaucgaggaggugaugaacaucgugcugaucgcccucagccugcuggccauccucaaggggaucuacaacgucgcgaccugcggccuguucgggcugguguccuuccuccugcugugcggccgcagcugcuccacgaccuacaaggggguguacgagcuccagacccuggagcuggacauggccagccucaacaugaccaugccgcuguccugcacgaagaacaacagccaccacuacaucauggucggcaacgagaccggccuggagcucacccugaccaacacguccaucaucaaccacaaguucugcaaccugagcgacgcccacaagaagaaccucuacgaccacgcccugauguccaucaucagcaccuuccaccuguccauccccaacuucaaccaguacgaggccaugagcugcgacuucaacgggggcaagaucuccgugcaguacaaccucagccacaccuacgcgguggacgccgccaaccacugcgggaccaucgccaacggcguccugcagacguucaugcggauggcguggggcggguccuacaucgcccuggacagcggcaagggguccugggacugcaucaugaccagcuaccaguaccucaucauccagaacaccaccugggaggaccacugccaguucucccgccccagccccaucggcuaccuggggcugcucagccagcggacgcgcgacaucuacaucucccggcgccggcgcggcaccuucaccuggacccugagcgacuccgagggcaacgagacgcccgggggcuacugccugacccgguggaugcucaucgaggccgagcugaagugcuucgggaacaccgccguggccaagugcaacgagaagcacgacgaggaguucugcgacaugcugcgccucuucgacuucaacaagcaggcgauccggcgccugaaggccccggcccagaugagcauccagcugaucaacaaggccgugaacgcccucaucaacgaccagcugaucaugaagaaccaccuccgggacaucaugggcauccccuacugcaacuacuccaaguacugcuaccugaaccacaccgucacggggcgcaccagccugccccggugcugccugguguccaacggcagcuaccucaacgagacccacuucuccgacgacaucgagcagcaggcggacaacaugaucaccgagcugcugcagaaggaguacaucgaccgccagggcaagacgccgcucgggcugguggaccuguucgucuucagcaccuccuucuaccugaucagcaucuuccuccaccuggugaagauccccacccaccggcacaucaucggcaagcccugccccaagccgcaccgccugaaccacauggggaucugcuccugcggccucuacaagcaccccggggugcccgucaaguggaagcggugaggacuaguuauaagacugacuagcccgaugggccucccaacgggcccuccuccccuccuugcaccgagauuaaucaaaggcucuuuucagagccaccaaaaaaaaaaaaaaaaaaaaaaaaaaaaaaaaaaaaaaaaaaaaaaaaaaaaaaaaaaaaaaaaaaaaaaaaaaaaaaaaaaaaaaaaaaaaaaaaaaaaa

SEQ ID NO: 26137 - RNA, 1686 nt, Artificial Sequence
  mRNA product Design i-3 (hSL-A100) comprising derived and/or modified sequence from LASV(LASV254-NIG-2011;Clade II)__AIT17674__GPCmut3 (opt1)
aggagaaagcuuaccaugggccagaucaucaccuucuuccaggaggugccccacgucaucgaggaggugaugaacaucgugcugaucgcccucagccugcuggccauccucaaggggaucuacaacgucgcgaccugcggccuguucgggcugguguccuuccuccugcugugcggccgcagcugcuccacgaccuacaaggggguguacgagcuccagacccuggagcuggacaugaccaaccucaacaugacgaugccgcugagcugcaccaagaacaacucccaccacuacaucauggucggcaacgagaccggccuggagcucacccugacgaacaccagcaucaucaaccacaaguucugcaaccuguccgacgcccacaagaagaaccucuacaaccacgcccugaugagcaucaucuccaccuuccaccugagcauccccaacuucaaccaguacgaggccauguccugcgacuucaacgggggcaagaucagcgugcaguacaaccucucccacagcuacgccguggacgcggccaaccacugcgggaccaucgccaacggcguccugcagacguucaugcggauggccuggggcggguccuacaucgcgcuggacagcggcaaggggaacugggacugcaucaugaccuccuaccaguaccucaucauccagaacaccaccugggaggaccacugccaguucagccgccccucccccaucggcuaccuggggcugcucagccagcggacgcgcgacaucuacaucagccggcgccggcgcggcaccuucaccuggacccuguccgacagcgagggcaacgagacgcccgggggcuacugccugacccgguggaugcucaucgaggccgagcugaagugcuucgggaacaccgccguggccaagugcaacgagaagcacgacgaggaguucugcgacaugcugcgccucuucgacuucaacaagcaggccauccggcgccugaagaccccggcgcaggccaacauccagcugaucaacaaggccgugaacgcccucaucaacgaccagcugaucaugaagaaccaccuccgggacaucaugggcauccccuacugcaacuacuccaaguacugcuaccugaaccacacggucaccgggaagaccagccugccccgcugcugccugguguccaacggcagcuaccucaacgagacccacuucuccgacgacaucgagcagcaggccgacaacaugaucacggagcugcugcagaaggaguacauggaccggcagggcaagaccccgcucgggcugguggaccuguucgucuucagcaccuccuucuaccugaucagcaucuuccuccaccuggugaagauccccacccaccgccacgugaucggcaagcccugccccaagccgcaccggcugaaccacauggggaucugcuccugcggccucuacaagcaccccgggguccccgugaaguggaagcgcugaggacuaguuauaagacugacuagcccgaugggccucccaacgggcccuccuccccuccuugcaccgagauuaaucaaaggcucuuuucagagccaccaaaaaaaaaaaaaaaaaaaaaaaaaaaaaaaaaaaaaaaaaaaaaaaaaaaaaaaaaaaaaaaaaaaaaaaaaaaaaaaaaaaaaaaaaaaaaaaaaaaaa

SEQ ID NO: 26138 - RNA, 1686 nt, Artificial Sequence
  mRNA product Design i-3 (hSL-A100) comprising derived and/or modified sequence from LASV(Nig08-A19;Clade III)__ADU56618__GPCmut3 (opt1)
aggagaaagcuuaccaugggccagaucgugaccuucuuccaggaggucccccacgugaucgaggaggugaugaacaucguccugaucgcccucagcauccuggccauccugaaggggcucuacaacaucgcgaccugcggccugaucgggcuggugacguuccuccugcuguccggccgcagcugcuccaugaccuacaaggggguguacgagcuccagacccuggagcugaacaugaacacccucaacaugacgaugccgcugagcugcaccaagaacaacucccaccacuacaucauggucggcaacgagaccggccuggagcucacccugacgaacaccagccugcuccaccacaaguucugcaaccuguccgacgcccacaagaagaaccuguacgaccacacccucaugagcaucaucuccaccuuccaccugagcauccccaacuucaaccaguacgaggccauguccugcgacuucaacgggggcaagaucacggugcaguacaaccugagccacuccuacgccaucgacgccgcgaaccacugcgggaccguggccaacggcguccuccagaccuucaugcggauggccuggggcgggagcuacaucgcccuggacuccggccgcgggaagugggacugcaucaugaccagcuaccaguaccugaucauccagaacacgaccugggaggaccacugccaguucucccggcccagccccaucggcuaccucgggcugcugucccagcgcacccgggacaucuacaucagccgccggcgccggggcaccuucacguggacccucagcgacuccgagggcaacgagacccccgggggcuacugccugacccgcuggaugcugaucgaggcggagcucaagugcuucgggaacacggccguggccaagugcaacgagaagcacgacgaggaguucugcgacaugcugcggcuguucgacuucaacaagcaggccauccgccggcucaaggccccggcgcagaugagcauccagcugaucaacaaggccgugaacgcccugaucaacgaccagcucaucaugaagaaccaccuccgcgacaucaugggcauccccuacugcaacuacuccaaguacugcuaccugaaccacaccagcaccgggcggaccucccugccccgcugcugccuggucagcaacggcuccuaccugaacgagacgcacuucagcgacgacaucgagcagcaggccgacaacaugaucaccgagaugcuccagaaggaguaccuggaccggcagggcaagaccccgcuggggcugguggaccucuucguguucuccaccagcuucuaccugaucuccaucuuccugcaccucgucaagauccccacgcaccgccacaucgugggcaagcccugccccaagccgcaccggcugaaccacauggggaucugcagcugcggccuguacaagcagcccggggugcccguccgcuggaagcggugaggacuaguuauaagacugacuagcccgaugggccucccaacgggcccuccuccccuccuugcaccgagauuaaucaaaggcucuuuucagagccaccaaaaaaaaaaaaaaaaaaaaaaaaaaaaaaaaaaaaaaaaaaaaaaaaaaaaaaaaaaaaaaaaaaaaaaaaaaaaaaaaaaaaaaaaaaaaaaaaaaaaa

SEQ ID NO: 26139 - RNA, 1689 nt, Artificial Sequence
  mRNA product Design i-3 (hSL-A100) comprising derived and/or modified sequence from LASV(G1180-SLE-2010;Clade IV)__AIT17168__GPCmut3 (opt1)
aggagaaagcuuaccaugggccagaucgugaccuucuuccaggaggucccccacgugaucgaggaggugaugaacaucguccugaucgcccucagcauccuggccgugcugaaggggcucuacaacuucgcgaccugcggccugguggggcugcucacguuccugcugcucugcggccgcuccugcaccgccagccgguacaagggggucuacgagcugcagacccuggagcucaacauggagacccugaacaugacgaugccgcuguccugcaccaagaacaacagccaccacuacaucauggugggcaacgagaccggccucgagcugacccugacgaacaccuccaucaucaaccacaaguucugcaaccucagcgacgcccacaagaagaaccuguacgaccacgcccugauguccaucaucagcaccuuccaccucuccauccccaacuucaaccaguacgaggccaugagcugcgacuucaacgggggcaagaucuccgugcaguacaaccugagccacuccuacgcgggggacgccgccaaccacugcggcaccgucgccaacggggugcugcagacguucaugcgcauggcguggggcggcagcuacaucgcccucgacuccgggcacggcagcugggacugcaucaugaccuccuaccaguaccugaucauccagaacaccaccugggaggaccacugccaguucagccggcccucccccaucggguaccugggccuccugagccagcgcacgcgggacaucuacaucagccgccggcgccggggcaccuucaccuggacccuguccgacagcgaggggaaggacacgccgggcggguacugccucacccgcuggaugcugaucgaggccgagcugaagugcuucggcaacaccgccguggccaagugcaacgagaagcacgacgaggaguucugcgacaugcuccggcuguucgacuucaacaagcaggcgauccagcgccugaaggcccccgcccagauguccauccagcucaucaacaaggccgucaacgcccugaucaacgaccagcugaucaugaagaaccaccuccgggacaucauggggauccccuacugcaacuacagcaaguacugcuaccugaaccacaccacgaccggcaagaccucccugcccaagugcugccucgugagcaacggcuccuaccugaacgagacccacuucagcgacgacaucgagcagcaggcggacaacaugaucacggagaugcugcagaaggaguacauggagcgccaggggaagaccccgcucggccugguggaccuguucgucuucuccaccagcuucuaccugaucuccaucuuccuccaccuggugaagauccccacccaccggcacaucgugggcaagagcugccccaagccccaccgccugaaccacauggggaucugcuccugcgggcucuacaagcagccgggcguccccgugaaguggaagcggugaggacuaguuauaagacugacuagcccgaugggccucccaacgggcccuccuccccuccuugcaccgagauuaaucaaaggcucuuuucagagccaccaaaaaaaaaaaaaaaaaaaaaaaaaaaaaaaaaaaaaaaaaaaaaaaaaaaaaaaaaaaaaaaaaaaaaaaaaaaaaaaaaaaaaaaaaaaaaaaaaaaaa

SEQ ID NO: 26140 - RNA, 1689 nt, Artificial Sequence
  mRNA product Design i-3 (hSL-A100) comprising derived and/or modified sequence from LASV(G1442-SLE-2011;Clade IV)__AIT17180__GPCmut3 (opt1)
aggagaaagcuuaccaugggccagaucgugaccuucuuccaggaggucccccacgugaucgaggaggugaugaacaucguccugaucgcccucagcauccuggccgugcugaaggggcucuacaacguggcgaccugcggccugaucgggcuggucacguuccuccugcugugcggccgcuccugcaccaccacccucuacaaggggguguacgagcugcagacgcuggagcucaacauggagacccugaacaugaccaugccgcugagcugcaccaagaacaacucccaccacuacauccgggugggcaacgagacgggccucgagcugacccugaccaacaccagcaucaucaaccacaaguucugcaaccucuccgacgcccacaagaagaaccuguacgaccacgcccugaugagcaucaucuccacguuccaccucagcauccccaacuucaaccaguacgaggccauguccugcgacuucaacgggggcaagaucagcguccaguacaaccugucccacagcuacgccggggacgcggccaaccacugcggcaccguggccaacggggugcugcagaccuucaugcgcauggccuggggcggcuccuacaucgcgcucgacagcgggcggggcaacugggacugcaucaugaccuccuaccaguaccugaucauccagaacacgaccugggacgaccacugccaguucagccgccccucccccaucggguaccugggccuccugagccagcggacccgcgacgucuacaucucccggcgccggcgcggcaccuucacguggacccugagcgacagcgaggggaaggacaccccgggcggguacugccucacccgguggaugcugaucgaggccgagcugaagugcuucggcaacacggccguggccaagugcaacgagaagcacgacgaggaguucugcgacaugcuccgccuguucgacuucaacaagcaggccauccagcggcugaaggcgcccgcccagauguccauccagcucaucaacaaggccgugaacgcccugaucaacgaccagcugaucaugaagaaccaccuccgcgacaucauggggauccccuacugcaacuacagcaaguacugcuaccugaacaacaccgccaccggcaagaccucccugcccaagugcugccucaucagcaacggcuccuaccugaacgagacgcacuucagcgacgacaucgagcaggaggcggacaacaugaucaccgagaugcugcagaaggaguacauggagcggcaggggaagaccccgcucggccuggucgaccuguucguguucuccaccagcuucuaccugaucuccaucuuccuccaccuggugaagauccccacgcaccgccacaucgucggcaagagcugccccaagccccaccggcugaaccacauggggaucugcuccugcgggcucuacaagcagccgggcgugcccgugcgcuggaagcggugaggacuaguuauaagacugacuagcccgaugggccucccaacgggcccuccuccccuccuugcaccgagauuaaucaaaggcucuuuucagagccaccaaaaaaaaaaaaaaaaaaaaaaaaaaaaaaaaaaaaaaaaaaaaaaaaaaaaaaaaaaaaaaaaaaaaaaaaaaaaaaaaaaaaaaaaaaaaaaaaaaaaa

SEQ ID NO: 26141 - RNA, 1689 nt, Artificial Sequence
  mRNA product Design i-3 (hSL-A100) comprising derived and/or modified sequence from LASV(G3010-SLE-2013;Clade IV)__AIT17344__GPCmut3 (opt1)
aggagaaagcuuaccaugggccagaucgugaccuucuuccaggaggucccccacgugaucgaggaggugaugaacaucguccugaucgcccucagcauccuggccgugcugaaggggcucuacaacuucgcgaccugcggccugguggggcuggucacguuccuccugcugugcggccgcuccugcaccaccagccucuacaaggggguguacgagcugcagacccuggagcucaacauggagacgcugaacaugaccaugccgcuguccugcaccaagaacaacagccaccacuacaucauggugggcaacgagaccggccucgagcugacgcugaccaacaccuccaucaucaaccacaaguucugcaaccucagcgacgcccacaagaagaaccuguacaaccacgcccugauguccaucaucagcaccuuccaccucuccauccccaacuucaaccaguacgaggccaugagcugcgacuucaacgggggcaagaucuccguccaguacaaccugagccacuccuacgccggggacgcggccagccacugcggcacgguggccaacggggugcugcagaccuucaugcggauggccuggggcggcuccuacaucgcgcucgacagcggguacggcaagugggacugcaucaugaccuccuaccaguaccugaucauccagaacaccacgugggaggaccacugccaguucagccgccccucccccaucggguaccugggccuccugagccagcggacccgcgacaucuacaucagccggcgccggcgcggcaccuucaccuggacgcuguccgacagcgaggggaaggacaccccgggcggguacugccucacccgguggaugcugaucgaggccgagcugaagugcuucggcaacaccgccgucgccaagugcaacgagaagcacgacgaggaguucugcgacaugcuccgccuguucgacuucaacaagcaggccauccagcggcugaagacgcccgcgcagauguccauccagcucaucaacaaggccgugaacgcccugaucaacgaccagcugaucaugaagaaccaccuccgcgacaucauggggauccccuacugcaacuacagcaaguacugcuaccugaaccacaccaccaccggcaagacgucccugcccaagugcugccucgugagcaacggcuccuaccugaacgagacccacuucagcgacgacaucgagcagcaggccgacaacaugaucaccgagaugcugcagaaggaguacauggagcggcaggggaagaccccgcucggccuggucgaccuguucguguucuccacgagcuucuaccugaucuccaucuuccuccaccuggugaagauccccacccaccgccacaucgucggcaagagcugccccaagccccaccggcugaaccacauggggaucugcuccugcgggcucuacaagcagccgggcgugcccgugcgcuggaagcggugaggacuaguuauaagacugacuagcccgaugggccucccaacgggcccuccuccccuccuugcaccgagauuaaucaaaggcucuuuucagagccaccaaaaaaaaaaaaaaaaaaaaaaaaaaaaaaaaaaaaaaaaaaaaaaaaaaaaaaaaaaaaaaaaaaaaaaaaaaaaaaaaaaaaaaaaaaaaaaaaaaaaa

SEQ ID NO: 26142 - RNA, 1689 nt, Artificial Sequence
  mRNA product Design i-3 (hSL-A100) comprising derived and/or modified sequence from LASV(G502-SLE-2009;Clade IV)__AIT17126__GPCmut3 (opt1)
aggagaaagcuuaccaugggccagaucgugaccuucuuccaggaggucccccacgugaucgaggaggugaugaacaucguccugaucgcccucagcauccuggccgugcugaaggggcucuacaacuucgcgaccugcggccugguggggcugcucacguuccugcugcucugcggccgcuccugcaccaccgggcuguacaagggcgucuacgagcugcagacccucgagcugaacauggagacgcugaacaugaccaugccgcucagcugcaccaagaacaacucccaccacuacaucauggugggcaacgagaccgggcuggagcugacgcucaccaacaccagcaucaucaaccacaaguucugcaaccuguccgacgcccacaagaagaaccuguacgaccacgcccucaugagcaucaucuccaccuuccaccugagcauccccaacuucaaccaguacgaggccauguccugcgacuucaacggcgggaagaucagcgugcaguacaaccugucccacagcuacgccggcgacgcggccgaccacugcgggacggucgccaacggcgugcuccagaccuucaugcggauggccuggggcggguccuacaucgcgcuggacagcggccgcgggcggugggacugcaucaugaccuccuaccaguaccugaucauccagaacaccacgugggaggaccacugccaguucagccgccccucccccaucggcuaccucggccugcugagccagcggacccgcgacaucuacaucucccggcgccggcgcgggaccuucaccuggacgcucagcgacagcgagggcaaggacacccccgggggcuacugccugacccgguggaugcugaucgaggccgagcucaagugcuucgggaacaccgccguggccaagugcaacgagaagcacgacgaggaguucugcgacaugcugcgccuguucgacuucaacaagcaggccauccagcggcucaaggcgccggcccagauguccauccagcugaucaacaaggccgucaacgcccugaucaacgaccagcucgugaugaagaaccaccuccgcgacaucaugggcauccccuacugcaacuacagccgguacugcuaccugaaccacacgaccaccggccgcaccucccugcccaagugcugccuggugagcaacggguccuaccugaacgagacgcacuucagcgacgacaucgagcagcaggccgacaacaugaucaccgagaugcuccagaaggaguacauggagcggcagggcaagaccccgcuggggcuggucgaccuguucguguucuccaccagcuucuaccucaucuccaucuuccugcaccuggugaagauccccacgcaccgccacaucgucggcaagagcugccccaagccccaccggcucaaccacauggggaucugcuccugcggccuguacaagcagccgggcgugcccgugaaguggaagcgcugaggacuaguuauaagacugacuagcccgaugggccucccaacgggcccuccuccccuccuugcaccgagauuaaucaaaggcucuuuucagagccaccaaaaaaaaaaaaaaaaaaaaaaaaaaaaaaaaaaaaaaaaaaaaaaaaaaaaaaaaaaaaaaaaaaaaaaaaaaaaaaaaaaaaaaaaaaaaaaaaaaaaa

SEQ ID NO: 26143 - RNA, 1689 nt, Artificial Sequence
  mRNA product Design i-3 (hSL-A100) comprising derived and/or modified sequence from LASV(G733-SLE-2010;Clade IV)__AIT17154__GPCmut3 (opt1)
aggagaaagcuuaccaugggccagaucgugaccuucuuccaggaggucccccacgugaucgaggaggugaugaacaucguccugaucgcccucagcauccuggccgugcugaaggggcucuacaacuucgcgaccugcggcaucguggggcuggucuccuuccugcuccugugcggccgcagcugcacgaccucccuguacaaggggguguacgagcuccagacccuggagcugaacauggagacccucaacaugacgaugccgcugagcugcaccaagaacaacucccaccacuacaucauggugggcaacgagaccggccuggagcucacccugacgaacaccagcaucaucaaccacaaguucugcaaccuguccgacgcccacaagaagaaccucuacgaccacgcccugaugagcaucaucuccaccuuccaccugagcauccccaacuucaaccaguacgaggccauguccugcgacuucaacgggggcaagaucagcguccaguacaaccucucccacagcuacgccggggacgcggccaaccacugcggcaccaucgccaacggggugcugcagacguucaugcggauggccuggggcggcuccuacaucgcgcuggacagcgggcgcgaccggugggacugcaucaugaccuccuaccaguaccucaucauccagaacaccaccugggaggaccacugccaguucagccgccccucccccaucggcuaccuggggcugcucagccagcggacgcgcgacaucuacaucagccggcgccggcgcggcaccuucaccuggacccuguccgacagcgagggcaaggacacgcccgggggcuacugccugacccgguggaugcucaucgaggccgagcugaagugcuucgggaacaccgccguggccaagugcaacgagaagcacgacgaggaguucugcgacaugcugcgccucuucgacuucaacaagcaggccauccagcggcugaaggcgccggcccagauguccauccagcugaucaacaaggccgucaacgcccucaucaacgaccagcugaucaugaagaaccaccuccgcgacaucaugggcauccccuacugcaacuacagcaaguacugcuaccugaaccacaccacgaccgggaagaccucccugcccaagugcugccuggugagcaacggcuccuaccucaacgagacccacuucagcgacgacaucgagcagcaggccgacaacaugaucacggagaugcugcagaaggaguacauggagcggcagggcaagaccccgcuggggcucguggaccuguucgucuucuccaccagcuucuaccugaucuccaucuuccugcaccucgugaagauccccacccaccgccacguggucggcaagagcugccccaagccccaccggcugaaccacauggggaucugcuccugcggccuguacgggcagccgggcgugcccgugaaguggaagcgcugaggacuaguuauaagacugacuagcccgaugggccucccaacgggcccuccuccccuccuugcaccgagauuaaucaaaggcucuuuucagagccaccaaaaaaaaaaaaaaaaaaaaaaaaaaaaaaaaaaaaaaaaaaaaaaaaaaaaaaaaaaaaaaaaaaaaaaaaaaaaaaaaaaaaaaaaaaaaaaaaaaaaa

SEQ ID NO: 26144 - RNA, 1689 nt, Artificial Sequence
  mRNA product Design i-3 (hSL-A100) comprising derived and/or modified sequence from MOPV/LASV reassortant(IGS-1;Clade IV)__AFY05576__GPCmut3 (opt1)
aggagaaagcuuaccaugggccagaucgugaccuucuuccaggaggucccccacgugaucgaggaggugaugaacaucguccugaucgcccucagcgugcuggccgugcugaaggggcucuacaacuucgcgaccugcggccuggucgggcuggugacguuccuccugcugugcggccgcuccugcaccaccagccucuacaaggggguguacgagcugcagacccuggagcucaacauggagacgcugaacaugaccaugccgcuguccugcaccaagaacaacagccaccacuacaucauggucggcaacgagaccggccucgagcugacgcugaccaacaccuccaucaucaaccacaaguucugcaaccucagcgacgcccacaagaagaaccuguacgaccacgcccugauguccaucaucagcaccuuccaccucuccauccccaacuucaaccaguacgaggccaugagcugcgacuucaacgggggcaagaucuccgugcaguacaaccugagccacuccuacgccggggacgcggccaaccacugcggcacgguggccaacgggguccugcagaccuucaugcggauggccuggggcggcagcuacaucgcgcucgacuccgggcgcggcaacugggacugcaucaugaccagcuaccaguaccugaucauccagaacaccacgugggaggaccacugccaguucucccggcccagccccaucggguaccugggccuccugucccagcgcacccgggacaucuacaucagccgccggcgccggggcaccuucaccuggacgcugagcgacuccgagggggaggacaccccgggcggguacugccucacccgcuggaugcugaucgaggccgagcugaagugcuucggcaacaccgccguggccaagugcaacgagaagcacgacgaggaguucugcgacaugcuccggcuguucgacuucaacaagcaggccauccagcgccugaaggcgcccgcccagaugagcauccagcucaucaacaaggccgugaacgcccugaucaacgaccagcugaucaugaagaaccaccuccgggacaucauggggauccccuacugcaacuacuccaaguacugcuaccugaaccacacgaccaccggccgcaccagccugcccaagugcugccucgucuccaacggcagcuaccugaacgagacgcacuucuccgacgacaucgagcagcaggccgacaacaugaucaccgagaugcugcagaaggaguacauggagcggcaggggaagaccccgcucggccugguggaccuguucguguucagcaccuccuucuaccugaucagcaucuuccuccaccuggucaagauccccacgcaccgccacaucguggggaaguccugccccaagccccaccggcugaaccacaugggcaucugcagcugcgggcucuacaagcagccgggcgugcccgucaaguggaagcgcugaggacuaguuauaagacugacuagcccgaugggccucccaacgggcccuccuccccuccuugcaccgagauuaaucaaaggcucuuuucagagccaccaaaaaaaaaaaaaaaaaaaaaaaaaaaaaaaaaaaaaaaaaaaaaaaaaaaaaaaaaaaaaaaaaaaaaaaaaaaaaaaaaaaaaaaaaaaaaaaaaaaaa

SEQ ID NO: 26145 - RNA, 1689 nt, Artificial Sequence
  mRNA product Design i-3 (hSL-A100) comprising derived and/or modified sequence from LASV(LM765-SLE-2012;Clade IV)__AIT17814__GPCmut3 (opt1)
aggagaaagcuuaccaugggccagaucgugaccuucuuccaggaggucccccacgugaucgaggaggugaugaacaucguccugaucgcccucagcauccuggccgugcugaaggggcucuacaacuucgcgaccugcggccugguggggcuggucacguuccuccugcugugcggccgcuccugcaccaccagccucuacaaggggguguacgagcugcagacccuggagcucaacauggagacgcugaacaugaccaugccgcuguccugcaccaagaacaacagccaccacuacaucauggugggcaacgagaccggccucgagcugacgcugaccaacaccuccaucaucgaccacaaguucugcaaccucagcgacgcccaccggaagaaccuguacgaccacgcccugauguccaucaucagcaccuuccaccucuccauccccaacuucaaccaguacgaggccaugagcugcgacuucaacgggggcaagaucuccguccaguacaaccugagccacuccuacgccaaggacgcggccgaccacugcgggacgguggccaacggcgugcugcagaccuucaugcgcauggccuggggcgggagcuacaucgcgcucgacuccggccgggggcgcugggacugcaucaugaccagcuaccaguaccugaucauccagaacaccacgugggaggaccacugccaguucucccggcccagccccaucggcuaccuggggcuccugucccagcgcacccgggacaucuacaucagccgccggcgccggggcaccuucaccuggacgcugagcgacuccgagggcaaggacacccccgggggcuacugccucacccgcuggaugcugaucgaggccgagcugaagugcuucgggaacaccgccgucgccaagugcaacgagaagcacgacgaggaguucugcgacaugcuccggcuguucgacuucaacaagcaggccauccagcgccugaaggcgccggcccagaugagcauccagcucaucaacaaggccgugaacgcccugaucaacgaccagcugaucaugaagaaccaccuccgggacaucaugggcauccccuacugcaacuacuccaaguacugcuaccugaaccacacgaccaccgggaagaccagccugcccaagugcugccucguguccaacggcagcuaccugaacgagacgcacuucuccgacgacaucgagcagcaggccgacaacaugaucaccgagaugcugcagaaggaguacauggagcgccagggcaagaccccgcucgggcuggucgaccuguucguguucagcaccuccuucuaccugaucagcaucuuccuccaccuggugaagauccccacgcaccggcacaucgucggcaagcccugccccaagccgcaccgccugaaccacauggggaucugcuccugcggccucuacaagcagcccggggugcccgugaaguggaagcggugaggacuaguuauaagacugacuagcccgaugggccucccaacgggcccuccuccccuccuugcaccgagauuaaucaaaggcucuuuucagagccaccaaaaaaaaaaaaaaaaaaaaaaaaaaaaaaaaaaaaaaaaaaaaaaaaaaaaaaaaaaaaaaaaaaaaaaaaaaaaaaaaaaaaaaaaaaaaaaaaaaaaa

SEQ ID NO: 26146 - RNA, 1689 nt, Artificial Sequence
  mRNA product Design i-3 (hSL-A100) comprising derived and/or modified sequence from LASV(LM776-SLE-2012;Clade IV)__AIT17824__GPCmut3 (opt1)
aggagaaagcuuaccaugggccagaucgugaccuucuuccaggaggucccccacgugaucgaggaggugaugaacaucguccugaucgcccucagcauccuggccgugcugaaggggcucuacaacuucgcgaccugcggccugguggggcuggucacguuccuccugcugugcggccgcuccugcaccaccagcguguacaaggggguguacgagcuccagacccuggagcugaacauggagacgcucaacaugaccaugccgcuguccugcaccaagaacaacagccaccacuacaucauggucggcaacgagaccggccuggagcucacgcugaccaacaccuccaucaucaaccacaaguucugcaaccugagcgacgcccacaagaagaaccucuacgaccacgcccugauguccaucaucagcaccuuccaccuguccauccccaacuucaaccaguacgaggccaugagcugcgacuucaacgggggcaagaucuccgugcaguacaaccucagccacuccuacgccggggacgcggccaaccacugcggcacgguggccaacgggguccugcagaccuucaugcggauggccuggggcggcagcuacaucgcgcuggacuccgggcacggcaagugggacugcaucaugaccagcuaccaguaccucaucauccagaacaccacgugggaggaccacugccaguucucccgccccagccccaucggguaccugggccugcucucccagcggacccgcgacaucuacaucagccggcgccggcgcggcaccuucaccuggacgcugagcgacuccgaggggaaggacaccccgggcggguacugccugacccgguggaugcucaucgaggccgagcugaagugcuucggcaacaccgccguggccaagugcaacgagaagcacgacgaggaguucugcgacaugcugcgccucuucgacuucaacaagcaggccauccagcggcugaaggcgcccgcccagaugagcauccagcugaucaacaaggccgugaacgcccucaucaacgaccagcugaucaugaagaaccaccuccgcgacaucauggggauccccuacugcaacuacuccaaguacugcuaccugaaccacacgaccaccggcaagaccagccugcccaagugcugccuggucuccaacggcagcuaccucaacgagacgcacuucuccgacgacaucgagcagcaggccgacaacaugaucaccgagaugcugcagaaggaguacauggagcggcaggggaagaccccgcugggccucguggaccuguucguguucagcaccuccuucuaccugaucagcaucuuccugcaccucgucaagauccccacgcaccgccacaucguggggaaguccugccccaagccccaccggcugaaccacaugggcaucugcagcugcgggcuguacaagcagccgggcgugcccguccgcuggaagcggugaggacuaguuauaagacugacuagcccgaugggccucccaacgggcccuccuccccuccuugcaccgagauuaaucaaaggcucuuuucagagccaccaaaaaaaaaaaaaaaaaaaaaaaaaaaaaaaaaaaaaaaaaaaaaaaaaaaaaaaaaaaaaaaaaaaaaaaaaaaaaaaaaaaaaaaaaaaaaaaaaaaaa

SEQ ID NO: 26147 - RNA, 1689 nt, Artificial Sequence
  mRNA product Design i-3 (hSL-A100) comprising derived and/or modified sequence from LASV(Mad39;Clade IV)__ANH09722__GPCmut3 (opt1)
aggagaaagcuuaccaugggccagaucgugaccuucuuccaggaggucccccacgugaucgaggaggugaugaacaucguccugaucgcccucagcauccuggccgugcugaaggggcucuacaacguggcgaccugcggccugaucgggcuggucacguuccuccugcugugcggccgcuccugcaccaccacccucuacaaggggguguacgagcugcaggcccuggagcucaacauggagacgcugaacaugaccaugccgcugagcugcaccaagaacaacucccaccacuacauccgggugggcaacgagaccggccucgagcugacgcugaccaacaccagccucaucaaccacaaguucugcaaccuguccgacgcccacaagaagaaccuguacgaccacgcccucaugagcaucaucuccaccuuccaccugagcauccccaacuucaaccaguacgaggccauguccugcgacuucaacgacgggaagaucagcguccaguacaaccugucccacacguacgcgggcgacaccgccaaccacugcgggaccguggccaacggcgugcuccagaccuucaugcgcauggccuggggcgggagcuacaucgcgcuggacuccggccgcgggggcugggacugcaucaugacgagcuaccaguaccugaucauccagaacaccaccugggaggaccacugccaguucucccggcccagccccaucggguaccucggccugcugucccagcggacccgcgacaucuacaucagccggcgccggcgcggcacguucaccuggacccucuccgacagcgaggggaaggacaccccgggcggguacugccugacgcgguggaugcugaucgaggccgagcucaagugcuucggcaacaccgccgucgccaagugcaacgagaagcacgacgaggaguucugcgacaugcugcgccuguucgacuucaacaagcaggccauccagcggcucaaggcgcccgcccagaugagcauccagcugaucaacaaggccgugaacgcccugaucaacgaccagcucaucaugaagaaccaccuccgcgacaucauggggauccccuacugcaacuacuccaaguacugcuaccugaaccacaccgugaccggcaagacgagccugcccaagugcugccuggucuccaacggcagcuaccugaacgagacccacuucuccgacgacaucgagcagcaggccgacaacaugaucaccgagaugcuccagaaggaguacauggagcggcaggggaagaccccgcugggccugguggaccuguucguguucagcacguccuucuaccucaucagcaucuuccugcaccuggucaagauccccacccaccgccacgugguggggaagcccugccccaagccgcaccggcucaaccacaugggcaucugcuccugcggguucuacaagcagcccggcguccccgugcgcuggaagcggugaggacuaguuauaagacugacuagcccgaugggccucccaacgggcccuccuccccuccuugcaccgagauuaaucaaaggcucuuuucagagccaccaaaaaaaaaaaaaaaaaaaaaaaaaaaaaaaaaaaaaaaaaaaaaaaaaaaaaaaaaaaaaaaaaaaaaaaaaaaaaaaaaaaaaaaaaaaaaaaaaaaaa

SEQ ID NO: 26148 - RNA, 1689 nt, Artificial Sequence
  mRNA product Design i-3 (hSL-A100) comprising derived and/or modified sequence from LASV(Z0947-SLE-2011;Clade IV)__AIT17840__GPCmut3 (opt1)
aggagaaagcuuaccaugggccagaucgugaccuucuuccaggaggucccccacgugaucgaggaggugaugaacaucguccugaucgcccucagcauccuggccgugcugaaggggcucuacaacuucgcgaccugcggccugguggggcuggucacguuccuccugcugugcggccgcuccugcaccaucagccucuacaaggggguguacgagcugcagacccuggagcucaacauggagacccugaacaugacgaugccgcuguccugcaccaagaacaacagccaccacuacaucauggugggcaacgagaccggccucgagcugacccugacgaacaccuccaucaucaaccacaaguucugcaaccucagcgacgcccacaagaagaaccuguacgaccacgcccugauguccaucaucagcaccuuccaccucuccauccccaacuucaaccaguacgaggccaugagcugcgacuucaacgggggcaagaucuccguccaguacaaccugagccacuccuacgccggggacgcggccaaccacugcggcaccguggccaacggggugcugcagacguucaugcggauggccuggggcggcagcuacaucgcgcucgacuccgggcgcgaccggugggacugcaucaugaccagcuaccaguaccugaucauccagaacaccaccugggaggaccacugccaguucucccgccccagccccaucggcuaccuggggcuccugucccagcggacgcgcgacaucuacaucagccggcgccggcgcggcaccuucaccuggacccugagcgacuccgagggcaaggacacgcccgggggcuacugccucacccgguggaugcugaucgaggccgagcugaagugcuucgggaacaccgccgucgccaagugcaacgagaagcacgacgaggaguucugcgacaugcuccgccuguucgacuucaacaagcaggccauccagcggcugaaggcgccggcccagaugagcauccagcucaucaacaaggccgugaacgcccugaucaacgaccagcugaucaugaagaaccaccuccgcgacaucaugggcauccccuacugcaacuacuccaaguacugcuaccugaaccacaccacgaccgggaagaccagccugcccaagugcugccucguguccaacggcagcuaccugaacgagacccacuucuccgacgacaucgagcagcaggccgacaacaugaucacggagaugcugcagaaggaguacauggagcggcagggcaagaccccgcucgggcuggucgaccuguucguguucagcaccuccuucuaccugaucagcaucuuccuccaccuggugaagauccccacccaccgccacaucgucggcaagcccugccccaagccgcaccggcugaaccacauggggaucugcuccugcggccucuacaagcagcccggggugcccgugaaguggaagcgcugaggacuaguuauaagacugacuagcccgaugggccucccaacgggcccuccuccccuccuugcaccgagauuaaucaaaggcucuuuucagagccaccaaaaaaaaaaaaaaaaaaaaaaaaaaaaaaaaaaaaaaaaaaaaaaaaaaaaaaaaaaaaaaaaaaaaaaaaaaaaaaaaaaaaaaaaaaaaaaaaaaaaa

SEQ ID NO: 26149 - RNA, 1689 nt, Artificial Sequence
  mRNA product Design i-3 (hSL-A100) comprising derived and/or modified sequence from LASV(Josiah;Clade IV)__NP_694870__GPCmut3 (opt4)
aggagaaagcuuaccaugggccagaucgugaccuucuuccaggaggugccccacgugaucgaggaggugaugaacaucgugcugaucgcccugagcgugcuggccgugcugaagggccuguacaacuucgccaccugcggccuggugggccuggugaccuuccugcugcugugcggcagaagcugcaccaccagccuguacaagggcguguacgagcugcagacccuggagcugaacauggagacccugaacaugaccaugccccugagcugcaccaagaacaacagccaccacuacaucauggugggcaacgagaccggccuggagcugacccugaccaacaccagcaucaucaaccacaaguucugcaaccugagcgacgcccacaagaagaaccuguacgaccacgcccugaugagcaucaucagcaccuuccaccugagcauccccaacuucaaccaguacgaggccaugagcugcgacuucaacggcggcaagaucagcgugcaguacaaccugagccacagcuacgccggcgacgccgccaaccacugcggcaccguggccaacggcgugcugcagaccuucaugagaauggccuggggcggcagcuacaucgcccuggacagcggcagaggcaacugggacugcaucaugaccagcuaccaguaccugaucauccagaacaccaccugggaggaccacugccaguucagcagacccagccccaucggcuaccugggccugcugagccagagaaccagagacaucuacaucagcagaagaagaagaggcaccuucaccuggacccugagcgacagcgagggcaaggacacccccggcggcuacugccugaccagauggaugcugaucgaggccgagcugaagugcuucggcaacaccgccguggccaagugcaacgagaagcacgacgaggaguucugcgacaugcugagacuguucgacuucaacaagcaggccauccagagacugaaggcccccgcccagaugagcauccagcugaucaacaaggccgugaacgcccugaucaacgaccagcugaucaugaagaaccaccugagagacaucaugggcauccccuacugcaacuacagcaaguacugcuaccugaaccacaccaccaccggcagaaccagccugcccaagugcugccuggugagcaacggcagcuaccugaacgagacccacuucagcgacgacaucgagcagcaggccgacaacaugaucaccgagaugcugcagaaggaguacauggagagacagggcaagaccccccugggccugguggaccuguucguguucagcaccagcuucuaccugaucagcaucuuccugcaccuggugaagauccccacccacagacacaucgugggcaagagcugccccaagccccacagacugaaccacaugggcaucugcagcugcggccuguacaagcagcccggcgugcccgugaaguggaagagaugaggacuaguuauaagacugacuagcccgaugggccucccaacgggcccuccuccccuccuugcaccgagauuaaucaaaggcucuuuucagagccaccaaaaaaaaaaaaaaaaaaaaaaaaaaaaaaaaaaaaaaaaaaaaaaaaaaaaaaaaaaaaaaaaaaaaaaaaaaaaaaaaaaaaaaaaaaaaaaaaaaaaa

SEQ ID NO: 26150 - RNA, 1686 nt, Artificial Sequence
  mRNA product Design i-3 (hSL-A100) comprising derived and/or modified sequence from LASV(LP;Clade I)__AAF86701__GPCmut3 (opt4)
aggagaaagcuuaccaugggccagaucaucaccuucuuccaggaggugccccacgugaucgaggaggugaugaacaucgugcugaucgcccugagccugcuggccauccugaagggccuguacaacaucgccaccugcggcaucaucggccugguggccuuccuguuccugugcggcaagagcugcagccugacccugaagggcggcuacgagcugcagacccuggagcugaacauggagacccugaacaugaccaugccccugagcugcaccaagaacagcagccaccacuacaucagagugggcaacgagaccggccuggagcugacccugaccaacaccagcaucaucaaccacaaguucugcaaccugagcgacgcccacaagaagaaccuguacgaccacgcccugaugagcaucaucagcaccuuccaccugagcauccccaacuucaaccaguacgaggccaugagcugcgacuucaacggcggcaagaucagcgugcaguacaaccugagccacagcuacgccggcgacgccgccgagcacugcggcaccguggccaacggcgugcugcagaccuucaugagaauggccuggggcggcagauacaucgcccuggacagcggcaagggcaacugggacugcaucaugaccagcuaccaguaccugaucauccagaacaccaccugggaggaccacugccaguucagcagacccagccccaucggcuaccugggccugcugagccagagaaccagagacaucuacaucagcagaagaagaagaggcaccuucaccuggacccugagcgacagcgagggcaacgagacccccggcggcuacugccugaccagauggaugcugaucgaggccgagcugaagugcuucggcaacaccgccguggccaagugcaacgagaagcacgacgaggaguucugcgacaugcugagacuguucgacuucaacaagcaggccaucagaagacugaaggcccccgcccagaugagcauccagcugaucaacaaggccgugaacgcccugaucaacgaccagcugaucaugaagaaccaccugagagacaucaugggcauccccuacugcaacuacagcaaguacugcuaccugaaccacaccagcagcggcagaaccagccugcccaagugcugccugaucagcaacggcagcuaccugaacgagacccaguucagcgacgacaucgagcagcaggccgacaacaugaucaccgagaugcugcagaaggaguacaucgagagacagggcaagaccccccugggccugguggacaucuucaucuucagcaccagcuucuaccugaucagcaucuuccugcaccugaucaagauccccacccacagacacaucgugggcaagcccugccccaagccccacagacugaaccacaugggcgugugcagcugcggccuguacaagcaccccggcgugcccaccaaguggaagagaugaggacuaguuauaagacugacuagcccgaugggccucccaacgggcccuccuccccuccuugcaccgagauuaaucaaaggcucuuuucagagccaccaaaaaaaaaaaaaaaaaaaaaaaaaaaaaaaaaaaaaaaaaaaaaaaaaaaaaaaaaaaaaaaaaaaaaaaaaaaaaaaaaaaaaaaaaaaaaaaaaaaaa

SEQ ID NO: 26151 - RNA, 1686 nt, Artificial Sequence
  mRNA product Design i-3 (hSL-A100) comprising derived and/or modified sequence from LASV(803213;Clade II)__AAF86703__GPCmut3 (opt4)
aggagaaagcuuaccaugggccagaucaucaccuucuuccaggaggugccccacgugaucgaggaggugaugaacaucgugcugaucgcccugagccugcuggccauccugaagggcaucuacaacguggccaccugcggccuguucggccugaucagcuuccugcugcugugcggcagaagcugcagcgugaccuacaagggcguguacgagcugcagacccuggagcugaacauggccaaccugaacaugaccaugccccugagcugcaccaagaacaacagccaccacuacaucauggugggcaacgagaccggccuggagcugacccugaccaacaccagcaucaucaaccacaaguucugcaaccugagcgacgcccacaagaagaaccuguacgaccacgcccugaugagcaucaucagcaccuuccaccugagcauccccaacuucaaccaguacgaggccaugagcugcgacuucaacggcggcaagaucagcgugcaguacaaccugagccacagcuucgccguggacgccgccaaccacugcggcaccaucgccaacggcgugcugcagaccuucaugagaauggccuggggcggcagcuacaucgcccuggacagcggcaagggcaacugggacugcaucaugaccagcuaccaguaccugaucauccagaacaccaccugggaggaccacugccaguucagcagacccagccccaucggcuaccugggccugcugagccagagaaccagagacaucuacaucagcagaagaagaagaggcaccuucaccuggacccugagcgacagcgagggcaacgaggcccccggcggcuacugccugaccagauggaugcugaucgaggccgagcugaagugcuucggcaacaccgccguggccaagugcaacgagaagcacgacgaggaguucugcgacaugcugagacuguucgacuucaacaagcaggccaucaagagacugaagacccccgcccagaugagcauccagcugaucaacaaggccgugaacgcccugaucaacgaccagcugaucaugaagaaccaccugagagacaucaugggcauccccuacugcaacuacagcagauacugcuaccugaaccacaccgugaccggcaagaccagccugcccagaugcugccuggugagcaacggcagcuaccugaacgagacccacuucagcgacgacaucgagcagcaggccgacaacaugaucaccgagaugcugcagaaggaguacauggacagacagggcaagaccccccugggccugguggaccuguucguguucagcaccagcuucuaccugaucagcaucuuccugcaccuggugaagauccccacccacagacacaucgugggcaagcccugccccaagccccacagacugaaccacaugggcaucugcagcugcggccuguacaagcaccccggcgugcccgugaaguggaagagaugaggacuaguuauaagacugacuagcccgaugggccucccaacgggcccuccuccccuccuugcaccgagauuaaucaaaggcucuuuucagagccaccaaaaaaaaaaaaaaaaaaaaaaaaaaaaaaaaaaaaaaaaaaaaaaaaaaaaaaaaaaaaaaaaaaaaaaaaaaaaaaaaaaaaaaaaaaaaaaaaaaaaa

SEQ ID NO: 26152 - RNA, 1686 nt, Artificial Sequence
  mRNA product Design i-3 (hSL-A100) comprising derived and/or modified sequence from LASV(GA391;Clade III)__CAA36645__GPCmut3 (opt4)
aggagaaagcuuaccaugggccagaucgugaccuucuuccaggaggugccccacgugaucgaggaggugaugaacaucgugcugaucgcccugagcauccuggccauccugaagggccuguacaacguggccaccugcggccugaucggccuggugaccuuccugcugcugagcggcagaagcugcagccugaucuacaagggcaccuacgagcugcagacccuggagcugaacauggagacccugaacaugaccaugccccugagcugcaccaagaacaacagccaccacuacaucagagugggcaacgagaccggccuggagcugacccugaccaacaccagcauccugaaccacaaguucugcaaccugagcgacgcccacaagagaaaccuguacgaccacagccugaugagcaucaucagcaccuuccaccugagcauccccaacuucaaccaguacgaggccaugagcugcgacuucaacggcggcaagaucaccgugcaguacaaccugagccacagcuucgccguggacgccgccggccacugcggcacccuggccaacggcgugcugcagaccuucaugagaauggccuggggcggcagcuacaucgcccuggacagcggcagaggcaacugggacugcaucaugaccagcuaccaguaccugaucauccagaacaccaccugggacgaccacugccaguucagcagacccagccccaucggcuaccugggccugcugagccagagaaccagagacaucuacaucagcagaagaagaagaggcaccuucaccuggacccugagcgacagcgagggcaacgagacccccggcggcuacugccugaccagauggaugcugaucgaggccgagcugaagugcuucggcaacaccgccguggccaagugcaacgagaagcacgacgaggaguucugcgacaugcugagacuguucgacuucaacaagcaggccaucagaagacugaagacccccgcccagaugagcauccagcugaucaacaaggccgugaacgcccugaucaacgaccagcugaucaugaagaaccaccugagagacaucaugggcauccccuacugcaacuacagcagauacugcuaccugaaccacaccagcaccggcaagaccagccugcccagaugcugccugaucagcaacggcagcuaccugaacgagaccaaguucagcgacgacaucgagcagcaggccgacaacaugaucaccgagaugcugcagaaggaguacaucgacagacagggcaagaccccccugggccugguggaccuguucguguucagcaccagcuucuaccugaucagcaucuuccugcaccuggugaagauccccacccacagacacaucgugggcaagcccugccccaagccccacagacugaaccacaugggcaucugcagcugcggccuguacaagcagcccggcgugcccgugagauggaagagaugaggacuaguuauaagacugacuagcccgaugggccucccaacgggcccuccuccccuccuugcaccgagauuaaucaaaggcucuuuucagagccaccaaaaaaaaaaaaaaaaaaaaaaaaaaaaaaaaaaaaaaaaaaaaaaaaaaaaaaaaaaaaaaaaaaaaaaaaaaaaaaaaaaaaaaaaaaaaaaaaaaaaa

SEQ ID NO: 26153 - RNA, 1689 nt, Artificial Sequence
  mRNA product Design i-3 (hSL-A100) comprising derived and/or modified sequence from LASV(AV;Clade V)__CCA30314__GPCmut3 (opt4)
aggagaaagcuuaccaugggccagaucgugaccuucuuccaggaggugccccacgugaucgaggaggugaugaacaucgugcugaucgcccugagcauccuggccgugcugaagggccuguacaacaucgccaccugcggccugaucggccugaucaccuuccugcugcugugcggcagaagcugcagcagcaaccuguacaagggcguguacgagcugcagagccuggaccugaacauggagacccugaacaugaccaugccccugagcugcaccaagaacaacagccaccacuacaucagagugggcaacgacaccggccuggagcugacccugaccaacaccagcauccugaaccacaaguucugcaaccugagcgacgcccacaagaaggaccuguacgaccacgcccugaugagcaucaucagcaccuuccaccugagcauccccaacuucaaccaguacgaggccaugagcugcgacuucaacggcggcaagaucagcgugcaguacaaccugagccacagcuacgccaucgacgccgccaaccacugcggcaccguggccaacggcauccugcagaccuucaugagaauggccuggggcggcagcuacaucgcccuggacagcggcagaggcaacugggacugcaucaugaccagcuaccaguaccugaucauccagaacaccaccugggagaaccacugccaguucagcagacccagccccaucggcuaccugggccugcugagccagagaaccagagacaucuacaucagcagaagaagaagaggcaccuucaccuggacccugagcgacagcgagggcaacgccacccccggcggcuacugccugaccagauggaugcugaucgaggccgagcugaagugcuucggcaacaccgccguggccaagugcaacgagaagcacgacgaggaguucugcgacaugcugagacuguucgacuucaacaagcaggccaucagcagacugaagagccccgcccagaugagcauccagcugaucaacaaggccgugaacgcccugaucaacgaccagcugaucaugaagaaccaccugagagacaucaugggcauccccuacugcaacuacagcaaguacugcuaccugaaccacaccaucaccggcaagaccagccugcccaagugcugccuggugagcaacggcagcuaccugaacgagacccacuucagcgacgacaucgagcagcaggccgacaacaugaucaccgagaugcugcagaaggaguacauggagagacagggcaagaccccccugggccugguggaccuguucguguucagcaccagcuucuaccugaucagcaucuuccugagacuggugaagauccccacccacagacacaucgugggcaagcccugccccaagccccacagacugaaccacaugggcaucugcagcugcggccuguacaagcagcccggcgugcccgugagauggaagagaugaggacuaguuauaagacugacuagcccgaugggccucccaacgggcccuccuccccuccuugcaccgagauuaaucaaaggcucuuuucagagccaccaaaaaaaaaaaaaaaaaaaaaaaaaaaaaaaaaaaaaaaaaaaaaaaaaaaaaaaaaaaaaaaaaaaaaaaaaaaaaaaaaaaaaaaaaaaaaaaaaaaaa

SEQ ID NO: 26154 - RNA, 1686 nt, Artificial Sequence
  mRNA product Design i-3 (hSL-A100) comprising derived and/or modified sequence from LASV(Togo/2016/7082;Clade VI)__AMR44577__GPCmut3 (opt4)
aggagaaagcuuaccaugggccagaucaucaccuucuuccaggaggugccccacgugaucgaggaggugaugaacaucgugcugaucgcccugagccugcuggccauccugaagggcguguacaacguggccaccugcggcaucaucggccuggugaccuuccuguuccugugcggcagaagcugcagccugaucuacaagggcagcuacgagcugcagacccuggagcugaacauggagacccugaacaugaccaugccccugagcugcaccaagaacagcagccaccacuacaucagagugggcaacgagaccggccuggagcugacccugaccaacaccagcaucaucaaccacaaguucugcaaccugagcgacgcccacaagagaaaccuguacgaccacgcccugaugagcauccugagcaccuuccaccugagcauccccaacuucaaccaguacgaggccaugagcugcgacuucaacggcggcaagaucagcgugcaguacaaccugagccacgccuacgccguggacgccgccgagcacugcggcaccguggccaacggcgugcugcagaccuucaugagaauggccuggggcggcagcuacaucgcccuggacagcggcagaggcaacugggacugcaucaugaccagcuaccaguaccugaucauccagaacaccaccugggaggaccacugccaguucagcagacccagccccaucggcuaccugggccugcugagccagagaaccagagacaucuacaucagcagaagaagaagaggcaccuucaccuggacccugagcgacagcgagggcaacgagacccccggcggcuacugccugaccagauggaugcugaucgaggccgagcugaagugcuucggcaacaccgccguggccaagugcaacgagaagcacgacgaggaguucugcgacaugcugagacuguucgacuucaacaagcaggccauccagagacugaagagccccgcccagaugagcauccagcugaucaacaaggccgugaacgcccugaucaacgaccagcugaucaugaagaaccaccugagagacaugaugggcauccccuacugcaacuacagcaaguacugcuaccugaaccacaccagcagcggcagaaccagccugcccaagugcugccuggugagcaacggcagcuaccugaacgagacccacuucagcgacgacaucgagcagcaggccgacaacaugaucaccgagaugcugcagaaggaguacaucgacagacagggcaagaccccccugggccugguggaccuguucguguucagcaccagcuucuaccugaucagcaucuuccugcaccugaucaagauccccacccacagacacaucgugggcaagcccugccccaagccccacagacugaaccacaugggcaucugcagcugcggccuguacaagcagcccggcgugcccaccagauggaagagaugaggacuaguuauaagacugacuagcccgaugggccucccaacgggcccuccuccccuccuugcaccgagauuaaucaaaggcucuuuucagagccaccaaaaaaaaaaaaaaaaaaaaaaaaaaaaaaaaaaaaaaaaaaaaaaaaaaaaaaaaaaaaaaaaaaaaaaaaaaaaaaaaaaaaaaaaaaaaaaaaaaaaa

SEQ ID NO: 26155 - RNA, 1686 nt, Artificial Sequence
  mRNA product Design i-3 (hSL-A100) comprising derived and/or modified sequence from LASV(KAK-428;Clade n.d. (VII))__ANH09740__GPCmut3 (opt4)
aggagaaagcuuaccaugggccagaucgugaccuucuuccaggaggugccccacgugaucgaggaggugaugaacaucgugcugaucgcccugagccugcuggccauccugaagggccuguacaacuucgccaccugcggcgugaucggccugaucaccuuccugcugcugugcggcagaagcugcagcgccaccuacaagggccaguacgagcugcagacccuggagcugaacauggagagccugaacaugaccaugccccugagcugcaccaagaacaacagccaccacuacaucagagccggcaacaacaccggccuggagcugacccugaccaacaccagcaucaucagccacaaguucugcaaccugagcgacgcccacaagaagaaccuguacgaccacacccugaugagcaucaucaccaccuuccaccugagcauccccaacuucaaccaguacgaggccaugagcugcgacuucaacggcggcaagaucagcauccaguacaaccugagccacagcuacgccggcgacgccgcccagcacugcggcaccguggccaacggcgugcugcagaccuucaugagaauggccuggggcggcagcuaccuggcccuggacagcggcagaagaggcugggacugcaucaucagcagcuaccaguaccugaucauccagaacaccaccugggacgaccacugccaguucagcagacccagccccaucggcuaccugggcuucgugagccagaagaccagagacaucuacaucagcagaagaagaagaggcaccuucaccuggacccugagcgacagcgagggccacgacaugcccggcggcuacugccugaccagauggaugcugaucgaggccgaccugaagugcuucggcaacaccgccguggccaagugcaacgagaagcacgacgaggaguucugcgacauguggagacuguucgacuucaacaagcaggccauccagagacugaaggcccccgcccagaugaacauccagcugaucaacaaggccgugaacgcccugaucaacgaccagcugaugaugaagaaccaccugagagacaucaugggcauccccuacugcaacuacagcaaguucugcuaccugaacaacaccaccaccggcagaaccagccugcccagaugcugccugaucagcaacggcagcuaccugaacgagacccacuucagcgacgacaucgagcagcaggccgacaacaugaucaccgagaugcugcagaaggaguacauggacagacagggcaagaccccccugggccugguggaccuguucguguucagcaccagcuucuaccugaucaccaucuuccugcaccuggugaagauccccacccacagacacaucgugggcaagcccugccccaagccccacagacugaaccacaugggcaucugcagcugcggccuguacaagcagcccggcgugcccgugagauggaagagaugaggacuaguuauaagacugacuagcccgaugggccucccaacgggcccuccuccccuccuugcaccgagauuaaucaaaggcucuuuucagagccaccaaaaaaaaaaaaaaaaaaaaaaaaaaaaaaaaaaaaaaaaaaaaaaaaaaaaaaaaaaaaaaaaaaaaaaaaaaaaaaaaaaaaaaaaaaaaaaaaaaaaa

SEQ ID NO: 26156 - RNA, 1686 nt, Artificial Sequence; identical to SEQ ID NO: 26150
  mRNA product Design i-3 (hSL-A100) comprising derived and/or modified sequence from LASV(Pinneo-NIG-1969;Clade I)__AIT17836__GPCmut3 (opt4)

SEQ ID NO: 26157 - RNA, 1686 nt, Artificial Sequence
  mRNA product Design i-3 (hSL-A100) comprising derived and/or modified sequence from LASV(ISTH0009-NIG-2011;Clade II)__AIT17404__GPCmut3 (opt4)
aggagaaagcuuaccaugggccagaucaucaccuucuuccaggaggugccccacgugaucgaggaggugaugaacaucgugcugaucgcccugagccugcuggccauccugaagggcaucuacaacguggccaccugcggccuguucggccuggugagcuuccugcugcugugcggcagaagcugcagcaccaccuacaagggcguguacgagcugcagacccuggagcuggacauggccagccugaacaugaccaugccccugagcugcaccaagaacaacagccaccacuacaucauggugggcaacgagaccggccuggagcugacccugaccaacaccagcaucaucaaccacaaguucugcaaccugagcgacgcccacaagaagaaccuguacgaccacgcccugaugagcaucaucagcaccuuccaccugagcauccccaacuucaaccaguacgaggccaugagcugcgacuucaacggcggcaagaucagcgugcaguacaaccugagccacgccuacgccguggacgccgccaaccacugcggcaccaucgccaacggcgugcugcagaccuucaugagaauggccuggggcggcagcuacaucgcccuggacagcggcaagggcagcugggacugcaucaugaccagcuaccaguaccugaucauccagaacaccaccugggaggaccacugccaguucagcagacccagccccaucggcuaccugggccugcugagccagagaaccagagacaucuacaucagcagaagaagaagaggcaccuucaccuggacccugagcgacagcgagggcaacgagacccccggcggcuacugccugaccagauggaugcugaucgaggccgagcugaagugcuucggcaacaccgccguggccaagugcaacgagaagcacgacgaggaguucugcgacaugcugagacuguucgacuucaacaagcaggccaucagaagacugaagacccccgcccagaugagcauccagcugaucaacaaggccgugaacgcccugaucaacgaccagcugaucaugaagaaccaccugagagacaucaugggcauccccuacugcaacuacagcaaguacugcuaccugaaccacaccgugaccggcaagaccagccugcccagaugcugccuggugagcaacggcagcuaccugaacgagacccacuucagcgacgacaucgagcagcaggccgacaacaugaucaccgagcugcugcagaaggaguacauggacagacagggcaagaccccccugggccugguggaccuguucguguucagcaccagcuucuaccugaucagcaucuuccugcaccugaucaagauccccacccacagacacaucaccggcaagcccugccccaagccccacagacugaaccacaugggcaucugcagcugcggccuguacaagcaccccggcgugcccgugaaguggaagagaugaggacuaguuauaagacugacuagcccgaugggccucccaacgggcccuccuccccuccuugcaccgagauuaaucaaaggcucuuuucagagccaccaaaaaaaaaaaaaaaaaaaaaaaaaaaaaaaaaaaaaaaaaaaaaaaaaaaaaaaaaaaaaaaaaaaaaaaaaaaaaaaaaaaaaaaaaaaaaaaaaaaaa

SEQ ID NO: 26158 - RNA, 1686 nt, Artificial Sequence
  mRNA product Design i-3 (hSL-A100) comprising derived and/or modified sequence from LASV(ISTH2010-NIG-2012;Clade II)__AIT17482__GPCmut3 (opt4)
aggagaaagcuuaccaugggccagaucaucaccuucuuccaggaggugccccacgugaucgaggaggugaugaacaucgugcugaucgcccugagccugcuggccauccugaagggcaucuacaacguggccaccugcggccuguucggccuggugagcuuccugcugcugugcggcagaagcugcagcaccaccuacaagggcguguacgagcugcagacccuggagcuggacauggccagccugaacaugaccaugccccugagcugcaccaagaacaacagccaccacuacaucauggugggcaacgagaccggccuggagcugacccugaccaacaccagcaucaucaaccacaaguucugcaaccugagcgacgcccacaagaagaaccuguacgaccacgcccugaugagcaucaucagcaccuuccaccugagcauccccaacuucaaccaguacgaggccaugagcugcgacuucaacggcggcaagaucagcgugcaguacaaccugagccacgccuacgccguggacgccgccaaccacugcggcaccaucgccaacggcgugcugcagaccuucaugagaauggccuggggcggcagcuacaucgcccuggacagcggcaagggcagcugggacugcaucaugaccagcuaccaguaccugaucauccagaacaucaccugggaggaccacugccaguucagcagacccagccccaucggcuaccugggccugcugagccagagaaccagagacaucuacaucagcagaagaagaagaggcaccuucaccuggacccugagcgacagcgagggcaacgagacccccggcggcuacugccugaccagauggaugcugaucgaggccgagcugaagugcuucggcaacaccgccguggccaagugcaacgagaagcacgacgaggaguucugcgacaugcugagacuguucgacuucaacaagcaggccaucagaagacugaagacccccgcccagaugagcauccagcugaucaacaaggccgugaacgcccugaucaacgaccagcugaucaugaagaaccaccugagagacaucaugggcauccccuacugcaacuacagcaaguacugcuaccugaaccacaccgugaccggcaagaccagccugcccagaugcugccuggugagcaacggcagcuaccugaacgagacccacuucagcgacgacaucgagcagcaggccgacaacaugaucaccgagcugcugcagaaggaguacaucgacagacagggcaagaccccccugggccugguggaccuguucguguucagcaccagcuucuaccugaucagcaucuuccugcaccuggugaagauccccacccacagacacguggugggcaagcccugccccaagccccacagacugaaccacaugggcaucugcagcugcggccuguacaagcaccccggcgugcccgugaaguggaagagaugaggacuaguuauaagacugacuagcccgaugggccucccaacgggcccuccuccccuccuugcaccgagauuaaucaaaggcucuuuucagagccaccaaaaaaaaaaaaaaaaaaaaaaaaaaaaaaaaaaaaaaaaaaaaaaaaaaaaaaaaaaaaaaaaaaaaaaaaaaaaaaaaaaaaaaaaaaaaaaaaaaaaa

SEQ ID NO: 26159 - RNA, 1686 nt, Artificial Sequence
  mRNA product Design i-3 (hSL-A100) comprising derived and/or modified sequence from LASV(Lassa virus/H.sapiens-wt/NGA/2015/ISTH_0543;Clade II)__AVO03639__GPCmut3 (opt4)
aggagaaagcuuaccaugggccagaucaucaccuucuuccaggaggugccccacgugaucgaggaggugaugaacaucgugcugaucgcccugagccugcuggccauccugaagggcaucuacaacguggccaccugcggccuguucggccuggugagcuuccugcugcugugcggcagaagcugcagcaccaccuacaagggcguguacgagcugcagacccuggagcuggacauggccaaccugaacaugaccaugccccugagcugcaccaagaacaacagccaccacuacaucauggugggcaacgagaccggccuggagcugacccugaccaacaccagcaucaucaaccacaaguucugcaaccugagcgacgcccacaagaagaaccuguacgaccacgcccugaugagcaucaucagcaccuuccaccugagcauccccaacuucaaccaguacgaggccaugagcugcgacuucaacggcggcaagaucagcgugcaguacaaccugagccacaccuacgccguggacgccgccaaccacugcggcaccaucgccaacggcgugcugcagaccuucaugagaauggccuggggcggcagcuacaucgcccuggacagcggcaagggcagcugggacugcaucaugaccagcuaccaguaccuggugauccagaacaccaccugggaggaccacugccaguucagcagacccagccccaucggcuaccugggccugcugagccagagaaccagagacaucuacaucagcagaagaagaagaggcaccuucaccuggacccugagcgacagcgagggcaacgagacccccggcggcuacugccugaccagauggaugcugaucgaggccgagcugaagugcuucggcaacaccgccguggccaagugcaacgagaagcacgacgaggaguucugcgacaugcugagacuguucgacuucaacaagcaggccaucagaagacugaagacccccgcccagaugagcauccagcugaucaacaaggccgugaacgcccugaucaacgaccagcugaucaugaagaaccaccugagagacaucaugggcauccccuacugcaacuacagcaaguacugcuaccugaaccacaccgugaccggcaagaccagccugcccagaugcugccuggugagcaacggcagcuaccugaacgagacccacuucagcgacgacaucgagcagcaggccgacaacaugaucaccgagcugcugcagaaggaguacaucgacagacagggcaagaccccccugggccugguggaccuguucguguucagcaccagcuucuaccugaucagcaucuuccugcaccuggugaagauccccacccacagacacaucaccggcaagcccugccccaagccccacagacugaaccacaugggcaucugcagcugcggccuguacaagcaccccggcgugcccgugaaguggaagagaugaggacuaguuauaagacugacuagcccgaugggccucccaacgggcccuccuccccuccuugcaccgagauuaaucaaaggcucuuuucagagccaccaaaaaaaaaaaaaaaaaaaaaaaaaaaaaaaaaaaaaaaaaaaaaaaaaaaaaaaaaaaaaaaaaaaaaaaaaaaaaaaaaaaaaaaaaaaaaaaaaaaaa

SEQ ID NO: 26160 - RNA, 1686 nt, Artificial Sequence
  mRNA product Design i-3 (hSL-A100) comprising derived and/or modified sequence from LASV(Lassa virus/H.sapiens-wt/NGA/2016/ISTH_0009;Clade II)__AVO03571__GPCmut3 (opt4)
aggagaaagcuuaccaugggccagaucaucaccuucuuccaggaggugccccacgugaucgaggaggugaugaacaucgugcugaucgcccugagccugcuggccauccugaagggcaucuacaacguggccaccugcggccugcugggccuggugagcuuccugcugcugugcggcagaagcugcagcaccaccuacaagggcguguacgagcugcagacccuggagcuggacauggccagccugaacaugaccaugccccugagcugcaccaagaacaacagccaccacuacaucauggugggcaacgagaccggccuggagcugacccugaccaacaccagcaucaucaaccacaaguucugcaaccugagcgacgcccacaagaagaaccuguacgaccacgcccugaugagcaucaucagcaccuuccaccugagcauccccaacuucaaccaguacgaggccaugagcugcgacuucaacggcggcagaaucagcgugcaguacaaccugagccacagcuacgccguggacgccgccaaccacugcggcaccaucgccaacggcgugcugcagaccuucaugagaauggccuggggcggcagcuacaucgcccuggacagcggcaagggcagcugggacugcaucaugaccagcuaccaguaccugaucauccagaacaccaccugggaggaccacugccaguucagcagacccagccccaucggcuaccugggccugcugagccagagaaccagagacaucuacaucagcagaagaagaagaggcaccuucaccuggacccugagcgacagcgagggcaacgagacccccggcggcuacugccugaccagauggaugcugaucgaggccgagcugaagugcuucggcaacaccgccguggccaagugcaacgagaagcacgacgaggaguucugcgacaugcugagacuguucgacuucaacaagcaggccaucagaagacugaagacccccgcccagaugagcauccagcugaucaacaaggccgugaacgcccugaucaacgaccagcugaucaugaagaaccaccugagagacaucaugggcauccccuacugcaacuacagcaaguacugcuaccugaaccacaccgugaccggcaagaccagccugcccagaugcugccuggugagcaacggcagcuaccugaacgagacccacuucagcgacgacaucgagcagcaggccgacaacaugaucaccgagcugcugcagaaggaguacaucgacagacagggcaagaccccccugggccugguggaccuguucguguucagcaccagcuucuaccugaucagcaucuuccugcaccuggugaagauccccacccacagacacaucaccggcaagcccugccccaagccccacagacugaaccacaugggcaucugcagcugcggccuguacaaccaccccggcgugcccgugaaguggaagagaugaggacuaguuauaagacugacuagcccgaugggccucccaacgggcccuccuccccuccuugcaccgagauuaaucaaaggcucuuuucagagccaccaaaaaaaaaaaaaaaaaaaaaaaaaaaaaaaaaaaaaaaaaaaaaaaaaaaaaaaaaaaaaaaaaaaaaaaaaaaaaaaaaaaaaaaaaaaaaaaaaaaaa

SEQ ID NO: 26161 - RNA, 1686 nt, Artificial Sequence
  mRNA product Design i-3 (hSL-A100) comprising derived and/or modified sequence from LASV(Lassa virus/H.sapiens-wt/NGA/2016/ISTH_0017;Clade II)__AVO03567__GPCmut3 (opt4)
aggagaaagcuuaccaugggccagaucaucaccuucuuccaggaggugccccacgugaucgaggaggugaugaacaucgugcugaucgcccugagccugcuggccauccugaagggcaucuacaacguggccaccugcggccuguucggccuggugagcuuccugcugcugugcggcagaagcugcagcaccaccuacaagggcguguacgagcugcagacccuggagcuggacauggccagccugaacaugaccaugccccugagcugcaccaagaacaacagccaccacuacaucauggugggcaacgagaccggccuggagcugacccugaccaacaccagcaucaucaaccacaaguucugcaaccugagcgacgcccacaagaagaaccuguacgaccacgcccugaugagcaucaucagcaccuuccaccugagcauccccaacuucaaccaguacgaggccaugagcugcgacuucaacggcggcaagaucagcgugcaguacaaccugagccacaccuacgccaucgacgccgccaaccacugcggcaccaucgccaacggcgugcugcagaccuucaugagaauggccuggggcggcagcuacaucgcccuggacagcggcaagggcagcugggacugcaucaugaccagcuaccaguaccugaucauccagaacaccaccugggaggaccacugccaguucagcagacccagccccaucggcuaccugggccugcugagccagagaaccagagacaucuacaucagcagaagaagaagaggcaccuucaccuggacccugagcgacagcgagggcaacgagacccccggcggcuacugccugaccagauggaugcugaucgaggccgagcugaagugcuucggcaacaccgccguggccaagugcaacgagaagcacgacgaggaguucugcgacaugcugagacuguucgacuucaacaagcaggccaucagaagacugaagacccccgcccagaugagcauccagcugaucaacaaggccgugaacgcccugaucaacgaccagcugaucaugaagaaccaccugagagacaucaugggcauccccuacugcaacuacagcaaguacugcuaccugaaccacaccgugaccggcaagaccagccugcccagaugcugccuggugagcaacggcagcuaccugaacgagacccacuucagcgacgacaucgagcagcaggccgacaacaugaucaccgagcugcugcagaaggaguacauggacagacagggcaagaccccccugggccugguggaccuguucguguucagcaccagcuucuaccugaucagcaucuuccugcaccuggugagaauccccacccacagacacgugaucggcaagcccugccccaagccccacagacugaaccacaugggcaucugcagcugcggccuguacaagcaccccggcgugcccgugaaguggaagagaugaggacuaguuauaagacugacuagcccgaugggccucccaacgggcccuccuccccuccuugcaccgagauuaaucaaaggcucuuuucagagccaccaaaaaaaaaaaaaaaaaaaaaaaaaaaaaaaaaaaaaaaaaaaaaaaaaaaaaaaaaaaaaaaaaaaaaaaaaaaaaaaaaaaaaaaaaaaaaaaaaaaaa

SEQ ID NO: 26162 - RNA, 1686 nt, Artificial Sequence
  mRNA product Design i-3 (hSL-A100) comprising derived and/or modified sequence from LASV(Lassa virus/H.sapiens-wt/NGA/2018/ISTH_0959;Clade II)__AVV65099__GPCmut3 (opt4)
aggagaaagcuuaccaugggccagaucaucaccuucuuccaggaggugccccacgugaucgaggaggugaugaacaucgugcugaucgcccugagccugcuggccauccugaagggcaucuacaacguggugaccugcggccuguucggccuggugagcuuccugcugcugugcggcagaagcugcagcaccaccuacaagggcguguacgagcugcagacccuggagcuggacauggccagccugaacaugaccaugccccugagcugcaccaagaacaacagccaccacuacaucauggugggcaacgagaccggccuggagcugacccugaccaacaccagcaucaucaaccacaaguucugcaaccugagcgacgcccacaagaagaaccuguacgaccacgcccugaugagcaucaucagcaccuuccaccugagcauccccaacuucaaccaguacgaggccaugagcugcgacuucaacggcggcaagaucagcgugcaguacaaccugagccacgccuacgccaucgacgccgccaaccacugcggcaccaucgccaacggcgugcugcagaccuucaugagaauggccuggggcggcagcuacaucgcccuggacagcggcaagggcagcugggacugcaucaugaccagcuaccaguaccugaucauccagaacaccaccugggaggaccacugccaguucagcagacccagccccaucggcuaccugggccugcugagccagagaaccagagacaucuacaucagcagaagaagaagaggcaccuucaccuggacccugagcgacagcgagggcaacgagacccccggcggcuacugccugaccagauggaugcugaucgaggccgagcugaagugcuucggcaacaccgccguggccaagugcaacgagaagcacgacgaggaguucugcgacaugcugagacuguucgacuucaacaagcaggccaucagaagacugaagacccccgcccagaugagcauccagcugaucaacaaggccgugaacgcccugaucaacgaccagcugaucaugaagaaccaccugagagacaucaugggcauccccuacugcaacuacagcaaguacugcuaccugaaccacaccgugaccggcaagaccagccugcccagaugcugccuggugagcaacggcagcuaccugaacgagacccacuucagcgacgacaucgagcagcaggccgacaacaugaucaccgagcugcugcagaaggaguacaucgacagacagggcaagaccccccugggccugguggaccuguucguguucagcaccagcuucuaccugaucagcaucuuccugcaccuggugaagauccccacccacagacacgugaucggcaagcccugccccaagccccacagacugaaccacaugggcaucugcagcugcggccuguacaagcaccccggcgugcccgugaaguggaagagaugaggacuaguuauaagacugacuagcccgaugggccucccaacgggcccuccuccccuccuugcaccgagauuaaucaaaggcucuuuucagagccaccaaaaaaaaaaaaaaaaaaaaaaaaaaaaaaaaaaaaaaaaaaaaaaaaaaaaaaaaaaaaaaaaaaaaaaaaaaaaaaaaaaaaaaaaaaaaaaaaaaaaa

SEQ ID NO: 26163 - RNA, 1686 nt, Artificial Sequence
  mRNA product Design i-3 (hSL-A100) comprising derived and/or modified sequence from LASV(LASV003-NIG-2008;Clade II)__AIT17580__GPCmut3 (opt4)
aggagaaagcuuaccaugggccagaucaucaccuucuuccaggaggugccccacgugaucgaggaggugaugaacaucgugcugaucgcccugagccugcuggccauccugaagggcaucuacaacguggccaccugcggccuguucggccuggugagcuuccugcugcugugcggcagaagcugcagcaccaccuacaagggcguguacgagcugcagacccuggagcuggacauggccagccugaacaugaccaugccccugagcugcaccaagaacaacagccaccacuacaucauggugggcaacgagaccggccuggagcugacccugaccaacaccagcaucaucaaccacaaguucugcaaccugagcgacgcccacaagaagaaccuguacgaccacgcccugaugagcaucaucagcaccuuccaccugagcauccccaacuucaaccaguacgaggccaugagcugcgacuucaacggcggcaagaucagcgugcaguacaaccugagccacaccuacgccguggacgccgccaaccacugcggcaccaucgccaacggcgugcugcagaccuucaugagaauggccuggggcggcagcuacaucgcccuggacagcggcaagggcagcugggacugcaucaugaccagcuaccaguaccugaucauccagaacaccaccugggaggaccacugccaguucagcagacccagccccaucggcuaccugggccugcugagccagagaaccagagacaucuacaucagcagaagaagaagaggcaccuucaccuggacccugagcgacagcgagagcaacgagacccccggcggcuacugccugaccagauggaugcugaucgaggccgagcugaagugcuucggcaacaccgccguggccaagugcaacgagaagcacgacgaggaguucugcgacaugcugagacuguucgacuucaacaagcaggccaucagaagacugaaggcccccgcccagaugagcauccagcugaucaacaaggccgugaacgcccugaucaacgaccagcugaucaugaagaaccaccugagagacaucaugggcauccccuacugcaacuacagcaaguacugcuaccugaaccacaccgugaccggcagaaccagccugcccagaugcugccuggugagcaacggcagcuaccugaacgagacccacuucagcgacgacaucgagcagcaggccgacaacaugaucaccgagcugcugcagaaggaguacauggacagacagggcaagaccccccugggccugguggaccuguucguguucagcaccagcuucuaccugaucagcaucuuccugcaccuggugaagauccccacccacagacacgugaucggcaagcccugccccaagccccacagacugaaccacaugggcaucugcagcugcggccuguacaagcaccccggcgugcccgugaaguggaagagaugaggacuaguuauaagacugacuagcccgaugggccucccaacgggcccuccuccccuccuugcaccgagauuaaucaaaggcucuuuucagagccaccaaaaaaaaaaaaaaaaaaaaaaaaaaaaaaaaaaaaaaaaaaaaaaaaaaaaaaaaaaaaaaaaaaaaaaaaaaaaaaaaaaaaaaaaaaaaaaaaaaaaa

SEQ ID NO: 26164 - RNA, 1686 nt, Artificial Sequence
  mRNA product Design i-3 (hSL-A100) comprising derived and/or modified sequence from LASV(LASV035-NIG-2009;Clade II)__AIT17588__GPCmut3 (opt4)
aggagaaagcuuaccaugggccagaucaucaccuucuuccaggaggugccccacgugaucgaggaggugaugaacaucgugcugaucgcccugagccugcuggccauccugaagggcaucuacaacguggccaccugcggccuguucggccuggugagcuuccugcugcugugcggcagaagcugcagcaccaccuacaagggcguguacgagcugcagacccuggagcuggacauggccagccugaacaugaccaugccccugagcugcaccaagaacaacagccaccacuacaucauggugggcaacgagaccggccuggagcugacccugaccaacaccagcaucaucaaccacaaguucugcaaccugagcgacgcccacaagaagaaccuguacgaccacgcccugaugagcaucaucagcaccuuccaccugagcauccccaacuucaaccaguacgaggccaugagcugcgacuucaacggcggcaagaucagcgugcaguacaaccugagccacgccuacgccguggacgccgccaaccacugcggcaccaucgccaacggcgugcugcagaccuucaugagaauggccuggggcggcagcuacaucgcccuggacagcggcaagggcagcugggacugcaucaugaccagcuaccaguaccugaucauccagaacaccaccugggaggaccacugccaguucagcagacccagccccaucggcuaccugggccugcugagccagagaaccagagacaucuacaucagcagaagaagaagaggcaccuucaccuggacccugagcgacagcgagggcaacgagacccccggcggcuacugccugaccagauggaugcugaucgaggccgagcugaagugcuucggcaacaccgccguggccaagugcaacgagaagcacgacgaggaguucugcgacaugcugagacuguucgacuucaacaagcaggccaucagaagacugaaggcccccgcccagaugagcauccagcugaucaacaaggccgugaacgcccugaucaacgaccagcugaucaugaagaaccaccugagagacaucaugggcauccccuacugcaacuacagcaaguacugcuaccugaaccacaccgugaccggcaagaccagccugcccagaugcugccuggugagcaacggcagcuaccugaacgagacccacuucagcgacgacaucgagcagcaggccgacaacaugaucaccgagcugcugcagaaggaguacaucgacagacagggcaagaccccccugggccugguggaccuguucguguucagcaccagcuucuaccugaucagcaucuuccugcaccuggugaagauccccacccacagacacgugaucggcaagcccugccccaagccccacagacugaaccacaugggcaucugcagcugcggccuguacaagcaccccggcgugcccgugaaguggaagagaugaggacuaguuauaagacugacuagcccgaugggccucccaacgggcccuccuccccuccuugcaccgagauuaaucaaaggcucuuuucagagccaccaaaaaaaaaaaaaaaaaaaaaaaaaaaaaaaaaaaaaaaaaaaaaaaaaaaaaaaaaaaaaaaaaaaaaaaaaaaaaaaaaaaaaaaaaaaaaaaaaaaaa

SEQ ID NO: 26165 - RNA, 1686 nt, Artificial Sequence
  mRNA product Design i-3 (hSL-A100) comprising derived and/or modified sequence from LASV(LASV1000-NIG-2009;Clade II)__AIT17782__GPCmut3 (opt4)
aggagaaagcuuaccaugggccagaucaucaccuucuuccaggaggugccccacgugaucgaggaggugaugaacaucgugcugaucgcccugagccugcuggccauccugaagggcaucuacaacguggccaccugcggccuguucggccuggugagcuuccugcugcugugcggcagaagcugcagcaccaccuacaagggcguguacgagcugcagacccuggagcuggacauggccagccugaacaugaccaugccccugagcugcaccaagaacaacagccaccacuacaucauggugggcaacgagaccggccuggagcugacccugaccaacaccagcaucaucaaccacaaguucugcaaccugagcgacgcccacaagaagaaccuguacgaccacgcccugaugagcaucaucagcaccuuccaccugagcauccccaacuucaaccaguacgaggccaugagcugcgacuucaacggcggcaagaucagcgugcaguacaaccugagccacaccuacgccguggacgccgccaaccacugcggcaccaucgccaacggcgugcugcagaccuucaugagaauggccuggggcggcagcuacaucgcccuggacagcggcaagggcagcugggacugcaucaugaccagcuaccaguaccugaucauccagaacaccaccugggaggaccacugccaguucagcagacccagccccaucggcuaccugggccugcugagccagagaaccagagacaucuacaucagcagaagaagaagaggcaccuucaccuggacccugagcgacagcgagggcaacgagacccccggcggcuacugccugaccagauggaugcugaucgaggccgagcugaagugcuucggcaacaccgccguggccaagugcaacgagaagcacgacgaggaguucugcgacaugcugagacuguucgacuucaacaagcaggccaucaagagacugaagacccccgcccagaugagcauccagcugaucaacaaggccgugaacgcccugaucaacgaccagcugaucaugaagaaccaccugagagacaucaugggcauccccuacugcaacuacagcaaguacugcuaccugaaccacaccgugaccggcaagaccagccugcccagaugcugccuggugagcaacggcagcuaccugaacgagacccacuucagcgacgacaucgagcagcaggccgacaacaugaucaccgagcugcugcagaaggaguacaucgacagacagggcaagaccccccugggccugguggaccuguucguguucagcaccagcuucuaccugaucagcaucuuccugcaccuggugaagauccccacccacagacacguggugggcaagcccugccccaagccccacagacugaaccacaugggcaucugcagcugcggccuguacaagcaccccggcgugcccgugaaguggaagagaugaggacuaguuauaagacugacuagcccgaugggccucccaacgggcccuccuccccuccuugcaccgagauuaaucaaaggcucuuuucagagccaccaaaaaaaaaaaaaaaaaaaaaaaaaaaaaaaaaaaaaaaaaaaaaaaaaaaaaaaaaaaaaaaaaaaaaaaaaaaaaaaaaaaaaaaaaaaaaaaaaaaaa

SEQ ID NO: 26166 - RNA, 1686 nt, Artificial Sequence
  mRNA product Design i-3 (hSL-A100) comprising derived and/or modified sequence from LASV(LASV221-NIG-2010;Clade II)__AIT17624__GPCmut3 (opt4)
aggagaaagcuuaccaugggccagaucaucaccuucuuccaggaggugccccacgugaucgaggaggugaugaacaucgugcugaucgcccugagccugcuggccauccugaagggcaucuacaacguggccaccugcggccuguucggccuggugagcuuccugcugcugugcggcagaagcugcagcaccaccuacaagggcguguacgagcugcagacccuggagcuggacauggccagccugaacaugaccaugccccugagcugcaccaagaacaacagccaccacuacaucauggugggcaacgagaccggccuggagcugacccugaccaacaccagcaucaucaaccacaaguucugcaaccugagcgacgcccacaagaagaaccuguacgaccacgcccugaugagcaucaucagcaccuuccaccugagcauccccaacuucaaccaguacgaggccaugagcugcgacuucaacggcggcaagaucagcgugcaguacaaccugagccacaccuacgccaucgacgccgccaaccacugcggcaccaucgccaacggcgugcugcagaccuucaugagaauggccuggggcggcagcuacaucgcccuggacagcggcaagggcagcugggacugcaucaugaccagcuaccaguaccugaucauccagaacaccaccugggaggaccacugccaguucagcagacccagccccaucggcuaccugggccugcugagccagagaaccagagacaucuacaucagcagaagaagaagaggcaccuucaccuggacccugagcgacagcgagggcaacgagacccccggcggcuacugccugaccagauggaugcugaucgaggccgagcugaagugcuucggcaacaccgccguggccaagugcaacgagaagcacgacgaggaguucugcgacaugcugagacuguucgacuucaacaagcaggccaucagaagacugaagacccccgcccagaugagcauccagcugaucaacaaggccgugaacgcccugaucaacgaccagcugaucaugaagaaccaccugagagacaucaugggcauccccuacugcaacuacagcaaguacugcuaccugaaccacaccgugaccggcaagaccagccugcccagaugcugccuggugagcaacggcagcuaccugaacgagacccacuucagcgacgacaucgagcagcaggccgacaacaugaucaccgagaugcugcagaaggaguacauggacagacagggcaagaccccccugggccugguggaccuguucguguucagcaccagcuucuaccugaucagcaucuuccugcaccuggugaagauccccacccacagacacgugaucggcaagcccugccccaagccccacagacugaaccacaugggcaucugcagcugcggccuguacaagcaccccggcgugcccgugaaguggaagagaugaggacuaguuauaagacugacuagcccgaugggccucccaacgggcccuccuccccuccuugcaccgagauuaaucaaaggcucuuuucagagccaccaaaaaaaaaaaaaaaaaaaaaaaaaaaaaaaaaaaaaaaaaaaaaaaaaaaaaaaaaaaaaaaaaaaaaaaaaaaaaaaaaaaaaaaaaaaaaaaaaaaaa

SEQ ID NO: 26167 - RNA, 1686 nt, Artificial Sequence
  mRNA product Design i-3 (hSL-A100) comprising derived and/or modified sequence from LASV(LASV237-NIG-2010;Clade II)__AIT17638__GPCmut3 (opt4)
aggagaaagcuuaccaugggccagaucaucaccuucuuccaggaggugccccacgugaucgaggaggugaugaacaucgugcugaucgcccugagccugcuggccauccugaagggcaucuacaacguggccaccugcggccuguucggccuggugagcuuccugcugcugugcggcagaagcugcagcaccaccuacaagggcguguacgagcugcagacccuggagcuggacauggccagccugaacaugaccaugccccugagcugcaccaagaacaacagccaccacuacaucauggugggcaacgagaccggccuggagcugacccugaccaacaccagcaucaucaaccacaaguucugcaaccugagcgacgcccacaagaaggaccuguacgaccacgcccugaugagcaucaucagcaccuuccaccugagcauccccaacuucaaccaguacgaggccaugagcugcgacuucaacggcggcaagaucagcgugcaguacaaccugagccacaccuacgccguggacgccgccaaccacugcggcaccaucgccaacggcgugcugcagaccuucaugagaauggccuggggcggcagcuacaucgcccuggacagcggcaagggcagcugggacugcaucaugaccagcuaccaguaccugaucauccagaacaccaccugggaggaccacugccaguucagcagacccagccccaucggcuaccugggccugcugagccagagaaccagagacaucuacaucagcagaagaagaagaggcaccuucaccuggacccugagcgacagcgagggcaacgagacccccggcggcuacugccugaccagauggaugcugaucgaggccgagcugaagugcuucggcaacaccgccguggccaagugcaacgagaagcacgacgaggaguucugcgacaugcugagacuguucgacuucaacaagcaggccaucagaagacugaagacccccgcccagaugagcauccagcugaucaacaaggccgugaacgcccugaucaacgaccagcugaucaugaagaaccaccugagagacaucaugggcauccccuacugcaacuacagcaaguacugcuaccugaaccacaccgugaccggcaagaccagccugcccagaugcugccuggugagcaacggcagcuaccugaacgagacccacuucagcgacgacaucgagcagcaggccgacaacaugaucaccgagcugcugcagaaggaguacauggacagacagggcaagaccccccugggccugguggaccuguucguguucagcaccagcuucuaccugaucagcaucuuccugcaccugaucaagauccccacccacagacacaucaccggcaagcccugccccaagccccacagacugaaccacaugggcaucugcagcugcggccuguacaagcaccccggcgugcccgugaaguggaagagaugaggacuaguuauaagacugacuagcccgaugggccucccaacgggcccuccuccccuccuugcaccgagauuaaucaaaggcucuuuucagagccaccaaaaaaaaaaaaaaaaaaaaaaaaaaaaaaaaaaaaaaaaaaaaaaaaaaaaaaaaaaaaaaaaaaaaaaaaaaaaaaaaaaaaaaaaaaaaaaaaaaaaa

SEQ ID NO: 26168 - RNA, 1686 nt, Artificial Sequence
  mRNA product Design i-3 (hSL-A100) comprising derived and/or modified sequence from LASV(LASV253-NIG-2011;Clade II)__AIT17670__GPCmut3 (opt4)
aggagaaagcuuaccaugggccagaucaucaccuucuuccaggaggugccccacgugaucgaggaggugaugaacaucgugcugaucgcccugagccugcuggccauccugaagggcaucuacaacguggccaccugcggccuguucggccuggugagcuuccugcugcugugcggcagaagcugcagcaccaccuacaagggcguguacgagcugcagacccuggagcuggacauggccagccugaacaugaccaugccccugagcugcaccaagaacaacagccaccacuacaucauggugggcaacgagaccggccuggagcugacccugaccaacaccagcaucaucaaccacaaguucugcaaccugagcgacgcccacaagaagaaccuguacgaccacgcccugaugagcaucaucagcaccuuccaccugagcauccccaacuucaaccaguacgaggccaugagcugcgacuucaacggcggcaagaucagcgugcaguacaaccugagccacaccuacgccguggacgccgccaaccacugcggcaccaucgccaacggcgugcugcagaccuucaugagaauggccuggggcggcagcuacaucgcccuggacagcggcaagggcagcugggacugcaucaugaccagcuaccaguaccugaucauccagaacaccaccugggaggaccacugccaguucagcagacccagccccaucggcuaccugggccugcugagccagagaaccagagacaucuacaucagcagaagaagaagaggcaccuucaccuggacccugagcgacagcgagggcaacgagacccccggcggcuacugccugaccagauggaugcugaucgaggccgagcugaagugcuucggcaacaccgccguggccaagugcaacgagaagcacgacgaggaguucugcgacaugcugagacuguucgacuucaacaagcaggccaucagaagacugaaggcccccgcccagaugagcauccagcugaucaacaaggccgugaacgcccugaucaacgaccagcugaucaugaagaaccaccugagagacaucaugggcauccccuacugcaacuacagcaaguacugcuaccugaaccacaccgugaccggcagaaccagccugcccagaugcugccuggugagcaacggcagcuaccugaacgagacccacuucagcgacgacaucgagcagcaggccgacaacaugaucaccgagcugcugcagaaggaguacaucgacagacagggcaagaccccccugggccugguggaccuguucguguucagcaccagcuucuaccugaucagcaucuuccugcaccuggugaagauccccacccacagacacaucaucggcaagcccugccccaagccccacagacugaaccacaugggcaucugcagcugcggccuguacaagcaccccggcgugcccgugaaguggaagagaugaggacuaguuauaagacugacuagcccgaugggccucccaacgggcccuccuccccuccuugcaccgagauuaaucaaaggcucuuuucagagccaccaaaaaaaaaaaaaaaaaaaaaaaaaaaaaaaaaaaaaaaaaaaaaaaaaaaaaaaaaaaaaaaaaaaaaaaaaaaaaaaaaaaaaaaaaaaaaaaaaaaaa

SEQ ID NO: 26169 - RNA, 1686 nt, Artificial Sequence
  mRNA product Design i-3 (hSL-A100) comprising derived and/or modified sequence from LASV(LASV254-NIG-2011;Clade II)__AIT17674__GPCmut3 (opt4)
aggagaaagcuuaccaugggccagaucaucaccuucuuccaggaggugccccacgugaucgaggaggugaugaacaucgugcugaucgcccugagccugcuggccauccugaagggcaucuacaacguggccaccugcggccuguucggccuggugagcuuccugcugcugugcggcagaagcugcagcaccaccuacaagggcguguacgagcugcagacccuggagcuggacaugaccaaccugaacaugaccaugccccugagcugcaccaagaacaacagccaccacuacaucauggugggcaacgagaccggccuggagcugacccugaccaacaccagcaucaucaaccacaaguucugcaaccugagcgacgcccacaagaagaaccuguacaaccacgcccugaugagcaucaucagcaccuuccaccugagcauccccaacuucaaccaguacgaggccaugagcugcgacuucaacggcggcaagaucagcgugcaguacaaccugagccacagcuacgccguggacgccgccaaccacugcggcaccaucgccaacggcgugcugcagaccuucaugagaauggccuggggcggcagcuacaucgcccuggacagcggcaagggcaacugggacugcaucaugaccagcuaccaguaccugaucauccagaacaccaccugggaggaccacugccaguucagcagacccagccccaucggcuaccugggccugcugagccagagaaccagagacaucuacaucagcagaagaagaagaggcaccuucaccuggacccugagcgacagcgagggcaacgagacccccggcggcuacugccugaccagauggaugcugaucgaggccgagcugaagugcuucggcaacaccgccguggccaagugcaacgagaagcacgacgaggaguucugcgacaugcugagacuguucgacuucaacaagcaggccaucagaagacugaagacccccgcccaggccaacauccagcugaucaacaaggccgugaacgcccugaucaacgaccagcugaucaugaagaaccaccugagagacaucaugggcauccccuacugcaacuacagcaaguacugcuaccugaaccacaccgugaccggcaagaccagccugcccagaugcugccuggugagcaacggcagcuaccugaacgagacccacuucagcgacgacaucgagcagcaggccgacaacaugaucaccgagcugcugcagaaggaguacauggacagacagggcaagaccccccugggccugguggaccuguucguguucagcaccagcuucuaccugaucagcaucuuccugcaccuggugaagauccccacccacagacacgugaucggcaagcccugccccaagccccacagacugaaccacaugggcaucugcagcugcggccuguacaagcaccccggcgugcccgugaaguggaagagaugaggacuaguuauaagacugacuagcccgaugggccucccaacgggcccuccuccccuccuugcaccgagauuaaucaaaggcucuuuucagagccaccaaaaaaaaaaaaaaaaaaaaaaaaaaaaaaaaaaaaaaaaaaaaaaaaaaaaaaaaaaaaaaaaaaaaaaaaaaaaaaaaaaaaaaaaaaaaaaaaaaaaa

SEQ ID NO: 26170 - RNA, 1686 nt, Artificial Sequence
  mRNA product Design i-3 (hSL-A100) comprising derived and/or modified sequence from LASV(Nig08-A19;Clade III)__ADU56618__GPCmut3 (opt4)
aggagaaagcuuaccaugggccagaucgugaccuucuuccaggaggugccccacgugaucgaggaggugaugaacaucgugcugaucgcccugagcauccuggccauccugaagggccuguacaacaucgccaccugcggccugaucggccuggugaccuuccugcugcugagcggcagaagcugcagcaugaccuacaagggcguguacgagcugcagacccuggagcugaacaugaacacccugaacaugaccaugccccugagcugcaccaagaacaacagccaccacuacaucauggugggcaacgagaccggccuggagcugacccugaccaacaccagccugcugcaccacaaguucugcaaccugagcgacgcccacaagaagaaccuguacgaccacacccugaugagcaucaucagcaccuuccaccugagcauccccaacuucaaccaguacgaggccaugagcugcgacuucaacggcggcaagaucaccgugcaguacaaccugagccacagcuacgccaucgacgccgccaaccacugcggcaccguggccaacggcgugcugcagaccuucaugagaauggccuggggcggcagcuacaucgcccuggacagcggcagaggcaagugggacugcaucaugaccagcuaccaguaccugaucauccagaacaccaccugggaggaccacugccaguucagcagacccagccccaucggcuaccugggccugcugagccagagaaccagagacaucuacaucagcagaagaagaagaggcaccuucaccuggacccugagcgacagcgagggcaacgagacccccggcggcuacugccugaccagauggaugcugaucgaggccgagcugaagugcuucggcaacaccgccguggccaagugcaacgagaagcacgacgaggaguucugcgacaugcugagacuguucgacuucaacaagcaggccaucagaagacugaaggcccccgcccagaugagcauccagcugaucaacaaggccgugaacgcccugaucaacgaccagcugaucaugaagaaccaccugagagacaucaugggcauccccuacugcaacuacagcaaguacugcuaccugaaccacaccagcaccggcagaaccagccugcccagaugcugccuggugagcaacggcagcuaccugaacgagacccacuucagcgacgacaucgagcagcaggccgacaacaugaucaccgagaugcugcagaaggaguaccuggacagacagggcaagaccccccugggccugguggaccuguucguguucagcaccagcuucuaccugaucagcaucuuccugcaccuggugaagauccccacccacagacacaucgugggcaagcccugccccaagccccacagacugaaccacaugggcaucugcagcugcggccuguacaagcagcccggcgugcccgugagauggaagagaugaggacuaguuauaagacugacuagcccgaugggccucccaacgggcccuccuccccuccuugcaccgagauuaaucaaaggcucuuuucagagccaccaaaaaaaaaaaaaaaaaaaaaaaaaaaaaaaaaaaaaaaaaaaaaaaaaaaaaaaaaaaaaaaaaaaaaaaaaaaaaaaaaaaaaaaaaaaaaaaaaaaaa

SEQ ID NO: 26171 - RNA, 1689 nt, Artificial Sequence
  mRNA product Design i-3 (hSL-A100) comprising derived and/or modified sequence from LASV(G1180-SLE-2010;Clade IV)__AIT17168__GPCmut3 (opt4)
aggagaaagcuuaccaugggccagaucgugaccuucuuccaggaggugccccacgugaucgaggaggugaugaacaucgugcugaucgcccugagcauccuggccgugcugaagggccuguacaacuucgccaccugcggccuggugggccugcugaccuuccugcugcugugcggcagaagcugcaccgccagcagauacaagggcguguacgagcugcagacccuggagcugaacauggagacccugaacaugaccaugccccugagcugcaccaagaacaacagccaccacuacaucauggugggcaacgagaccggccuggagcugacccugaccaacaccagcaucaucaaccacaaguucugcaaccugagcgacgcccacaagaagaaccuguacgaccacgcccugaugagcaucaucagcaccuuccaccugagcauccccaacuucaaccaguacgaggccaugagcugcgacuucaacggcggcaagaucagcgugcaguacaaccugagccacagcuacgccggcgacgccgccaaccacugcggcaccguggccaacggcgugcugcagaccuucaugagaauggccuggggcggcagcuacaucgcccuggacagcggccacggcagcugggacugcaucaugaccagcuaccaguaccugaucauccagaacaccaccugggaggaccacugccaguucagcagacccagccccaucggcuaccugggccugcugagccagagaaccagagacaucuacaucagcagaagaagaagaggcaccuucaccuggacccugagcgacagcgagggcaaggacacccccggcggcuacugccugaccagauggaugcugaucgaggccgagcugaagugcuucggcaacaccgccguggccaagugcaacgagaagcacgacgaggaguucugcgacaugcugagacuguucgacuucaacaagcaggccauccagagacugaaggcccccgcccagaugagcauccagcugaucaacaaggccgugaacgcccugaucaacgaccagcugaucaugaagaaccaccugagagacaucaugggcauccccuacugcaacuacagcaaguacugcuaccugaaccacaccaccaccggcaagaccagccugcccaagugcugccuggugagcaacggcagcuaccugaacgagacccacuucagcgacgacaucgagcagcaggccgacaacaugaucaccgagaugcugcagaaggaguacauggagagacagggcaagaccccccugggccugguggaccuguucguguucagcaccagcuucuaccugaucagcaucuuccugcaccuggugaagauccccacccacagacacaucgugggcaagagcugccccaagccccacagacugaaccacaugggcaucugcagcugcggccuguacaagcagcccggcgugcccgugaaguggaagagaugaggacuaguuauaagacugacuagcccgaugggccucccaacgggcccuccuccccuccuugcaccgagauuaaucaaaggcucuuuucagagccaccaaaaaaaaaaaaaaaaaaaaaaaaaaaaaaaaaaaaaaaaaaaaaaaaaaaaaaaaaaaaaaaaaaaaaaaaaaaaaaaaaaaaaaaaaaaaaaaaaaaaa

SEQ ID NO: 26172 - RNA, 1689 nt, Artificial Sequence
  mRNA product Design i-3 (hSL-A100) comprising derived and/or modified sequence from LASV(G1442-SLE-2011;Clade IV)__AIT17180__GPCmut3 (opt4)
aggagaaagcuuaccaugggccagaucgugaccuucuuccaggaggugccccacgugaucgaggaggugaugaacaucgugcugaucgcccugagcauccuggccgugcugaagggccuguacaacguggccaccugcggccugaucggccuggugaccuuccugcugcugugcggcagaagcugcaccaccacccuguacaagggcguguacgagcugcagacccuggagcugaacauggagacccugaacaugaccaugccccugagcugcaccaagaacaacagccaccacuacaucagagugggcaacgagaccggccuggagcugacccugaccaacaccagcaucaucaaccacaaguucugcaaccugagcgacgcccacaagaagaaccuguacgaccacgcccugaugagcaucaucagcaccuuccaccugagcauccccaacuucaaccaguacgaggccaugagcugcgacuucaacggcggcaagaucagcgugcaguacaaccugagccacagcuacgccggcgacgccgccaaccacugcggcaccguggccaacggcgugcugcagaccuucaugagaauggccuggggcggcagcuacaucgcccuggacagcggcagaggcaacugggacugcaucaugaccagcuaccaguaccugaucauccagaacaccaccugggacgaccacugccaguucagcagacccagccccaucggcuaccugggccugcugagccagagaaccagagacguguacaucagcagaagaagaagaggcaccuucaccuggacccugagcgacagcgagggcaaggacacccccggcggcuacugccugaccagauggaugcugaucgaggccgagcugaagugcuucggcaacaccgccguggccaagugcaacgagaagcacgacgaggaguucugcgacaugcugagacuguucgacuucaacaagcaggccauccagagacugaaggcccccgcccagaugagcauccagcugaucaacaaggccgugaacgcccugaucaacgaccagcugaucaugaagaaccaccugagagacaucaugggcauccccuacugcaacuacagcaaguacugcuaccugaacaacaccgccaccggcaagaccagccugcccaagugcugccugaucagcaacggcagcuaccugaacgagacccacuucagcgacgacaucgagcaggaggccgacaacaugaucaccgagaugcugcagaaggaguacauggagagacagggcaagaccccccugggccugguggaccuguucguguucagcaccagcuucuaccugaucagcaucuuccugcaccuggugaagauccccacccacagacacaucgugggcaagagcugccccaagccccacagacugaaccacaugggcaucugcagcugcggccuguacaagcagcccggcgugcccgugagauggaagagaugaggacuaguuauaagacugacuagcccgaugggccucccaacgggcccuccuccccuccuugcaccgagauuaaucaaaggcucuuuucagagccaccaaaaaaaaaaaaaaaaaaaaaaaaaaaaaaaaaaaaaaaaaaaaaaaaaaaaaaaaaaaaaaaaaaaaaaaaaaaaaaaaaaaaaaaaaaaaaaaaaaaaa

SEQ ID NO: 26173 - RNA, 1689 nt, Artificial Sequence
  mRNA product Design i-3 (hSL-A100) comprising derived and/or modified sequence from LASV(G3010-SLE-2013;Clade IV)__AIT17344__GPCmut3 (opt4)
aggagaaagcuuaccaugggccagaucgugaccuucuuccaggaggugccccacgugaucgaggaggugaugaacaucgugcugaucgcccugagcauccuggccgugcugaagggccuguacaacuucgccaccugcggccuggugggccuggugaccuuccugcugcugugcggcagaagcugcaccaccagccuguacaagggcguguacgagcugcagacccuggagcugaacauggagacccugaacaugaccaugccccugagcugcaccaagaacaacagccaccacuacaucauggugggcaacgagaccggccuggagcugacccugaccaacaccagcaucaucaaccacaaguucugcaaccugagcgacgcccacaagaagaaccuguacaaccacgcccugaugagcaucaucagcaccuuccaccugagcauccccaacuucaaccaguacgaggccaugagcugcgacuucaacggcggcaagaucagcgugcaguacaaccugagccacagcuacgccggcgacgccgccagccacugcggcaccguggccaacggcgugcugcagaccuucaugagaauggccuggggcggcagcuacaucgcccuggacagcggcuacggcaagugggacugcaucaugaccagcuaccaguaccugaucauccagaacaccaccugggaggaccacugccaguucagcagacccagccccaucggcuaccugggccugcugagccagagaaccagagacaucuacaucagcagaagaagaagaggcaccuucaccuggacccugagcgacagcgagggcaaggacacccccggcggcuacugccugaccagauggaugcugaucgaggccgagcugaagugcuucggcaacaccgccguggccaagugcaacgagaagcacgacgaggaguucugcgacaugcugagacuguucgacuucaacaagcaggccauccagagacugaagacccccgcccagaugagcauccagcugaucaacaaggccgugaacgcccugaucaacgaccagcugaucaugaagaaccaccugagagacaucaugggcauccccuacugcaacuacagcaaguacugcuaccugaaccacaccaccaccggcaagaccagccugcccaagugcugccuggugagcaacggcagcuaccugaacgagacccacuucagcgacgacaucgagcagcaggccgacaacaugaucaccgagaugcugcagaaggaguacauggagagacagggcaagaccccccugggccugguggaccuguucguguucagcaccagcuucuaccugaucagcaucuuccugcaccuggugaagauccccacccacagacacaucgugggcaagagcugccccaagccccacagacugaaccacaugggcaucugcagcugcggccuguacaagcagcccggcgugcccgugagauggaagagaugaggacuaguuauaagacugacuagcccgaugggccucccaacgggcccuccuccccuccuugcaccgagauuaaucaaaggcucuuuucagagccaccaaaaaaaaaaaaaaaaaaaaaaaaaaaaaaaaaaaaaaaaaaaaaaaaaaaaaaaaaaaaaaaaaaaaaaaaaaaaaaaaaaaaaaaaaaaaaaaaaaaaa

SEQ ID NO: 26174 - RNA, 1689 nt, Artificial Sequence
  mRNA product Design i-3 (hSL-A100) comprising derived and/or modified sequence from LASV(G502-SLE-2009;Clade IV)__AIT17126__GPCmut3 (opt4)
aggagaaagcuuaccaugggccagaucgugaccuucuuccaggaggugccccacgugaucgaggaggugaugaacaucgugcugaucgcccugagcauccuggccgugcugaagggccuguacaacuucgccaccugcggccuggugggccugcugaccuuccugcugcugugcggcagaagcugcaccaccggccuguacaagggcguguacgagcugcagacccuggagcugaacauggagacccugaacaugaccaugccccugagcugcaccaagaacaacagccaccacuacaucauggugggcaacgagaccggccuggagcugacccugaccaacaccagcaucaucaaccacaaguucugcaaccugagcgacgcccacaagaagaaccuguacgaccacgcccugaugagcaucaucagcaccuuccaccugagcauccccaacuucaaccaguacgaggccaugagcugcgacuucaacggcggcaagaucagcgugcaguacaaccugagccacagcuacgccggcgacgccgccgaccacugcggcaccguggccaacggcgugcugcagaccuucaugagaauggccuggggcggcagcuacaucgcccuggacagcggcagaggcagaugggacugcaucaugaccagcuaccaguaccugaucauccagaacaccaccugggaggaccacugccaguucagcagacccagccccaucggcuaccugggccugcugagccagagaaccagagacaucuacaucagcagaagaagaagaggcaccuucaccuggacccugagcgacagcgagggcaaggacacccccggcggcuacugccugaccagauggaugcugaucgaggccgagcugaagugcuucggcaacaccgccguggccaagugcaacgagaagcacgacgaggaguucugcgacaugcugagacuguucgacuucaacaagcaggccauccagagacugaaggcccccgcccagaugagcauccagcugaucaacaaggccgugaacgcccugaucaacgaccagcuggugaugaagaaccaccugagagacaucaugggcauccccuacugcaacuacagcagauacugcuaccugaaccacaccaccaccggcagaaccagccugcccaagugcugccuggugagcaacggcagcuaccugaacgagacccacuucagcgacgacaucgagcagcaggccgacaacaugaucaccgagaugcugcagaaggaguacauggagagacagggcaagaccccccugggccugguggaccuguucguguucagcaccagcuucuaccugaucagcaucuuccugcaccuggugaagauccccacccacagacacaucgugggcaagagcugccccaagccccacagacugaaccacaugggcaucugcagcugcggccuguacaagcagcccggcgugcccgugaaguggaagagaugaggacuaguuauaagacugacuagcccgaugggccucccaacgggcccuccuccccuccuugcaccgagauuaaucaaaggcucuuuucagagccaccaaaaaaaaaaaaaaaaaaaaaaaaaaaaaaaaaaaaaaaaaaaaaaaaaaaaaaaaaaaaaaaaaaaaaaaaaaaaaaaaaaaaaaaaaaaaaaaaaaaaa

SEQ ID NO: 26175 - RNA, 1689 nt, Artificial Sequence
  mRNA product Design i-3 (hSL-A100) comprising derived and/or modified sequence from LASV(G733-SLE-2010;Clade IV)__AIT17154__GPCmut3 (opt4)
aggagaaagcuuaccaugggccagaucgugaccuucuuccaggaggugccccacgugaucgaggaggugaugaacaucgugcugaucgcccugagcauccuggccgugcugaagggccuguacaacuucgccaccugcggcaucgugggccuggugagcuuccugcugcugugcggcagaagcugcaccaccagccuguacaagggcguguacgagcugcagacccuggagcugaacauggagacccugaacaugaccaugccccugagcugcaccaagaacaacagccaccacuacaucauggugggcaacgagaccggccuggagcugacccugaccaacaccagcaucaucaaccacaaguucugcaaccugagcgacgcccacaagaagaaccuguacgaccacgcccugaugagcaucaucagcaccuuccaccugagcauccccaacuucaaccaguacgaggccaugagcugcgacuucaacggcggcaagaucagcgugcaguacaaccugagccacagcuacgccggcgacgccgccaaccacugcggcaccaucgccaacggcgugcugcagaccuucaugagaauggccuggggcggcagcuacaucgcccuggacagcggcagagacagaugggacugcaucaugaccagcuaccaguaccugaucauccagaacaccaccugggaggaccacugccaguucagcagacccagccccaucggcuaccugggccugcugagccagagaaccagagacaucuacaucagcagaagaagaagaggcaccuucaccuggacccugagcgacagcgagggcaaggacacccccggcggcuacugccugaccagauggaugcugaucgaggccgagcugaagugcuucggcaacaccgccguggccaagugcaacgagaagcacgacgaggaguucugcgacaugcugagacuguucgacuucaacaagcaggccauccagagacugaaggcccccgcccagaugagcauccagcugaucaacaaggccgugaacgcccugaucaacgaccagcugaucaugaagaaccaccugagagacaucaugggcauccccuacugcaacuacagcaaguacugcuaccugaaccacaccaccaccggcaagaccagccugcccaagugcugccuggugagcaacggcagcuaccugaacgagacccacuucagcgacgacaucgagcagcaggccgacaacaugaucaccgagaugcugcagaaggaguacauggagagacagggcaagaccccccugggccugguggaccuguucguguucagcaccagcuucuaccugaucagcaucuuccugcaccuggugaagauccccacccacagacacguggugggcaagagcugccccaagccccacagacugaaccacaugggcaucugcagcugcggccuguacggccagcccggcgugcccgugaaguggaagagaugaggacuaguuauaagacugacuagcccgaugggccucccaacgggcccuccuccccuccuugcaccgagauuaaucaaaggcucuuuucagagccaccaaaaaaaaaaaaaaaaaaaaaaaaaaaaaaaaaaaaaaaaaaaaaaaaaaaaaaaaaaaaaaaaaaaaaaaaaaaaaaaaaaaaaaaaaaaaaaaaaaaaa

SEQ ID NO: 26176 - RNA, 1689 nt, Artificial Sequence
  mRNA product Design i-3 (hSL-A100) comprising derived and/or modified sequence from MOPV/LASV reassortant(IGS-1;Clade IV)__AFY05576__GPCmut3 (opt4)
aggagaaagcuuaccaugggccagaucgugaccuucuuccaggaggugccccacgugaucgaggaggugaugaacaucgugcugaucgcccugagcgugcuggccgugcugaagggccuguacaacuucgccaccugcggccuggugggccuggugaccuuccugcugcugugcggcagaagcugcaccaccagccuguacaagggcguguacgagcugcagacccuggagcugaacauggagacccugaacaugaccaugccccugagcugcaccaagaacaacagccaccacuacaucauggugggcaacgagaccggccuggagcugacccugaccaacaccagcaucaucaaccacaaguucugcaaccugagcgacgcccacaagaagaaccuguacgaccacgcccugaugagcaucaucagcaccuuccaccugagcauccccaacuucaaccaguacgaggccaugagcugcgacuucaacggcggcaagaucagcgugcaguacaaccugagccacagcuacgccggcgacgccgccaaccacugcggcaccguggccaacggcgugcugcagaccuucaugagaauggccuggggcggcagcuacaucgcccuggacagcggcagaggcaacugggacugcaucaugaccagcuaccaguaccugaucauccagaacaccaccugggaggaccacugccaguucagcagacccagccccaucggcuaccugggccugcugagccagagaaccagagacaucuacaucagcagaagaagaagaggcaccuucaccuggacccugagcgacagcgagggcgaggacacccccggcggcuacugccugaccagauggaugcugaucgaggccgagcugaagugcuucggcaacaccgccguggccaagugcaacgagaagcacgacgaggaguucugcgacaugcugagacuguucgacuucaacaagcaggccauccagagacugaaggcccccgcccagaugagcauccagcugaucaacaaggccgugaacgcccugaucaacgaccagcugaucaugaagaaccaccugagagacaucaugggcauccccuacugcaacuacagcaaguacugcuaccugaaccacaccaccaccggcagaaccagccugcccaagugcugccuggugagcaacggcagcuaccugaacgagacccacuucagcgacgacaucgagcagcaggccgacaacaugaucaccgagaugcugcagaaggaguacauggagagacagggcaagaccccccugggccugguggaccuguucguguucagcaccagcuucuaccugaucagcaucuuccugcaccuggugaagauccccacccacagacacaucgugggcaagagcugccccaagccccacagacugaaccacaugggcaucugcagcugcggccuguacaagcagcccggcgugcccgugaaguggaagagaugaggacuaguuauaagacugacuagcccgaugggccucccaacgggcccuccuccccuccuugcaccgagauuaaucaaaggcucuuuucagagccaccaaaaaaaaaaaaaaaaaaaaaaaaaaaaaaaaaaaaaaaaaaaaaaaaaaaaaaaaaaaaaaaaaaaaaaaaaaaaaaaaaaaaaaaaaaaaaaaaaaaaa

SEQ ID NO: 26177 - RNA, 1689 nt, Artificial Sequence
  mRNA product Design i-3 (hSL-A100) comprising derived and/or modified sequence from LASV(LM765-SLE-2012;Clade IV)__AIT17814__GPCmut3 (opt4)
aggagaaagcuuaccaugggccagaucgugaccuucuuccaggaggugccccacgugaucgaggaggugaugaacaucgugcugaucgcccugagcauccuggccgugcugaagggccuguacaacuucgccaccugcggccuggugggccuggugaccuuccugcugcugugcggcagaagcugcaccaccagccuguacaagggcguguacgagcugcagacccuggagcugaacauggagacccugaacaugaccaugccccugagcugcaccaagaacaacagccaccacuacaucauggugggcaacgagaccggccuggagcugacccugaccaacaccagcaucaucgaccacaaguucugcaaccugagcgacgcccacagaaagaaccuguacgaccacgcccugaugagcaucaucagcaccuuccaccugagcauccccaacuucaaccaguacgaggccaugagcugcgacuucaacggcggcaagaucagcgugcaguacaaccugagccacagcuacgccaaggacgccgccgaccacugcggcaccguggccaacggcgugcugcagaccuucaugagaauggccuggggcggcagcuacaucgcccuggacagcggcagaggcagaugggacugcaucaugaccagcuaccaguaccugaucauccagaacaccaccugggaggaccacugccaguucagcagacccagccccaucggcuaccugggccugcugagccagagaaccagagacaucuacaucagcagaagaagaagaggcaccuucaccuggacccugagcgacagcgagggcaaggacacccccggcggcuacugccugaccagauggaugcugaucgaggccgagcugaagugcuucggcaacaccgccguggccaagugcaacgagaagcacgacgaggaguucugcgacaugcugagacuguucgacuucaacaagcaggccauccagagacugaaggcccccgcccagaugagcauccagcugaucaacaaggccgugaacgcccugaucaacgaccagcugaucaugaagaaccaccugagagacaucaugggcauccccuacugcaacuacagcaaguacugcuaccugaaccacaccaccaccggcaagaccagccugcccaagugcugccuggugagcaacggcagcuaccugaacgagacccacuucagcgacgacaucgagcagcaggccgacaacaugaucaccgagaugcugcagaaggaguacauggagagacagggcaagaccccccugggccugguggaccuguucguguucagcaccagcuucuaccugaucagcaucuuccugcaccuggugaagauccccacccacagacacaucgugggcaagcccugccccaagccccacagacugaaccacaugggcaucugcagcugcggccuguacaagcagcccggcgugcccgugaaguggaagagaugaggacuaguuauaagacugacuagcccgaugggccucccaacgggcccuccuccccuccuugcaccgagauuaaucaaaggcucuuuucagagccaccaaaaaaaaaaaaaaaaaaaaaaaaaaaaaaaaaaaaaaaaaaaaaaaaaaaaaaaaaaaaaaaaaaaaaaaaaaaaaaaaaaaaaaaaaaaaaaaaaaaaa

SEQ ID NO: 26178 - RNA, 1689 nt, Artificial Sequence
  mRNA product Design i-3 (hSL-A100) comprising derived and/or modified sequence from LASV(LM776-SLE-2012;Clade IV)__AIT17824__GPCmut3 (opt4)
aggagaaagcuuaccaugggccagaucgugaccuucuuccaggaggugccccacgugaucgaggaggugaugaacaucgugcugaucgcccugagcauccuggccgugcugaagggccuguacaacuucgccaccugcggccuggugggccuggugaccuuccugcugcugugcggcagaagcugcaccaccagcguguacaagggcguguacgagcugcagacccuggagcugaacauggagacccugaacaugaccaugccccugagcugcaccaagaacaacagccaccacuacaucauggugggcaacgagaccggccuggagcugacccugaccaacaccagcaucaucaaccacaaguucugcaaccugagcgacgcccacaagaagaaccuguacgaccacgcccugaugagcaucaucagcaccuuccaccugagcauccccaacuucaaccaguacgaggccaugagcugcgacuucaacggcggcaagaucagcgugcaguacaaccugagccacagcuacgccggcgacgccgccaaccacugcggcaccguggccaacggcgugcugcagaccuucaugagaauggccuggggcggcagcuacaucgcccuggacagcggccacggcaagugggacugcaucaugaccagcuaccaguaccugaucauccagaacaccaccugggaggaccacugccaguucagcagacccagccccaucggcuaccugggccugcugagccagagaaccagagacaucuacaucagcagaagaagaagaggcaccuucaccuggacccugagcgacagcgagggcaaggacacccccggcggcuacugccugaccagauggaugcugaucgaggccgagcugaagugcuucggcaacaccgccguggccaagugcaacgagaagcacgacgaggaguucugcgacaugcugagacuguucgacuucaacaagcaggccauccagagacugaaggcccccgcccagaugagcauccagcugaucaacaaggccgugaacgcccugaucaacgaccagcugaucaugaagaaccaccugagagacaucaugggcauccccuacugcaacuacagcaaguacugcuaccugaaccacaccaccaccggcaagaccagccugcccaagugcugccuggugagcaacggcagcuaccugaacgagacccacuucagcgacgacaucgagcagcaggccgacaacaugaucaccgagaugcugcagaaggaguacauggagagacagggcaagaccccccugggccugguggaccuguucguguucagcaccagcuucuaccugaucagcaucuuccugcaccuggugaagauccccacccacagacacaucgugggcaagagcugccccaagccccacagacugaaccacaugggcaucugcagcugcggccuguacaagcagcccggcgugcccgugagauggaagagaugaggacuaguuauaagacugacuagcccgaugggccucccaacgggcccuccuccccuccuugcaccgagauuaaucaaaggcucuuuucagagccaccaaaaaaaaaaaaaaaaaaaaaaaaaaaaaaaaaaaaaaaaaaaaaaaaaaaaaaaaaaaaaaaaaaaaaaaaaaaaaaaaaaaaaaaaaaaaaaaaaaaaa

SEQ ID NO: 26179 - RNA, 1689 nt, Artificial Sequence
  mRNA product Design i-3 (hSL-A100) comprising derived and/or modified sequence from LASV(Mad39;Clade IV)__ANH09722__GPCmut3 (opt4)
aggagaaagcuuaccaugggccagaucgugaccuucuuccaggaggugccccacgugaucgaggaggugaugaacaucgugcugaucgcccugagcauccuggccgugcugaagggccuguacaacguggccaccugcggccugaucggccuggugaccuuccugcugcugugcggcagaagcugcaccaccacccuguacaagggcguguacgagcugcaggcccuggagcugaacauggagacccugaacaugaccaugccccugagcugcaccaagaacaacagccaccacuacaucagagugggcaacgagaccggccuggagcugacccugaccaacaccagccugaucaaccacaaguucugcaaccugagcgacgcccacaagaagaaccuguacgaccacgcccugaugagcaucaucagcaccuuccaccugagcauccccaacuucaaccaguacgaggccaugagcugcgacuucaacgacggcaagaucagcgugcaguacaaccugagccacaccuacgccggcgacaccgccaaccacugcggcaccguggccaacggcgugcugcagaccuucaugagaauggccuggggcggcagcuacaucgcccuggacagcggcagaggcggcugggacugcaucaugaccagcuaccaguaccugaucauccagaacaccaccugggaggaccacugccaguucagcagacccagccccaucggcuaccugggccugcugagccagagaaccagagacaucuacaucagcagaagaagaagaggcaccuucaccuggacccugagcgacagcgagggcaaggacacccccggcggcuacugccugaccagauggaugcugaucgaggccgagcugaagugcuucggcaacaccgccguggccaagugcaacgagaagcacgacgaggaguucugcgacaugcugagacuguucgacuucaacaagcaggccauccagagacugaaggcccccgcccagaugagcauccagcugaucaacaaggccgugaacgcccugaucaacgaccagcugaucaugaagaaccaccugagagacaucaugggcauccccuacugcaacuacagcaaguacugcuaccugaaccacaccgugaccggcaagaccagccugcccaagugcugccuggugagcaacggcagcuaccugaacgagacccacuucagcgacgacaucgagcagcaggccgacaacaugaucaccgagaugcugcagaaggaguacauggagagacagggcaagaccccccugggccugguggaccuguucguguucagcaccagcuucuaccugaucagcaucuuccugcaccuggugaagauccccacccacagacacguggugggcaagcccugccccaagccccacagacugaaccacaugggcaucugcagcugcggcuucuacaagcagcccggcgugcccgugagauggaagagaugaggacuaguuauaagacugacuagcccgaugggccucccaacgggcccuccuccccuccuugcaccgagauuaaucaaaggcucuuuucagagccaccaaaaaaaaaaaaaaaaaaaaaaaaaaaaaaaaaaaaaaaaaaaaaaaaaaaaaaaaaaaaaaaaaaaaaaaaaaaaaaaaaaaaaaaaaaaaaaaaaaaaa

SEQ ID NO: 26180 - RNA, 1689 nt, Artificial Sequence
  mRNA product Design i-3 (hSL-A100) comprising derived and/or modified sequence from LASV(Z0947-SLE-2011;Clade IV)__AIT17840__GPCmut3 (opt4)
aggagaaagcuuaccaugggccagaucgugaccuucuuccaggaggugccccacgugaucgaggaggugaugaacaucgugcugaucgcccugagcauccuggccgugcugaagggccuguacaacuucgccaccugcggccuggugggccuggugaccuuccugcugcugugcggcagaagcugcaccaucagccuguacaagggcguguacgagcugcagacccuggagcugaacauggagacccugaacaugaccaugccccugagcugcaccaagaacaacagccaccacuacaucauggugggcaacgagaccggccuggagcugacccugaccaacaccagcaucaucaaccacaaguucugcaaccugagcgacgcccacaagaagaaccuguacgaccacgcccugaugagcaucaucagcaccuuccaccugagcauccccaacuucaaccaguacgaggccaugagcugcgacuucaacggcggcaagaucagcgugcaguacaaccugagccacagcuacgccggcgacgccgccaaccacugcggcaccguggccaacggcgugcugcagaccuucaugagaauggccuggggcggcagcuacaucgcccuggacagcggcagagacagaugggacugcaucaugaccagcuaccaguaccugaucauccagaacaccaccugggaggaccacugccaguucagcagacccagccccaucggcuaccugggccugcugagccagagaaccagagacaucuacaucagcagaagaagaagaggcaccuucaccuggacccugagcgacagcgagggcaaggacacccccggcggcuacugccugaccagauggaugcugaucgaggccgagcugaagugcuucggcaacaccgccguggccaagugcaacgagaagcacgacgaggaguucugcgacaugcugagacuguucgacuucaacaagcaggccauccagagacugaaggcccccgcccagaugagcauccagcugaucaacaaggccgugaacgcccugaucaacgaccagcugaucaugaagaaccaccugagagacaucaugggcauccccuacugcaacuacagcaaguacugcuaccugaaccacaccaccaccggcaagaccagccugcccaagugcugccuggugagcaacggcagcuaccugaacgagacccacuucagcgacgacaucgagcagcaggccgacaacaugaucaccgagaugcugcagaaggaguacauggagagacagggcaagaccccccugggccugguggaccuguucguguucagcaccagcuucuaccugaucagcaucuuccugcaccuggugaagauccccacccacagacacaucgugggcaagcccugccccaagccccacagacugaaccacaugggcaucugcagcugcggccuguacaagcagcccggcgugcccgugaaguggaagagaugaggacuaguuauaagacugacuagcccgaugggccucccaacgggcccuccuccccuccuugcaccgagauuaaucaaaggcucuuuucagagccaccaaaaaaaaaaaaaaaaaaaaaaaaaaaaaaaaaaaaaaaaaaaaaaaaaaaaaaaaaaaaaaaaaaaaaaaaaaaaaaaaaaaaaaaaaaaaaaaaaaaaa

SEQ ID NO: 26181 - RNA, 1689 nt, Artificial Sequence
  mRNA product Design i-3 (hSL-A100) comprising derived and/or modified sequence from LASV(Josiah;Clade IV)__NP_694870__GPCmut3 (opt5)
aggagaaagcuuaccaugggccagaucgugaccuucuuucaagaggucccccacguuauugaagaggugaugaacaucgugcugauugcccucagcguccuggcugugcuuaaggggcuguacaauuucgccacaugcggacucguuggccuggugacguuucuucugcucugugggagauccugcaccacaucucuguauaaaggagucuacgaacugcagacccucgagcugaacauggaaacacuuaauaugaccaugccucugagcuguacaaagaacaauucccaucacuauaucauggugggcaacgagaccgggcucgagcugacgcuuaccaauacaucuauuaucaaccauaaauucugcaaucugagcgacgcgcacaagaaaaaccucuacgaucaugcucugauguccaucauuucuaccuuucaccugagcaucccgaauuucaaccaguaugaagccauguccugugacuuuaauggaggcaagauuagcguucaguacaaccucucucacuccuaugccggcgaugcugccaaucauugcgggacaguggcuaacggaguccugcaaaccuucaugcggauggccuggggcgggagcuacaucgcgcuugacucuggacgcggcaacugggauuguauuaugacguccuaccaguaucugaucauucagaauacaaccugggaggaccacugccaguuuagcagacccucuccuaucggguaccucggacugcuuucccaacggacacgcgauaucuauauuagcagacggcgcagaggcaccuucaccuggacacuguccgacucugaaggcaaggauacgcccgggggauacugucucacccgguggaugcugaucgaggccgagcugaaaugcuuuggcaacacagcuguggccaaguguaaugaaaaacaugacgaggaguucugcgauaugcuccgccuguuugacuucaacaagcaggcuauucagagacuuaaagccccugcgcagaugagcauccaacugauuaauaaggccgugaacgcucucaucaaugaucagcugaucaugaagaaccaccuucgggacauuauggggauccccuauugcaauuacuccaaauauuguuaccugaaccacaccacaaccggacgcacgagccucccuaagugcugucuggucucuaauggcuccuaccugaacgaaacacauuucagcgacgauauugaacagcaagccgacaauaugaucaccgagaugcuccagaaagaguauauggaaagacaggggaagaccccgcugggacuuguugaucuguuuguguucucuaccagcuuuuaccucauuuccaucuuccugcaccuggugaaaauccccacacaucggcacauugucggcaagucuugcccuaaaccccaucgccuuaaccacaugggcaucuguagcugcgggcucuauaagcagccuggagugcccguuaaguggaaaagaugaggacuaguuauaagacugacuagcccgaugggccucccaacgggcccuccuccccuccuugcaccgagauuaaucaaaggcucuuuucagagccaccaaaaaaaaaaaaaaaaaaaaaaaaaaaaaaaaaaaaaaaaaaaaaaaaaaaaaaaaaaaaaaaaaaaaaaaaaaaaaaaaaaaaaaaaaaaaaaaaaaaaa

SEQ ID NO: 26182 - RNA, 1686 nt, Artificial Sequence
  mRNA product Design i-3 (hSL-A100) comprising derived and/or modified sequence from LASV(LP;Clade I)__AAF86701__GPCmut3 (opt5)
aggagaaagcuuaccaugggccagaucauuaccuucuuucaagaggugccccacgucaucgaagagguuaugaacauugugcugaucgcccucagccugcuugcuauucugaaggggcucuacaauaucgccacaugcggaaucauuggccugguggcguuccuuuuucugugugggaaauccugcucucucacgcugaagggaggcuaugaacugcagacccucgagcugaacauggaaacacuuaauaugaccaugccucugagcuguaccaaaaacuccucucaucacuacaucagagucgggaaugagacaggacucgagcugacacuuaccaacacgagcauuaucaaucauaaguucugcaaccuguccgacgcucacaaaaagaaucucuaugaucaugcccugaugucuauuaucagcaccuuucaccuguccauuccgaacuucaaucaguacgaagccaugagcugugacuuuaacggcggcaagaucucugugcaguauaaucucucccacagcuacgcuggggaugccgcugagcauugcggaacaguugccaacggcgugcugcaaaccuucaugcggauggcguggggagggcgcuauaucgcccuugacucuggcaaagggaauugggauuguauuaugacauccuaccaguaccugaucauucagaacaccacgugggaagaccacugccaguuuagcagacccucuccuaucggauaucucggccugcuuucccaacggacacgcgauauuuacaucagcagacggcgcagaggcaccuucacauggacccuguccgacucugaggggaacgagacccccggaggcuauugucucacacgguggaugcugaucgaagcugagcugaagugcuuugggaauacggccgucgcuaaauguaacgaaaagcaugaugaggaguucugcgacaugcuccgccuguuugauuucaauaaacaggccauuagacggcuuaaggcgccugcccagaugagcauccagcugauuaacaaggcugugaaugcccucaucaacgaccaacugauuaugaaaaaucaccuucgcgauaucaugggaauccccuacugcaacuauuccaaguacuguuaucugaaucacaccagcucuggcagaacaucccucccuaaaugcugucugauuagcaacgggucuuaccugaaugaaacccaguucagcgacgacaucgagcagcaagcugauaacaugauuacagaaaugcuccagaaggaguacaucgaacggcagggaaaaaccccgcugggccuuguugacauuuuuaucuucuccacgucuuuuuaucugauuagcaucuuccuccaucugaucaagauucccacacaccgccauaucgugggcaaaccuugccccaagccucacagacugaaucauaugggggucuguuccugcggacuuuacaagcaccccggcgugccgaccaaauggaagcggugaggacuaguuauaagacugacuagcccgaugggccucccaacgggcccuccuccccuccuugcaccgagauuaaucaaaggcucuuuucagagccaccaaaaaaaaaaaaaaaaaaaaaaaaaaaaaaaaaaaaaaaaaaaaaaaaaaaaaaaaaaaaaaaaaaaaaaaaaaaaaaaaaaaaaaaaaaaaaaaaaaaaa

SEQ ID NO: 26183 - RNA, 1686 nt, Artificial Sequence
  mRNA product Design i-3 (hSL-A100) comprising derived and/or modified sequence from LASV(803213;Clade II)__AAF86703__GPCmut3 (opt5)
aggagaaagcuuaccaugggccagaucauuaccuucuuucaagaggugccccacgucaucgaagagguuaugaacauugugcugaucgcccucagccugcuugcuauucugaaggggaucuacaauguggccacaugcggacucuucggccugaucuccuuucuucugcucugugggagaucuugcagcgucacguauaaaggaguguacgaacugcagacccuggagcucaacauggcgaaucugaacaugacaaugccucuuuccuguaccaagaauaacucucaucacuauauuaugguuggcaaugaaacagggcuggagcucacccugacaaacaccagcaucauuaaucauaaauucugcaaccuuuccgacgcucacaagaaaaaucuguacgaucaugcccucaugucuaucauuagcacguuucaccuguccaucccgaacuucaaucaguaugaggccaugagcugugacuuuaacggaggcaagauuucugugcaguacaaucugucccacagcuucgcugucgaugccgcuaaccauugcggcaccaucgccaacggggugcuccaaacauuuaugcggauggcguggggaggcucuuauaucgcccuggacuccgggaagggaaauugggauuguauuaugaccagcuaccaguaccuuaucauucagaacacaaccugggaagaccacugccaguucucucgccccuccccuaucggcuaucuggggcuccugagccaaagaacgcgggauauuuacaucucccgcagacggcgcggaacauuuaccuggacacuuucugacagcgagggcaaugaagcucccggcggguauugucugaccagauggaugcucaucgaggccgagcugaaaugcuucggaaacaccgcuguugccaaguguaaugaaaaacaugaugaggaauuuugcgacaugcugcgccucuucgauuucaacaagcaggcgauuaaacggcugaagacgccugcccagauguccauccagcuuauuaauaaggcugugaacgcccugaucaaugaccaacucauuaugaaaaaccaccugagagauaucaugggcauccccuacugcaauuauagccgguacuguuaucuuaaccacacagucaccgggaagacaucucugccucgcugcugucucguguccaauggaagcuaccugaacgagacccauuuuucugacgacauugaacagcaggcugauaauaugaucacagagaugcugcaaaaagaguacauggacagacagggcaagaccccgcucgggcugguggaucuuuucgucuuuagcacguccuucuaucugauuucuaucuuucuccaccugguuaaaauucccacacaucggcacaucgugggaaagccuugccccaaaccucaucgccugaaccacaugggcauuuguagcugcggccuuuacaagcaccccggggugccggucaaguggaaaagaugaggacuaguuauaagacugacuagcccgaugggccucccaacgggcccuccuccccuccuugcaccgagauuaaucaaaggcucuuuucagagccaccaaaaaaaaaaaaaaaaaaaaaaaaaaaaaaaaaaaaaaaaaaaaaaaaaaaaaaaaaaaaaaaaaaaaaaaaaaaaaaaaaaaaaaaaaaaaaaaaaaaaa

SEQ ID NO: 26184 - RNA, 1686 nt, Artificial Sequence
  mRNA product Design i-3 (hSL-A100) comprising derived and/or modified sequence from LASV(GA391;Clade III)__CAA36645__GPCmut3 (opt5)
aggagaaagcuuaccaugggccagaucgugaccuucuuucaagaggucccccacguuauugaagaggugaugaacaucgugcugauugcccucagcauccuggcuauucuuaaggggcuguacaaugucgccacaugcggacucaucggccuggugacguuccuucugcucuccgggagaucuuguagccugaucuauaaaggaaccuacgaacugcagacacucgagcugaacauggaaacccuuaauaugacaaugccucuguccugcaccaagaacaauucucaucacuauauucggguuggcaacgagacagggcucgagcugacccuuacgaauaccagcauccugaaccauaaauuuuguaaucucuccgacgcgcacaagcgcaaccuguacgaucauucucugaugagcauuaucuccacauuccaccucagcauuccgaauuuuaaccaguaugaagcuaugucuugcgacuucaauggaggcaaaaucaccgugcaguacaaccugucccacagcuuugccgucgaugccgcuggccauugugggacacuugccaauggagugcugcaaaccuucaugagaauggcuuggggcgggucuuauauugcccucgacuccggacggggcaacugggauugcaucaugacgagcuaccaguaccugaucauucagaacacaaccugggacgaucacugucaguuuucucgccccuccccuaucggguaucuuggacugcucagccaaagaacacgggacauuuacaucucccgcagacggcgcggcaccuucaccuggacacugucugauagcgagggcaaugaaacgcccgggggauauugccugaccagauggaugcucauugaggcggagcugaaguguuuuggcaacacagccguugcuaagugcaaugaaaaacaugacgaggaguucugugauaugcuucggcuguuugacuucaacaagcaggccauccgcagacucaaaaccccugcucagauguccauccagcugauuaauaaggccgugaacgcgcuuaucaaugaucaacugauuaugaaaaaccaccuccgggacaucauggggauucccuacugcaauuauagccgcuacugcuaucugaaccacacaucuaccggaaagacgucccugccuagauguugccucaucagcaauggcucuuaccugaacgaaacaaaguucagcgacgauaucgaacagcaggccgacaauaugauuaccgagaugcuucaaaaagaguacaucgaucggcaggggaagaccccgcugggacucgucgaccuguuuguguucuccacaucuuuuuaucugauuagcaucuuccuucaucucgugaaaauucccacccacagacauaucgucggcaagccuugucccaaaccucaccgccugaaccauaugggcauuugcuccugugggcuguacaagcagcccggaguuccggugcgguggaaaagaugaggacuaguuauaagacugacuagcccgaugggccucccaacgggcccuccuccccuccuugcaccgagauuaaucaaaggcucuuuucagagccaccaaaaaaaaaaaaaaaaaaaaaaaaaaaaaaaaaaaaaaaaaaaaaaaaaaaaaaaaaaaaaaaaaaaaaaaaaaaaaaaaaaaaaaaaaaaaaaaaaaaaa

SEQ ID NO: 26185 - RNA, 1689 nt, Artificial Sequence
  mRNA product Design i-3 (hSL-A100) comprising derived and/or modified sequence from LASV(AV;Clade V)__CCA30314__GPCmut3 (opt5)
aggagaaagcuuaccaugggccagaucgugaccuucuuucaagaggucccccacguuauugaagaggugaugaacaucgugcugauugcccucagcauccuggcuguccuuaaggggcuguacaauauugccacaugcggacucaucggccugaucacguuccuucugcucugugggagauccugcucuagcaaccuguauaaaggaguguacgaacugcagucccucgaccugaauauggagacccuuaacaugacaaugccucugucuuguaccaagaauaacagccaucacuauauucggguuggcaaugauacagggcucgaacugacccuuacaaacaccuccauccugaaucauaaauuuugcaaccucucugacgcgcacaagaaagaucuguacgaccaugcucugaugagcauuaucuccacguuccaccucagcauuccgaauuuuaaccaguaugaggccaugucuugugauuucaauggaggcaagaucuccgugcaguacaaccugagccacucuuaugccauugacgcugccaaucauugcggcaccgucgcuaacgggauccuucaaacauuuaugcgcauggccuggggaggcuccuacaucgcgcuggauagcgggagaggaaacugggacuguauuaugaccucuuaccaguaucucaucauucagaauacaaccugggagaaccacugccaguucucccggcccagcccuaucggcuaccuggggcuucugucccaacgcacgagagauauuuauaucucucggcgcagacggggaacauuuaccuggacacucagcgacuccgaaggcaaugccacccccggcggguacugucugacccgcuggaugcugaucgaggcugaacucaagugcuucggaaacacagccguggcuaaauguaaugagaagcaugaugaggaauuuugcgacaugcugagacuuuucgauuuuaacaaacaggccauuagccggcugaagucuccugcgcagauguccauccagcucauuaauaaagccguuaacgcucugaucaaugaccaacuuauuaugaagaaccaucugcgcgacaucaugggcauccccuauugcaauuacagcaaguauuguuaccucaaccacacgauuaccgggaaaacaucucugccuaagugcugucuggugagcaauggauccuaccucaacgagacccacuucucugaugacaucgaacagcaggccgauaauaugauuacagagaugcugcaaaaagaauauauggagagacagggcaagaccccgcuugggcuggucgaccucuucguguuuagcacguccuucuaccugaucagcauuuuucugcggcuugugaaaauccccacacaccgccauauugucggaaagccuugccccaaaccucacagacucaaccauaugggcaucuguucuugcggccuguauaagcagcccgggguuccggugcgguggaagagaugaggacuaguuauaagacugacuagcccgaugggccucccaacgggcccuccuccccuccuugcaccgagauuaaucaaaggcucuuuucagagccaccaaaaaaaaaaaaaaaaaaaaaaaaaaaaaaaaaaaaaaaaaaaaaaaaaaaaaaaaaaaaaaaaaaaaaaaaaaaaaaaaaaaaaaaaaaaaaaaaaaaaa

SEQ ID NO: 26186 - RNA, 1686 nt, Artificial Sequence
  mRNA product Design i-3 (hSL-A100) comprising derived and/or modified sequence from LASV(Togo/2016/7082;Clade VI)__AMR44577__GPCmut3 (opt5)
aggagaaagcuuaccaugggccagaucauuaccuucuuucaagaggugccccacgucaucgaagagguuaugaacauugugcugaucgcccucagccugcuugcuauucugaaggggguguacaaugucgccacaugcggaaucaucggccucgugacguuccuguuucuuugugggagauccugcucucugauuuauaaaggaagcuacgaacuccagacccuggagcugaacauggaaacacucaauaugaccaugccucuguccuguacaaagaacucuagccaucacuauauccggguuggcaaugagaccgggcuugagcugacacucaccaacacguccauuaucaaucauaaauucugcaaccugucugacgcgcacaagcgcaaucuuuacgaucaugcucugaugagcauucucuccaccuuucaccugagcaucccgaacuucaaucaguaugaagccaugucuugugacuuuaacggaggcaaaauuuccgugcaguacaaucugagccacgccuaugcugucgaugccgcugagcauugcggcacaguggccaacgggguucuccaaaccuucaugagaauggcguggggaggcucuuacaucgcccuggacuccgggcggggaaauugggauuguaucaugacaagcuaccaguaucuuauuauccagaacaccacgugggaagaccacugccaguuuucucgccccuccccuauuggcuaccuggggcuccugagccaaagaacacgggauaucuauauuucccgcagacggcgcggaaccuucacauggacccuuucugacagcgagggcaacgagacccccggcggguacugucugacaagauggaugcucaucgaagcugagcugaagugcuuuggaaauacggccguggcuaaguguaacgaaaaacaugaugaggaguucugcgacaugcugcggcucuuugauuucaauaagcaggccauccagcgccugaaauccccugcgcagaugagcauucaacuuaucaacaaggccgucaaugcucugauuaacgaccagcucaucaugaaaaaucaccugagagauaugaugggcauucccuauugcaacuacucuaaguauuguuaccuuaaucacaccuccagcgggcggacaucucugccuaagugcugucucgugagcaacggauccuaccugaaugaaacccauuucucugacgacaucgagcagcaagccgauaacaugaucacagaaaugcugcagaaagaguauauugaccgccagggcaagaccccgcucgggcugguggaucuuuuugucuucagcacguccuuuuaccugaucagcauuuuccuccaccugaucaaaauucccacacauagacacaucguuggaaagccuugccccaaaccucaucggcugaaucacaugggcauuuguucuugcggccuuuauaagcagcccggggugccgaccagauggaaacgcugaggacuaguuauaagacugacuagcccgaugggccucccaacgggcccuccuccccuccuugcaccgagauuaaucaaaggcucuuuucagagccaccaaaaaaaaaaaaaaaaaaaaaaaaaaaaaaaaaaaaaaaaaaaaaaaaaaaaaaaaaaaaaaaaaaaaaaaaaaaaaaaaaaaaaaaaaaaaaaaaaaaaa

SEQ ID NO: 26187 - RNA, 1686 nt, Artificial Sequence
  mRNA product Design i-3 (hSL-A100) comprising derived and/or modified sequence from LASV(KAK-428;Clade n.d. (VII))__ANH09740__GPCmut3 (opt5)
aggagaaagcuuaccaugggccagaucgugaccuucuuucaagaggucccccacguuauugaagaggugaugaacaucgugcugauugcccucagccugcuugcuauccugaaggggcucuacaauuucgccacaugcggagucauuggccugaucacguuucuucugcucugugggagauccugcucugcgaccuauaaaggacaguacgaacugcagacacuggagcucaacauggaaagccugaauaugaccaugccucuuuccuguacaaagaacaauucucaucacuauauccgggcuggcaacaauaccgggcuggagcucacacugaccaacacgagcauuaucucccauaaauucugcaaucuuucugacgcccacaagaaaaaccuguacgaucauacccucaugagcauuaucacaaccuuucaccuguccauuccgaauuucaaccaguaugaggccaugagcugugacuuuaauggaggcaagaucucuauucaauacaaccugucccacagcuaugcuggcgaugccgcucagcauugcgggacaguggccaauggaguucuccagaccuucaugcgcauggcguggggcgggucuuaccuggcccuugacuccggaagacggggcugggauuguaucaucagcucuuaccaguaucugauuauccaaaacacgacaugggacgaucacugccaguuuucccgccccagcccuauuggguaccucggauucgugucccagaagaccagagacaucuauauuucucggcgcagacggggcacauuuaccuggacccugagcgauuccgaaggccaugacaugcccgggggauacugucuuacacgcuggaugcugaucgaggcugaucucaaaugcuucggcaacacggccgucgcuaaguguaaugaaaaacacgacgaggaguuuugcgauauguggagacuguucgacuucaacaagcaggccauccaacggcugaaagcgccugcccagaugaauauucagcucaucaacaaggcugugaaugcccugauuaacgaccaacuuaugaugaagaaucaucugcgcgauaucauggggauucccuauugcaacuacagcaaauuuuguuaucucaauaacaccacaaccggaagaacaucucugccucggugcugucuuaucuccaauggcagcuaccugaacgaaacccacuucucugacgauaucgagcagcaggcugacaauaugauuacggaaaugcuccagaaggaguacauggaucgccaagggaaaacaccgcugggacugguugaccucuuuguguucagcaccuccuuuuaucugaucaccauuuuccuucaccuggucaagauccccacacauagacacauugugggcaaaccuugccccaagccucaucggcucaaccacaugggcaucuguucuugcgggcuguacaaacagcccggagugccggucagauggaagcgcugaggacuaguuauaagacugacuagcccgaugggccucccaacgggcccuccuccccuccuugcaccgagauuaaucaaaggcucuuuucagagccaccaaaaaaaaaaaaaaaaaaaaaaaaaaaaaaaaaaaaaaaaaaaaaaaaaaaaaaaaaaaaaaaaaaaaaaaaaaaaaaaaaaaaaaaaaaaaaaaaaaaaa

SEQ ID NO: 26188 - RNA, 1686 nt, Artificial Sequence; identical to SEQ ID NO: 26182
  mRNA product Design i-3 (hSL-A100) comprising derived and/or modified sequence from LASV(Pinneo-NIG-1969;Clade I)__AIT17836__GPCmut3 (opt5)

SEQ ID NO: 26189 - RNA, 1686 nt, Artificial Sequence
  mRNA product Design i-3 (hSL-A100) comprising derived and/or modified sequence from LASV(ISTH0009-NIG-2011;Clade II)__AIT17404__GPCmut3 (opt5)
aggagaaagcuuaccaugggccagaucauuaccuucuuucaagaggugccccacgucaucgaagagguuaugaacauugugcugaucgcccucagccugcuugcuauucugaaggggaucuacaauguggccacaugcggacucuucggccuggucuccuuucuucugcucugugggagaucuugcagcacgaccuauaaaggaguguacgaacugcagacacuggagcucgacauggcgucccugaacaugaccaugccucuuucuuguacaaagaauaacagccaucacuauaucaugguuggcaaugaaaccgggcuggagcucacacugaccaacacguccauuaucaaucauaaauucugcaaccuuucugaugcucacaagaaaaaucuguacgaccaugcccucaugagcauuaucuccaccuuucaccugagcauuccgaacuucaaucaguaugaggccaugucuugugauuuuaacggaggcaagaucuccgugcaguacaaucugagccacgcuuaugccgucgacgcugccaaccauugcggcacaauugcgaauggggugcuccaaaccuucaugcggauggccuggggaggcucuuacaucgcucuggauuccgggaagggaagcugggacuguaucaugacaucuuaccaguaucuuauuauccagaacaccacgugggaagaucacugccaguuuucccgccccagcccuauuggcuaccuggggcuccugucccaaagaacacgggacaucuauauuucucgcagacggcgcggaaccuucacauggacccuuagcgauuccgagggcaacgaaacccccggcggguacugucugacaagauggaugcucaucgaggccgagcugaaaugcuuuggaaauacggcuguugccaaguguaacgaaaaacaugacgaggaguucugcgauaugcugcggcucuuugacuucaauaagcaggcgauccgcagacugaaaaccccugcccagaugagcauucagcuuaucaacaaggcugugaaugcccugauuaacgaucaacucaucaugaagaaucaucugcgggacauuaugggcauccccuauugcaacuacucuaaauauuguuaccuuaaucacacagucaccgggaagacaucccugccucgcugcugucucgugagcaacggaucuuaccugaaugaaacccacuucagcgacgauaucgaacagcaggcugacaacaugauuacggagcugcuccaaaaagaguauauggauagacagggcaagacaccgcuggggcuuguggaccuguuugucuucuccaccucuuuuuaccucaucagcauuuuccugcaccugaucaaaauucccacccaucggcacaucacaggaaagccuugccccaaaccucaucgccuuaaucacaugggcauuuguuccugcggccucuauaagcaccccgggguuccggugaaguggaaaagaugaggacuaguuauaagacugacuagcccgaugggccucccaacgggcccuccuccccuccuugcaccgagauuaaucaaaggcucuuuucagagccaccaaaaaaaaaaaaaaaaaaaaaaaaaaaaaaaaaaaaaaaaaaaaaaaaaaaaaaaaaaaaaaaaaaaaaaaaaaaaaaaaaaaaaaaaaaaaaaaaaaaaa

SEQ ID NO: 26190 - RNA, 1686 nt, Artificial Sequence
  mRNA product Design i-3 (hSL-A100) comprising derived and/or modified sequence from LASV(ISTH2010-NIG-2012;Clade II)__AIT17482__GPCmut3 (opt5)
aggagaaagcuuaccaugggccagaucauuaccuucuuucaagaggugccccacgucaucgaagagguuaugaacauugugcugaucgcccucagccugcuugcuauucugaaggggaucuacaauguggccacaugcggacucuucggccuggucuccuuucuucugcucugugggagaucuugcagcacgaccuauaaaggaguguacgaacugcagacacuggagcucgacauggcgucccugaacaugaccaugccucuuucuuguacaaagaauaacagccaucacuauaucaugguuggcaaugaaaccgggcuggagcucacacugaccaacacguccauuaucaaucauaaauucugcaaccuuucugaugcucacaagaaaaaucuguacgaccaugcccucaugagcauuaucuccaccuuucaccugagcauuccgaacuucaaucaguaugaggccaugucuugugauuuuaacggaggcaagaucuccgugcaguacaaucugagccacgcuuaugccgucgacgcugccaaccauugcggcacaauugcgaauggggugcuccaaaccuucaugcggauggccuggggaggcucuuacaucgcucuggauuccgggaagggaagcugggacuguaucaugacaucuuaccaguaucuuauuauccagaacauuaccugggaagaucacugccaguuuucccgccccagcccuaucggcuaccuggggcuccugucccaaagaacgcgggacauuuauaucucucgcagacggcgcggaacauucaccuggacacuuagcgauuccgagggcaacgaaacccccggcggguacugucugaccagauggaugcucaucgaggccgagcugaaaugcuuuggaaauacagcuguugccaaguguaacgaaaaacaugacgaggaguucugcgauaugcugcggcucuuugacuucaauaagcaggcgauucgcagacugaaaacgccugcccagaugagcauccagcuuauuaacaaggcugugaaugcccugaucaacgaucaacucauuaugaagaaucaucugcgggacaucaugggcauccccuauugcaacuacucuaaauauuguuaccuuaaucacaccgucacagggaagaccucccugccucgcugcugucucgugagcaacggaucuuaccugaaugaaacacacuucagcgacgauauugaacagcaggcugacaacaugaucaccgagcugcuccaaaaagaguauauugauagacagggcaagacgccgcuggggcuuguggaccuguuugucuucuccacaucuuuuuaccucaucagcauuuuccugcaccugguuaaaauccccacccaucggcacguggugggaaagccuugccccaaaccucaucgccuuaaucacaugggcauuuguuccugcggccucuauaagcaccccggggucccggugaaguggaaaagaugaggacuaguuauaagacugacuagcccgaugggccucccaacgggcccuccuccccuccuugcaccgagauuaaucaaaggcucuuuucagagccaccaaaaaaaaaaaaaaaaaaaaaaaaaaaaaaaaaaaaaaaaaaaaaaaaaaaaaaaaaaaaaaaaaaaaaaaaaaaaaaaaaaaaaaaaaaaaaaaaaaaaa

SEQ ID NO: 26191 - RNA, 1686 nt, Artificial Sequence
  mRNA product Design i-3 (hSL-A100) comprising derived and/or modified sequence from LASV(Lassa virus/H.sapiens-wt/NGA/2015/ISTH_0543;Clade II)__AVO03639__GPCmut3 (opt5)
aggagaaagcuuaccaugggccagaucauuaccuucuuucaagaggugccccacgucaucgaagagguuaugaacauugugcugaucgcccucagccugcuugcuauucugaaggggaucuacaauguggccacaugcggacucuucggccuggucuccuuucuucugcucugugggagaucuugcagcacgaccuauaaaggaguguacgaacugcagacacuggagcucgacauggcgaaccugaauaugaccaugccucuuuccuguacaaagaacaauucucaucacuauaucaugguuggcaacgaaaccgggcuggagcucacacugaccaauacgagcauuaucaaccauaaauucugcaaucuuuccgaugcucacaagaaaaaccuguacgaccaugcccucaugucuauuaucagcaccuuucaccuguccauuccgaauuucaaccaguaugaggccaugagcugugauuuuaauggaggcaagaucucugugcaguacaaccugucccacacauaugcugucgacgccgcuaaucauugcggcaccauugccaacggggugcuccaaacauucaugcggauggcguggggaggcagcuacaucgcccuggauucugggaagggauccugggacuguaucaugaccagcuaccaguaucuuguuauucagaacacgacaugggaagaucacugccaguuuucucgccccuccccuaucggcuaccuggggcuccugagccaaagaacccgggacauuuauaucucccgcagacggcgcggaacauucaccuggacccuuucugauagcgagggcaaugaaacacccggcggguacugucugacgagauggaugcucauugaggcugagcugaaaugcuuuggaaacaccgccguggcuaaguguaaugaaaaacaugacgaggaguucugcgauaugcugcggcucuuugacuucaacaagcaggccauccgcagacugaaaaccccugcgcagauguccauccagcuuauuaauaaggccgucaacgcucugaucaaugaucaacucauuaugaagaaccaucugcgggacaucaugggcauucccuauugcaauuacagcaaauauuguuaccuuaaccacacagugacagggaagaccucucugccucgcugcugucucguguccaauggaagcuaccugaacgaaacgcacuucucugacgauaucgaacagcaggccgacaauaugaucacagagcugcuccaaaaagaguauauugauagacagggcaagaccccgcuggggcuugucgaccuguuuguuuucagcaccuccuuuuaccucaucucuauuuuccugcaccuggugaaaauccccacacaucggcacauuaccggaaagccuugccccaaaccucaucgccuuaaccacaugggcaucuguagcugcggccucuauaagcaccccggggugccggucaaguggaaaagaugaggacuaguuauaagacugacuagcccgaugggccucccaacgggcccuccuccccuccuugcaccgagauuaaucaaaggcucuuuucagagccaccaaaaaaaaaaaaaaaaaaaaaaaaaaaaaaaaaaaaaaaaaaaaaaaaaaaaaaaaaaaaaaaaaaaaaaaaaaaaaaaaaaaaaaaaaaaaaaaaaaaaa

SEQ ID NO: 26192 - RNA, 1686 nt, Artificial Sequence
  mRNA product Design i-3 (hSL-A100) comprising derived and/or modified sequence from LASV(Lassa virus/H.sapiens-wt/NGA/2016/ISTH_0009;Clade II)__AVO03571__GPCmut3 (opt5)
aggagaaagcuuaccaugggccagaucauuaccuucuuucaagaggugccccacgucaucgaagagguuaugaacauugugcugaucgcccucagccugcuugcuauucugaaggggaucuacaauguggccacaugcggacuccugggccuugucuccuuccugcuccugugugggagaucuugcagcacgaccuauaaaggaguguacgaacugcagacacucgagcuggacauggcgucccuuaacaugaccaugccucugucuuguacaaagaauaacagccaucacuauaucaugguuggcaaugaaaccgggcucgagcugacacuuaccaacacguccauuaucaaucauaaauuuugcaaccugucugaugcucacaagaaaaaucucuacgaccaugcccugaugagcauuaucuccaccuuccaccugagcauuccgaacuuuaaucaguaugaggccaugucuugugauuucaacggaggccggaucuccgugcaguacaaucucagccacucuuaugcugucgacgccgcuaaccauugcggcacaauugccaauggggugcugcaaaccuuuaugcgcauggcguggggaggcuccuacaucgcccuugauagcgggaagggaucuugggacuguaucaugacauccuaccaguaucugauuauccagaacaccacgugggaagaucacugccaguucagcagacccuccccuauuggcuaccucgggcugcuuucucaacggacacgcgacaucuauauuagcagacggcgcagaggaaccuuuacauggacccuguccgauagcgagggcaacgaaacccccggcggguacugucucacacgguggaugcugaucgaggcugagcugaagugcuucggaaauacggccguugcuaaauguaacgaaaagcaugacgaggaauuuugcgauaugcuccgccuguucgacuuuaauaaacaggccaucagacggcuuaagaccccugcgcagaugucuauucagcugaucaacaaagccgugaaugcucucauuaacgaucaacugaucaugaagaaucaccuucgcgacauuaugggcauccccuauugcaacuacuccaaguauuguuaccugaaucacacagucaccgggaaaacaagccucccuagaugcugucuggugucuaacggaagcuaccugaaugagacccauuucuccgacgauaucgaacagcaggccgacaacaugauuacggagcuccugcaaaaggaguauaucgaucggcagggcaaaacaccgcuugggcugguggaccucuucgucuuuucuaccagcuucuaccugauuuccaucuuucugcaccuuguuaagauucccacccaucgccacaucacaggaaaaccuugccccaagccucauagacucaaucacaugggcauuuguagcugcggccuguauaaccaccccggggugccggugaaauggaagcggugaggacuaguuauaagacugacuagcccgaugggccucccaacgggcccuccuccccuccuugcaccgagauuaaucaaaggcucuuuucagagccaccaaaaaaaaaaaaaaaaaaaaaaaaaaaaaaaaaaaaaaaaaaaaaaaaaaaaaaaaaaaaaaaaaaaaaaaaaaaaaaaaaaaaaaaaaaaaaaaaaaaaa

SEQ ID NO: 26193 - RNA, 1686 nt, Artificial Sequence
  mRNA product Design i-3 (hSL-A100) comprising derived and/or modified sequence from LASV(Lassa virus/H.sapiens-wt/NGA/2016/ISTH_0017;Clade II)__AVO03567__GPCmut3 (opt5)
aggagaaagcuuaccaugggccagaucauuaccuucuuucaagaggugccccacgucaucgaagagguuaugaacauugugcugaucgcccucagccugcuugcuauucugaaggggaucuacaauguggccacaugcggacucuucggccuggucuccuuucuucugcucugugggagaucuugcagcacgaccuauaaaggaguguacgaacugcagacacuggagcucgacauggcgucccugaacaugaccaugccucuuucuuguacaaagaauaacagccaucacuauaucaugguuggcaaugaaaccgggcuggagcucacacugaccaacacguccauuaucaaucauaaauucugcaaccuuucugaugcucacaagaaaaaucuguacgaccaugcccucaugagcauuaucuccaccuuucaccugagcauuccgaacuucaaucaguaugaggccaugucuugugauuuuaacggaggcaagaucuccgugcaguacaaucugagccacacauaugcuauugacgccgcuaaccauugcggcaccaucgccaaugggguccuccaaacauucaugcggauggcguggggaggcucuuacaucgcccuggauuccgggaagggaagcugggacuguauuaugaccucuuaccaguaucuuaucauucagaacacgacaugggaagaucacugccaguuuucccgccccagcccuaucggcuaccuggggcuccugucccaaagaacccgggacauuuauaucucucgcagacggcgcggaacauucaccuggacccuuagcgauuccgagggcaacgaaacacccggcggguacugucugacgagauggaugcucaucgaggcugagcugaaaugcuuuggaaauaccgccguggcuaaguguaacgaaaaacaugacgaggaguucugcgauaugcugcggcucuuugacuucaauaagcaggccauucgcagacugaaaaccccugcgcagaugagcauccagcuuauuaacaaggccguuaaugcucugaucaacgaucaacucauuaugaagaaucaucugcgggacaucaugggcauccccuauugcaacuacucuaaauauuguuaccuuaaucacacagugacagggaagaccucccugccucgcugcugucucgucagcaacggaucuuaccugaaugaaacgcacuucagcgacgauauugaacagcaggccgacaacaugaucacagagcugcuccaaaaagaguauauggauagacagggcaagaccccgcuggggcuuguggaccuguuuguguucuccaccucuuuuuaccucauuagcaucuuccugcaccugguccggauucccacacaucgccacguuaucggaaaaccuugccccaagccucauagacuuaaucacaugggcauuuguuccugcggccucuauaaacaccccggggugccggugaaguggaagcggugaggacuaguuauaagacugacuagcccgaugggccucccaacgggcccuccuccccuccuugcaccgagauuaaucaaaggcucuuuucagagccaccaaaaaaaaaaaaaaaaaaaaaaaaaaaaaaaaaaaaaaaaaaaaaaaaaaaaaaaaaaaaaaaaaaaaaaaaaaaaaaaaaaaaaaaaaaaaaaaaaaaaa

SEQ ID NO: 26194 - RNA, 1686 nt, Artificial Sequence
  mRNA product Design i-3 (hSL-A100) comprising derived and/or modified sequence from LASV(Lassa virus/H.sapiens-wt/NGA/2018/ISTH_0959;Clade II)__AVV65099__GPCmut3 (opt5)
aggagaaagcuuaccaugggccagaucauuaccuucuuucaagaggugccccacgucaucgaagagguuaugaacauugugcugaucgcccucagccugcuugcuauucugaaggggaucuacaauguggucacaugcggacucuucggccugguguccuuucuucugcucugugggagaucuugcagcacgaccuauaaaggaguuuacgaacugcagacacuggagcucgacauggccucccugaacaugaccaugccucuuucuuguacaaagaauaacagccaucacuauaucauggugggcaaugaaaccgggcuggagcucacacugaccaacacguccauuaucaaucauaaauucugcaaccuuucugaugcgcacaagaaaaaucuguacgaccaugcucucaugagcauuaucuccaccuuucaccugagcauuccgaacuucaaucaguaugaggccaugucuugugauuuuaacggaggcaagaucuccguccaguacaaucugagccacgccuaugcuauugacgccgcuaaccauugcggcacaaucgccaauggggugcuccaaaccuucaugcggauggcguggggaggcucuuacaucgcccuggauuccgggaagggaagcugggacuguauuaugacaucuuaccaguaucuuaucauucagaacaccacgugggaagaucacugccaguuuucccgccccagcccuaucggcuaccuggggcuccugucccaaagaacacgggacauuuauaucucucgcagacggcgcggaaccuucacauggacccuuagcgauuccgagggcaacgaaacccccggcggguacugucugacaagauggaugcucaucgaggcugagcugaaaugcuuuggaaauacggccguugcuaaguguaacgaaaaacaugacgaggaguucugcgauaugcugcggcucuuugacuucaauaagcaggccauucgcagacugaaaaccccugcgcagaugagcauccagcuuauuaacaaggccgugaaugcucugaucaacgaucaacucauuaugaagaaucaucugcgggacaucaugggcauccccuauugcaacuacucuaaauauuguuaccuuaaucacacagucaccgggaagacaucccugccucgcugcugucucgugagcaacggaucuuaccugaaugaaacccacuucagcgacgauauugaacagcaggccgacaacaugaucacggagcugcuccaaaaagaguauauugauagacagggcaagacaccgcuggggcuuguggaccuguuugucuucuccaccucuuuuuaccucaucagcauuuuccugcaccugguuaaaauccccacccaucggcacgugauuggaaagccuugccccaaaccucaucgccuuaaucacaugggcaucuguuccugcggccucuauaagcaccccggggugccggucaaguggaaaagaugaggacuaguuauaagacugacuagcccgaugggccucccaacgggcccuccuccccuccuugcaccgagauuaaucaaaggcucuuuucagagccaccaaaaaaaaaaaaaaaaaaaaaaaaaaaaaaaaaaaaaaaaaaaaaaaaaaaaaaaaaaaaaaaaaaaaaaaaaaaaaaaaaaaaaaaaaaaaaaaaaaaaa

SEQ ID NO: 26195 - RNA, 1686 nt, Artificial Sequence
  mRNA product Design i-3 (hSL-A100) comprising derived and/or modified sequence from LASV(LASV003-NIG-2008;Clade II)__AIT17580__GPCmut3 (opt5)
aggagaaagcuuaccaugggccagaucauuaccuucuuucaagaggugccccacgucaucgaagagguuaugaacauugugcugaucgcccucagccugcuugcuauucugaaggggaucuacaauguggccacaugcggacucuucggccuggucuccuuucuucugcucugugggagaucuugcagcacgaccuauaaaggaguguacgaacugcagacacuggagcucgacauggcgucccugaacaugaccaugccucuuucuuguacaaagaauaacagccaucacuauaucaugguuggcaaugaaaccgggcuggagcucacacugaccaacacguccauuaucaaucauaaauucugcaaccuuucugaugcucacaagaaaaaucuguacgaccaugcccucaugagcauuaucuccaccuuucaccugagcauuccgaacuucaaucaguaugaggccaugucuugugauuuuaacggaggcaagaucuccgugcaguacaaucugagccacacauaugcugucgacgccgcuaaccauugcggcaccauugccaauggggugcuccaaacauucaugcggauggcguggggaggcucuuacaucgcccuggauuccgggaagggaagcugggacuguaucaugaccucuuaccaguaucuuauuauccagaacacgacaugggaagaucacugccaguuuucccgccccagcccuauuggcuaccuggggcuccugucccaaagaacccgggacaucuauauuucucgcagacggcgcggaacauucaccuggacccuuagcgauuccgagagcaacgaaacacccggcggcuacugucugacgagauggaugcucaucgaggcugagcugaaaugcuuugggaauaccgccguugcuaaguguaacgaaaaacaugacgaggaguucugcgauaugcugcggcucuuugacuucaauaagcaggccauccgcagacugaaagcgccugcccagaugucuauucagcuuaucaacaaggcugugaaugcccugauuaacgaucaacucaucaugaagaaucaucugcgggacauuaugggaauccccuauugcaacuacuccaaauauuguuaccuuaaucacacagucaccggccgcacaagccugccuagaugcugucucgugucuaacgggagcuaccugaaugaaacccacuucuccgacgauaucgaacagcaggcugacaacaugauuacggagcugcuccaaaaggaguauauggaucggcagggaaaaacaccgcugggccuuguggaccuguuugucuucucuaccagcuuuuaccucaucuccauuuuccugcaccugguuaagauccccacccaucgccacgugauugggaaaccuugccccaagccucauagacuuaaucacaugggaaucuguagcugcggccucuauaaacaccccggcgugccggucaaguggaagcggugaggacuaguuauaagacugacuagcccgaugggccucccaacgggcccuccuccccuccuugcaccgagauuaaucaaaggcucuuuucagagccaccaaaaaaaaaaaaaaaaaaaaaaaaaaaaaaaaaaaaaaaaaaaaaaaaaaaaaaaaaaaaaaaaaaaaaaaaaaaaaaaaaaaaaaaaaaaaaaaaaaaaa

SEQ ID NO: 26196 - RNA, 1686 nt, Artificial Sequence
  mRNA product Design i-3 (hSL-A100) comprising derived and/or modified sequence from LASV(LASV035-NIG-2009;Clade II)__AIT17588__GPCmut3 (opt5)
aggagaaagcuuaccaugggccagaucauuaccuucuuucaagaggugccccacgucaucgaagagguuaugaacauugugcugaucgcccucagccugcuugcuauucugaaggggaucuacaauguggccacaugcggacucuucggccuggucuccuuucuucugcucugugggagaucuugcagcacgaccuauaaaggaguguacgaacugcagacacuggagcucgacauggcgucccugaacaugaccaugccucuuucuuguacaaagaauaacagccaucacuauaucaugguuggcaaugaaaccgggcuggagcucacacugaccaacacguccauuaucaaucauaaauucugcaaccuuucugaugcucacaagaaaaaucuguacgaccaugcccucaugagcauuaucuccaccuuucaccugagcauuccgaacuucaaucaguaugaggccaugucuugugauuuuaacggaggcaagaucuccgugcaguacaaucugagccacgcuuaugccgucgacgcugccaaccauugcggcacaauugcgaauggggugcuccaaaccuucaugcggauggccuggggaggcucuuacaucgcucuggauuccgggaagggaagcugggacuguaucaugacaucuuaccaguaucuuauuauccagaacaccacgugggaagaucacugccaguuuucccgccccagcccuauuggcuaccuggggcuccugucccaaagaacacgggacaucuauauuucucgcagacggcgcggaaccuucacauggacccuuagcgauuccgagggcaacgaaacccccggcggguacugucugacaagauggaugcucaucgaggccgagcugaaaugcuuuggaaauacggcuguugccaaguguaacgaaaaacaugacgaggaguucugcgauaugcugcggcucuuugacuucaauaagcaggcgauccgcagacugaaagccccugcucagaugagcauucagcuuaucaacaaggccgugaaugcucugauuaacgaucaacucaucaugaagaaucaucugcgggacauuaugggcauccccuauugcaacuacucuaaauauuguuaccuuaaucacaccgucacagggaagaccucccugccucgcugcugucucgugagcaacggaucuuaccugaaugaaacacacuucagcgacgauaucgaacagcaggccgacaacaugauuaccgagcugcuccaaaaagaguauaucgauagacagggcaagacgccgcuggggcuuguggaccuguuugucuucuccacaucuuuuuaccucauuagcaucuuccugcaccugguuaaaauucccacccaucggcacgugaucggaaagccuugccccaaaccucaucgccuuaaucacaugggcauuuguuccugcggccucuauaagcaccccggggugccggucaaguggaaaagaugaggacuaguuauaagacugacuagcccgaugggccucccaacgggcccuccuccccuccuugcaccgagauuaaucaaaggcucuuuucagagccaccaaaaaaaaaaaaaaaaaaaaaaaaaaaaaaaaaaaaaaaaaaaaaaaaaaaaaaaaaaaaaaaaaaaaaaaaaaaaaaaaaaaaaaaaaaaaaaaaaaaaa

SEQ ID NO: 26197 - RNA, 1686 nt, Artificial Sequence
  mRNA product Design i-3 (hSL-A100) comprising derived and/or modified sequence from LASV(LASV1000-NIG-2009;Clade II)__AIT17782__GPCmut3 (opt5)
aggagaaagcuuaccaugggccagaucauuaccuucuuucaagaggugccccacgucaucgaagagguuaugaacauugugcugaucgcccucagccugcuugcuauucugaaggggaucuacaauguggccacaugcggacucuucggccuggucuccuuucuucugcucugugggagaucuugcagcacgaccuauaaaggaguguacgaacugcagacacuggagcucgacauggcgucccugaacaugaccaugccucuuucuuguacaaagaauaacagccaucacuauaucaugguuggcaaugaaaccgggcuggagcucacacugaccaacacguccauuaucaaucauaaauucugcaaccuuucugaugcucacaagaaaaaucuguacgaccaugcccucaugagcauuaucuccaccuuucaccugagcauuccgaacuucaaucaguaugaggccaugucuugugauuuuaacggaggcaagaucuccgugcaguacaaucugagccacacauaugcugucgacgccgcuaaccauugcggcaccauugccaauggggugcuccaaacauucaugcggauggcguggggaggcucuuacaucgcccuggauuccgggaagggaagcugggacuguaucaugaccucuuaccaguaucuuauuauccagaacacgacaugggaagaucacugccaguuuucccgccccagcccuauuggcuaccuggggcuccugucccaaagaacccgggacaucuauauuucucgcagacggcgcggaacauucaccuggacccuuagcgauuccgagggcaacgaaacacccggcggguacugucugacgagauggaugcucaucgaggcugagcugaaaugcuuuggaaauaccgccguugcuaaguguaacgaaaaacaugacgaggaguucugcgauaugcugcggcucuuugacuucaauaagcaggccaucaaacgccugaagaccccugcgcagaugagcauucagcuuaucaacaaggccgugaaugcucugauuaacgaucaacucaucaugaaaaaucaccugagagacauuaugggcauccccuauugcaacuacucuaaguauuguuaccuuaaucacacagucacagggaaaaccucccugccucggugcugucucgugagcaacggaucuuaccugaaugaaacgcauuucagcgacgauaucgaacagcaggccgacaacaugauuacagagcugcuccaaaaggaguauaucgaucgccagggcaaaaccccgcuggggcuuguggaccuguuugucuucuccaccucuuuuuaccucauuagcaucuuccugcaccugguuaagauucccacacauagacacguggugggaaaaccuugccccaagccucaucggcuuaaucacaugggcaucuguuccugcggccucuauaagcaccccggggucccggugaaauggaagcgcugaggacuaguuauaagacugacuagcccgaugggccucccaacgggcccuccuccccuccuugcaccgagauuaaucaaaggcucuuuucagagccaccaaaaaaaaaaaaaaaaaaaaaaaaaaaaaaaaaaaaaaaaaaaaaaaaaaaaaaaaaaaaaaaaaaaaaaaaaaaaaaaaaaaaaaaaaaaaaaaaaaaaa

SEQ ID NO: 26198 - RNA, 1686 nt, Artificial Sequence
  mRNA product Design i-3 (hSL-A100) comprising derived and/or modified sequence from LASV(LASV221-NIG-2010;Clade II)__AIT17624__GPCmut3 (opt5)
aggagaaagcuuaccaugggccagaucauuaccuucuuucaagaggugccccacgucaucgaagagguuaugaacauugugcugaucgcccucagccugcuugcuauucugaaggggaucuacaauguggccacaugcggacucuucggccuggucuccuuucuucugcucugugggagaucuugcagcacgaccuauaaaggaguguacgaacugcagacacuggagcucgacauggcgucccugaacaugaccaugccucuuucuuguacaaagaauaacagccaucacuauaucaugguuggcaaugaaaccgggcuggagcucacacugaccaacacguccauuaucaaucauaaauucugcaaccuuucugaugcucacaagaaaaaucuguacgaccaugcccucaugagcauuaucuccaccuuucaccugagcauuccgaacuucaaucaguaugaggccaugucuugugauuuuaacggaggcaagaucuccgugcaguacaaucugagccacacauaugcuauugacgccgcuaaccauugcggcaccaucgccaaugggguccuccaaacauucaugcggauggcguggggaggcucuuacaucgcccuggauuccgggaagggaagcugggacuguauuaugaccucuuaccaguaucuuaucauucagaacacgacaugggaagaucacugccaguuuucccgccccagcccuaucggcuaccuggggcuccugucccaaagaacccgggacauuuauaucucucgcagacggcgcggaacauucaccuggacccuuagcgauuccgagggcaacgaaacacccggcggguacugucugacgagauggaugcucaucgaggcugagcugaaaugcuuuggaaauaccgccguggcuaaguguaacgaaaaacaugacgaggaguucugcgauaugcugcggcucuuugacuucaauaagcaggccauucgcagacugaaaaccccugcgcagaugagcauccagcuuauuaacaaggccguuaaugcucugaucaacgaucaacucauuaugaagaaucaucugcgggacaucaugggcauccccuauugcaacuacucuaaauauuguuaccuuaaucacacagugacagggaagaccucccugccucgcugcugucucgucagcaacggaucuuaccugaaugaaacgcacuucagcgacgauauugaacagcaggccgacaacaugaucacagagaugcugcaaaaagaguauauggauagacagggcaagaccccgcucgggcugguggaccuuuuuguguucuccaccucuuuuuaccugauuagcaucuuccuccaccuggucaaaauucccacacaucggcacguuaucggaaagccuugccccaaaccucaucgccugaaucacaugggcauuuguuccugcggccuuuauaagcaccccggggugccggugaaguggaaaagaugaggacuaguuauaagacugacuagcccgaugggccucccaacgggcccuccuccccuccuugcaccgagauuaaucaaaggcucuuuucagagccaccaaaaaaaaaaaaaaaaaaaaaaaaaaaaaaaaaaaaaaaaaaaaaaaaaaaaaaaaaaaaaaaaaaaaaaaaaaaaaaaaaaaaaaaaaaaaaaaaaaaaa

SEQ ID NO: 26199 - RNA, 1686 nt, Artificial Sequence
  mRNA product Design i-3 (hSL-A100) comprising derived and/or modified sequence from LASV(LASV237-NIG-2010;Clade II)__AIT17638__GPCmut3 (opt5)
aggagaaagcuuaccaugggccagaucauuaccuucuuucaagaggugccccacgucaucgaagagguuaugaacauugugcugaucgcccucagccugcuugcuauucugaaggggaucuacaauguggccacaugcggacucuucggccuggucuccuuucuucugcucugugggagaucuugcagcacgaccuauaaaggaguguacgaacugcagacacuggagcucgacauggcgucccugaacaugaccaugccucuuucuuguacaaagaauaacagccaucacuauaucaugguuggcaaugaaaccgggcuggagcucacacugaccaacacguccauuaucaaucauaaauucugcaaccuuucugaugcucacaagaaagaccuguacgaucaugcccucaugagcauuaucuccaccuuucaccugagcauuccgaauuucaaccaguaugaggccaugucuugugacuuuaauggaggcaagaucuccgugcaguacaaccugagccacacauaugcugucgaugccgcuaaucauugcggcaccauugccaacggggugcuccaaacauucaugcggauggcguggggaggcucuuacaucgcccuggacuccgggaagggaagcugggauuguaucaugaccucuuaccaguaucuuauuauccagaauacgacaugggaagaccacugccaguuuucccgccccagcccuauuggcuaccuggggcuccugucccaaagaacccgggauaucuauauuucucgcagacggcgcggaacauucaccuggacccuuagcgacuccgagggcaacgaaacacccggcggguacugucugacgagauggaugcucaucgaggcugagcugaaaugcuuuggaaacaccgccguugcuaaguguaaugaaaaacaugaugaggaguucugcgacaugcugcggcucuuugauuucaacaagcaggccauccgcagacugaaaaccccugcgcagaugagcauucagcuuaucaauaaggccgugaacgcucugauuaaugaccaacucaucaugaagaaccaucugcgggacauuaugggcauccccuauugcaauuacucuaaauauuguuaccuuaaccacacagucacagggaagaccucccugccucgcugcugucucgugagcaauggaucuuaccugaacgaaacgcacuucagcgaugacaucgaacagcaggccgauaauaugauuacagagcugcuccaaaaagaguauauggacagacagggcaagaccccgcuggggcuuguggaucuguuugucuucuccaccucuuuuuaccucaucagcauuuuccugcaccugaucaaaauucccacacaucggcacaucaccggaaagccuugccccaaaccucaucgccuuaaccacaugggcauuuguuccugcggccucuauaagcaccccgggguuccggugaaguggaaaagaugaggacuaguuauaagacugacuagcccgaugggccucccaacgggcccuccuccccuccuugcaccgagauuaaucaaaggcucuuuucagagccaccaaaaaaaaaaaaaaaaaaaaaaaaaaaaaaaaaaaaaaaaaaaaaaaaaaaaaaaaaaaaaaaaaaaaaaaaaaaaaaaaaaaaaaaaaaaaaaaaaaaaa

SEQ ID NO: 26200 - RNA, 1686 nt, Artificial Sequence
  mRNA product Design i-3 (hSL-A100) comprising derived and/or modified sequence from LASV(LASV253-NIG-2011;Clade II)__AIT17670__GPCmut3 (opt5)
aggagaaagcuuaccaugggccagaucauuaccuucuuucaagaggugccccacgucaucgaagagguuaugaacauugugcugaucgcccucagccugcuugcuauucugaaggggaucuacaauguggccacaugcggacucuucggccuggucuccuuucuucugcucugugggagaucuugcagcacgaccuauaaaggaguguacgaacugcagacacuggagcucgacauggcgucccugaacaugaccaugccucuuucuuguacaaagaauaacagccaucacuauaucaugguuggcaaugaaaccgggcuggagcucacacugaccaacacguccauuaucaaucauaaauucugcaaccuuucugaugcucacaagaaaaaucuguacgaccaugcccucaugagcauuaucuccaccuuucaccugagcauuccgaacuucaaucaguaugaggccaugucuugugauuuuaacggaggcaagaucuccgugcaguacaaucugagccacacauaugcugucgacgccgcuaaccauugcggcaccauugccaauggggugcuccaaacauucaugcggauggcguggggaggcucuuacaucgcccuggauuccgggaagggaagcugggacuguaucaugaccucuuaccaguaucuuauuauccagaacacgacaugggaagaucacugccaguuuucccgccccagcccuauuggcuaccuggggcuccugucccaaagaacccgggacaucuauauuucucgcagacggcgcggaacauucaccuggacccuuagcgauuccgagggcaacgaaacacccggcggguacugucugacgagauggaugcucaucgaggcugagcugaaaugcuuuggaaauaccgccguugcuaaguguaacgaaaaacaugacgaggaguucugcgauaugcugcggcucuuugacuucaauaagcaggccauccgcagacugaaagcgccugcccagaugagcauucagcuuaucaacaaggcugugaaugcccugauuaacgaucaacucaucaugaagaaucaucugcgggacauuaugggcauccccuauugcaacuacucuaaauauuguuaccuuaaucacacagucaccgggcgcacaucccugccuagaugcugucucgugagcaacggaucuuaccugaaugaaacccacuucagcgacgauaucgaacagcaggcugacaacaugauuacggagcugcuccaaaaggaguauaucgaucggcagggcaaaacaccgcuggggcuuguggaccuguuugucuucuccaccucuuuuuaccucauuagcaucuuccugcaccugguuaagauucccacccaucgccacaucauuggaaaaccuugccccaagccucauagacuuaaucacaugggcaucuguuccugcggccucuauaaacaccccggggugccggugaaguggaagcggugaggacuaguuauaagacugacuagcccgaugggccucccaacgggcccuccuccccuccuugcaccgagauuaaucaaaggcucuuuucagagccaccaaaaaaaaaaaaaaaaaaaaaaaaaaaaaaaaaaaaaaaaaaaaaaaaaaaaaaaaaaaaaaaaaaaaaaaaaaaaaaaaaaaaaaaaaaaaaaaaaaaaa

SEQ ID NO: 26201 - RNA, 1686 nt, Artificial Sequence
  mRNA product Design i-3 (hSL-A100) comprising derived and/or modified sequence from LASV(LASV254-NIG-2011;Clade II)__AIT17674__GPCmut3 (opt5)
aggagaaagcuuaccaugggccagaucauuaccuucuuucaagaggugccccacgucaucgaagagguuaugaacauugugcugaucgcccucagccugcuugcuauucugaaggggaucuacaauguggccacaugcggacucuucggccuggucuccuuucuucugcucugugggagaucuugcagcacgaccuauaaaggaguguacgaacugcagacacuggagcucgacaugaccaaccugaauaugacaaugccucuuuccuguaccaagaacaauucucaucacuauaucaugguuggcaacgaaacagggcuggagcucacccugacgaauaccagcauuaucaaccauaaauucugcaaucuuuccgaugcgcacaagaaaaaccuguacaaucaugcucucaugucuauuaucagcacauuucaccuguccauuccgaacuucaaucaguaugaggccaugagcugugacuuuaacggaggcaagaucucugugcaguacaaucugucccacagcuaugccgucgaugcugccaaccauugcggcaccauugcuaacggggugcuccaaacauucaugcggauggccuggggaggcucuuacaucgcgcuggacuccgggaagggaaauugggauuguaucaugaccagcuaccaguaucuuauuauccagaacacgacaugggaagaccacugccaguuuucucgccccuccccuauuggcuaccuggggcuccugagccaaagaacccgggauaucuauauuucccgcagacggcgcggaacauucaccuggacccuuucugacagcgagggcaaugaaacacccggcggguacugucugacgagauggaugcucaucgaggccgagcugaaaugcuuuggaaacaccgcuguugccaaguguaaugaaaaacaugaugaggaguucugcgacaugcugcggcucuuugauuucaacaagcaggcuauccgcagacugaaaaccccugcccaggcgaauauucagcuuaucaacaaggccgugaaugcucugauuaacgaccaacucaucaugaagaaucaucugcgggauauuaugggcauccccuauugcaacuacuccaaauauuguuaccuuaaucacacagucacagggaagaccagccugccucgcugcugucucgugucuaacggauccuaccugaaugaaacgcacuucagcgacgacaucgaacagcaggccgauaacaugauuacagagcugcuccaaaaagaguauauggacagacagggcaagaccccgcuggggcuuguggaucuguuugucuucucuaccagcuuuuaccucaucuccauuuuccugcaccugguuaaaauccccacacaucggcacgugauuggaaagccuugccccaaaccucaucgccuuaaccacaugggcaucuguucuugcggccucuauaagcaccccggggugccggucaaguggaaaagaugaggacuaguuauaagacugacuagcccgaugggccucccaacgggcccuccuccccuccuugcaccgagauuaaucaaaggcucuuuucagagccaccaaaaaaaaaaaaaaaaaaaaaaaaaaaaaaaaaaaaaaaaaaaaaaaaaaaaaaaaaaaaaaaaaaaaaaaaaaaaaaaaaaaaaaaaaaaaaaaaaaaaa

SEQ ID NO: 26202 - RNA, 1686 nt, Artificial Sequence
  mRNA product Design i-3 (hSL-A100) comprising derived and/or modified sequence from LASV(Nig08-A19;Clade III)__ADU56618__GPCmut3 (opt5)
aggagaaagcuuaccaugggccagaucgugaccuucuuucaagaggucccccacguuauugaagaggugaugaacaucgugcugauugcccucagcauccuggcuauucuuaaggggcuguacaauaucgccacaugcggacucaucggccuggucacguuccuucugcucuccgggagaucuuguagcaugaccuauaaaggaguguacgaacugcagacacuggagcucaacaugaauacccugaacaugacaaugccucuuuccugcaccaagaauaacucucaucacuauauuaugguuggcaaugaaacagggcuggagcucacccugacgaacaccagccuucugcaucacaaauuuuguaaucucuccgacgcgcauaagaaaaaccuguacgaucacacacugaugucuaucauuagcaccuuccaccucuccaucccgaauuuuaaccaguaugaggcuaugagcugcgacuucaauggaggcaagauuacagugcaguacaaccugucucauuccuaugccaucgaugccgcuaaucacuguggcaccgucgccaacggggugcuucaaacguuuaugcggauggcuuggggaggcagcuacauugcccuggacucugggcgcggaaagugggauugcaucaugacauccuaccaguaucucaucauucagaacaccacaugggaagaccauugucaguucagcagacccucuccuaucggcuaccuggggcuucugucccaacggacccgcgauauuuauaucagcagacggcgcagaggaaccuuuacauggacgcucuccgacucugagggcaaugaaacccccggcggguacugccugacacgguggaugcugauugaggcggagcucaaauguuucggaaacaccgccguugcuaagugcaaugaaaaacacgaugaggaauuuugugacaugcugcgccuuuucgauuuuaacaagcaggccaucagacggcugaaagcuccugcccagaugagcauccagcucauuaauaaggcggugaacgcccugaucaaugaccaacuuauuaugaagaaccaucugcgcgauaucaugggcauucccuauugcaauuacuccaaauauugcuaccucaaccacacaagcaccgggagaacgucucugccucgguguugccuggucuccaauggaagcuaccucaacgagacacacuucucugacgacaucgaacagcaggcugauaauaugaucaccgagaugcugcaaaaggaguaucuugaccgccagggcaaaaccccgcuggggcucguggaucuguucguguuuagcacauccuucuaccugauuucuaucuuucuucaucucgucaagauucccacccacagacauaucguuggaaaaccuugucccaagccucaccggcugaaccacaugggcauuugcagcuguggccuguauaaacagcccggggugccggugagauggaagcgcugaggacuaguuauaagacugacuagcccgaugggccucccaacgggcccuccuccccuccuugcaccgagauuaaucaaaggcucuuuucagagccaccaaaaaaaaaaaaaaaaaaaaaaaaaaaaaaaaaaaaaaaaaaaaaaaaaaaaaaaaaaaaaaaaaaaaaaaaaaaaaaaaaaaaaaaaaaaaaaaaaaaaa

SEQ ID NO: 26203 - RNA, 1689 nt, Artificial Sequence
  mRNA product Design i-3 (hSL-A100) comprising derived and/or modified sequence from LASV(G1180-SLE-2010;Clade IV)__AIT17168__GPCmut3 (opt5)
aggagaaagcuuaccaugggccagaucgugaccuucuuucaagaggucccccacguuauugaagaggugaugaacaucgugcugauugcccucagcauccuggcuguccuuaaggggcuguacaauuucgccacaugcggacucgugggccugcuuacguuucugcuccugugugggagauccugcaccgcgucucgguauaaaggaguuuacgaacugcagacacucgagcugaacauggaaacccuuaauaugacaaugccucugagcuguaccaagaacaauucccaucacuauauuauggugggcaacgagacagggcucgagcugacccuuacgaauaccucuaucaucaaccauaaauucugcaaucugagcgacgcucacaagaaaaaccucuacgaucaugcccugauguccauuaucucuacauuucaccugagcauuccgaauuucaaccaguaugaagccauguccugugacuuuaauggaggcaagaucagcguccaguacaaccucucucacuccuaugcuggcgaugccgcuaaucauugcgggaccguggccaacggaguucugcaaacauucaugcgcauggcguggggcgggagcuacauugcccuugacucuggacacggcuccugggauuguaucaugaccagcuaccaguaucugauuauccagaacacgacaugggaggaccauugccaguuuucuagacccuccccuaucggguaccucggacugcuuagccaacggacccgcgauauuuauaucuccagacggcgcagaggcacauucaccuggacccugucugacagcgaaggcaaggauacacccgggggauacugucucacgcgguggaugcugauugaggcugagcugaaaugcuuuggcaauaccgccguggcuaaguguaacgaaaaacacgacgaggaguucugcgauaugcuccgccuguuugacuucaauaagcaggccauccagagacuuaaagcgccugcccagauguccauucaacugaucaacaaggcugucaaugcccucaucaacgaucagcugauuaugaagaaucaccuucgggacaucauggggauucccuauugcaacuacagcaaauauuguuaccugaaucauacaaccacaggaaagaccucucucccuaaaugcugucugguguccaacggcagcuaccugaaugaaacgcacuucucugacgauaucgaacagcaagcugacaacaugauuacagagaugcuccagaaggaguauauggaacgccaggggaaaaccccgcugggacuuguggaucuguuugucuucagcaccuccuuuuaccucaucucuaucuuccugcaucugguuaagauucccacacacagacauaucgugggcaaaagcugcccuaagccccaccggcuuaaucacaugggcauuuguuccugcgggcucuauaagcagccuggagugcccgucaaauggaagcgcugaggacuaguuauaagacugacuagcccgaugggccucccaacgggcccuccuccccuccuugcaccgagauuaaucaaaggcucuuuucagagccaccaaaaaaaaaaaaaaaaaaaaaaaaaaaaaaaaaaaaaaaaaaaaaaaaaaaaaaaaaaaaaaaaaaaaaaaaaaaaaaaaaaaaaaaaaaaaaaaaaaaaa

SEQ ID NO: 26204 - RNA, 1689 nt, Artificial Sequence
  mRNA product Design i-3 (hSL-A100) comprising derived and/or modified sequence from LASV(G1442-SLE-2011;Clade IV)__AIT17180__GPCmut3 (opt5)
aggagaaagcuuaccaugggccagaucgugaccuucuuucaagaggucccccacguuauugaagaggugaugaacaucgugcugauugcccucagcauccuggcuguccuuaaggggcuguacaauguggccacaugcggacucauuggccugguuacguuccuucugcucugugggagauccugcaccacaacccuguauaaaggaguguacgaacugcagacacucgagcugaacauggaaacccuuaauaugacaaugccucugucuuguaccaagaacaauagccaucacuauauccgggucggcaacgagacggggcucgagcugacccuuacaaauaccuccaucauuaaccauaaauuuugcaaucugucugacgcgcacaagaaaaaccucuacgaucaugcucugaugagcaucauuuccacauuccaccugucuaucccgaauuuuaaccaguaugaagccaugagcugugacuucaauggaggcaagauuuccgugcaguacaaccucagccacucuuaugccggcgaugcugccaaucauugcgggaccguugcuaacggagugcugcaaacguuuaugcgcauggccuggggcggguccuacaucgcgcuugacagcggaagaggcaacugggauuguauuaugacaucuuaccaguaucugaucauccagaauaccacaugggacgaucacugccaguucucccggcccagcccuauuggguaccucggacugcuuucucaacgcaccagagacgucuauaucucccggcgcagacggggcaccuuuacauggacgcugagcgauuccgagggcaaggacacccccgggggauacugucucacacgcuggaugcugauugaagccgagcugaaaugcuucggcaacaccgcuguggccaaguguaaugagaaacaugaugaagaguuuugcgacaugcucagacuguucgauuuuaacaagcaggcuauccagcggcuuaaagccccugcgcagaugucuauucaacugaucaauaaggccgugaacgcucucaucaaugaccagcugauuaugaagaaccaccuucgcgacaucauggggauucccuauugcaauuacagcaaauauuguuaccugaacaauacagccaccggaaagacgucccucccuaaaugcugucugaucagcaacggcucuuaccugaaugaaacacacuucuccgaugacauugagcaggaagcugauaacaugaucaccgagaugcuccaaaaggaguauauggaaagacaggggaaaaccccgcugggacuugucgaccuguucguuuuuagcacaucuuucuaccucaucagcauuuuucugcaucuggugaagauccccacccaccggcauauugugggcaaauccugcccuaagccccaccgccuuaaucauaugggcaucuguucuugcgggcucuauaagcagccuggaguccccgugagauggaaacggugaggacuaguuauaagacugacuagcccgaugggccucccaacgggcccuccuccccuccuugcaccgagauuaaucaaaggcucuuuucagagccaccaaaaaaaaaaaaaaaaaaaaaaaaaaaaaaaaaaaaaaaaaaaaaaaaaaaaaaaaaaaaaaaaaaaaaaaaaaaaaaaaaaaaaaaaaaaaaaaaaaaaa

SEQ ID NO: 26205 - RNA, 1689 nt, Artificial Sequence
  mRNA product Design i-3 (hSL-A100) comprising derived and/or modified sequence from LASV(G3010-SLE-2013;Clade IV)__AIT17344__GPCmut3 (opt5)
aggagaaagcuuaccaugggccagaucgugaccuucuuucaagaggucccccacguuauugaagaggugaugaacaucgugcugauugcccucagcauccuggcuguccuuaaggggcuguacaauuucgccacaugcggacucgugggccugguuacguuucuucugcucugugggagauccugcaccacaucucuguauaaaggaguguacgaacugcagacccucgagcugaacauggaaacacuuaauaugaccaugccucugagcuguacaaagaacaauucccaucacuauauuauggucggcaacgagaccgggcucgagcugacgcuuaccaauacaucuaucaucaaccauaaauucugcaaucugagcgacgcgcacaagaaaaaccucuacaaucaugcucugauguccauuaucucuaccuuucaccugagcauuccgaacuucaaucaguaugaagccauguccugugauuuuaacggaggcaagaucagcgugcaguacaaucucucucacuccuaugccggcgacgcugccagccauugcgggacaguugcuaacggagugcugcaaaccuucaugcggauggccuggggcgggucuuacauugcgcuugauuccggauacggcaagugggacuguaucaugacgagcuaucaguaccugauuauccagaacacaaccugggaggaucacugccaguuuucucgccccuccccuaucggguaucucggacugcuuagccaaagaacacgggacauuuacaucucccgcagacggcgcggcaccuucaccuggacacugucugauagcgaaggcaaagacacgcccgggggauauugucucaccagauggaugcugauugaggccgagcugaagugcuuuggcaauacagcugucgccaaauguaacgaaaagcaugaugaggaguucugcgacaugcuccggcuguuugauuucaauaaacaggcuauccagcgccuuaagaccccugcccagauguccauucaacugaucaacaaggcggugaaugcccucaucaacgaccagcugauuaugaaaaaucaccuuagagauaucauggggauucccuacugcaacuauagcaaguacuguuaccugaaucacacaaccacgggaaaaacaucucucccuaagugcugucugguguccaacggcagcuaucugaaugaaacccauuucucugacgacaucgaacagcaagcugauaacaugauuaccgagaugcuccagaaagaguacauggaacggcaggggaagacaccgcugggacuugucgaccuguuuguuuucagcaccuccuuuuaucucaucucuaucuuccugcaccuggugaaaauucccacacaucgccacaucgugggcaagagcugcccuaagccccauagacuuaaucacaugggcauuuguuccugcgggcucuacaaacagccuggaguccccgugcgguggaagcgcugaggacuaguuauaagacugacuagcccgaugggccucccaacgggcccuccuccccuccuugcaccgagauuaaucaaaggcucuuuucagagccaccaaaaaaaaaaaaaaaaaaaaaaaaaaaaaaaaaaaaaaaaaaaaaaaaaaaaaaaaaaaaaaaaaaaaaaaaaaaaaaaaaaaaaaaaaaaaaaaaaaaaa

SEQ ID NO: 26206 - RNA, 1689 nt, Artificial Sequence
  mRNA product Design i-3 (hSL-A100) comprising derived and/or modified sequence from LASV(G502-SLE-2009;Clade IV)__AIT17126__GPCmut3 (opt5)
aggagaaagcuuaccaugggccagaucgugaccuucuuucaagaggucccccacguuauugaagaggugaugaacaucgugcugauugcccucagcauccuggcuguccuuaaggggcuguacaauuucgccacaugcggacucgugggccugcuuacguuucugcuccugugugggagauccugcaccacaggacuguauaaaggcguuuacgaacuccagacccuggagcuuaacauggaaacacugaauaugaccaugccucucucuuguacaaagaacaauagccaucacuauauuaugguggggaacgagaccggacuggagcuuacgcugaccaauacauccaucaucaaccauaaauucugcaaucucucugacgcgcacaagaaaaaccuguacgaucaugcucugaugagcauuaucuccaccuuucaccucucuauuccgaauuucaaccaguaugaagccaugagcugugacuuuaauggcggcaagaucuccguccaguacaaccugagccacucuuaugccggggaugcugccgaccauugcggaacaguggcuaauggcguucuucaaaccuucaugcggauggccuggggaggguccuacauugcgcuggauagcggccgcgggagaugggacuguaucaugacgucuuaccaguaucucauuauccagaacacaaccugggaggaucacugccaguuuucccggcccagcccuaucggauaccugggccuucugucucaacgcacaagagacauuuauaucucccggcgcagacggggcaccuucaccuggacacucagcgauuccgaagggaaggacacgcccggaggcuacugucugacccgcuggaugcugauugaggccgagcucaaaugcuuugggaacacagcuguggccaaguguaaugaaaaacaugaugaggaguucugcgacaugcugagacuuuuugauuucaacaagcaggcuauccagcggcugaaagccccugcgcagaugucuauucaacucaucaauaaggccgucaacgcucugaucaaugaccagcuugugaugaagaaccaucugcgcgacauuaugggaauccccuauugcaauuacagcagauauuguuaccucaaccacaccacaaccggccggacgucccugccuaaaugcugucuggugagcaaugggucuuaccucaacgaaacacacuucuccgaugacauugaacagcaagccgauaauaugaucaccgagaugcugcagaaggaguauauggaacgccagggaaaaaccccgcuuggccuggucgaccucuuuguuuucagcacaucuuuuuaccugauuagcaucuuccugcaccuugugaagauccccacccauagacacauugugggcaaauccugcccuaagccccaucggcucaaccacauggggaucuguucuugcggacuguauaaacagccuggcguccccgugaaguggaagagaugaggacuaguuauaagacugacuagcccgaugggccucccaacgggcccuccuccccuccuugcaccgagauuaaucaaaggcucuuuucagagccaccaaaaaaaaaaaaaaaaaaaaaaaaaaaaaaaaaaaaaaaaaaaaaaaaaaaaaaaaaaaaaaaaaaaaaaaaaaaaaaaaaaaaaaaaaaaaaaaaaaaaa

SEQ ID NO: 26207 - RNA, 1689 nt, Artificial Sequence
  mRNA product Design i-3 (hSL-A100) comprising derived and/or modified sequence from LASV(G733-SLE-2010;Clade IV)__AIT17154__GPCmut3 (opt5)
aggagaaagcuuaccaugggccagaucgugaccuucuuucaagaggucccccacguuauugaagaggugaugaacaucgugcugauugcccucagcauccuggcuguccuuaaggggcuguacaauuucgccacaugcggaauugugggccucguuuccuuucugcuucugugugggagaucuugcacgaccagccucuauaaaggaguguacgaacugcagacacuggagcucaacauggaaacccugaauaugacaaugccucuuuccuguaccaagaacaauucucaucacuauaucauggucggcaacgagacagggcuggagcucacccugacgaauaccagcaucauuaaccauaaauucugcaaucuuuccgacgcgcacaagaaaaaccuguacgaucaugcucucaugucuaucauuagcacauuucaccuguccaucccgaauuucaaccaguaugaagccaugagcugugacuuuaauggaggcaagauuucugugcaguacaaccugucccacagcuaugccggcgaugcugccaaucauugcgggaccaucgcuaacggaguucuccaaacauucaugcggauggccuggggcgggucuuacauugcgcuggacuccggacgcgauagaugggacuguaucaugaccagcuaccaguaucuuaucauucagaacacgacaugggaggaucacugccaguuuucucggcccuccccuaucggcuaccuggggcuccugagccaacgcaccagagacauuuauaucucccggcgcagacggggaacauucaccuggacccuuucugauagcgaaggcaaggacacacccggcggguacugucugacgcgcuggaugcucauugaggccgagcugaaaugcuuuggaaauaccgcuguggccaaguguaacgaaaaacaugaugaggaguucugcgacaugcugagacucuuugauuucaauaagcaggcuauccagcggcugaaagccccugcgcagauguccauccaacuuauuaacaaggccgucaaugcucugaucaacgaccagcucauuaugaagaaucaucugcgcgacaucaugggcauucccuauugcaacuacagcaaauauuguuaccuuaaucacacaaccacagggaagaccucucugccuaaaugcugucucguguccaacggaagcuaccugaaugaaacgcacuucucugaugacaucgaacagcaagccgauaacaugaucacagagaugcugcagaaggaguauauggaaagacagggcaaaaccccgcucgggcugguggaccuuuuugucuucagcaccuccuuuuaccugauuucuaucuuccuccaccugguuaagauucccacacaucggcacguggugggaaaaagcugcccuaagccccaucgccugaaucacaugggcaucuguuccugcggccuuuaugggcagccuggaguccccgugaaguggaaaagaugaggacuaguuauaagacugacuagcccgaugggccucccaacgggcccuccuccccuccuugcaccgagauuaaucaaaggcucuuuucagagccaccaaaaaaaaaaaaaaaaaaaaaaaaaaaaaaaaaaaaaaaaaaaaaaaaaaaaaaaaaaaaaaaaaaaaaaaaaaaaaaaaaaaaaaaaaaaaaaaaaaaaa

SEQ ID NO: 26208 - RNA, 1689 nt, Artificial Sequence
  mRNA product Design i-3 (hSL-A100) comprising derived and/or modified sequence from MOPV/LASV reassortant(IGS-1;Clade IV)__AFY05576__GPCmut3 (opt5)
aggagaaagcuuaccaugggccagaucgugaccuucuuucaagaggucccccacguuauugaagaggugaugaacaucgugcugauugcccucagcguccuggcugugcuuaaggggcuguacaauuucgccacaugcggacucguuggccuggugacguuucuucugcucugugggagauccugcaccacaucucuguauaaaggagucuacgaacugcagacccucgagcugaacauggaaacacuuaauaugaccaugccucugagcuguacaaagaacaauucccaucacuauaucauggugggcaacgagaccgggcucgagcugacgcuuaccaauacaucuauuaucaaccauaaauucugcaaucugagcgacgcgcacaagaaaaaccucuacgaucaugcucugauguccaucauuucuaccuuucaccugagcaucccgaauuucaaccaguaugaagccauguccugugacuuuaauggaggcaagauuagcguucaguacaaccucucucacuccuaugccggcgaugcugccaaucauugcgggacaguggcuaacggaguccugcaaaccuucaugcggauggccuggggcgggagcuacaucgcgcuugacucuggacgcggcaacugggauuguauuaugacguccuaccaguaucugaucauucagaauacaaccugggaggaccacugccaguuuagcagacccucuccuaucggguaccucggacugcuuucccaacggacacgcgauaucuauauuagcagacggcgcagaggcaccuucaccuggacacuguccgacucugaaggcgaggauacgcccgggggauacugucucacccgguggaugcugaucgaggccgaacugaagugcuuuggcaacacagcuguggccaaauguaaugagaagcaugacgaagaguucugcgauaugcuccgccuguuugacuucaacaaacaggcuauucagagacuuaaggccccugcgcagaugagcauccaacugauuaauaaagccgugaacgcucucaucaaugaucagcugaucaugaagaaccaccuucgggacauuauggggauccccuauugcaauuacuccaaguauuguuaccugaaccacaccacaaccggacgcacgagccucccuaaaugcugucuggucucuaauggcuccuaccugaacgaaacacauuucagcgacgauauugagcagcaagccgacaauaugaucaccgagaugcuccagaaggaauauauggagagacaggggaaaaccccgcugggacuuguugaucuguuuguguucucuaccagcuuuuaccucauuuccaucuuccugcaccuggugaagauccccacacaucggcacauugucggcaaaucuugcccuaagccccaucgccuuaaccacaugggcaucuguagcugcgggcucuauaaacagccuggagugcccguuaaguggaagagaugaggacuaguuauaagacugacuagcccgaugggccucccaacgggcccuccuccccuccuugcaccgagauuaaucaaaggcucuuuucagagccaccaaaaaaaaaaaaaaaaaaaaaaaaaaaaaaaaaaaaaaaaaaaaaaaaaaaaaaaaaaaaaaaaaaaaaaaaaaaaaaaaaaaaaaaaaaaaaaaaaaaaa

SEQ ID NO: 26209 - RNA, 1689 nt, Artificial Sequence
  mRNA product Design i-3 (hSL-A100) comprising derived and/or modified sequence from LASV(LM765-SLE-2012;Clade IV)__AIT17814__GPCmut3 (opt5)
aggagaaagcuuaccaugggccagaucgugaccuucuuucaagaggucccccacguuauugaagaggugaugaacaucgugcugauugcccucagcauccuggcuguccuuaaggggcuguacaauuucgccacaugcggacucgugggccugguuacguuucuucugcucugugggagauccugcaccacaucucuguauaaaggaguguacgaacugcagacccucgagcugaacauggaaacacuuaauaugaccaugccucugagcuguacaaagaacaauucccaucacuauauuauggucggcaacgagaccgggcucgagcugacgcuuaccaauacaucuaucaucgaccauaaauucugcaaccugagcgaugcgcaccggaagaaucucuacgaccaugcucugauguccauuaucucuaccuuucaccugagcauuccgaacuucaaucaguaugaagccauguccugugauuuuaacggaggcaaaaucagcgugcaguacaaucucucucacuccuaugccaaggacgcugccgaucauugcggcacaguugcuaacggggugcugcaaaccuucaugcgcauggccuggggaggcagcuacauugcgcuugacucugggagaggacggugggauuguaucaugacguccuaccaguaucugauuauccagaauacaaccugggaggaccacugccaguuuagccgccccucuccuaucggcuaccucgggcugcuuucccaaagaacacgggauauuuauaucagccgcagacggcgcggaaccuucaccuggacacuguccgacucugaaggcaaggauacgcccggcggguacugucucaccagauggaugcugauugaggccgagcugaaaugcuuuggaaacacagcugucgccaaguguaacgaaaaacaugacgaggaguucugcgauaugcuccggcuguuugacuucaauaagcaggcuauccagcgccuuaaagccccugcgcagaugagcauucaacugaucaacaaggccgugaaugcucucaucaacgaccagcugauuaugaagaaucaccuuagagauaucaugggcauucccuauugcaacuacuccaaauauuguuaccugaaucacaccacaaccgggaagacgagccucccuaaaugcugucuggugucuaacggauccuaccugaaugaaacacauuucagcgacgauaucgaacagcaagccgacaacaugauuaccgagaugcuccagaaggaguauauggaacggcagggcaaaaccccgcuggggcuugucgaucuguuuguuuucucuaccagcuuuuaccucaucuccaucuuccugcaccuggugaagauucccacacaucgccacaucgugggaaaaccuugccccaagccucauagacuuaaucacaugggcauuuguucuugcggccucuauaagcagcccggggucccggugaaauggaagcggugaggacuaguuauaagacugacuagcccgaugggccucccaacgggcccuccuccccuccuugcaccgagauuaaucaaaggcucuuuucagagccaccaaaaaaaaaaaaaaaaaaaaaaaaaaaaaaaaaaaaaaaaaaaaaaaaaaaaaaaaaaaaaaaaaaaaaaaaaaaaaaaaaaaaaaaaaaaaaaaaaaaaa

SEQ ID NO: 26210 - RNA, 1689 nt, Artificial Sequence
  mRNA product Design i-3 (hSL-A100) comprising derived and/or modified sequence from LASV(LM776-SLE-2012;Clade IV)__AIT17824__GPCmut3 (opt5)
aggagaaagcuuaccaugggccagaucgugaccuucuuucaagaggucccccacguuauugaagaggugaugaacaucgugcugauugcccucagcauccuggcuguccuuaaggggcuguacaauuucgccacaugcggacucgugggccugguuacguuucuucugcucugugggagauccugcaccacaucuguguauaaaggagucuacgaacugcagacccuggagcucaacauggaaacacugaauaugaccaugccucuuagcuguacaaagaacaauucccaucacuauauuauggugggcaacgagaccgggcuggagcucacgcugaccaauacaucuaucaucaaccauaaauucugcaaucuuagcgacgcgcacaagaaaaaccuguacgaucaugcucucauguccauuaucucuaccuuucaccugagcauuccgaauuucaaccaguaugaagccauguccugugacuuuaauggaggcaagaucagcguucaguacaaccugucucacuccuaugccggcgaugcugccaaucauugcgggacaguggcuaacggaguccuccaaaccuucaugcggauggccuggggcgggagcuacauugcgcuggacucuggacacggcaagugggauuguaucaugacguccuaccaguaucuuauuauccagaacacaaccugggaggaccauugccaguuuagccgccccucuccuaucggguaccugggacuccugucccaaagaacacgggauauuuauaucagccgcagacggcgcggcaccuucaccuggacacuuuccgacucugaaggcaaagauacgcccgggggauacugucugaccagauggaugcucauugaggccgagcugaagugcuuuggcaauacagcuguggccaaauguaacgaaaagcacgacgaggaguucugcgauaugcugcggcucuuugacuucaauaaacaggcuauccagcgccugaaggccccugcgcagaugagcauucaacuuaucaacaaggccgugaaugcucugaucaacgaucagcucauuaugaaaaaucaccugagagacaucauggggauucccuauugcaacuacuccaaguauuguuaccuuaaucauaccacaaccggaaaaacgagccugccuaagugcugucucgucucuaacggcuccuaccugaaugaaacacacuucagcgacgauaucgaacagcaagccgacaacaugauuaccgagaugcugcagaaagaguauauggaacggcaggggaagaccccgcucggacugguugaucuuuuuguguucucuaccagcuuuuaccugaucuccaucuuccuccaucuggugaaaauucccacacaccgccauaucgucggcaagucuugcccuaagccccacagacugaaucacaugggcauuuguagcugcgggcuuuauaaacagccuggagugcccguucgguggaagcgcugaggacuaguuauaagacugacuagcccgaugggccucccaacgggcccuccuccccuccuugcaccgagauuaaucaaaggcucuuuucagagccaccaaaaaaaaaaaaaaaaaaaaaaaaaaaaaaaaaaaaaaaaaaaaaaaaaaaaaaaaaaaaaaaaaaaaaaaaaaaaaaaaaaaaaaaaaaaaaaaaaaaaa

SEQ ID NO: 26211 - RNA, 1689 nt, Artificial Sequence
  mRNA product Design i-3 (hSL-A100) comprising derived and/or modified sequence from LASV(Mad39;Clade IV)__ANH09722__GPCmut3 (opt5)
aggagaaagcuuaccaugggccagaucgugaccuucuuucaagaggucccccacguuauugaagaggugaugaacaucgugcugauugcccucagcauccuggcuguccuuaaggggcuguacaauguggccacaugcggacucauuggccugguuacguuccuucugcucugugggagauccugcaccacaacccuguauaaaggaguguacgaacugcaggcgcucgagcugaacauggaaacacuuaauaugaccaugccucugucuuguacaaagaacaauagccaucacuauauccgggucggcaacgagaccgggcucgagcugacgcuuaccaauacaucccugaucaaccauaaauuuugcaaucucucugacgcucacaagaaaaaccuguacgaucaugcccugaugagcauuaucuccaccuuccaccucucuauuccgaauuuuaaccaguaugaagccaugagcugugacuucaaugauggaaagaucuccgugcaguacaaccugagccacacauaugcuggcgacaccgccaaucauugcggcacgguugcuaacggggugcuucaaacauuuaugcgcauggccuggggaggcucuuacauugcgcuggauuccgggagaggaggcugggacuguaucaugaccagcuaccaguaucucauuauccagaacacaaccugggaggaucacugccaguucucucggcccuccccuaucggguaccugggacuucugagccaacgcaccagagacauuuauaucucucggcgcagacggggcacauuuacguggacccucuccgauagcgaaggcaaggacacacccgggggauacugucugacccgcuggaugcugauugaggccgagcucaaaugcuucggcaauacagcugucgccaaguguaacgaaaaacaugaugaggaauuuugcgacaugcugagacuuuucgauuuuaauaagcaggcuauccagcggcugaaagccccugcgcagauguccauucaacucaucaacaaggccgugaaugcucugaucaacgaccagcuuauuaugaagaaucaucugcgcgacaucauggggauucccuauugcaacuacucuaaauauuguuaccucaaucacaccgugacgggaaagacaagccugccuaaaugcugucuggucuccaacggcagcuaccucaaugagacccacuucucugaugacaucgaacagcaagccgauaacaugauuaccgagaugcugcagaaggaguauauggaaagacaggggaaaacaccgcuuggacugguugaccucuucguguuuuccaccagcuucuaccugaucucuaucuuucugcaccuugugaagauucccacacaucggcacgucgugggcaaaccuugccccaagccucaucgccucaaucacaugggcaucuguagcugcggguucuauaagcagcccggaguuccggugagauggaaacggugaggacuaguuauaagacugacuagcccgaugggccucccaacgggcccuccuccccuccuugcaccgagauuaaucaaaggcucuuuucagagccaccaaaaaaaaaaaaaaaaaaaaaaaaaaaaaaaaaaaaaaaaaaaaaaaaaaaaaaaaaaaaaaaaaaaaaaaaaaaaaaaaaaaaaaaaaaaaaaaaaaaaa

SEQ ID NO: 26212 - RNA, 1689 nt, Artificial Sequence
  mRNA product Design i-3 (hSL-A100) comprising derived and/or modified sequence from LASV(Z0947-SLE-2011;Clade IV)__AIT17840__GPCmut3 (opt5)
aggagaaagcuuaccaugggccagaucgugaccuucuuucaagaggucccccacguuauugaagaggugaugaacaucgugcugauugcccucagcauccuggcuguccuuaaggggcuguacaauuucgccacaugcggacucgugggccugguuacguuucuucugcucugugggagauccugcaccauuucucuguauaaaggaguguacgaacugcagacacucgagcugaacauggaaacccuuaauaugacaaugccucugagcuguaccaagaacaauucccaucacuauaucauggucggcaacgagacagggcucgagcugacccuuacgaauaccucuaucauuaaccauaaauucugcaaucugagcgacgcgcacaagaaaaaccucuacgaucaugcucugauguccaucauuucuacauuucaccugagcaucccgaauuucaaccaguaugaagccauguccugugacuuuaauggaggcaagauuagcgugcaguacaaccucucucacuccuaugccggcgaugcugccaaucauugcgggaccguugcuaacggagugcugcaaacauucaugcggauggccuggggcgggagcuacaucgcgcuugacucuggacgcgauagaugggacuguauuaugaccuccuaccaguaucugaucauccagaacacgacaugggaggaucacugccaguuuagccggcccucuccuauuggcuaccucgggcugcuuucccaacgcaccagagacaucuauauuagccggcgcagacggggaacauucaccuggacccuguccgauucugaaggcaaggacacacccggcggguacugucucacgcgcuggaugcugaucgaggccgagcugaaaugcuuuggaaauaccgcugucgccaaguguaacgaaaaacaugaugaggaguucugcgacaugcucagacuguuugauuucaauaagcaggcuauucagcggcuuaaagccccugcgcagaugagcauccaacugaucaacaaggccgugaaugcucucauuaacgaccagcugaucaugaagaaucaccuucgcgacauuaugggcauccccuauugcaacuacuccaaauauuguuaccugaaucacacaaccacagggaagaccagccucccuaaaugcugucuggugucuaacggauccuaccugaaugaaacgcauuucagcgaugacauugaacagcaagccgauaacaugaucacagagaugcuccagaaggaguauauggaaagacagggcaaaaccccgcuggggcuugucgaccuguuuguuuucucuaccagcuuuuaccucaucuccauuuuccugcaccuggugaagauccccacacaucggcacauugugggaaaaccuugccccaagccucaucgccuuaaucacaugggcaucuguucuugcggccucuauaagcagcccggggucccggugaaauggaagagaugaggacuaguuauaagacugacuagcccgaugggccucccaacgggcccuccuccccuccuugcaccgagauuaaucaaaggcucuuuucagagccaccaaaaaaaaaaaaaaaaaaaaaaaaaaaaaaaaaaaaaaaaaaaaaaaaaaaaaaaaaaaaaaaaaaaaaaaaaaaaaaaaaaaaaaaaaaaaaaaaaaaaa

SEQ ID NO: 26213 - RNA, 1665 nt, Artificial Sequence
  mRNA product Design i-3 (A100) comprising derived and/or modified sequence from LASV(Josiah;Clade IV)__NP_694870__GPCmut3 (opt1)
aggagaaagcuuaccaugggccagaucgugaccuucuuccaggaggucccccacgugaucgaggaggugaugaacaucguccugaucgcccucagcgugcuggccgugcugaaggggcucuacaacuucgcgaccugcggccuggucgggcuggugacguuccuccugcugugcggccgcuccugcaccaccagccucuacaaggggguguacgagcugcagacccuggagcucaacauggagacgcugaacaugaccaugccgcuguccugcaccaagaacaacagccaccacuacaucauggucggcaacgagaccggccucgagcugacgcugaccaacaccuccaucaucaaccacaaguucugcaaccucagcgacgcccacaagaagaaccuguacgaccacgcccugauguccaucaucagcaccuuccaccucuccauccccaacuucaaccaguacgaggccaugagcugcgacuucaacgggggcaagaucuccgugcaguacaaccugagccacuccuacgccggggacgcggccaaccacugcggcacgguggccaacgggguccugcagaccuucaugcggauggccuggggcggcagcuacaucgcgcucgacuccgggcgcggcaacugggacugcaucaugaccagcuaccaguaccugaucauccagaacaccacgugggaggaccacugccaguucucccggcccagccccaucggguaccugggccuccugucccagcgcacccgggacaucuacaucagccgccggcgccggggcaccuucaccuggacgcugagcgacuccgaggggaaggacaccccgggcggguacugccugacccgcuggaugcucaucgaggccgagcugaagugcuucggcaacaccgccguggccaagugcaacgagaagcacgacgaggaguucugcgacaugcugcggcuguucgacuucaacaagcaggccauccagcgccugaaggcgcccgcccagaugagcauccagcugaucaacaaggccgugaacgcccucaucaacgaccagcugaucaugaagaaccaccuccgggacaucauggggauccccuacugcaacuacuccaaguacugcuaccucaaccacacgaccaccggccgcaccagccugcccaagugcugccuggucuccaacggcagcuaccucaacgagacgcacuucuccgacgacaucgagcagcaggccgacaacaugaucaccgagaugcugcagaaggaguacauggagcggcaggggaagacgccccugggccucguggaccuguucguguucagcaccuccuucuaccugaucagcaucuuccugcaccucgucaagaucccgacccaccgccacaucguggggaaguccugccccaagccccaccggcugaaccacaugggcaucugcagcugcgggcuguacaagcagcccggcgugccggucaaguggaagcgcugaggacuaguuauaagacugacuagcccgaugggccucccaacgggcccuccuccccuccuugcaccgagauuaauaaaaaaaaaaaaaaaaaaaaaaaaaaaaaaaaaaaaaaaaaaaaaaaaaaaaaaaaaaaaaaaaaaaaaaaaaaaaaaaaaaaaaaaaaaaaaaaaaaaa

SEQ ID NO: 26214 - RNA, 1662 nt, Artificial Sequence
  mRNA product Design i-3 (A100) comprising derived and/or modified sequence from LASV(LP;Clade I)__AAF86701__GPCmut3 (opt1)
aggagaaagcuuaccaugggccagaucaucaccuucuuccaggaggugccccacgucaucgaggaggugaugaacaucgugcugaucgcccucagccugcuggccauccucaaggggcuguacaacaucgcgaccugcggcaucaucgggcuggucgccuuccucuuccugugcggcaaguccugcagccugacgcucaagggcggguacgagcugcagacccuggagcucaacauggagacccugaacaugaccaugccgcuguccugcacgaagaacagcucccaccacuacauccgcgugggcaacgagaccgggcucgagcugacccugaccaacacgagcaucaucaaccacaaguucugcaaccucuccgacgcccacaagaagaaccuguacgaccacgcccugaugagcaucaucuccaccuuccaccucagcauccccaacuucaaccaguacgaggccauguccugcgacuucaacggcgggaagaucagcgugcaguacaaccugucccacagcuacgcgggcgacgccgccgagcacugcgggaccgucgccaacggcgugcugcagaccuucaugcggauggcguggggcgggcgcuacaucgcccucgacuccggcaaggggaacugggacugcaucaugacgagcuaccaguaccugaucauccagaacaccaccugggaggaccacugccaguucucccggcccagccccaucggcuaccugggccuccugucccagcgcacccgggacaucuacaucagccgccggcgccgggggacguucaccuggacccugagcgacuccgagggcaacgagacccccgggggcuacugccugacgcgcuggaugcucaucgaggccgagcugaagugcuucgggaacaccgccguggccaagugcaacgagaagcacgacgaggaguucugcgacaugcugcggcuguucgacuucaacaagcaggcgauccgccggcugaaggcccccgcccagaugagcauccagcugaucaacaaggccgucaacgcccucaucaacgaccagcugaucaugaagaaccaccuccgcgacaucaugggcauccccuacugcaacuacuccaaguacugcuaccucaaccacaccagcuccggccggaccagccugcccaagugcugccugaucuccaacgggagcuaccucaacgagacgcaguucuccgacgacaucgagcagcaggcggacaacaugaucaccgagaugcugcagaaggaguacaucgagcgccagggcaagaccccgcuggggcucguggacaucuucaucuucagcaccuccuucuaccugaucagcaucuuccugcaccugaucaagaucccgacgcaccggcacaucgugggcaagcccugccccaagccccaccgccucaaccacaugggggucugcuccugcggccuguacaagcacccgggcgugcccaccaaguggaagcggugaggacuaguuauaagacugacuagcccgaugggccucccaacgggcccuccuccccuccuugcaccgagauuaauaaaaaaaaaaaaaaaaaaaaaaaaaaaaaaaaaaaaaaaaaaaaaaaaaaaaaaaaaaaaaaaaaaaaaaaaaaaaaaaaaaaaaaaaaaaaaaaaaaaa

SEQ ID NO: 26215 - RNA, 1662 nt, Artificial Sequence
  mRNA product Design i-3 (A100) comprising derived and/or modified sequence from LASV(803213;Clade II)__AAF86703__GPCmut3 (opt1)
aggagaaagcuuaccaugggccagaucaucaccuucuuccaggaggugccccacgucaucgaggaggugaugaacaucgugcugaucgcccucagccugcuggccauccucaaggggaucuacaacgucgcgaccugcggccuguucgggcugaucuccuuccuccugcugugcggccgcagcugcuccgugacguacaaggggguguacgagcuccagacccuggagcugaacauggccaaccucaacaugaccaugccgcugagcugcaccaagaacaacucccaccacuacaucauggucggcaacgagacgggccuggagcucacccugaccaacaccagcaucaucaaccacaaguucugcaaccuguccgacgcccacaagaagaaccucuacgaccacgcccugaugagcaucaucuccacguuccaccugagcauccccaacuucaaccaguacgaggccauguccugcgacuucaacgggggcaagaucagcgugcaguacaaccucucccacagcuucgcgguggacgccgccaaccacugcgggaccaucgccaacggcguccugcagaccuucaugcggauggcguggggcggguccuacaucgcccuggacagcggcaaggggaacugggacugcaucaugaccuccuaccaguaccucaucauccagaacacgaccugggaggaccacugccaguucagccgccccucccccaucggcuaccuggggcugcucagccagcggacccgcgacaucuacaucagccggcgccgccggggcaccuucacguggacccucuccgacagcgagggcaacgaggcccccgggggcuacugccugacccgguggaugcugaucgaggccgagcucaagugcuucgggaacaccgccguggcgaagugcaacgagaagcacgacgaggaguucugcgacaugcugcgccuguucgacuucaacaagcaggccaucaagcggcucaagacgcccgcccagauguccauccagcugaucaacaaggccgugaacgcccugaucaacgaccagcucaucaugaagaaccaccuccgcgacaucaugggcauccccuacugcaacuacagccgguacugcuaccugaaccacaccgucaccgggaagaccucccugccccgcugcugccuggugagcaacggcuccuaccugaacgagacgcacuucagcgacgacaucgagcagcaggcggacaacaugaucaccgagaugcuccagaaggaguacauggaccggcagggcaagaccccgcuggggcugguggaccucuucgucuucuccaccagcuucuaccugaucuccaucuuccugcaccuggugaagaucccgacgcaccgccacaucgugggcaagcccugccccaagccccaccggcucaaccacauggggaucugcagcugcggccuguacaagcacccggggguccccgugaaguggaagcgcugaggacuaguuauaagacugacuagcccgaugggccucccaacgggcccuccuccccuccuugcaccgagauuaauaaaaaaaaaaaaaaaaaaaaaaaaaaaaaaaaaaaaaaaaaaaaaaaaaaaaaaaaaaaaaaaaaaaaaaaaaaaaaaaaaaaaaaaaaaaaaaaaaaaa

SEQ ID NO: 26216 - RNA, 1662 nt, Artificial Sequence
  mRNA product Design i-3 (A100) comprising derived and/or modified sequence from LASV(GA391;Clade III)__CAA36645__GPCmut3 (opt1)
aggagaaagcuuaccaugggccagaucgugaccuucuuccaggaggucccccacgugaucgaggaggugaugaacaucguccugaucgcccucagcauccuggccauccugaaggggcucuacaacguggcgaccugcggccugaucgggcuggugacguuccuccugcuguccggccgcagcugcucccucaucuacaaggggaccuacgagcugcagacccuggagcucaacauggagacccugaacaugacgaugccgcugagcugcaccaagaacaacucccaccacuacauccgggucggcaacgagaccggccucgagcugacccugacgaacaccagcauccucaaccacaaguucugcaaccuguccgacgcccacaagcgcaaccuguacgaccacagccucauguccaucaucagcaccuuccaccuguccauccccaacuucaaccaguacgaggccaugagcugcgacuucaacgggggcaagaucaccgugcaguacaaccugucccacagcuucgccguggacgccgcggggcacugcggcacgcucgccaacgggguccugcagaccuucaugcggauggccuggggcggcuccuacaucgcccuggacagcgggcgcggcaacugggacugcaucaugaccuccuaccaguaccucaucauccagaacaccacgugggacgaccacugccaguucagccggcccucccccaucggguaccugggccugcucagccagcgcacccgggacaucuacaucagccgccggcgccggggcaccuucaccuggacgcucuccgacagcgaggggaacgagaccccgggcggguacugccugacccgcuggaugcugaucgaggcggagcucaagugcuucggcaacaccgccguggccaagugcaacgagaagcacgacgaggaguucugcgacaugcugcggcuguucgacuucaacaagcaggccauccgccggcucaagacgcccgcccagauguccauccagcugaucaacaaggcggugaacgcccugaucaacgaccagcucaucaugaagaaccaccuccgcgacaucauggggauccccuacugcaacuacagccgguacugcuaccugaaccacaccuccaccggcaagaccagccugccccgcugcugccugaucuccaacggcagcuaccugaacgagacgaaguucuccgacgacaucgagcagcaggccgacaacaugaucaccgagaugcuccagaaggaguacaucgaccggcaggggaagacgccccugggccuggucgaccuguucguguucagcaccuccuucuaccucaucagcaucuuccugcaccuggugaagaucccgacccaccgccacaucgucgggaagcccugccccaagccccaccggcucaaccacaugggcaucugcuccugcgggcuguacaagcagccgggcgugcccgugcgcuggaagcggugaggacuaguuauaagacugacuagcccgaugggccucccaacgggcccuccuccccuccuugcaccgagauuaauaaaaaaaaaaaaaaaaaaaaaaaaaaaaaaaaaaaaaaaaaaaaaaaaaaaaaaaaaaaaaaaaaaaaaaaaaaaaaaaaaaaaaaaaaaaaaaaaaaaa

SEQ ID NO: 26217 - RNA, 1665 nt, Artificial Sequence
  mRNA product Design i-3 (A100) comprising derived and/or modified sequence from LASV(AV;Clade V)__CCA30314__GPCmut3 (opt1)
aggagaaagcuuaccaugggccagaucgugaccuucuuccaggaggucccccacgugaucgaggaggugaugaacaucguccugaucgcccucagcauccuggccgugcugaaggggcucuacaacaucgcgaccugcggccugaucgggcugaucacguuccuccugcugugcggccgcuccugcagcuccaaccucuacaaggggguguacgagcugcagagccuggaccucaacauggagacccugaacaugaccaugccgcuguccugcaccaagaacaacagccaccacuacauccgggucggcaacgacacgggccucgagcugacccugaccaacaccuccauccucaaccacaaguucugcaaccugagcgacgcccacaagaaggaccuguacgaccacgcccucauguccaucaucagcacguuccaccuguccauccccaacuucaaccaguacgaggccaugagcugcgacuucaacgggggcaagaucuccgugcaguacaaccugagccacuccuacgccaucgacgcggccaaccacugcgggaccguggccaacggcauccuccagaccuucaugcgcauggccuggggcgggagcuacaucgcgcuggacuccggccgggggaacugggacugcaucaugaccagcuaccaguaccugaucauccagaacacgaccugggagaaccacugccaguucucccgccccagccccaucggcuaccucgggcugcugagccagcggacccgcgacaucuacaucucccggcgccgccggggcaccuucacguggacccugagcgacuccgagggcaacgccacccccgggggcuacugccucacccgguggaugcugaucgaggccgagcugaagugcuucgggaacacggccgucgccaagugcaacgagaagcacgacgaggaguucugcgacaugcuccgccuguucgacuucaacaagcaggcgaucagccggcugaagucccccgcccagaugagcauccagcucaucaacaaggccgugaacgcccugaucaacgaccagcugaucaugaagaaccaccuccgcgacaucaugggcauccccuacugcaacuacuccaaguacugcuaccugaaccacaccaucaccgggaagaccagccugcccaagugcugccucguguccaacggcagcuaccugaacgagacgcacuucuccgacgacaucgagcagcaggccgacaacaugaucaccgagaugcugcagaaggaguacauggagcggcagggcaagaccccgcucgggcuggucgaccuguucguguucagcaccuccuucuaccugaucagcaucuuccuccgccuggugaagaucccgacgcaccggcacaucgucggcaagcccugccccaagccccaccgccugaaccacauggggaucugcuccugcggccucuacaagcagccgggggugcccgugcgguggaagcgcugaggacuaguuauaagacugacuagcccgaugggccucccaacgggcccuccuccccuccuugcaccgagauuaauaaaaaaaaaaaaaaaaaaaaaaaaaaaaaaaaaaaaaaaaaaaaaaaaaaaaaaaaaaaaaaaaaaaaaaaaaaaaaaaaaaaaaaaaaaaaaaaaaaaa

SEQ ID NO: 26218 - RNA, 1662 nt, Artificial Sequence
  mRNA product Design i-3 (A100) comprising derived and/or modified sequence from LASV(Togo/2016/7082;Clade VI)__AMR44577__GPCmut3 (opt1)
aggagaaagcuuaccaugggccagaucaucaccuucuuccaggaggugccccacgucaucgaggaggugaugaacaucgugcugaucgcccucagccugcuggccauccucaagggggucuacaacguggcgaccugcggcaucaucgggcuggugacguuccuguuccucugcggccgcuccugcagccugaucuacaagggguccuacgagcugcagacccucgagcugaacauggagacccugaacaugaccaugccgcucagcugcacgaagaacuccagccaccacuacauccgggucggcaacgagaccggccuggagcugacccucaccaacacguccaucaucaaccacaaguucugcaaccugagcgacgcccacaagcgcaaccuguacgaccacgcccucauguccauccugagcaccuuccaccuguccauccccaacuucaaccaguacgaggccaugagcugcgacuucaacgggggcaagaucuccgugcaguacaaccucagccacgccuacgcgguggacgccgccgagcacugcgggaccgucgccaacggcgugcugcagaccuucaugcggauggcguggggcggguccuacaucgcccuggacagcggccgcgggaacugggacugcaucaugacguccuaccaguaccucaucauccagaacaccaccugggaggaccacugccaguucagccggcccucccccaucggcuaccuggggcugcucagccagcgcacccgggacaucuacaucagccgccggcgccggggcacguucaccuggacccucuccgacagcgagggcaacgagacccccgggggcuacugccugacgcgcuggaugcugaucgaggccgagcucaagugcuucgggaacaccgccguggccaagugcaacgagaagcacgacgaggaguucugcgacaugcugcggcuguucgacuucaacaagcaggcgauccagcgccucaagucccccgcccagaugagcauccagcugaucaacaaggccgucaacgcccugaucaacgaccagcucaucaugaagaaccaccuccgggacaugaugggcauccccuacugcaacuacuccaaguacugcuaccugaaccacaccagcuccgggcgcaccagccugcccaagugcugccugguguccaacggcagcuaccugaacgagacgcacuucuccgacgacaucgagcagcaggccgacaacaugaucaccgagaugcuccagaaggaguacaucgaccggcagggcaagaccccgcuggggcugguggaccucuucgucuucagcaccuccuucuaccugaucagcaucuuccugcaccugaucaagaucccgacgcaccgccacaucgugggcaagcccugccccaagccccaccggcucaaccacauggggaucugcuccugcggccuguacaagcagccgggggugcccacccgcuggaagcggugaggacuaguuauaagacugacuagcccgaugggccucccaacgggcccuccuccccuccuugcaccgagauuaauaaaaaaaaaaaaaaaaaaaaaaaaaaaaaaaaaaaaaaaaaaaaaaaaaaaaaaaaaaaaaaaaaaaaaaaaaaaaaaaaaaaaaaaaaaaaaaaaaaaa

SEQ ID NO: 26219 - RNA, 1662 nt, Artificial Sequence
  mRNA product Design i-3 (A100) comprising derived and/or modified sequence from LASV(KAK-428;Clade n.d. (VII))__ANH09740__GPCmut3 (opt1)
aggagaaagcuuaccaugggccagaucgugaccuucuuccaggaggucccccacgugaucgaggaggugaugaacaucguccugaucgcccucagccugcuggccauccucaaggggcuguacaacuucgcgaccugcggcgugaucgggcugaucacguuccuccugcugugcggccgcuccugcagcgccaccuacaaggggcaguacgagcuccagacccuggagcugaacauggagucccucaacaugaccaugccgcugagcugcacgaagaacaacucccaccacuacauccgggccggcaacaacaccggccuggagcucacccugaccaacacgagcaucaucucccacaaguucugcaaccugagcgacgcccacaagaagaaccucuacgaccacacccugauguccaucaucaccaccuuccaccugagcauccccaacuucaaccaguacgaggccauguccugcgacuucaacgggggcaagaucagcauccaguacaaccucucccacagcuacgcgggggacgccgcccagcacugcggcacgguggccaacgggguccugcagaccuucaugcgcauggcguggggcggcuccuaccuggcccucgacagcgggcggcgcggcugggacugcaucaucuccagcuaccaguaccugaucauccagaacaccaccugggacgaccacugccaguucucccggcccagccccaucggguaccugggcuucgugagccagaagacgcgcgacaucuacaucucccggcgccgccggggcaccuucaccuggacccugagcgacuccgaggggcacgacaugccgggcggguacugccucacgcgguggaugcugaucgaggccgaccugaagugcuucggcaacaccgccguggccaagugcaacgagaagcacgacgaggaguucugcgacauguggcgccucuucgacuucaacaagcaggcgauccagcggcugaaggcccccgcccagaugaacauccagcugaucaacaaggccgucaacgcccucaucaacgaccagcugaugaugaagaaccaccuccgcgacaucauggggauccccuacugcaacuacagcaaguucugcuaccugaacaacaccaccacgggccggaccucccugccccgcugcugccugaucagcaacggcuccuaccucaacgagacccacuucagcgacgacaucgagcagcaggcggacaacaugaucaccgagaugcugcagaaggaguacauggaccggcaggggaagacgccccugggccucguggaccuguucguguucuccaccagcuucuaccugaucaccaucuuccuccaccuggucaagaucccgacccaccgccacaucguggggaagcccugccccaagccccaccggcugaaccacaugggcaucugcuccugcgggcuguacaagcagccgggcgugcccguccgcuggaagcggugaggacuaguuauaagacugacuagcccgaugggccucccaacgggcccuccuccccuccuugcaccgagauuaauaaaaaaaaaaaaaaaaaaaaaaaaaaaaaaaaaaaaaaaaaaaaaaaaaaaaaaaaaaaaaaaaaaaaaaaaaaaaaaaaaaaaaaaaaaaaaaaaaaaa

SEQ ID NO: 26220 - RNA, 1662 nt, Artificial Sequence; identical to SEQ ID NO: 26214
  mRNA product Design i-3 (A100) comprising derived and/or modified sequence from LASV(Pinneo-NIG-1969;Clade I)__AIT17836__GPCmut3 (opt1)

SEQ ID NO: 26221 - RNA, 1662 nt, Artificial Sequence
  mRNA product Design i-3 (A100) comprising derived and/or modified sequence from LASV(ISTH0009-NIG-2011;Clade II)__AIT17404__GPCmut3 (opt1)
aggagaaagcuuaccaugggccagaucaucaccuucuuccaggaggugccccacgucaucgaggaggugaugaacaucgugcugaucgcccucagccugcuggccauccucaaggggaucuacaacgucgcgaccugcggccuguucgggcugguguccuuccuccugcugugcggccgcagcugcuccacgaccuacaaggggguguacgagcuccagacccuggagcuggacauggccagccucaacaugaccaugccgcuguccugcacgaagaacaacagccaccacuacaucauggucggcaacgagaccggccuggagcucacccugaccaacacguccaucaucaaccacaaguucugcaaccugagcgacgcccacaagaagaaccucuacgaccacgcccugauguccaucaucagcaccuuccaccuguccauccccaacuucaaccaguacgaggccaugagcugcgacuucaacgggggcaagaucuccgugcaguacaaccucagccacgcguacgccguggacgccgccaaccacugcgggaccaucgcgaacggcguccugcagaccuucaugcggauggccuggggcggguccuacaucgcccuggacagcggcaagggguccugggacugcaucaugacgagcuaccaguaccucaucauccagaacaccaccugggaggaccacugccaguucucccgccccagccccaucggcuaccuggggcugcucagccagcggacccgcgacaucuacaucucccggcgccgccggggcacguucaccuggacccucagcgacuccgagggcaacgagacccccgggggcuacugccugacgcgguggaugcugaucgaggccgagcucaagugcuucgggaacaccgccguggcgaagugcaacgagaagcacgacgaggaguucugcgacaugcugcgccuguucgacuucaacaagcaggccauccggcgccucaagacccccgcccagaugagcauccagcugaucaacaaggccgugaacgcccugaucaacgaccagcucaucaugaagaaccaccuccgggacaucaugggcaucccguacugcaacuacuccaaguacugcuaccugaaccacaccgucacggggaagaccagccugccccgcugcugccugguguccaacggcagcuaccugaacgagacccacuucuccgacgacaucgagcagcaggcggacaacaugaucaccgagcuccugcagaaggaguacauggaccggcagggcaagacgccccuggggcucguggaccuguucgucuucagcaccuccuucuaccugaucagcaucuuccugcaccucaucaagaucccgacccaccgccacaucaccggcaagcccugccccaagccccaccggcugaaccacauggggaucugcuccugcggccuguacaagcacccgggggugcccgugaaguggaagcgcugaggacuaguuauaagacugacuagcccgaugggccucccaacgggcccuccuccccuccuugcaccgagauuaauaaaaaaaaaaaaaaaaaaaaaaaaaaaaaaaaaaaaaaaaaaaaaaaaaaaaaaaaaaaaaaaaaaaaaaaaaaaaaaaaaaaaaaaaaaaaaaaaaaaa

SEQ ID NO: 26222 - RNA, 1662 nt, Artificial Sequence
  mRNA product Design i-3 (A100) comprising derived and/or modified sequence from LASV(ISTH2010-NIG-2012;Clade II)__AIT17482__GPCmut3 (opt1)
aggagaaagcuuaccaugggccagaucaucaccuucuuccaggaggugccccacgucaucgaggaggugaugaacaucgugcugaucgcccucagccugcuggccauccucaaggggaucuacaacgucgcgaccugcggccuguucgggcugguguccuuccuccugcugugcggccgcagcugcuccacgaccuacaaggggguguacgagcuccagacccuggagcuggacauggccagccucaacaugaccaugccgcuguccugcacgaagaacaacagccaccacuacaucauggucggcaacgagaccggccuggagcucacccugaccaacacguccaucaucaaccacaaguucugcaaccugagcgacgcccacaagaagaaccucuacgaccacgcccugauguccaucaucagcaccuuccaccuguccauccccaacuucaaccaguacgaggccaugagcugcgacuucaacgggggcaagaucuccgugcaguacaaccucagccacgcguacgccguggacgccgccaaccacugcgggaccaucgcgaacggcguccugcagaccuucaugcggauggccuggggcggguccuacaucgcccuggacagcggcaagggguccugggacugcaucaugacgagcuaccaguaccucaucauccagaacaucaccugggaggaccacugccaguucucccgccccagccccaucggcuaccuggggcugcucagccagcggacccgcgacaucuacaucucccggcgccgccggggcaccuucacguggacccucagcgacuccgagggcaacgagacccccgggggcuacugccugacccgguggaugcugaucgaggccgagcucaagugcuucgggaacacggccguggcgaagugcaacgagaagcacgacgaggaguucugcgacaugcugcgccuguucgacuucaacaagcaggccauccggcgccucaagacccccgcccagaugagcauccagcugaucaacaaggccgugaacgcccugaucaacgaccagcucaucaugaagaaccaccuccgggacaucaugggcauccccuacugcaacuacuccaaguacugcuaccugaaccacaccgucaccgggaagacgagccugccccgcugcugccugguguccaacggcagcuaccugaacgagacccacuucuccgacgacaucgagcagcaggcggacaacaugaucaccgagcuccugcagaaggaguacaucgaccggcagggcaagaccccgcuggggcucguggaccuguucgucuucagcacguccuucuaccugaucagcaucuuccugcaccucgugaagaucccgacccaccgccacguggucggcaagcccugccccaagccccaccggcugaaccacauggggaucugcuccugcggccuguacaagcacccgggggugcccgugaaguggaagcgcugaggacuaguuauaagacugacuagcccgaugggccucccaacgggcccuccuccccuccuugcaccgagauuaauaaaaaaaaaaaaaaaaaaaaaaaaaaaaaaaaaaaaaaaaaaaaaaaaaaaaaaaaaaaaaaaaaaaaaaaaaaaaaaaaaaaaaaaaaaaaaaaaaaaa

SEQ ID NO: 26223 - RNA, 1662 nt, Artificial Sequence
  mRNA product Design i-3 (A100) comprising derived and/or modified sequence from LASV(Lassa virus/H.sapiens-wt/NGA/2015/ISTH_0543;Clade II)__AVO03639__GPCmut3 (opt1)
aggagaaagcuuaccaugggccagaucaucaccuucuuccaggaggugccccacgucaucgaggaggugaugaacaucgugcugaucgcccucagccugcuggccauccucaaggggaucuacaacgucgcgaccugcggccuguucgggcugguguccuuccuccugcugugcggccgcagcugcuccacgaccuacaaggggguguacgagcuccagacccuggagcuggacauggccaaccucaacaugaccaugccgcugagcugcacgaagaacaacucccaccacuacaucauggucggcaacgagaccggccuggagcucacccugaccaacacgagcaucaucaaccacaaguucugcaaccuguccgacgcccacaagaagaaccucuacgaccacgcccugaugagcaucaucuccaccuuccaccugagcauccccaacuucaaccaguacgaggccauguccugcgacuucaacgggggcaagaucagcgugcaguacaaccucucccacaccuacgcgguggacgccgccaaccacugcgggaccaucgccaacggcguccugcagacguucaugcggauggcguggggcgggagcuacaucgcccuggacuccggcaaggggagcugggacugcaucaugaccuccuaccaguaccucgugauccagaacaccaccugggaggaccacugccaguucagccgccccucccccaucggcuaccuggggcugcucagccagcggacgcgcgacaucuacaucagccggcgccgccggggcaccuucaccuggacccucuccgacagcgagggcaacgagacgcccgggggcuacugccugacccgguggaugcugaucgaggccgagcucaagugcuucgggaacaccgccguggccaagugcaacgagaagcacgacgaggaguucugcgacaugcugcgccuguucgacuucaacaagcaggcgauccggcgccucaagacccccgcccagauguccauccagcugaucaacaaggccgucaacgcccugaucaacgaccagcucaucaugaagaaccaccuccgggacaucaugggcauccccuacugcaacuacagcaaguacugcuaccugaaccacacggugaccgggaagaccucccugccccgcugcugccuggugagcaacggcuccuaccugaacgagacccacuucagcgacgacaucgagcagcaggccgacaacaugaucacggagcuccugcagaaggaguacaucgaccggcagggcaagaccccgcuggggcucgucgaccuguucguguucuccaccagcuucuaccugaucuccaucuuccugcaccucgugaagaucccgacccaccgccacaucacgggcaagcccugccccaagccccaccggcugaaccacauggggaucugcagcugcggccuguacaagcacccggggguccccgugaaguggaagcgcugaggacuaguuauaagacugacuagcccgaugggccucccaacgggcccuccuccccuccuugcaccgagauuaauaaaaaaaaaaaaaaaaaaaaaaaaaaaaaaaaaaaaaaaaaaaaaaaaaaaaaaaaaaaaaaaaaaaaaaaaaaaaaaaaaaaaaaaaaaaaaaaaaaaa

SEQ ID NO: 26224 - RNA, 1662 nt, Artificial Sequence
  mRNA product Design i-3 (A100) comprising derived and/or modified sequence from LASV(Lassa virus/H.sapiens-wt/NGA/2016/ISTH_0009;Clade II)__AVO03571__GPCmut3 (opt1)
aggagaaagcuuaccaugggccagaucaucaccuucuuccaggaggugccccacgucaucgaggaggugaugaacaucgugcugaucgcccucagccugcuggccauccucaaggggaucuacaacgucgcgaccugcggccugcuggggcucguguccuuccugcugcucugcggccgcagcugcuccacgaccuacaaggggguguacgagcugcagacccuggagcucgacauggccagccugaacaugaccaugccgcuguccugcacgaagaacaacagccaccacuacaucauggucggcaacgagaccggccucgagcugacccugaccaacacguccaucaucaaccacaaguucugcaaccucagcgacgcccacaagaagaaccuguacgaccacgcccugauguccaucaucagcaccuuccaccucuccauccccaacuucaaccaguacgaggccaugagcugcgacuucaacgggggccggaucuccgugcaguacaaccugagccacuccuacgcgguggacgccgccaaccacugcgggaccaucgccaacggcguccugcagaccuucaugcgcauggcguggggcgggagcuacaucgcccucgacuccggcaaggggagcugggacugcaucaugacguccuaccaguaccugaucauccagaacaccaccugggaggaccacugccaguucagccggcccagccccaucggcuaccuggggcuccugucccagcgcacccgggacaucuacaucagccgccggcgccggggcacguucaccuggacccuguccgacagcgagggcaacgagacccccgggggcuacugccugacgcgcuggaugcucaucgaggccgagcugaagugcuucgggaacaccgccguggccaagugcaacgagaagcacgacgaggaguucugcgacaugcugcggcuguucgacuucaacaagcaggcgauccgccggcugaagacccccgcccagauguccauccagcugaucaacaaggccgugaacgcccucaucaacgaccagcugaucaugaagaaccaccuccgcgacaucaugggcaucccguacugcaacuacagcaaguacugcuaccucaaccacaccgucacggggaagaccucccugccccggugcugccuggugagcaacggcuccuaccucaacgagacccacuucagcgacgacaucgagcagcaggccgacaacaugaucaccgagcugcugcagaaggaguacaucgaccgccagggcaagacgccccucgggcugguggaccuguucgucuucuccaccagcuucuaccugaucuccaucuuccuccaccuggugaagaucccgacccaccggcacaucaccggcaagcccugccccaagccccaccgccugaaccacauggggaucugcagcugcggccucuacaaccacccgggggugcccgucaaguggaagcggugaggacuaguuauaagacugacuagcccgaugggccucccaacgggcccuccuccccuccuugcaccgagauuaauaaaaaaaaaaaaaaaaaaaaaaaaaaaaaaaaaaaaaaaaaaaaaaaaaaaaaaaaaaaaaaaaaaaaaaaaaaaaaaaaaaaaaaaaaaaaaaaaaaaa

SEQ ID NO: 26225 - RNA, 1662 nt, Artificial Sequence
  mRNA product Design i-3 (A100) comprising derived and/or modified sequence from LASV(Lassa virus/H.sapiens-wt/NGA/2016/ISTH_0017;Clade II)__AVO03567__GPCmut3 (opt1)
aggagaaagcuuaccaugggccagaucaucaccuucuuccaggaggugccccacgucaucgaggaggugaugaacaucgugcugaucgcccucagccugcuggccauccucaaggggaucuacaacgucgcgaccugcggccuguucgggcugguguccuuccuccugcugugcggccgcagcugcuccacgaccuacaaggggguguacgagcuccagacccuggagcuggacauggccagccucaacaugaccaugccgcuguccugcacgaagaacaacagccaccacuacaucauggucggcaacgagaccggccuggagcucacccugaccaacacguccaucaucaaccacaaguucugcaaccugagcgacgcccacaagaagaaccucuacgaccacgcccugauguccaucaucagcaccuuccaccuguccauccccaacuucaaccaguacgaggccaugagcugcgacuucaacgggggcaagaucuccgugcaguacaaccucagccacaccuacgcgaucgacgccgccaaccacugcgggaccaucgccaacggcgugcugcagacguucaugcggauggcguggggcggguccuacaucgcccuggacagcggcaagggguccugggacugcaucaugaccagcuaccaguaccucaucauccagaacaccaccugggaggaccacugccaguucucccgccccagccccaucggcuaccuggggcugcucagccagcggacgcgcgacaucuacaucucccggcgccgccggggcaccuucaccuggacccucagcgacuccgagggcaacgagacgcccgggggcuacugccugacccgguggaugcugaucgaggccgagcucaagugcuucgggaacaccgccgucgccaagugcaacgagaagcacgacgaggaguucugcgacaugcugcgccuguucgacuucaacaagcaggcgauccggcgccucaagacccccgcccagaugagcauccagcugaucaacaaggccgugaacgcccugaucaacgaccagcucaucaugaagaaccaccuccgggacaucaugggcauccccuacugcaacuacuccaaguacugcuaccugaaccacacggugaccgggaagaccagccugccccgcugcugccuggucuccaacggcagcuaccugaacgagacccacuucuccgacgacaucgagcagcaggccgacaacaugaucacggagcuccugcagaaggaguacauggaccggcagggcaagaccccgcuggggcucguggaccuguucguguucagcaccuccuucuaccugaucagcaucuuccugcaccucguccgcaucccgacccaccggcacgugaucggcaagcccugccccaagccccaccgccugaaccacauggggaucugcuccugcggccuguacaagcacccgggggugcccgucaaguggaagcggugaggacuaguuauaagacugacuagcccgaugggccucccaacgggcccuccuccccuccuugcaccgagauuaauaaaaaaaaaaaaaaaaaaaaaaaaaaaaaaaaaaaaaaaaaaaaaaaaaaaaaaaaaaaaaaaaaaaaaaaaaaaaaaaaaaaaaaaaaaaaaaaaaaaa

SEQ ID NO: 26226 - RNA, 1662 nt, Artificial Sequence
  mRNA product Design i-3 (A100) comprising derived and/or modified sequence from LASV(Lassa virus/H.sapiens-wt/NGA/2018/ISTH_0959;Clade II)__AVV65099__GPCmut3 (opt1)
aggagaaagcuuaccaugggccagaucaucaccuucuuccaggaggugccccacgucaucgaggaggugaugaacaucgugcugaucgcccucagccugcuggccauccucaaggggaucuacaacgucgugaccugcggccuguucgggcugguguccuuccuccugcugugcggccgcagcugcuccacgaccuacaagggggucuacgagcuccagacccuggagcuggacauggcgagccucaacaugaccaugccgcuguccugcacgaagaacaacagccaccacuacaucauggugggcaacgagaccggccuggagcucacccugaccaacacguccaucaucaaccacaaguucugcaaccugagcgacgcccacaagaagaaccucuacgaccacgcccugauguccaucaucagcaccuuccaccuguccauccccaacuucaaccaguacgaggccaugagcugcgacuucaacgggggcaagaucuccgugcaguacaaccucagccacgccuacgcgaucgacgccgccaaccacugcgggaccaucgccaacggcguccugcagaccuucaugcggauggcguggggcggguccuacaucgcccuggacagcggcaagggguccugggacugcaucaugacgagcuaccaguaccucaucauccagaacaccaccugggaggaccacugccaguucucccgccccagccccaucggcuaccuggggcugcucagccagcggacccgcgacaucuacaucucccggcgccgccggggcacguucaccuggacccucagcgacuccgagggcaacgagacccccgggggcuacugccugacgcgguggaugcugaucgaggccgagcucaagugcuucgggaacaccgccguggccaagugcaacgagaagcacgacgaggaguucugcgacaugcugcgccuguucgacuucaacaagcaggcgauccggcgccucaagacccccgcccagaugagcauccagcugaucaacaaggccgugaacgcccugaucaacgaccagcucaucaugaagaaccaccuccgggacaucaugggcaucccguacugcaacuacuccaaguacugcuaccugaaccacaccgucacggggaagaccagccugccccgcugcugccugguguccaacggcagcuaccugaacgagacccacuucuccgacgacaucgagcagcaggccgacaacaugaucaccgagcuccugcagaaggaguacaucgaccggcagggcaagacgccccuggggcucguggaccuguucgucuucagcaccuccuucuaccugaucagcaucuuccugcaccucgugaagaucccgacccaccgccacgugaucggcaagcccugccccaagccccaccggcugaaccacauggggaucugcuccugcggccuguacaagcacccggggguccccgugaaguggaagcgcugaggacuaguuauaagacugacuagcccgaugggccucccaacgggcccuccuccccuccuugcaccgagauuaauaaaaaaaaaaaaaaaaaaaaaaaaaaaaaaaaaaaaaaaaaaaaaaaaaaaaaaaaaaaaaaaaaaaaaaaaaaaaaaaaaaaaaaaaaaaaaaaaaaaa

SEQ ID NO: 26227 - RNA, 1662 nt, Artificial Sequence
  mRNA product Design i-3 (A100) comprising derived and/or modified sequence from LASV(LASV003-NIG-2008;Clade II)__AIT17580__GPCmut3 (opt1)
aggagaaagcuuaccaugggccagaucaucaccuucuuccaggaggugccccacgucaucgaggaggugaugaacaucgugcugaucgcccucagccugcuggccauccucaaggggaucuacaacgucgcgaccugcggccuguucgggcugguguccuuccuccugcugugcggccgcagcugcuccacgaccuacaaggggguguacgagcuccagacccuggagcuggacauggccagccucaacaugaccaugccgcuguccugcacgaagaacaacagccaccacuacaucauggucggcaacgagaccggccuggagcucacccugaccaacacguccaucaucaaccacaaguucugcaaccugagcgacgcccacaagaagaaccucuacgaccacgcccugauguccaucaucagcaccuuccaccuguccauccccaacuucaaccaguacgaggccaugagcugcgacuucaacgggggcaagaucuccgugcaguacaaccucagccacaccuacgcgguggacgccgccaaccacugcgggaccaucgccaacggcguccugcagacguucaugcggauggcguggggcggguccuacaucgcccuggacagcggcaagggguccugggacugcaucaugaccagcuaccaguaccucaucauccagaacaccaccugggaggaccacugccaguucucccgccccagccccaucggcuaccuggggcugcucagccagcggacgcgcgacaucuacaucucccggcgccgccggggcaccuucaccuggacccucagcgacuccgagagcaacgagacgccgggcggguacugccugacccgguggaugcugaucgaggccgagcucaagugcuucggcaacaccgccguggccaagugcaacgagaagcacgacgaggaguucugcgacaugcugcgccuguucgacuucaacaagcaggcgauccggcgccucaaggcccccgcccagauguccauccagcugaucaacaaggccgugaacgcccugaucaacgaccagcucaucaugaagaaccaccuccgggacaucauggggauccccuacugcaacuacagcaaguacugcuaccugaaccacaccgucacgggccgcaccucccugccccggugcugccuggugagcaacggguccuaccugaacgagacccacuucagcgacgacaucgagcagcaggcggacaacaugaucaccgagcuccugcagaaggaguacauggaccgccagggcaagacgccccugggccucguggaccuguucgucuucuccaccagcuucuaccugaucuccaucuuccugcaccucgugaagaucccgacccaccggcacgugaucgggaagcccugccccaagccccaccgccugaaccacaugggcaucugcagcugcgggcuguacaagcacccgggcguccccgugaaguggaagcggugaggacuaguuauaagacugacuagcccgaugggccucccaacgggcccuccuccccuccuugcaccgagauuaauaaaaaaaaaaaaaaaaaaaaaaaaaaaaaaaaaaaaaaaaaaaaaaaaaaaaaaaaaaaaaaaaaaaaaaaaaaaaaaaaaaaaaaaaaaaaaaaaaaaa

SEQ ID NO: 26228 - RNA, 1662 nt, Artificial Sequence
  mRNA product Design i-3 (A100) comprising derived and/or modified sequence from LASV(LASV035-NIG-2009;Clade II)__AIT17588__GPCmut3 (opt1)
aggagaaagcuuaccaugggccagaucaucaccuucuuccaggaggugccccacgucaucgaggaggugaugaacaucgugcugaucgcccucagccugcuggccauccucaaggggaucuacaacgucgcgaccugcggccuguucgggcugguguccuuccuccugcugugcggccgcagcugcuccacgaccuacaaggggguguacgagcuccagacccuggagcuggacauggccagccucaacaugaccaugccgcuguccugcacgaagaacaacagccaccacuacaucauggucggcaacgagaccggccuggagcucacccugaccaacacguccaucaucaaccacaaguucugcaaccugagcgacgcccacaagaagaaccucuacgaccacgcccugauguccaucaucagcaccuuccaccuguccauccccaacuucaaccaguacgaggccaugagcugcgacuucaacgggggcaagaucuccgugcaguacaaccucagccacgcguacgccguggacgccgccaaccacugcgggaccaucgcgaacggcguccugcagaccuucaugcggauggccuggggcggguccuacaucgcccuggacagcggcaagggguccugggacugcaucaugacgagcuaccaguaccucaucauccagaacaccaccugggaggaccacugccaguucucccgccccagccccaucggcuaccuggggcugcucagccagcggacccgcgacaucuacaucucccggcgccgccggggcacguucaccuggacccucagcgacuccgagggcaacgagacccccgggggcuacugccugacgcgguggaugcugaucgaggccgagcucaagugcuucgggaacaccgccguggcgaagugcaacgagaagcacgacgaggaguucugcgacaugcugcgccuguucgacuucaacaagcaggccauccggcgccucaaggcccccgcccagaugagcauccagcugaucaacaaggccgugaacgcgcugaucaacgaccagcucaucaugaagaaccaccuccgggacaucaugggcauccccuacugcaacuacuccaaguacugcuaccugaaccacaccgucaccgggaagacgagccugccccgcugcugccugguguccaacggcagcuaccugaacgagacccacuucuccgacgacaucgagcagcaggccgacaacaugaucaccgagcuccugcagaaggaguacaucgaccggcagggcaagaccccgcuggggcucguggaccuguucgucuucagcacguccuucuaccugaucagcaucuuccugcaccucgugaagaucccgacccaccgccacgugaucggcaagcccugccccaagccccaccggcugaaccacauggggaucugcuccugcggccuguacaagcacccggggguccccgugaaguggaagcgcugaggacuaguuauaagacugacuagcccgaugggccucccaacgggcccuccuccccuccuugcaccgagauuaauaaaaaaaaaaaaaaaaaaaaaaaaaaaaaaaaaaaaaaaaaaaaaaaaaaaaaaaaaaaaaaaaaaaaaaaaaaaaaaaaaaaaaaaaaaaaaaaaaaaa

SEQ ID NO: 26229 - RNA, 1662 nt, Artificial Sequence
  mRNA product Design i-3 (A100) comprising derived and/or modified sequence from LASV(LASV1000-NIG-2009;Clade II)__AIT17782__GPCmut3 (opt1)
aggagaaagcuuaccaugggccagaucaucaccuucuuccaggaggugccccacgucaucgaggaggugaugaacaucgugcugaucgcccucagccugcuggccauccucaaggggaucuacaacgucgcgaccugcggccuguucgggcugguguccuuccuccugcugugcggccgcagcugcuccacgaccuacaaggggguguacgagcuccagacccuggagcuggacauggccagccucaacaugaccaugccgcuguccugcacgaagaacaacagccaccacuacaucauggucggcaacgagaccggccuggagcucacccugaccaacacguccaucaucaaccacaaguucugcaaccugagcgacgcccacaagaagaaccucuacgaccacgcccugauguccaucaucagcaccuuccaccuguccauccccaacuucaaccaguacgaggccaugagcugcgacuucaacgggggcaagaucuccgugcaguacaaccucagccacaccuacgcgguggacgccgccaaccacugcgggaccaucgccaacggcguccugcagacguucaugcggauggcguggggcggguccuacaucgcccuggacagcggcaagggguccugggacugcaucaugaccagcuaccaguaccucaucauccagaacaccaccugggaggaccacugccaguucucccgccccagccccaucggcuaccuggggcugcucagccagcggacgcgcgacaucuacaucucccggcgccgccggggcaccuucaccuggacccucagcgacuccgagggcaacgagacgcccgggggcuacugccugacccgguggaugcugaucgaggccgagcucaagugcuucgggaacaccgccguggccaagugcaacgagaagcacgacgaggaguucugcgacaugcugcgccuguucgacuucaacaagcaggcgaucaagcggcucaagacccccgcccagaugagcauccagcugaucaacaaggccgugaacgcccugaucaacgaccagcucaucaugaagaaccaccuccgcgacaucaugggcauccccuacugcaacuacuccaaguacugcuaccugaaccacacggucaccgggaagaccagccugccccggugcugccugguguccaacggcagcuaccugaacgagacccacuucuccgacgacaucgagcagcaggccgacaacaugaucacggagcuccugcagaaggaguacaucgaccgccagggcaagaccccgcuggggcucguggaccuguucgucuucagcaccuccuucuaccugaucagcaucuuccugcaccucgugaagaucccgacccaccggcacguggucggcaagcccugccccaagccccaccgccugaaccacauggggaucugcuccugcggccuguacaagcacccgggggugcccgugaaguggaagcggugaggacuaguuauaagacugacuagcccgaugggccucccaacgggcccuccuccccuccuugcaccgagauuaauaaaaaaaaaaaaaaaaaaaaaaaaaaaaaaaaaaaaaaaaaaaaaaaaaaaaaaaaaaaaaaaaaaaaaaaaaaaaaaaaaaaaaaaaaaaaaaaaaaaa

SEQ ID NO: 26230 - RNA, 1662 nt, Artificial Sequence
  mRNA product Design i-3 (A100) comprising derived and/or modified sequence from LASV(LASV221-NIG-2010;Clade II)__AIT17624__GPCmut3 (opt1)
aggagaaagcuuaccaugggccagaucaucaccuucuuccaggaggugccccacgucaucgaggaggugaugaacaucgugcugaucgcccucagccugcuggccauccucaaggggaucuacaacgucgcgaccugcggccuguucgggcugguguccuuccuccugcugugcggccgcagcugcuccacgaccuacaaggggguguacgagcuccagacccuggagcuggacauggccagccucaacaugaccaugccgcuguccugcacgaagaacaacagccaccacuacaucauggucggcaacgagaccggccuggagcucacccugaccaacacguccaucaucaaccacaaguucugcaaccugagcgacgcccacaagaagaaccucuacgaccacgcccugauguccaucaucagcaccuuccaccuguccauccccaacuucaaccaguacgaggccaugagcugcgacuucaacgggggcaagaucuccgugcaguacaaccucagccacaccuacgcgaucgacgccgccaaccacugcgggaccaucgccaacggcgugcugcagacguucaugcggauggcguggggcggguccuacaucgcccuggacagcggcaagggguccugggacugcaucaugaccagcuaccaguaccucaucauccagaacaccaccugggaggaccacugccaguucucccgccccagccccaucggcuaccuggggcugcucagccagcggacgcgcgacaucuacaucucccggcgccgccggggcaccuucaccuggacccucagcgacuccgagggcaacgagacgcccgggggcuacugccugacccgguggaugcugaucgaggccgagcucaagugcuucgggaacaccgccgucgccaagugcaacgagaagcacgacgaggaguucugcgacaugcugcgccuguucgacuucaacaagcaggcgauccggcgccucaagacccccgcccagaugagcauccagcugaucaacaaggccgugaacgcccugaucaacgaccagcucaucaugaagaaccaccuccgggacaucaugggcauccccuacugcaacuacuccaaguacugcuaccugaaccacacggugaccgggaagaccagccugccccgcugcugccuggucuccaacggcagcuaccugaacgagacccacuucuccgacgacaucgagcagcaggccgacaacaugaucacggagaugcuccagaaggaguacauggaccggcagggcaagaccccgcuggggcugguggaccucuucguguucagcaccuccuucuaccugaucagcaucuuccugcaccuggucaagaucccgacccaccgccacgugaucggcaagcccugccccaagccccaccggcucaaccacauggggaucugcuccugcggccuguacaagcacccgggggugcccgucaaguggaagcgcugaggacuaguuauaagacugacuagcccgaugggccucccaacgggcccuccuccccuccuugcaccgagauuaauaaaaaaaaaaaaaaaaaaaaaaaaaaaaaaaaaaaaaaaaaaaaaaaaaaaaaaaaaaaaaaaaaaaaaaaaaaaaaaaaaaaaaaaaaaaaaaaaaaaa

SEQ ID NO: 26231 - RNA, 1662 nt, Artificial Sequence
  mRNA product Design i-3 (A100) comprising derived and/or modified sequence from LASV(LASV237-NIG-2010;Clade II)__AIT17638__GPCmut3 (opt1)
aggagaaagcuuaccaugggccagaucaucaccuucuuccaggaggugccccacgucaucgaggaggugaugaacaucgugcugaucgcccucagccugcuggccauccucaaggggaucuacaacgucgcgaccugcggccuguucgggcugguguccuuccuccugcugugcggccgcagcugcuccacgaccuacaaggggguguacgagcuccagacccuggagcuggacauggccagccucaacaugaccaugccgcuguccugcacgaagaacaacagccaccacuacaucauggucggcaacgagaccggccuggagcucacccugaccaacacguccaucaucaaccacaaguucugcaaccugagcgacgcccacaagaaggaccucuacgaccacgcccugauguccaucaucagcaccuuccaccuguccauccccaacuucaaccaguacgaggccaugagcugcgacuucaacgggggcaagaucuccgugcaguacaaccucagccacaccuacgcgguggacgccgccaaccacugcgggaccaucgccaacggcguccugcagacguucaugcggauggcguggggcggguccuacaucgcccuggacagcggcaagggguccugggacugcaucaugaccagcuaccaguaccucaucauccagaacaccaccugggaggaccacugccaguucucccgccccagccccaucggcuaccuggggcugcucagccagcggacgcgcgacaucuacaucucccggcgccgccggggcaccuucaccuggacccucagcgacuccgagggcaacgagacgcccgggggcuacugccugacccgguggaugcugaucgaggccgagcucaagugcuucgggaacaccgccguggccaagugcaacgagaagcacgacgaggaguucugcgacaugcugcgccuguucgacuucaacaagcaggcgauccggcgccucaagacccccgcccagaugagcauccagcugaucaacaaggccgugaacgcccugaucaacgaccagcucaucaugaagaaccaccuccgggacaucaugggcauccccuacugcaacuacuccaaguacugcuaccugaaccacacggucaccgggaagaccagccugccccgcugcugccugguguccaacggcagcuaccugaacgagacccacuucuccgacgacaucgagcagcaggccgacaacaugaucacggagcuccugcagaaggaguacauggaccggcagggcaagaccccgcuggggcucguggaccuguucgucuucagcaccuccuucuaccugaucagcaucuuccugcaccucaucaagaucccgacccaccgccacaucacgggcaagcccugccccaagccccaccggcugaaccacauggggaucugcuccugcggccuguacaagcacccgggggugcccgugaaguggaagcgcugaggacuaguuauaagacugacuagcccgaugggccucccaacgggcccuccuccccuccuugcaccgagauuaauaaaaaaaaaaaaaaaaaaaaaaaaaaaaaaaaaaaaaaaaaaaaaaaaaaaaaaaaaaaaaaaaaaaaaaaaaaaaaaaaaaaaaaaaaaaaaaaaaaaa

SEQ ID NO: 26232 - RNA, 1662 nt, Artificial Sequence
  mRNA product Design i-3 (A100) comprising derived and/or modified sequence from LASV(LASV253-NIG-2011;Clade II)__AIT17670__GPCmut3 (opt1)
aggagaaagcuuaccaugggccagaucaucaccuucuuccaggaggugccccacgucaucgaggaggugaugaacaucgugcugaucgcccucagccugcuggccauccucaaggggaucuacaacgucgcgaccugcggccuguucgggcugguguccuuccuccugcugugcggccgcagcugcuccacgaccuacaaggggguguacgagcuccagacccuggagcuggacauggccagccucaacaugaccaugccgcuguccugcacgaagaacaacagccaccacuacaucauggucggcaacgagaccggccuggagcucacccugaccaacacguccaucaucaaccacaaguucugcaaccugagcgacgcccacaagaagaaccucuacgaccacgcccugauguccaucaucagcaccuuccaccuguccauccccaacuucaaccaguacgaggccaugagcugcgacuucaacgggggcaagaucuccgugcaguacaaccucagccacaccuacgcgguggacgccgccaaccacugcgggaccaucgccaacggcguccugcagacguucaugcggauggcguggggcggguccuacaucgcccuggacagcggcaagggguccugggacugcaucaugaccagcuaccaguaccucaucauccagaacaccaccugggaggaccacugccaguucucccgccccagccccaucggcuaccuggggcugcucagccagcggacgcgcgacaucuacaucucccggcgccgccggggcaccuucaccuggacccucagcgacuccgagggcaacgagacgcccgggggcuacugccugacccgguggaugcugaucgaggccgagcucaagugcuucgggaacaccgccguggccaagugcaacgagaagcacgacgaggaguucugcgacaugcugcgccuguucgacuucaacaagcaggcgauccggcgccucaaggcccccgcccagaugagcauccagcugaucaacaaggccgugaacgcccugaucaacgaccagcucaucaugaagaaccaccuccgggacaucaugggcaucccguacugcaacuacuccaaguacugcuaccugaaccacaccgucacggggcgcaccagccugccccggugcugccugguguccaacggcagcuaccugaacgagacccacuucuccgacgacaucgagcagcaggcggacaacaugaucaccgagcuccugcagaaggaguacaucgaccgccagggcaagacgccccuggggcucguggaccuguucgucuucagcaccuccuucuaccugaucagcaucuuccugcaccucgugaagaucccgacccaccggcacaucaucggcaagcccugccccaagccccaccgccugaaccacauggggaucugcuccugcggccuguacaagcacccgggggugcccgucaaguggaagcggugaggacuaguuauaagacugacuagcccgaugggccucccaacgggcccuccuccccuccuugcaccgagauuaauaaaaaaaaaaaaaaaaaaaaaaaaaaaaaaaaaaaaaaaaaaaaaaaaaaaaaaaaaaaaaaaaaaaaaaaaaaaaaaaaaaaaaaaaaaaaaaaaaaaa

SEQ ID NO: 26233 - RNA, 1662 nt, Artificial Sequence
  mRNA product Design i-3 (A100) comprising derived and/or modified sequence from LASV(LASV254-NIG-2011;Clade II)__AIT17674__GPCmut3 (opt1)
aggagaaagcuuaccaugggccagaucaucaccuucuuccaggaggugccccacgucaucgaggaggugaugaacaucgugcugaucgcccucagccugcuggccauccucaaggggaucuacaacgucgcgaccugcggccuguucgggcugguguccuuccuccugcugugcggccgcagcugcuccacgaccuacaaggggguguacgagcuccagacccuggagcuggacaugaccaaccucaacaugacgaugccgcugagcugcaccaagaacaacucccaccacuacaucauggucggcaacgagaccggccuggagcucacccugacgaacaccagcaucaucaaccacaaguucugcaaccuguccgacgcccacaagaagaaccucuacaaccacgcccugaugagcaucaucuccaccuuccaccugagcauccccaacuucaaccaguacgaggccauguccugcgacuucaacgggggcaagaucagcgugcaguacaaccucucccacagcuacgccguggacgcggccaaccacugcgggaccaucgccaacggcguccugcagacguucaugcggauggccuggggcggguccuacaucgcgcuggacagcggcaaggggaacugggacugcaucaugaccuccuaccaguaccucaucauccagaacaccaccugggaggaccacugccaguucagccgccccucccccaucggcuaccuggggcugcucagccagcggacgcgcgacaucuacaucagccggcgccgccggggcaccuucaccuggacccucuccgacagcgagggcaacgagacgcccgggggcuacugccugacccgguggaugcugaucgaggccgagcucaagugcuucgggaacaccgccguggccaagugcaacgagaagcacgacgaggaguucugcgacaugcugcgccuguucgacuucaacaagcaggccauccggcgccucaagacccccgcgcaggccaacauccagcugaucaacaaggccgugaacgcccugaucaacgaccagcucaucaugaagaaccaccuccgggacaucaugggcauccccuacugcaacuacuccaaguacugcuaccugaaccacacggucaccgggaagaccagccugccccgcugcugccugguguccaacggcagcuaccugaacgagacccacuucuccgacgacaucgagcagcaggccgacaacaugaucacggagcuccugcagaaggaguacauggaccggcagggcaagaccccgcuggggcucguggaccuguucgucuucagcaccuccuucuaccugaucagcaucuuccugcaccucgugaagaucccgacccaccgccacgugaucggcaagcccugccccaagccccaccggcugaaccacauggggaucugcuccugcggccuguacaagcacccggggguccccgugaaguggaagcgcugaggacuaguuauaagacugacuagcccgaugggccucccaacgggcccuccuccccuccuugcaccgagauuaauaaaaaaaaaaaaaaaaaaaaaaaaaaaaaaaaaaaaaaaaaaaaaaaaaaaaaaaaaaaaaaaaaaaaaaaaaaaaaaaaaaaaaaaaaaaaaaaaaaaa

SEQ ID NO: 26234 - RNA, 1662 nt, Artificial Sequence
  mRNA product Design i-3 (A100) comprising derived and/or modified sequence from LASV(Nig08-A19;Clade III)__ADU56618__GPCmut3 (opt1)
aggagaaagcuuaccaugggccagaucgugaccuucuuccaggaggucccccacgugaucgaggaggugaugaacaucguccugaucgcccucagcauccuggccauccugaaggggcucuacaacaucgcgaccugcggccugaucgggcuggugacguuccuccugcuguccggccgcagcugcuccaugaccuacaaggggguguacgagcuccagacccuggagcugaacaugaacacccucaacaugacgaugccgcugagcugcaccaagaacaacucccaccacuacaucauggucggcaacgagaccggccuggagcucacccugacgaacaccagccugcuccaccacaaguucugcaaccuguccgacgcccacaagaagaaccuguacgaccacacccucaugagcaucaucuccaccuuccaccugagcauccccaacuucaaccaguacgaggccauguccugcgacuucaacgggggcaagaucacggugcaguacaaccugagccacuccuacgccaucgacgccgcgaaccacugcgggaccguggccaacggcguccuccagaccuucaugcggauggccuggggcgggagcuacaucgcccuggacuccggccgcgggaagugggacugcaucaugaccagcuaccaguaccugaucauccagaacacgaccugggaggaccacugccaguucucccggcccagccccaucggcuaccucgggcugcugucccagcgcacccgggacaucuacaucagccgccggcgccggggcaccuucacguggacccugagcgacuccgagggcaacgagacccccgggggcuacugccucacccgcuggaugcugaucgaggcggagcugaagugcuucgggaacacggccguggccaagugcaacgagaagcacgacgaggaguucugcgacaugcuccggcuguucgacuucaacaagcaggccauccgccggcugaaggcccccgcgcagaugagcauccagcucaucaacaaggccgugaacgcccugaucaacgaccagcugaucaugaagaaccaccuccgcgacaucaugggcauccccuacugcaacuacuccaaguacugcuaccugaaccacaccagcaccgggcggaccucccugccccgcugcugccucgucagcaacggcuccuaccugaacgagacgcacuucagcgacgacaucgagcagcaggccgacaacaugaucaccgagaugcugcagaaggaguaccucgaccggcagggcaagaccccgcuggggcugguggaccuguucguguucuccaccagcuucuaccucaucuccaucuuccugcaccuggucaagaucccgacgcaccgccacaucgugggcaagcccugccccaagccccaccggcucaaccacauggggaucugcagcugcggccuguacaagcagccgggggugcccguccgcuggaagcggugaggacuaguuauaagacugacuagcccgaugggccucccaacgggcccuccuccccuccuugcaccgagauuaauaaaaaaaaaaaaaaaaaaaaaaaaaaaaaaaaaaaaaaaaaaaaaaaaaaaaaaaaaaaaaaaaaaaaaaaaaaaaaaaaaaaaaaaaaaaaaaaaaaaa

SEQ ID NO: 26235 - RNA, 1665 nt, Artificial Sequence
  mRNA product Design i-3 (A100) comprising derived and/or modified sequence from LASV(G1180-SLE-2010;Clade IV)__AIT17168__GPCmut3 (opt1)
aggagaaagcuuaccaugggccagaucgugaccuucuuccaggaggucccccacgugaucgaggaggugaugaacaucguccugaucgcccucagcauccuggccgugcugaaggggcucuacaacuucgcgaccugcggccugguggggcugcucaccuuccugcugcucugcggccgcuccugcaccgccagccgguacaagggggucuacgagcugcagacccuggagcucaacauggagacccugaacaugacgaugccgcuguccugcaccaagaacaacagccaccacuacaucauggugggcaacgagaccggccucgagcugacccugacgaacaccuccaucaucaaccacaaguucugcaaccucagcgacgcccacaagaagaaccuguacgaccacgcccugauguccaucaucagcaccuuccaccucuccauccccaacuucaaccaguacgaggccaugagcugcgacuucaacgggggcaagaucuccgugcaguacaaccugagccacuccuacgcgggggacgccgccaaccacugcggcaccgucgccaacggggugcugcagacguucaugcgcauggcguggggcggcagcuacaucgcccucgacuccgggcacggcagcugggacugcaucaugaccuccuaccaguaccugaucauccagaacaccaccugggaggaccacugccaguucagccggcccucccccaucggguaccugggccuccugagccagcgcacgcgggacaucuacaucagccgccggcgccggggcaccuucaccuggacccuguccgacagcgaggggaaggacacgccgggcggguacugccugacccgcuggaugcucaucgaggccgagcugaagugcuucggcaacaccgccguggccaagugcaacgagaagcacgacgaggaguucugcgacaugcugcggcuguucgacuucaacaagcaggcgauccagcgccugaaggcccccgcccagauguccauccagcugaucaacaaggccgucaacgcccucaucaacgaccagcugaucaugaagaaccaccuccgggacaucauggggauccccuacugcaacuacagcaaguacugcuaccucaaccacaccacgaccggcaagaccucccugcccaagugcugccuggugagcaacggcuccuaccucaacgagacccacuucagcgacgacaucgagcagcaggcggacaacaugaucacggagaugcugcagaaggaguacauggagcgccaggggaagacgccccugggccucguggaccuguucgucuucuccaccagcuucuaccugaucuccaucuuccugcaccucgugaagaucccgacccaccggcacaucgugggcaagagcugccccaagccccaccgccugaaccacauggggaucugcuccugcgggcuguacaagcagcccggcgucccggugaaguggaagcggugaggacuaguuauaagacugacuagcccgaugggccucccaacgggcccuccuccccuccuugcaccgagauuaauaaaaaaaaaaaaaaaaaaaaaaaaaaaaaaaaaaaaaaaaaaaaaaaaaaaaaaaaaaaaaaaaaaaaaaaaaaaaaaaaaaaaaaaaaaaaaaaaaaaa

SEQ ID NO: 26236 - RNA, 1665 nt, Artificial Sequence
  mRNA product Design i-3 (A100) comprising derived and/or modified sequence from LASV(G1442-SLE-2011;Clade IV)__AIT17180__GPCmut3 (opt1)
aggagaaagcuuaccaugggccagaucgugaccuucuuccaggaggucccccacgugaucgaggaggugaugaacaucguccugaucgcccucagcauccuggccgugcugaaggggcucuacaacguggcgaccugcggccugaucgggcuggucacguuccuccugcugugcggccgcuccugcaccaccacccucuacaaggggguguacgagcugcagacgcuggagcucaacauggagacccugaacaugaccaugccgcugagcugcaccaagaacaacucccaccacuacauccgggugggcaacgagacgggccucgagcugacccugaccaacaccagcaucaucaaccacaaguucugcaaccucuccgacgcccacaagaagaaccuguacgaccacgcccugaugagcaucaucuccacguuccaccucagcauccccaacuucaaccaguacgaggccauguccugcgacuucaacgggggcaagaucagcguccaguacaaccugucccacagcuacgccggggacgcggccaaccacugcggcaccguggccaacggggugcugcagaccuucaugcgcauggccuggggcggcuccuacaucgcgcucgacagcgggcggggcaacugggacugcaucaugaccuccuaccaguaccugaucauccagaacacgaccugggacgaccacugccaguucagccgccccucccccaucggguaccugggccuccugagccagcggacccgcgacgucuacaucucccggcgccgccggggcaccuucacguggacccugagcgacagcgaggggaaggacaccccgggcggguacugccugacccgguggaugcucaucgaggccgagcugaagugcuucggcaacacggccguggccaagugcaacgagaagcacgacgaggaguucugcgacaugcugcgccucuucgacuucaacaagcaggccauccagcggcugaaggcgcccgcccagauguccauccagcugaucaacaaggccgugaacgcccucaucaacgaccagcugaucaugaagaaccaccuccgcgacaucauggggauccccuacugcaacuacagcaaguacugcuaccugaacaacaccgccaccggcaagaccucccugcccaagugcugccugaucagcaacggcuccuaccucaacgagacgcacuucagcgacgacaucgagcaggaggcggacaacaugaucaccgagaugcugcagaaggaguacauggagcggcaggggaagacgccccugggccucgucgaccuguucguguucuccaccagcuucuaccugaucuccaucuuccugcaccucgugaagaucccgacccaccgccacaucgucggcaagagcugccccaagccccaccggcugaaccacauggggaucugcuccugcgggcuguacaagcagcccggcgugccggugcgcuggaagcggugaggacuaguuauaagacugacuagcccgaugggccucccaacgggcccuccuccccuccuugcaccgagauuaauaaaaaaaaaaaaaaaaaaaaaaaaaaaaaaaaaaaaaaaaaaaaaaaaaaaaaaaaaaaaaaaaaaaaaaaaaaaaaaaaaaaaaaaaaaaaaaaaaaaa

SEQ ID NO: 26237 - RNA, 1665 nt, Artificial Sequence
  mRNA product Design i-3 (A100) comprising derived and/or modified sequence from LASV(G3010-SLE-2013;Clade IV)__AIT17344__GPCmut3 (opt1)
aggagaaagcuuaccaugggccagaucgugaccuucuuccaggaggucccccacgugaucgaggaggugaugaacaucguccugaucgcccucagcauccuggccgugcugaaggggcucuacaacuucgcgaccugcggccugguggggcuggucacguuccuccugcugugcggccgcuccugcaccaccagccucuacaaggggguguacgagcugcagacccuggagcucaacauggagacgcugaacaugaccaugccgcuguccugcaccaagaacaacagccaccacuacaucauggugggcaacgagaccggccucgagcugacgcugaccaacaccuccaucaucaaccacaaguucugcaaccucagcgacgcccacaagaagaaccuguacaaccacgcccugauguccaucaucagcaccuuccaccucuccauccccaacuucaaccaguacgaggccaugagcugcgacuucaacgggggcaagaucuccguccaguacaaccugagccacuccuacgccggggacgcggccagccacugcggcacgguggccaacggggugcugcagaccuucaugcggauggccuggggcggcuccuacaucgcgcucgacagcggguacggcaagugggacugcaucaugaccuccuaccaguaccugaucauccagaacaccacgugggaggaccacugccaguucagccgccccucccccaucggguaccugggccuccugagccagcggacccgcgacaucuacaucagccggcgccgccggggcaccuucaccuggacgcuguccgacagcgaggggaaggacaccccgggcggguacugccugacccgguggaugcucaucgaggccgagcugaagugcuucggcaacaccgccgucgccaagugcaacgagaagcacgacgaggaguucugcgacaugcugcgccucuucgacuucaacaagcaggccauccagcggcugaagacgcccgcgcagauguccauccagcugaucaacaaggccgugaacgcccucaucaacgaccagcugaucaugaagaaccaccuccgcgacaucauggggauccccuacugcaacuacagcaaguacugcuaccugaaccacaccaccaccggcaagacgucccugcccaagugcugccuggugagcaacggcuccuaccucaacgagacccacuucagcgacgacaucgagcagcaggccgacaacaugaucaccgagaugcugcagaaggaguacauggagcggcaggggaagacgccccugggccucgucgaccuguucguguucuccaccagcuucuaccugaucuccaucuuccugcaccucgugaagaucccgacccaccgccacaucgucggcaagagcugccccaagccccaccggcugaaccacauggggaucugcuccugcgggcuguacaagcagcccggcgugccggugcgcuggaagcggugaggacuaguuauaagacugacuagcccgaugggccucccaacgggcccuccuccccuccuugcaccgagauuaauaaaaaaaaaaaaaaaaaaaaaaaaaaaaaaaaaaaaaaaaaaaaaaaaaaaaaaaaaaaaaaaaaaaaaaaaaaaaaaaaaaaaaaaaaaaaaaaaaaaa

SEQ ID NO: 26238 - RNA, 1665 nt, Artificial Sequence
  mRNA product Design i-3 (A100) comprising derived and/or modified sequence from LASV(G502-SLE-2009;Clade IV)__AIT17126__GPCmut3 (opt1)
aggagaaagcuuaccaugggccagaucgugaccuucuuccaggaggucccccacgugaucgaggaggugaugaacaucguccugaucgcccucagcauccuggccgugcugaaggggcucuacaacuucgcgaccugcggccugguggggcugcucacguuccugcugcucugcggccgcuccugcaccaccgggcuguacaagggcgucuacgagcugcagacccucgagcugaacauggagacgcugaacaugaccaugccgcucagcugcaccaagaacaacucccaccacuacaucauggugggcaacgagaccgggcuggagcugacgcucaccaacaccagcaucaucaaccacaaguucugcaaccuguccgacgcccacaagaagaaccuguacgaccacgcccucaugagcaucaucuccaccuuccaccugagcauccccaacuucaaccaguacgaggccauguccugcgacuucaacggcgggaagaucagcgugcaguacaaccugucccacagcuacgccggcgacgcggccgaccacugcgggacggucgccaacggcgugcuccagaccuucaugcggauggccuggggcggguccuacaucgcgcuggacagcggccgcgggcggugggacugcaucaugaccuccuaccaguaccugaucauccagaacaccacgugggaggaccacugccaguucagccgccccucccccaucggcuaccucggccugcugagccagcggacccgcgacaucuacaucucccggcgccgccgggggaccuucaccuggacgcugagcgacagcgagggcaaggacacccccgggggcuacugccucacccgguggaugcugaucgaggccgagcugaagugcuucgggaacaccgccguggccaagugcaacgagaagcacgacgaggaguucugcgacaugcuccgccuguucgacuucaacaagcaggccauccagcggcugaaggcgcccgcccagauguccauccagcucaucaacaaggccgucaacgcccugaucaacgaccagcuggugaugaagaaccaccuccgcgacaucaugggcauccccuacugcaacuacagccgguacugcuaccugaaccacacgaccaccggccgcaccucccugcccaagugcugccucgugagcaacggguccuaccugaacgagacgcacuucagcgacgacaucgagcagcaggccgacaacaugaucaccgagaugcugcagaaggaguacauggagcggcagggcaagaccccgcucgggcuggucgaccuguucguguucuccaccagcuucuaccugaucuccaucuuccuccaccuggugaagaucccgacgcaccgccacaucgucggcaagagcugccccaagccccaccggcugaaccacauggggaucugcuccugcggccucuacaagcagcccggcgugccggugaaguggaagcgcugaggacuaguuauaagacugacuagcccgaugggccucccaacgggcccuccuccccuccuugcaccgagauuaauaaaaaaaaaaaaaaaaaaaaaaaaaaaaaaaaaaaaaaaaaaaaaaaaaaaaaaaaaaaaaaaaaaaaaaaaaaaaaaaaaaaaaaaaaaaaaaaaaaaa

SEQ ID NO: 26239 - RNA, 1665 nt, Artificial Sequence
  mRNA product Design i-3 (A100) comprising derived and/or modified sequence from LASV(G733-SLE-2010;Clade IV)__AIT17154__GPCmut3 (opt1)
aggagaaagcuuaccaugggccagaucgugaccuucuuccaggaggucccccacgugaucgaggaggugaugaacaucguccugaucgcccucagcauccuggccgugcugaaggggcucuacaacuucgcgaccugcggcaucguggggcuggucuccuuccugcuccugugcggccgcagcugcacgaccucccuguacaaggggguguacgagcuccagacccuggagcugaacauggagacccucaacaugacgaugccgcugagcugcaccaagaacaacucccaccacuacaucauggugggcaacgagaccggccuggagcucacccugacgaacaccagcaucaucaaccacaaguucugcaaccuguccgacgcccacaagaagaaccucuacgaccacgcccugaugagcaucaucuccaccuuccaccugagcauccccaacuucaaccaguacgaggccauguccugcgacuucaacgggggcaagaucagcguccaguacaaccucucccacagcuacgccggggacgcggccaaccacugcggcaccaucgccaacggggugcugcagacguucaugcggauggccuggggcggcuccuacaucgcgcuggacagcgggcgcgaccggugggacugcaucaugaccuccuaccaguaccucaucauccagaacaccaccugggaggaccacugccaguucagccgccccucccccaucggcuaccuggggcugcucagccagcggacgcgcgacaucuacaucagccggcgccgccggggcaccuucaccuggacccucuccgacagcgagggcaaggacacgcccgggggcuacugccugacccgguggaugcugaucgaggccgagcucaagugcuucgggaacaccgccguggccaagugcaacgagaagcacgacgaggaguucugcgacaugcugcgccuguucgacuucaacaagcaggccauccagcggcucaaggcgcccgcccagauguccauccagcugaucaacaaggccgucaacgcccugaucaacgaccagcucaucaugaagaaccaccuccgcgacaucaugggcauccccuacugcaacuacagcaaguacugcuaccugaaccacaccacgaccgggaagaccucccugcccaagugcugccuggugagcaacggcuccuaccugaacgagacccacuucagcgacgacaucgagcagcaggccgacaacaugaucacggagaugcuccagaaggaguacauggagcggcagggcaagaccccgcuggggcugguggaccucuucgucuucuccaccagcuucuaccugaucuccaucuuccugcaccuggugaagaucccgacccaccgccacguggucggcaagagcugccccaagccccaccggcucaaccacauggggaucugcuccugcggccuguacgggcagcccggcgugccggugaaguggaagcgcugaggacuaguuauaagacugacuagcccgaugggccucccaacgggcccuccuccccuccuugcaccgagauuaauaaaaaaaaaaaaaaaaaaaaaaaaaaaaaaaaaaaaaaaaaaaaaaaaaaaaaaaaaaaaaaaaaaaaaaaaaaaaaaaaaaaaaaaaaaaaaaaaaaaa

SEQ ID NO: 26240 - RNA, 1665 nt, Artificial Sequence
  mRNA product Design i-3 (A100) comprising derived and/or modified sequence from MOPV/LASV reassortant(IGS-1;Clade IV)__AFY05576__GPCmut3 (opt1)
aggagaaagcuuaccaugggccagaucgugaccuucuuccaggaggucccccacgugaucgaggaggugaugaacaucguccugaucgcccucagcgugcuggccgugcugaaggggcucuacaacuucgcgaccugcggccuggucgggcuggugacguuccuccugcugugcggccgcuccugcaccaccagccucuacaaggggguguacgagcugcagacccuggagcucaacauggagacgcugaacaugaccaugccgcuguccugcaccaagaacaacagccaccacuacaucauggucggcaacgagaccggccucgagcugacgcugaccaacaccuccaucaucaaccacaaguucugcaaccucagcgacgcccacaagaagaaccuguacgaccacgcccugauguccaucaucagcaccuuccaccucuccauccccaacuucaaccaguacgaggccaugagcugcgacuucaacgggggcaagaucuccgugcaguacaaccugagccacuccuacgccggggacgcggccaaccacugcggcacgguggccaacgggguccugcagaccuucaugcggauggccuggggcggcagcuacaucgcgcucgacuccgggcgcggcaacugggacugcaucaugaccagcuaccaguaccugaucauccagaacaccacgugggaggaccacugccaguucucccggcccagccccaucggguaccugggccuccugucccagcgcacccgggacaucuacaucagccgccggcgccggggcaccuucaccuggacgcugagcgacuccgagggggaggacaccccgggcggguacugccugacccgcuggaugcucaucgaggccgagcugaagugcuucggcaacaccgccguggccaagugcaacgagaagcacgacgaggaguucugcgacaugcugcggcuguucgacuucaacaagcaggccauccagcgccugaaggcgcccgcccagaugagcauccagcugaucaacaaggccgugaacgcccucaucaacgaccagcugaucaugaagaaccaccuccgggacaucauggggauccccuacugcaacuacuccaaguacugcuaccucaaccacacgaccaccggccgcaccagccugcccaagugcugccuggucuccaacggcagcuaccucaacgagacgcacuucuccgacgacaucgagcagcaggccgacaacaugaucaccgagaugcugcagaaggaguacauggagcggcaggggaagacgccccugggccucguggaccuguucguguucagcaccuccuucuaccugaucagcaucuuccugcaccucgucaagaucccgacccaccgccacaucguggggaaguccugccccaagccccaccggcugaaccacaugggcaucugcagcugcgggcuguacaagcagcccggcgugccggucaaguggaagcgcugaggacuaguuauaagacugacuagcccgaugggccucccaacgggcccuccuccccuccuugcaccgagauuaauaaaaaaaaaaaaaaaaaaaaaaaaaaaaaaaaaaaaaaaaaaaaaaaaaaaaaaaaaaaaaaaaaaaaaaaaaaaaaaaaaaaaaaaaaaaaaaaaaaaa

SEQ ID NO: 26241 - RNA, 1665 nt, Artificial Sequence
  mRNA product Design i-3 (A100) comprising derived and/or modified sequence from LASV(LM765-SLE-2012;Clade IV)__AIT17814__GPCmut3 (opt1)
aggagaaagcuuaccaugggccagaucgugaccuucuuccaggaggucccccacgugaucgaggaggugaugaacaucguccugaucgcccucagcauccuggccgugcugaaggggcucuacaacuucgcgaccugcggccugguggggcuggucacguuccuccugcugugcggccgcuccugcaccaccagccucuacaaggggguguacgagcugcagacccuggagcucaacauggagacgcugaacaugaccaugccgcuguccugcaccaagaacaacagccaccacuacaucauggugggcaacgagaccggccucgagcugacgcugaccaacaccuccaucaucgaccacaaguucugcaaccucagcgacgcccaccggaagaaccuguacgaccacgcccugauguccaucaucagcaccuuccaccucuccauccccaacuucaaccaguacgaggccaugagcugcgacuucaacgggggcaagaucuccguccaguacaaccugagccacuccuacgccaaggacgcggccgaccacugcgggacgguggccaacggcgugcugcagaccuucaugcgcauggccuggggcgggagcuacaucgcgcucgacuccggccgggggcgcugggacugcaucaugaccagcuaccaguaccugaucauccagaacaccacgugggaggaccacugccaguucucccggcccagccccaucggcuaccuggggcuccugucccagcgcacccgggacaucuacaucagccgccggcgccggggcaccuucaccuggacgcugagcgacuccgagggcaaggacacccccgggggcuacugccugacccgcuggaugcucaucgaggccgagcugaagugcuucgggaacaccgccgucgccaagugcaacgagaagcacgacgaggaguucugcgacaugcugcggcuguucgacuucaacaagcaggccauccagcgccugaaggcgcccgcccagaugagcauccagcugaucaacaaggccgugaacgcccucaucaacgaccagcugaucaugaagaaccaccuccgggacaucaugggcauccccuacugcaacuacuccaaguacugcuaccucaaccacacgaccaccgggaagaccagccugcccaagugcugccugguguccaacggcagcuaccucaacgagacgcacuucuccgacgacaucgagcagcaggccgacaacaugaucaccgagaugcugcagaaggaguacauggagcgccagggcaagaccccgcuggggcucgucgaccuguucguguucagcaccuccuucuaccugaucagcaucuuccugcaccucgugaagaucccgacgcaccggcacaucgucggcaagcccugccccaagccccaccgccugaaccacauggggaucugcuccugcggccuguacaagcagccgggggugcccgugaaguggaagcggugaggacuaguuauaagacugacuagcccgaugggccucccaacgggcccuccuccccuccuugcaccgagauuaauaaaaaaaaaaaaaaaaaaaaaaaaaaaaaaaaaaaaaaaaaaaaaaaaaaaaaaaaaaaaaaaaaaaaaaaaaaaaaaaaaaaaaaaaaaaaaaaaaaaa

SEQ ID NO: 26242 - RNA, 1665 nt, Artificial Sequence
  mRNA product Design i-3 (A100) comprising derived and/or modified sequence from LASV(LM776-SLE-2012;Clade IV)__AIT17824__GPCmut3 (opt1)
aggagaaagcuuaccaugggccagaucgugaccuucuuccaggaggucccccacgugaucgaggaggugaugaacaucguccugaucgcccucagcauccuggccgugcugaaggggcucuacaacuucgcgaccugcggccugguggggcuggucacguuccuccugcugugcggccgcuccugcaccaccagcguguacaaggggguguacgagcuccagacccuggagcugaacauggagacgcucaacaugaccaugccgcuguccugcaccaagaacaacagccaccacuacaucauggucggcaacgagaccggccuggagcucacgcugaccaacaccuccaucaucaaccacaaguucugcaaccugagcgacgcccacaagaagaaccucuacgaccacgcccugauguccaucaucagcaccuuccaccuguccauccccaacuucaaccaguacgaggccaugagcugcgacuucaacgggggcaagaucuccgugcaguacaaccucagccacuccuacgccggggacgcggccaaccacugcggcacgguggccaacgggguccugcagaccuucaugcggauggccuggggcggcagcuacaucgcgcuggacuccgggcacggcaagugggacugcaucaugaccagcuaccaguaccucaucauccagaacaccacgugggaggaccacugccaguucucccgccccagccccaucggguaccugggccugcucucccagcggacccgcgacaucuacaucagccggcgccgccggggcaccuucaccuggacgcucagcgacuccgaggggaaggacaccccgggcggguacugccugacccgguggaugcugaucgaggccgagcucaagugcuucggcaacaccgccguggccaagugcaacgagaagcacgacgaggaguucugcgacaugcugcgccuguucgacuucaacaagcaggccauccagcggcucaaggcgcccgcccagaugagcauccagcugaucaacaaggccgugaacgcccugaucaacgaccagcucaucaugaagaaccaccuccgcgacaucauggggauccccuacugcaacuacuccaaguacugcuaccugaaccacacgaccaccggcaagaccagccugcccaagugcugccuggucuccaacggcagcuaccugaacgagacgcacuucuccgacgacaucgagcagcaggccgacaacaugaucaccgagaugcuccagaaggaguacauggagcggcaggggaagacgccccugggccugguggaccucuucguguucagcaccuccuucuaccugaucagcaucuuccugcaccuggucaagaucccgacccaccgccacaucguggggaaguccugccccaagccccaccggcucaaccacaugggcaucugcagcugcgggcuguacaagcagcccggcgugccgguccgcuggaagcggugaggacuaguuauaagacugacuagcccgaugggccucccaacgggcccuccuccccuccuugcaccgagauuaauaaaaaaaaaaaaaaaaaaaaaaaaaaaaaaaaaaaaaaaaaaaaaaaaaaaaaaaaaaaaaaaaaaaaaaaaaaaaaaaaaaaaaaaaaaaaaaaaaaaa

SEQ ID NO: 26243 - RNA, 1665 nt, Artificial Sequence
  mRNA product Design i-3 (A100) comprising derived and/or modified sequence from LASV(Mad39;Clade IV)__ANH09722__GPCmut3 (opt1)
aggagaaagcuuaccaugggccagaucgugaccuucuuccaggaggucccccacgugaucgaggaggugaugaacaucguccugaucgcccucagcauccuggccgugcugaaggggcucuacaacguggcgaccugcggccugaucgggcuggucacguuccuccugcugugcggccgcuccugcaccaccacccucuacaaggggguguacgagcugcaggcccuggagcucaacauggagacgcugaacaugaccaugccgcugagcugcaccaagaacaacucccaccacuacauccgggugggcaacgagaccggccucgagcugacgcugaccaacaccagccucaucaaccacaaguucugcaaccuguccgacgcccacaagaagaaccuguacgaccacgcccucaugagcaucaucuccaccuuccaccugagcauccccaacuucaaccaguacgaggccauguccugcgacuucaacgacgggaagaucagcguccaguacaaccugucccacacguacgcgggcgacaccgccaaccacugcgggaccguggccaacggcgugcuccagaccuucaugcgcauggccuggggcgggagcuacaucgcgcuggacuccggccgcgggggcugggacugcaucaugacgagcuaccaguaccugaucauccagaacaccaccugggaggaccacugccaguucucccggcccagccccaucggguaccucggccugcugucccagcggacccgcgacaucuacaucagccggcgccgccggggcacguucaccuggacccuguccgacagcgaggggaaggacaccccgggcggguacugccucacgcgguggaugcugaucgaggccgagcugaagugcuucggcaacaccgccgucgccaagugcaacgagaagcacgacgaggaguucugcgacaugcuccgccuguucgacuucaacaagcaggccauccagcggcugaaggcgcccgcccagaugagcauccagcucaucaacaaggccgugaacgcccugaucaacgaccagcugaucaugaagaaccaccuccgcgacaucauggggauccccuacugcaacuacuccaaguacugcuaccugaaccacaccgugaccggcaagacgagccugcccaagugcugccucgucuccaacggcagcuaccugaacgagacccacuucuccgacgacaucgagcagcaggccgacaacaugaucaccgagaugcugcagaaggaguacauggagcggcaggggaagacgccccucggccugguggaccuguucguguucagcaccuccuucuaccugaucagcaucuuccuccaccuggucaagaucccgacccaccgccacgugguggggaagcccugccccaagccccaccggcugaaccacaugggcaucugcuccugcggguucuacaagcagccgggcguccccgugcgcuggaagcggugaggacuaguuauaagacugacuagcccgaugggccucccaacgggcccuccuccccuccuugcaccgagauuaauaaaaaaaaaaaaaaaaaaaaaaaaaaaaaaaaaaaaaaaaaaaaaaaaaaaaaaaaaaaaaaaaaaaaaaaaaaaaaaaaaaaaaaaaaaaaaaaaaaaa

SEQ ID NO: 26244 - RNA, 1665 nt, Artificial Sequence
  mRNA product Design i-3 (A100) comprising derived and/or modified sequence from LASV(Z0947-SLE-2011;Clade IV)__AIT17840__GPCmut3 (opt1)
aggagaaagcuuaccaugggccagaucgugaccuucuuccaggaggucccccacgugaucgaggaggugaugaacaucguccugaucgcccucagcauccuggccgugcugaaggggcucuacaacuucgcgaccugcggccugguggggcuggucacguuccuccugcugugcggccgcuccugcaccaucagccucuacaaggggguguacgagcugcagacccuggagcucaacauggagacccugaacaugacgaugccgcuguccugcaccaagaacaacagccaccacuacaucauggugggcaacgagaccggccucgagcugacccugacgaacaccuccaucaucaaccacaaguucugcaaccucagcgacgcccacaagaagaaccuguacgaccacgcccugauguccaucaucagcaccuuccaccucuccauccccaacuucaaccaguacgaggccaugagcugcgacuucaacgggggcaagaucuccguccaguacaaccugagccacuccuacgccggggacgcggccaaccacugcggcaccguggccaacggggugcugcagacguucaugcggauggccuggggcggcagcuacaucgcgcucgacuccgggcgcgaccggugggacugcaucaugaccagcuaccaguaccugaucauccagaacaccaccugggaggaccacugccaguucucccgccccagccccaucggcuaccuggggcuccugucccagcggacgcgcgacaucuacaucagccggcgccgccggggcaccuucaccuggacccugagcgacuccgagggcaaggacacgcccgggggcuacugccugacccgguggaugcucaucgaggccgagcugaagugcuucgggaacaccgccgucgccaagugcaacgagaagcacgacgaggaguucugcgacaugcugcgccucuucgacuucaacaagcaggccauccagcggcugaaggcgcccgcccagaugagcauccagcugaucaacaaggccgugaacgcccucaucaacgaccagcugaucaugaagaaccaccuccgcgacaucaugggcauccccuacugcaacuacuccaaguacugcuaccugaaccacaccacgaccgggaagaccagccugcccaagugcugccugguguccaacggcagcuaccucaacgagacccacuucuccgacgacaucgagcagcaggccgacaacaugaucacggagaugcugcagaaggaguacauggagcggcagggcaagaccccgcuggggcucgucgaccuguucguguucagcaccuccuucuaccugaucagcaucuuccugcaccucgugaagaucccgacccaccgccacaucgucggcaagcccugccccaagccccaccggcugaaccacauggggaucugcuccugcggccuguacaagcagccgggggugcccgugaaguggaagcgcugaggacuaguuauaagacugacuagcccgaugggccucccaacgggcccuccuccccuccuugcaccgagauuaauaaaaaaaaaaaaaaaaaaaaaaaaaaaaaaaaaaaaaaaaaaaaaaaaaaaaaaaaaaaaaaaaaaaaaaaaaaaaaaaaaaaaaaaaaaaaaaaaaaaa

SEQ ID NO: 26245 - RNA, 1665 nt, Artificial Sequence
  mRNA product Design i-3 (A100) comprising derived and/or modified sequence from LASV(Josiah;Clade IV)__NP_694870__GPCmut3 (opt1)
aggagaaagcuuaccaugggccagaucgugaccuucuuccaggaggucccccacgugaucgaggaggugaugaacaucguccugaucgcccucagcgugcuggccgugcugaaggggcucuacaacuucgcgaccugcggccuggucgggcuggugacguuccuccugcugugcggccgcuccugcaccaccagccucuacaaggggguguacgagcugcagacccuggagcucaacauggagacgcugaacaugaccaugccgcuguccugcaccaagaacaacagccaccacuacaucauggucggcaacgagaccggccucgagcugacgcugaccaacaccuccaucaucaaccacaaguucugcaaccucagcgacgcccacaagaagaaccuguacgaccacgcccugauguccaucaucagcaccuuccaccucuccauccccaacuucaaccaguacgaggccaugagcugcgacuucaacgggggcaagaucuccgugcaguacaaccugagccacuccuacgccggggacgcggccaaccacugcggcacgguggccaacgggguccugcagaccuucaugcggauggccuggggcggcagcuacaucgcgcucgacuccgggcgcggcaacugggacugcaucaugaccagcuaccaguaccugaucauccagaacaccacgugggaggaccacugccaguucucccggcccagccccaucggguaccugggccuccugucccagcgcacccgggacaucuacaucagccgccggcgccggggcaccuucaccuggacgcugagcgacuccgaggggaaggacaccccgggcggguacugccucacccgcuggaugcugaucgaggccgagcugaagugcuucggcaacaccgccguggccaagugcaacgagaagcacgacgaggaguucugcgacaugcuccggcuguucgacuucaacaagcaggccauccagcgccugaaggcgcccgcccagaugagcauccagcucaucaacaaggccgugaacgcccugaucaacgaccagcugaucaugaagaaccaccuccgggacaucauggggauccccuacugcaacuacuccaaguacugcuaccugaaccacacgaccaccggccgcaccagccugcccaagugcugccucgucuccaacggcagcuaccugaacgagacgcacuucuccgacgacaucgagcagcaggccgacaacaugaucaccgagaugcugcagaaggaguacauggagcggcaggggaagaccccgcucggccugguggaccuguucguguucagcaccuccuucuaccugaucagcaucuuccuccaccuggucaagauccccacgcaccgccacaucguggggaaguccugccccaagccccaccggcugaaccacaugggcaucugcagcugcgggcucuacaagcagccgggcgugcccgucaaguggaagcgcugaggacuaguuauaagacugacuagcccgaugggccucccaacgggcccuccuccccuccuugcaccgagauuaauaaaaaaaaaaaaaaaaaaaaaaaaaaaaaaaaaaaaaaaaaaaaaaaaaaaaaaaaaaaaaaaaaaaaaaaaaaaaaaaaaaaaaaaaaaaaaaaaaaaa

SEQ ID NO: 26246 - RNA, 1662 nt, Artificial Sequence
  mRNA product Design i-3 (A100) comprising derived and/or modified sequence from LASV(LP;Clade I)__AAF86701__GPCmut3 (opt1)
aggagaaagcuuaccaugggccagaucaucaccuucuuccaggaggugccccacgucaucgaggaggugaugaacaucgugcugaucgcccucagccugcuggccauccucaaggggcuguacaacaucgcgaccugcggcaucaucgggcuggucgccuuccucuuccugugcggcaaguccugcagccugacgcucaagggcggguacgagcugcagacccuggagcucaacauggagacccugaacaugaccaugccgcuguccugcacgaagaacagcucccaccacuacauccgcgugggcaacgagaccgggcucgagcugacccugaccaacacgagcaucaucaaccacaaguucugcaaccucuccgacgcccacaagaagaaccuguacgaccacgcccugaugagcaucaucuccaccuuccaccucagcauccccaacuucaaccaguacgaggccauguccugcgacuucaacggcgggaagaucagcgugcaguacaaccugucccacagcuacgcgggcgacgccgccgagcacugcgggaccgucgccaacggcgugcugcagaccuucaugcggauggcguggggcgggcgcuacaucgcccucgacuccggcaaggggaacugggacugcaucaugacgagcuaccaguaccugaucauccagaacaccaccugggaggaccacugccaguucucccggcccagccccaucggcuaccugggccuccugucccagcgcacccgggacaucuacaucagccgccggcgccgggggacguucaccuggacccugagcgacuccgagggcaacgagacccccgggggcuacugccucacgcgcuggaugcugaucgaggccgagcugaagugcuucgggaacaccgccguggccaagugcaacgagaagcacgacgaggaguucugcgacaugcuccggcuguucgacuucaacaagcaggcgauccgccggcugaaggccccggcccagaugagcauccagcucaucaacaaggccgucaacgcccugaucaacgaccagcugaucaugaagaaccaccuccgcgacaucaugggcauccccuacugcaacuacuccaaguacugcuaccugaaccacaccagcuccggccggaccagccugcccaagugcugccucaucuccaacgggagcuaccugaacgagacgcaguucuccgacgacaucgagcagcaggcggacaacaugaucaccgagaugcugcagaaggaguacaucgagcgccagggcaagaccccgcucgggcugguggacaucuucaucuucagcaccuccuucuaccugaucagcaucuuccugcaccucaucaagauccccacgcaccggcacaucgugggcaagcccugccccaagccgcaccgccugaaccacaugggggucugcuccugcggccuguacaagcaccccggcgugcccaccaaguggaagcggugaggacuaguuauaagacugacuagcccgaugggccucccaacgggcccuccuccccuccuugcaccgagauuaauaaaaaaaaaaaaaaaaaaaaaaaaaaaaaaaaaaaaaaaaaaaaaaaaaaaaaaaaaaaaaaaaaaaaaaaaaaaaaaaaaaaaaaaaaaaaaaaaaaaa

SEQ ID NO: 26247 - RNA, 1662 nt, Artificial Sequence
  mRNA product Design i-3 (A100) comprising derived and/or modified sequence from LASV(803213;Clade II)__AAF86703__GPCmut3 (opt1)
aggagaaagcuuaccaugggccagaucaucaccuucuuccaggaggugccccacgucaucgaggaggugaugaacaucgugcugaucgcccucagccugcuggccauccucaaggggaucuacaacgucgcgaccugcggccuguucgggcugaucuccuuccuccugcugugcggccgcagcugcuccgugacguacaaggggguguacgagcuccagacccuggagcugaacauggccaaccucaacaugaccaugccgcugagcugcaccaagaacaacucccaccacuacaucauggucggcaacgagacgggccuggagcucacccugaccaacaccagcaucaucaaccacaaguucugcaaccuguccgacgcccacaagaagaaccucuacgaccacgcccugaugagcaucaucuccacguuccaccugagcauccccaacuucaaccaguacgaggccauguccugcgacuucaacgggggcaagaucagcgugcaguacaaccucucccacagcuucgcgguggacgccgccaaccacugcgggaccaucgccaacggcguccugcagaccuucaugcggauggcguggggcggguccuacaucgcccuggacagcggcaaggggaacugggacugcaucaugaccuccuaccaguaccucaucauccagaacacgaccugggaggaccacugccaguucagccgccccucccccaucggcuaccuggggcugcucagccagcggacccgcgacaucuacaucagccggcgccggcgcggcaccuucacguggacccuguccgacagcgagggcaacgaggcccccgggggcuacugccugacccgguggaugcucaucgaggccgagcugaagugcuucgggaacaccgccguggcgaagugcaacgagaagcacgacgaggaguucugcgacaugcugcgccucuucgacuucaacaagcaggccaucaagcggcugaagacgccggcccagauguccauccagcugaucaacaaggccgugaacgcccucaucaacgaccagcugaucaugaagaaccaccuccgcgacaucaugggcauccccuacugcaacuacagccgguacugcuaccugaaccacaccgucaccgggaagaccucccugccccgcugcugccuggugagcaacggcuccuaccucaacgagacgcacuucagcgacgacaucgagcagcaggcggacaacaugaucaccgagaugcugcagaaggaguacauggaccggcagggcaagaccccgcuggggcucguggaccuguucgucuucuccaccagcuucuaccugaucuccaucuuccugcaccucgugaagauccccacgcaccgccacaucgugggcaagcccugccccaagccgcaccggcugaaccacauggggaucugcagcugcggccuguacaagcaccccgggguccccgugaaguggaagcgcugaggacuaguuauaagacugacuagcccgaugggccucccaacgggcccuccuccccuccuugcaccgagauuaauaaaaaaaaaaaaaaaaaaaaaaaaaaaaaaaaaaaaaaaaaaaaaaaaaaaaaaaaaaaaaaaaaaaaaaaaaaaaaaaaaaaaaaaaaaaaaaaaaaaa

SEQ ID NO: 26248 - RNA, 1662 nt, Artificial Sequence
  mRNA product Design i-3 (A100) comprising derived and/or modified sequence from LASV(GA391;Clade III)__CAA36645__GPCmut3 (opt1)
aggagaaagcuuaccaugggccagaucgugaccuucuuccaggaggucccccacgugaucgaggaggugaugaacaucguccugaucgcccucagcauccuggccauccugaaggggcucuacaacguggcgaccugcggccugaucgggcuggugacguuccuccugcuguccggccgcagcugcucccucaucuacaaggggaccuacgagcugcagacccuggagcucaacauggagacccugaacaugacgaugccgcugagcugcaccaagaacaacucccaccacuacauccgggucggcaacgagaccggccucgagcugacccugacgaacaccagcauccucaaccacaaguucugcaaccuguccgacgcccacaagcgcaaccuguacgaccacagccucauguccaucaucagcaccuuccaccuguccauccccaacuucaaccaguacgaggccaugagcugcgacuucaacgggggcaagaucaccgugcaguacaaccugucccacagcuucgccguggacgccgcggggcacugcggcacgcucgccaacgggguccugcagaccuucaugcggauggccuggggcggcuccuacaucgcccuggacagcgggcgcggcaacugggacugcaucaugaccuccuaccaguaccucaucauccagaacaccacgugggacgaccacugccaguucagccggcccucccccaucggguaccugggccugcucagccagcgcacccgggacaucuacaucagccgccggcgccggggcaccuucaccuggacgcuguccgacagcgaggggaacgagaccccgggcggguacugccugacccgcuggaugcucaucgaggcggagcugaagugcuucggcaacaccgccguggccaagugcaacgagaagcacgacgaggaguucugcgacaugcugcggcuguucgacuucaacaagcaggccauccgccggcugaagacgcccgcccagauguccauccagcugaucaacaaggcggugaacgcccucaucaacgaccagcugaucaugaagaaccaccuccgcgacaucauggggauccccuacugcaacuacagccgguacugcuaccucaaccacaccuccaccggcaagaccagccugccccgcugcugccugaucuccaacggcagcuaccucaacgagacgaaguucuccgacgacaucgagcagcaggccgacaacaugaucaccgagaugcugcagaaggaguacaucgaccggcaggggaagaccccgcugggccuggucgaccucuucguguucagcaccuccuucuaccugaucagcaucuuccugcaccucgugaagauccccacgcaccgccacaucgucgggaagcccugccccaagccgcaccggcugaaccacaugggcaucugcuccugcgggcuguacaagcagcccggcgugcccgugcgcuggaagcgcugaggacuaguuauaagacugacuagcccgaugggccucccaacgggcccuccuccccuccuugcaccgagauuaauaaaaaaaaaaaaaaaaaaaaaaaaaaaaaaaaaaaaaaaaaaaaaaaaaaaaaaaaaaaaaaaaaaaaaaaaaaaaaaaaaaaaaaaaaaaaaaaaaaaa

SEQ ID NO: 26249 - RNA, 1665 nt, Artificial Sequence
  mRNA product Design i-3 (A100) comprising derived and/or modified sequence from LASV(AV;Clade V)__CCA30314__GPCmut3 (opt1)
aggagaaagcuuaccaugggccagaucgugaccuucuuccaggaggucccccacgugaucgaggaggugaugaacaucguccugaucgcccucagcauccuggccgugcugaaggggcucuacaacaucgcgaccugcggccugaucgggcugaucacguuccuccugcugugcggccgcuccugcagcuccaaccucuacaaggggguguacgagcugcagagccuggaccucaacauggagacccugaacaugaccaugccgcuguccugcaccaagaacaacagccaccacuacauccgggucggcaacgacacgggccucgagcugacccugaccaacaccuccauccucaaccacaaguucugcaaccugagcgacgcccacaagaaggaccuguacgaccacgcccucauguccaucaucagcacguuccaccuguccauccccaacuucaaccaguacgaggccaugagcugcgacuucaacgggggcaagaucuccgugcaguacaaccugagccacuccuacgccaucgacgcggccaaccacugcgggaccguggccaacggcauccuccagaccuucaugcgcauggccuggggcgggagcuacaucgcgcuggacuccggccgggggaacugggacugcaucaugaccagcuaccaguaccugaucauccagaacacgaccugggagaaccacugccaguucucccgccccagccccaucggcuaccucgggcugcugagccagcggacccgcgacaucuacaucucccggcgccggcgcggcaccuucacguggacccucagcgacuccgagggcaacgccacccccgggggcuacugccugacccgguggaugcugaucgaggccgagcucaagugcuucgggaacacggccgucgccaagugcaacgagaagcacgacgaggaguucugcgacaugcugcgccuguucgacuucaacaagcaggcgaucagccggcucaaguccccggcccagaugagcauccagcugaucaacaaggccgugaacgcccugaucaacgaccagcucaucaugaagaaccaccuccgcgacaucaugggcauccccuacugcaacuacuccaaguacugcuaccugaaccacaccaucaccgggaagaccagccugcccaagugcugccugguguccaacggcagcuaccugaacgagacgcacuucuccgacgacaucgagcagcaggccgacaacaugaucaccgagaugcuccagaaggaguacauggagcggcagggcaagaccccgcuggggcuggucgaccuguucguguucagcaccuccuucuaccucaucagcaucuuccugcgccuggugaagauccccacgcaccggcacaucgucggcaagcccugccccaagccgcaccgccucaaccacauggggaucugcuccugcggccuguacaagcagcccggggugcccgugcgguggaagcgcugaggacuaguuauaagacugacuagcccgaugggccucccaacgggcccuccuccccuccuugcaccgagauuaauaaaaaaaaaaaaaaaaaaaaaaaaaaaaaaaaaaaaaaaaaaaaaaaaaaaaaaaaaaaaaaaaaaaaaaaaaaaaaaaaaaaaaaaaaaaaaaaaaaaa

SEQ ID NO: 26250 - RNA, 1662 nt, Artificial Sequence
  mRNA product Design i-3 (A100) comprising derived and/or modified sequence from LASV(Togo/2016/7082;Clade VI)__AMR44577__GPCmut3 (opt1)
aggagaaagcuuaccaugggccagaucaucaccuucuuccaggaggugccccacgucaucgaggaggugaugaacaucgugcugaucgcccucagccugcuggccauccucaagggggucuacaacguggcgaccugcggcaucaucgggcuggugacguuccuguuccucugcggccgcuccugcagccugaucuacaagggguccuacgagcugcagacccucgagcugaacauggagacccugaacaugaccaugccgcucagcugcacgaagaacuccagccaccacuacauccgggucggcaacgagaccggccuggagcugacccucaccaacacguccaucaucaaccacaaguucugcaaccugagcgacgcccacaagcgcaaccuguacgaccacgcccucauguccauccugagcaccuuccaccuguccauccccaacuucaaccaguacgaggccaugagcugcgacuucaacgggggcaagaucuccgugcaguacaaccucagccacgccuacgcgguggacgccgccgagcacugcgggaccgucgccaacggcgugcugcagaccuucaugcggauggcguggggcggguccuacaucgcccuggacagcggccgcgggaacugggacugcaucaugacguccuaccaguaccucaucauccagaacaccaccugggaggaccacugccaguucagccggcccucccccaucggcuaccuggggcugcucagccagcgcacccgggacaucuacaucagccgccggcgccggggcacguucaccuggacccuguccgacagcgagggcaacgagacccccgggggcuacugccugacgcgcuggaugcucaucgaggccgagcugaagugcuucgggaacaccgccguggccaagugcaacgagaagcacgacgaggaguucugcgacaugcugcggcuguucgacuucaacaagcaggcgauccagcgccugaaguccccggcccagaugagcauccagcugaucaacaaggccgucaacgcccucaucaacgaccagcugaucaugaagaaccaccuccgggacaugaugggcauccccuacugcaacuacuccaaguacugcuaccucaaccacaccagcuccgggcgcaccagccugcccaagugcugccugguguccaacggcagcuaccucaacgagacgcacuucuccgacgacaucgagcagcaggccgacaacaugaucaccgagaugcugcagaaggaguacaucgaccggcagggcaagaccccgcuggggcucguggaccuguucgucuucagcaccuccuucuaccugaucagcaucuuccugcaccucaucaagauccccacgcaccgccacaucgugggcaagcccugccccaagccgcaccggcugaaccacauggggaucugcuccugcggccuguacaagcagcccggggugcccacccgcuggaagcggugaggacuaguuauaagacugacuagcccgaugggccucccaacgggcccuccuccccuccuugcaccgagauuaauaaaaaaaaaaaaaaaaaaaaaaaaaaaaaaaaaaaaaaaaaaaaaaaaaaaaaaaaaaaaaaaaaaaaaaaaaaaaaaaaaaaaaaaaaaaaaaaaaaaa

SEQ ID NO: 26251 - RNA, 1662 nt, Artificial Sequence
  mRNA product Design i-3 (A100) comprising derived and/or modified sequence from LASV(KAK-428;Clade n.d. (VII))__ANH09740__GPCmut3 (opt1)
aggagaaagcuuaccaugggccagaucgugaccuucuuccaggaggucccccacgugaucgaggaggugaugaacaucguccugaucgcccucagccugcuggccauccucaaggggcuguacaacuucgcgaccugcggcgugaucgggcugaucacguuccuccugcugugcggccgcuccugcagcgccaccuacaaggggcaguacgagcuccagacccuggagcugaacauggagucccucaacaugaccaugccgcugagcugcacgaagaacaacucccaccacuacauccgggccggcaacaacaccggccuggagcucacccugaccaacacgagcaucaucucccacaaguucugcaaccugagcgacgcccacaagaagaaccucuacgaccacacccugauguccaucaucaccaccuuccaccugagcauccccaacuucaaccaguacgaggccauguccugcgacuucaacgggggcaagaucagcauccaguacaaccucucccacagcuacgcgggggacgccgcccagcacugcggcacgguggccaacgggguccugcagaccuucaugcgcauggcguggggcggcuccuaccuggcccucgacagcgggcggcgcggcugggacugcaucaucuccagcuaccaguaccugaucauccagaacaccaccugggacgaccacugccaguucucccggcccagccccaucggguaccugggcuucgugagccagaagacgcgcgacaucuacaucucccggcgccggcgcggcaccuucaccuggacccucagcgacuccgaggggcacgacaugccgggcggguacugccugacgcgguggaugcugaucgaggccgaccucaagugcuucggcaacaccgccguggccaagugcaacgagaagcacgacgaggaguucugcgacauguggcgccuguucgacuucaacaagcaggcgauccagcggcugaaggcccccgcccagaugaacauccagcucaucaacaaggccgucaacgcccugaucaacgaccagcugaugaugaagaaccaccuccgcgacaucauggggauccccuacugcaacuacagcaaguucugcuaccugaacaacaccaccacgggccggaccucccugccccgcugcugccucaucagcaacggcuccuaccugaacgagacccacuucagcgacgacaucgagcagcaggcggacaacaugaucaccgagaugcugcagaaggaguacauggaccggcaggggaagacgccgcucggccugguggaccuguucguguucuccaccagcuucuaccucaucaccaucuuccugcaccuggucaagauccccacccaccgccacaucguggggaagcccugccccaagccgcaccggcugaaccacaugggcaucugcuccugcgggcucuacaagcagcccggcgugcccguccgcuggaagcggugaggacuaguuauaagacugacuagcccgaugggccucccaacgggcccuccuccccuccuugcaccgagauuaauaaaaaaaaaaaaaaaaaaaaaaaaaaaaaaaaaaaaaaaaaaaaaaaaaaaaaaaaaaaaaaaaaaaaaaaaaaaaaaaaaaaaaaaaaaaaaaaaaaaa

SEQ ID NO: 26252 - RNA, 1662 nt, Artificial Sequence; identical to SEQ ID NO: 26246
  mRNA product Design i-3 (A100) comprising derived and/or modified sequence from LASV(Pinneo-NIG-1969;Clade I)__AIT17836__GPCmut3 (opt1)

SEQ ID NO: 26253 - RNA, 1662 nt, Artificial Sequence
  mRNA product Design i-3 (A100) comprising derived and/or modified sequence from LASV(ISTH0009-NIG-2011;Clade II)__AIT17404__GPCmut3 (opt1)
aggagaaagcuuaccaugggccagaucaucaccuucuuccaggaggugccccacgucaucgaggaggugaugaacaucgugcugaucgcccucagccugcuggccauccucaaggggaucuacaacgucgcgaccugcggccuguucgggcugguguccuuccuccugcugugcggccgcagcugcuccacgaccuacaaggggguguacgagcuccagacccuggagcuggacauggccagccucaacaugaccaugccgcuguccugcacgaagaacaacagccaccacuacaucauggucggcaacgagaccggccuggagcucacccugaccaacacguccaucaucaaccacaaguucugcaaccugagcgacgcccacaagaagaaccucuacgaccacgcccugauguccaucaucagcaccuuccaccuguccauccccaacuucaaccaguacgaggccaugagcugcgacuucaacgggggcaagaucuccgugcaguacaaccucagccacgcguacgccguggacgccgccaaccacugcgggaccaucgcgaacggcguccugcagaccuucaugcggauggccuggggcggguccuacaucgcccuggacagcggcaagggguccugggacugcaucaugacgagcuaccaguaccucaucauccagaacaccaccugggaggaccacugccaguucucccgccccagccccaucggcuaccuggggcugcucagccagcggacccgcgacaucuacaucucccggcgccggcgcggcacguucaccuggacccugagcgacuccgagggcaacgagacccccgggggcuacugccugacgcgguggaugcucaucgaggccgagcugaagugcuucgggaacaccgccguggcgaagugcaacgagaagcacgacgaggaguucugcgacaugcugcgccucuucgacuucaacaagcaggccauccggcgccugaagaccccggcccagaugagcauccagcugaucaacaaggccgugaacgcccucaucaacgaccagcugaucaugaagaaccaccuccgggacaucaugggcauccccuacugcaacuacuccaaguacugcuaccugaaccacaccgucacggggaagaccagccugccccgcugcugccugguguccaacggcagcuaccucaacgagacccacuucuccgacgacaucgagcagcaggcggacaacaugaucaccgagcugcugcagaaggaguacauggaccggcagggcaagacgccgcucgggcugguggaccuguucgucuucagcaccuccuucuaccugaucagcaucuuccuccaccugaucaagauccccacccaccgccacaucaccggcaagcccugccccaagccgcaccggcugaaccacauggggaucugcuccugcggccucuacaagcaccccggggugcccgugaaguggaagcgcugaggacuaguuauaagacugacuagcccgaugggccucccaacgggcccuccuccccuccuugcaccgagauuaauaaaaaaaaaaaaaaaaaaaaaaaaaaaaaaaaaaaaaaaaaaaaaaaaaaaaaaaaaaaaaaaaaaaaaaaaaaaaaaaaaaaaaaaaaaaaaaaaaaaa

SEQ ID NO: 26254 - RNA, 1662 nt, Artificial Sequence
  mRNA product Design i-3 (A100) comprising derived and/or modified sequence from LASV(ISTH2010-NIG-2012;Clade II)__AIT17482__GPCmut3 (opt1)
aggagaaagcuuaccaugggccagaucaucaccuucuuccaggaggugccccacgucaucgaggaggugaugaacaucgugcugaucgcccucagccugcuggccauccucaaggggaucuacaacgucgcgaccugcggccuguucgggcugguguccuuccuccugcugugcggccgcagcugcuccacgaccuacaaggggguguacgagcuccagacccuggagcuggacauggccagccucaacaugaccaugccgcuguccugcacgaagaacaacagccaccacuacaucauggucggcaacgagaccggccuggagcucacccugaccaacacguccaucaucaaccacaaguucugcaaccugagcgacgcccacaagaagaaccucuacgaccacgcccugauguccaucaucagcaccuuccaccuguccauccccaacuucaaccaguacgaggccaugagcugcgacuucaacgggggcaagaucuccgugcaguacaaccucagccacgcguacgccguggacgccgccaaccacugcgggaccaucgcgaacggcguccugcagaccuucaugcggauggccuggggcggguccuacaucgcccuggacagcggcaagggguccugggacugcaucaugacgagcuaccaguaccucaucauccagaacaucaccugggaggaccacugccaguucucccgccccagccccaucggcuaccuggggcugcucagccagcggacccgcgacaucuacaucucccggcgccggcgcggcaccuucacguggacccugagcgacuccgagggcaacgagacccccgggggcuacugccugacccgguggaugcucaucgaggccgagcugaagugcuucgggaacacggccguggcgaagugcaacgagaagcacgacgaggaguucugcgacaugcugcgccucuucgacuucaacaagcaggccauccggcgccugaagaccccggcccagaugagcauccagcugaucaacaaggccgugaacgcccucaucaacgaccagcugaucaugaagaaccaccuccgggacaucaugggcauccccuacugcaacuacuccaaguacugcuaccugaaccacaccgucaccgggaagacgagccugccccgcugcugccugguguccaacggcagcuaccucaacgagacccacuucuccgacgacaucgagcagcaggcggacaacaugaucaccgagcugcugcagaaggaguacaucgaccggcagggcaagaccccgcucgggcugguggaccuguucgucuucagcacguccuucuaccugaucagcaucuuccuccaccuggugaagauccccacccaccgccacguggucggcaagcccugccccaagccgcaccggcugaaccacauggggaucugcuccugcggccucuacaagcaccccggggugcccgugaaguggaagcgcugaggacuaguuauaagacugacuagcccgaugggccucccaacgggcccuccuccccuccuugcaccgagauuaauaaaaaaaaaaaaaaaaaaaaaaaaaaaaaaaaaaaaaaaaaaaaaaaaaaaaaaaaaaaaaaaaaaaaaaaaaaaaaaaaaaaaaaaaaaaaaaaaaaaa

SEQ ID NO: 26255 - RNA, 1662 nt, Artificial Sequence
  mRNA product Design i-3 (A100) comprising derived and/or modified sequence from LASV(Lassa virus/H.sapiens-wt/NGA/2015/ISTH_0543;Clade II)__AVO03639__GPCmut3 (opt1)
aggagaaagcuuaccaugggccagaucaucaccuucuuccaggaggugccccacgucaucgaggaggugaugaacaucgugcugaucgcccucagccugcuggccauccucaaggggaucuacaacgucgcgaccugcggccuguucgggcugguguccuuccuccugcugugcggccgcagcugcuccacgaccuacaaggggguguacgagcuccagacccuggagcuggacauggccaaccucaacaugaccaugccgcugagcugcacgaagaacaacucccaccacuacaucauggucggcaacgagaccggccuggagcucacccugaccaacacgagcaucaucaaccacaaguucugcaaccuguccgacgcccacaagaagaaccucuacgaccacgcccugaugagcaucaucuccaccuuccaccugagcauccccaacuucaaccaguacgaggccauguccugcgacuucaacgggggcaagaucagcgugcaguacaaccucucccacaccuacgcgguggacgccgccaaccacugcgggaccaucgccaacggcguccugcagacguucaugcggauggcguggggcgggagcuacaucgcccuggacuccggcaaggggagcugggacugcaucaugaccuccuaccaguaccucgugauccagaacaccaccugggaggaccacugccaguucagccgccccucccccaucggcuaccuggggcugcucagccagcggacgcgcgacaucuacaucagccggcgccggcgcggcaccuucaccuggacccuguccgacagcgagggcaacgagacgcccgggggcuacugccugacccgguggaugcucaucgaggccgagcugaagugcuucgggaacaccgccguggccaagugcaacgagaagcacgacgaggaguucugcgacaugcugcgccucuucgacuucaacaagcaggcgauccggcgccugaagaccccggcccagauguccauccagcugaucaacaaggccgucaacgcccucaucaacgaccagcugaucaugaagaaccaccuccgggacaucaugggcauccccuacugcaacuacagcaaguacugcuaccugaaccacacggugaccgggaagaccucccugccccgcugcugccuggugagcaacggcuccuaccucaacgagacccacuucagcgacgacaucgagcagcaggccgacaacaugaucacggagcugcugcagaaggaguacaucgaccggcagggcaagaccccgcucgggcuggucgaccuguucguguucuccaccagcuucuaccugaucuccaucuuccuccaccuggugaagauccccacccaccgccacaucacgggcaagcccugccccaagccgcaccggcugaaccacauggggaucugcagcugcggccucuacaagcaccccgggguccccgugaaguggaagcgcugaggacuaguuauaagacugacuagcccgaugggccucccaacgggcccuccuccccuccuugcaccgagauuaauaaaaaaaaaaaaaaaaaaaaaaaaaaaaaaaaaaaaaaaaaaaaaaaaaaaaaaaaaaaaaaaaaaaaaaaaaaaaaaaaaaaaaaaaaaaaaaaaaaaa

SEQ ID NO: 26256 - RNA, 1662 nt, Artificial Sequence
  mRNA product Design i-3 (A100) comprising derived and/or modified sequence from LASV(Lassa virus/H.sapiens-wt/NGA/2016/ISTH_0009;Clade II)__AVO03571__GPCmut3 (opt1)
aggagaaagcuuaccaugggccagaucaucaccuucuuccaggaggugccccacgucaucgaggaggugaugaacaucgugcugaucgcccucagccugcuggccauccucaaggggaucuacaacgucgcgaccugcggccugcuggggcucguguccuuccugcugcucugcggccgcagcugcuccacgaccuacaaggggguguacgagcugcagacccuggagcucgacauggccagccugaacaugaccaugccgcuguccugcacgaagaacaacagccaccacuacaucauggucggcaacgagaccggccucgagcugacccugaccaacacguccaucaucaaccacaaguucugcaaccucagcgacgcccacaagaagaaccuguacgaccacgcccugauguccaucaucagcaccuuccaccucuccauccccaacuucaaccaguacgaggccaugagcugcgacuucaacgggggccggaucuccgugcaguacaaccugagccacuccuacgcgguggacgccgccaaccacugcgggaccaucgccaacggcguccugcagaccuucaugcgcauggcguggggcgggagcuacaucgcccucgacuccggcaaggggagcugggacugcaucaugacguccuaccaguaccugaucauccagaacaccaccugggaggaccacugccaguucagccggcccagccccaucggcuaccuggggcuccugucccagcgcacccgggacaucuacaucagccgccggcgccggggcacguucaccuggacccuguccgacagcgagggcaacgagacccccgggggcuacugccucacgcgcuggaugcugaucgaggccgagcugaagugcuucgggaacaccgccguggccaagugcaacgagaagcacgacgaggaguucugcgacaugcuccggcuguucgacuucaacaagcaggcgauccgccggcugaagaccccggcccagauguccauccagcucaucaacaaggccgugaacgcccugaucaacgaccagcugaucaugaagaaccaccuccgcgacaucaugggcauccccuacugcaacuacagcaaguacugcuaccugaaccacaccgucacggggaagaccucccugccccggugcugccucgugagcaacggcuccuaccugaacgagacccacuucagcgacgacaucgagcagcaggccgacaacaugaucaccgagcugcuccagaaggaguacaucgaccgccagggcaagacgccgcuggggcugguggaccuguucgucuucuccaccagcuucuaccucaucuccaucuuccugcaccuggugaagauccccacccaccggcacaucaccggcaagcccugccccaagccgcaccgccucaaccacauggggaucugcagcugcggccuguacaaccaccccggggugcccgucaaguggaagcggugaggacuaguuauaagacugacuagcccgaugggccucccaacgggcccuccuccccuccuugcaccgagauuaauaaaaaaaaaaaaaaaaaaaaaaaaaaaaaaaaaaaaaaaaaaaaaaaaaaaaaaaaaaaaaaaaaaaaaaaaaaaaaaaaaaaaaaaaaaaaaaaaaaaa

SEQ ID NO: 26257 - RNA, 1662 nt, Artificial Sequence
  mRNA product Design i-3 (A100) comprising derived and/or modified sequence from LASV(Lassa virus/H.sapiens-wt/NGA/2016/ISTH_0017;Clade II)__AVO03567__GPCmut3 (opt1)
aggagaaagcuuaccaugggccagaucaucaccuucuuccaggaggugccccacgucaucgaggaggugaugaacaucgugcugaucgcccucagccugcuggccauccucaaggggaucuacaacgucgcgaccugcggccuguucgggcugguguccuuccuccugcugugcggccgcagcugcuccacgaccuacaaggggguguacgagcuccagacccuggagcuggacauggccagccucaacaugaccaugccgcuguccugcacgaagaacaacagccaccacuacaucauggucggcaacgagaccggccuggagcucacccugaccaacacguccaucaucaaccacaaguucugcaaccugagcgacgcccacaagaagaaccucuacgaccacgcccugauguccaucaucagcaccuuccaccuguccauccccaacuucaaccaguacgaggccaugagcugcgacuucaacgggggcaagaucuccgugcaguacaaccucagccacaccuacgcgaucgacgccgccaaccacugcgggaccaucgccaacggcgugcugcagacguucaugcggauggcguggggcggguccuacaucgcccuggacagcggcaagggguccugggacugcaucaugaccagcuaccaguaccucaucauccagaacaccaccugggaggaccacugccaguucucccgccccagccccaucggcuaccuggggcugcucagccagcggacgcgcgacaucuacaucucccggcgccggcgcggcaccuucaccuggacccugagcgacuccgagggcaacgagacgcccgggggcuacugccugacccgguggaugcucaucgaggccgagcugaagugcuucgggaacaccgccgucgccaagugcaacgagaagcacgacgaggaguucugcgacaugcugcgccucuucgacuucaacaagcaggcgauccggcgccugaagaccccggcccagaugagcauccagcugaucaacaaggccgugaacgcccucaucaacgaccagcugaucaugaagaaccaccuccgggacaucaugggcauccccuacugcaacuacuccaaguacugcuaccugaaccacacggugaccgggaagaccagccugccccgcugcugccuggucuccaacggcagcuaccucaacgagacccacuucuccgacgacaucgagcagcaggccgacaacaugaucacggagcugcugcagaaggaguacauggaccggcagggcaagaccccgcucgggcugguggaccuguucguguucagcaccuccuucuaccugaucagcaucuuccuccaccugguccgcauccccacccaccggcacgugaucggcaagcccugccccaagccgcaccgccugaaccacauggggaucugcuccugcggccucuacaagcaccccggggugcccgucaaguggaagcggugaggacuaguuauaagacugacuagcccgaugggccucccaacgggcccuccuccccuccuugcaccgagauuaauaaaaaaaaaaaaaaaaaaaaaaaaaaaaaaaaaaaaaaaaaaaaaaaaaaaaaaaaaaaaaaaaaaaaaaaaaaaaaaaaaaaaaaaaaaaaaaaaaaaa

SEQ ID NO: 26258 - RNA, 1662 nt, Artificial Sequence
  mRNA product Design i-3 (A100) comprising derived and/or modified sequence from LASV(Lassa virus/H.sapiens-wt/NGA/2018/ISTH_0959;Clade II)__AVV65099__GPCmut3 (opt1)
aggagaaagcuuaccaugggccagaucaucaccuucuuccaggaggugccccacgucaucgaggaggugaugaacaucgugcugaucgcccucagccugcuggccauccucaaggggaucuacaacgucgugaccugcggccuguucgggcugguguccuuccuccugcugugcggccgcagcugcuccacgaccuacaagggggucuacgagcuccagacccuggagcuggacauggcgagccucaacaugaccaugccgcuguccugcacgaagaacaacagccaccacuacaucauggugggcaacgagaccggccuggagcucacccugaccaacacguccaucaucaaccacaaguucugcaaccugagcgacgcccacaagaagaaccucuacgaccacgcccugauguccaucaucagcaccuuccaccuguccauccccaacuucaaccaguacgaggccaugagcugcgacuucaacgggggcaagaucuccgugcaguacaaccucagccacgccuacgcgaucgacgccgccaaccacugcgggaccaucgccaacggcguccugcagaccuucaugcggauggcguggggcggguccuacaucgcccuggacagcggcaagggguccugggacugcaucaugacgagcuaccaguaccucaucauccagaacaccaccugggaggaccacugccaguucucccgccccagccccaucggcuaccuggggcugcucagccagcggacccgcgacaucuacaucucccggcgccggcgcggcacguucaccuggacccugagcgacuccgagggcaacgagacccccgggggcuacugccugacgcgguggaugcucaucgaggccgagcugaagugcuucgggaacaccgccguggccaagugcaacgagaagcacgacgaggaguucugcgacaugcugcgccucuucgacuucaacaagcaggcgauccggcgccugaagaccccggcccagaugagcauccagcugaucaacaaggccgugaacgcccucaucaacgaccagcugaucaugaagaaccaccuccgggacaucaugggcauccccuacugcaacuacuccaaguacugcuaccugaaccacaccgucacggggaagaccagccugccccgcugcugccugguguccaacggcagcuaccucaacgagacccacuucuccgacgacaucgagcagcaggccgacaacaugaucaccgagcugcugcagaaggaguacaucgaccggcagggcaagacgccgcucgggcugguggaccuguucgucuucagcaccuccuucuaccugaucagcaucuuccuccaccuggugaagauccccacccaccgccacgugaucggcaagcccugccccaagccgcaccggcugaaccacauggggaucugcuccugcggccucuacaagcaccccgggguccccgugaaguggaagcgcugaggacuaguuauaagacugacuagcccgaugggccucccaacgggcccuccuccccuccuugcaccgagauuaauaaaaaaaaaaaaaaaaaaaaaaaaaaaaaaaaaaaaaaaaaaaaaaaaaaaaaaaaaaaaaaaaaaaaaaaaaaaaaaaaaaaaaaaaaaaaaaaaaaaa

SEQ ID NO: 26259 - RNA, 1662 nt, Artificial Sequence
  mRNA product Design i-3 (A100) comprising derived and/or modified sequence from LASV(LASV003-NIG-2008;Clade II)__AIT17580__GPCmut3 (opt1)
aggagaaagcuuaccaugggccagaucaucaccuucuuccaggaggugccccacgucaucgaggaggugaugaacaucgugcugaucgcccucagccugcuggccauccucaaggggaucuacaacgucgcgaccugcggccuguucgggcugguguccuuccuccugcugugcggccgcagcugcuccacgaccuacaaggggguguacgagcuccagacccuggagcuggacauggccagccucaacaugaccaugccgcuguccugcacgaagaacaacagccaccacuacaucauggucggcaacgagaccggccuggagcucacccugaccaacacguccaucaucaaccacaaguucugcaaccugagcgacgcccacaagaagaaccucuacgaccacgcccugauguccaucaucagcaccuuccaccuguccauccccaacuucaaccaguacgaggccaugagcugcgacuucaacgggggcaagaucuccgugcaguacaaccucagccacaccuacgcgguggacgccgccaaccacugcgggaccaucgccaacggcguccugcagacguucaugcggauggcguggggcggguccuacaucgcccuggacagcggcaagggguccugggacugcaucaugaccagcuaccaguaccucaucauccagaacaccaccugggaggaccacugccaguucucccgccccagccccaucggcuaccuggggcugcucagccagcggacgcgcgacaucuacaucucccggcgccggcgcggcaccuucaccuggacccugagcgacuccgagagcaacgagacgccgggcggguacugccugacccgguggaugcucaucgaggccgagcugaagugcuucggcaacaccgccguggccaagugcaacgagaagcacgacgaggaguucugcgacaugcugcgccucuucgacuucaacaagcaggcgauccggcgccugaaggcccccgcccagauguccauccagcugaucaacaaggccgugaacgcccucaucaacgaccagcugaucaugaagaaccaccuccgggacaucauggggauccccuacugcaacuacagcaaguacugcuaccugaaccacaccgucacgggccgcaccucccugccccggugcugccuggugagcaacggguccuaccucaacgagacccacuucagcgacgacaucgagcagcaggcggacaacaugaucaccgagcugcugcagaaggaguacauggaccgccagggcaagacgccgcucggccugguggaccuguucgucuucuccaccagcuucuaccugaucuccaucuuccuccaccuggugaagauccccacccaccggcacgugaucgggaagcccugccccaagccgcaccgccugaaccacaugggcaucugcagcugcgggcucuacaagcaccccggcguccccgugaaguggaagcggugaggacuaguuauaagacugacuagcccgaugggccucccaacgggcccuccuccccuccuugcaccgagauuaauaaaaaaaaaaaaaaaaaaaaaaaaaaaaaaaaaaaaaaaaaaaaaaaaaaaaaaaaaaaaaaaaaaaaaaaaaaaaaaaaaaaaaaaaaaaaaaaaaaaa

SEQ ID NO: 26260 - RNA, 1662 nt, Artificial Sequence
  mRNA product Design i-3 (A100) comprising derived and/or modified sequence from LASV(LASV035-NIG-2009;Clade II)__AIT17588__GPCmut3 (opt1)
aggagaaagcuuaccaugggccagaucaucaccuucuuccaggaggugccccacgucaucgaggaggugaugaacaucgugcugaucgcccucagccugcuggccauccucaaggggaucuacaacgucgcgaccugcggccuguucgggcugguguccuuccuccugcugugcggccgcagcugcuccacgaccuacaaggggguguacgagcuccagacccuggagcuggacauggccagccucaacaugaccaugccgcuguccugcacgaagaacaacagccaccacuacaucauggucggcaacgagaccggccuggagcucacccugaccaacacguccaucaucaaccacaaguucugcaaccugagcgacgcccacaagaagaaccucuacgaccacgcccugauguccaucaucagcaccuuccaccuguccauccccaacuucaaccaguacgaggccaugagcugcgacuucaacgggggcaagaucuccgugcaguacaaccucagccacgcguacgccguggacgccgccaaccacugcgggaccaucgcgaacggcguccugcagaccuucaugcggauggccuggggcggguccuacaucgcccuggacagcggcaagggguccugggacugcaucaugacgagcuaccaguaccucaucauccagaacaccaccugggaggaccacugccaguucucccgccccagccccaucggcuaccuggggcugcucagccagcggacccgcgacaucuacaucucccggcgccggcgcggcacguucaccuggacccugagcgacuccgagggcaacgagacccccgggggcuacugccugacgcgguggaugcucaucgaggccgagcugaagugcuucgggaacaccgccguggcgaagugcaacgagaagcacgacgaggaguucugcgacaugcugcgccucuucgacuucaacaagcaggccauccggcgccugaaggccccggcccagaugagcauccagcugaucaacaaggccgugaacgcgcucaucaacgaccagcugaucaugaagaaccaccuccgggacaucaugggcauccccuacugcaacuacuccaaguacugcuaccugaaccacaccgucaccgggaagacgagccugccccgcugcugccugguguccaacggcagcuaccucaacgagacccacuucuccgacgacaucgagcagcaggccgacaacaugaucaccgagcugcugcagaaggaguacaucgaccggcagggcaagaccccgcucgggcugguggaccuguucgucuucagcacguccuucuaccugaucagcaucuuccuccaccuggugaagauccccacccaccgccacgugaucggcaagcccugccccaagccgcaccggcugaaccacauggggaucugcuccugcggccucuacaagcaccccgggguccccgugaaguggaagcgcugaggacuaguuauaagacugacuagcccgaugggccucccaacgggcccuccuccccuccuugcaccgagauuaauaaaaaaaaaaaaaaaaaaaaaaaaaaaaaaaaaaaaaaaaaaaaaaaaaaaaaaaaaaaaaaaaaaaaaaaaaaaaaaaaaaaaaaaaaaaaaaaaaaaa

SEQ ID NO: 26261 - RNA, 1662 nt, Artificial Sequence
  mRNA product Design i-3 (A100) comprising derived and/or modified sequence from LASV(LASV1000-NIG-2009;Clade II)__AIT17782__GPCmut3 (opt1)
aggagaaagcuuaccaugggccagaucaucaccuucuuccaggaggugccccacgucaucgaggaggugaugaacaucgugcugaucgcccucagccugcuggccauccucaaggggaucuacaacgucgcgaccugcggccuguucgggcugguguccuuccuccugcugugcggccgcagcugcuccacgaccuacaaggggguguacgagcuccagacccuggagcuggacauggccagccucaacaugaccaugccgcuguccugcacgaagaacaacagccaccacuacaucauggucggcaacgagaccggccuggagcucacccugaccaacacguccaucaucaaccacaaguucugcaaccugagcgacgcccacaagaagaaccucuacgaccacgcccugauguccaucaucagcaccuuccaccuguccauccccaacuucaaccaguacgaggccaugagcugcgacuucaacgggggcaagaucuccgugcaguacaaccucagccacaccuacgcgguggacgccgccaaccacugcgggaccaucgccaacggcguccugcagacguucaugcggauggcguggggcggguccuacaucgcccuggacagcggcaagggguccugggacugcaucaugaccagcuaccaguaccucaucauccagaacaccaccugggaggaccacugccaguucucccgccccagccccaucggcuaccuggggcugcucagccagcggacgcgcgacaucuacaucucccggcgccggcgcggcaccuucaccuggacccugagcgacuccgagggcaacgagacgcccgggggcuacugccugacccgguggaugcucaucgaggccgagcugaagugcuucgggaacaccgccguggccaagugcaacgagaagcacgacgaggaguucugcgacaugcugcgccucuucgacuucaacaagcaggcgaucaagcggcugaagaccccggcccagaugagcauccagcugaucaacaaggccgugaacgcccucaucaacgaccagcugaucaugaagaaccaccuccgcgacaucaugggcauccccuacugcaacuacuccaaguacugcuaccugaaccacacggucaccgggaagaccagccugccccggugcugccugguguccaacggcagcuaccucaacgagacccacuucuccgacgacaucgagcagcaggccgacaacaugaucacggagcugcugcagaaggaguacaucgaccgccagggcaagaccccgcucgggcugguggaccuguucgucuucagcaccuccuucuaccugaucagcaucuuccuccaccuggugaagauccccacccaccggcacguggucggcaagcccugccccaagccgcaccgccugaaccacauggggaucugcuccugcggccucuacaagcaccccggggugcccgugaaguggaagcggugaggacuaguuauaagacugacuagcccgaugggccucccaacgggcccuccuccccuccuugcaccgagauuaauaaaaaaaaaaaaaaaaaaaaaaaaaaaaaaaaaaaaaaaaaaaaaaaaaaaaaaaaaaaaaaaaaaaaaaaaaaaaaaaaaaaaaaaaaaaaaaaaaaaa

SEQ ID NO: 26262 - RNA, 1662 nt, Artificial Sequence
  mRNA product Design i-3 (A100) comprising derived and/or modified sequence from LASV(LASV221-NIG-2010;Clade II)__AIT17624__GPCmut3 (opt1)
aggagaaagcuuaccaugggccagaucaucaccuucuuccaggaggugccccacgucaucgaggaggugaugaacaucgugcugaucgcccucagccugcuggccauccucaaggggaucuacaacgucgcgaccugcggccuguucgggcugguguccuuccuccugcugugcggccgcagcugcuccacgaccuacaaggggguguacgagcuccagacccuggagcuggacauggccagccucaacaugaccaugccgcuguccugcacgaagaacaacagccaccacuacaucauggucggcaacgagaccggccuggagcucacccugaccaacacguccaucaucaaccacaaguucugcaaccugagcgacgcccacaagaagaaccucuacgaccacgcccugauguccaucaucagcaccuuccaccuguccauccccaacuucaaccaguacgaggccaugagcugcgacuucaacgggggcaagaucuccgugcaguacaaccucagccacaccuacgcgaucgacgccgccaaccacugcgggaccaucgccaacggcgugcugcagacguucaugcggauggcguggggcggguccuacaucgcccuggacagcggcaagggguccugggacugcaucaugaccagcuaccaguaccucaucauccagaacaccaccugggaggaccacugccaguucucccgccccagccccaucggcuaccuggggcugcucagccagcggacgcgcgacaucuacaucucccggcgccggcgcggcaccuucaccuggacccugagcgacuccgagggcaacgagacgcccgggggcuacugccugacccgguggaugcucaucgaggccgagcugaagugcuucgggaacaccgccgucgccaagugcaacgagaagcacgacgaggaguucugcgacaugcugcgccucuucgacuucaacaagcaggcgauccggcgccugaagaccccggcccagaugagcauccagcugaucaacaaggccgugaacgcccucaucaacgaccagcugaucaugaagaaccaccuccgggacaucaugggcauccccuacugcaacuacuccaaguacugcuaccugaaccacacggugaccgggaagaccagccugccccgcugcugccuggucuccaacggcagcuaccucaacgagacccacuucuccgacgacaucgagcagcaggccgacaacaugaucacggagaugcugcagaaggaguacauggaccggcagggcaagaccccgcuggggcucguggaccuguucguguucagcaccuccuucuaccugaucagcaucuuccugcaccucgucaagauccccacccaccgccacgugaucggcaagcccugccccaagccgcaccggcugaaccacauggggaucugcuccugcggccuguacaagcaccccggggugcccgucaaguggaagcgcugaggacuaguuauaagacugacuagcccgaugggccucccaacgggcccuccuccccuccuugcaccgagauuaauaaaaaaaaaaaaaaaaaaaaaaaaaaaaaaaaaaaaaaaaaaaaaaaaaaaaaaaaaaaaaaaaaaaaaaaaaaaaaaaaaaaaaaaaaaaaaaaaaaaa

SEQ ID NO: 26263 - RNA, 1662 nt, Artificial Sequence
  mRNA product Design i-3 (A100) comprising derived and/or modified sequence from LASV(LASV237-NIG-2010;Clade II)__AIT17638__GPCmut3 (opt1)
aggagaaagcuuaccaugggccagaucaucaccuucuuccaggaggugccccacgucaucgaggaggugaugaacaucgugcugaucgcccucagccugcuggccauccucaaggggaucuacaacgucgcgaccugcggccuguucgggcugguguccuuccuccugcugugcggccgcagcugcuccacgaccuacaaggggguguacgagcuccagacccuggagcuggacauggccagccucaacaugaccaugccgcuguccugcacgaagaacaacagccaccacuacaucauggucggcaacgagaccggccuggagcucacccugaccaacacguccaucaucaaccacaaguucugcaaccugagcgacgcccacaagaaggaccucuacgaccacgcccugauguccaucaucagcaccuuccaccuguccauccccaacuucaaccaguacgaggccaugagcugcgacuucaacgggggcaagaucuccgugcaguacaaccucagccacaccuacgcgguggacgccgccaaccacugcgggaccaucgccaacggcguccugcagacguucaugcggauggcguggggcggguccuacaucgcccuggacagcggcaagggguccugggacugcaucaugaccagcuaccaguaccucaucauccagaacaccaccugggaggaccacugccaguucucccgccccagccccaucggcuaccuggggcugcucagccagcggacgcgcgacaucuacaucucccggcgccggcgcggcaccuucaccuggacccugagcgacuccgagggcaacgagacgcccgggggcuacugccugacccgguggaugcucaucgaggccgagcugaagugcuucgggaacaccgccguggccaagugcaacgagaagcacgacgaggaguucugcgacaugcugcgccucuucgacuucaacaagcaggcgauccggcgccugaagaccccggcccagaugagcauccagcugaucaacaaggccgugaacgcccucaucaacgaccagcugaucaugaagaaccaccuccgggacaucaugggcauccccuacugcaacuacuccaaguacugcuaccugaaccacacggucaccgggaagaccagccugccccgcugcugccugguguccaacggcagcuaccucaacgagacccacuucuccgacgacaucgagcagcaggccgacaacaugaucacggagcugcugcagaaggaguacauggaccggcagggcaagaccccgcucgggcugguggaccuguucgucuucagcaccuccuucuaccugaucagcaucuuccuccaccugaucaagauccccacccaccgccacaucacgggcaagcccugccccaagccgcaccggcugaaccacauggggaucugcuccugcggccucuacaagcaccccggggugcccgugaaguggaagcgcugaggacuaguuauaagacugacuagcccgaugggccucccaacgggcccuccuccccuccuugcaccgagauuaauaaaaaaaaaaaaaaaaaaaaaaaaaaaaaaaaaaaaaaaaaaaaaaaaaaaaaaaaaaaaaaaaaaaaaaaaaaaaaaaaaaaaaaaaaaaaaaaaaaaa

SEQ ID NO: 26264 - RNA, 1662 nt, Artificial Sequence
  mRNA product Design i-3 (A100) comprising derived and/or modified sequence from LASV(LASV253-NIG-2011;Clade II)__AIT17670__GPCmut3 (opt1)
aggagaaagcuuaccaugggccagaucaucaccuucuuccaggaggugccccacgucaucgaggaggugaugaacaucgugcugaucgcccucagccugcuggccauccucaaggggaucuacaacgucgcgaccugcggccuguucgggcugguguccuuccuccugcugugcggccgcagcugcuccacgaccuacaaggggguguacgagcuccagacccuggagcuggacauggccagccucaacaugaccaugccgcuguccugcacgaagaacaacagccaccacuacaucauggucggcaacgagaccggccuggagcucacccugaccaacacguccaucaucaaccacaaguucugcaaccugagcgacgcccacaagaagaaccucuacgaccacgcccugauguccaucaucagcaccuuccaccuguccauccccaacuucaaccaguacgaggccaugagcugcgacuucaacgggggcaagaucuccgugcaguacaaccucagccacaccuacgcgguggacgccgccaaccacugcgggaccaucgccaacggcguccugcagacguucaugcggauggcguggggcggguccuacaucgcccuggacagcggcaagggguccugggacugcaucaugaccagcuaccaguaccucaucauccagaacaccaccugggaggaccacugccaguucucccgccccagccccaucggcuaccuggggcugcucagccagcggacgcgcgacaucuacaucucccggcgccggcgcggcaccuucaccuggacccugagcgacuccgagggcaacgagacgcccgggggcuacugccugacccgguggaugcucaucgaggccgagcugaagugcuucgggaacaccgccguggccaagugcaacgagaagcacgacgaggaguucugcgacaugcugcgccucuucgacuucaacaagcaggcgauccggcgccugaaggccccggcccagaugagcauccagcugaucaacaaggccgugaacgcccucaucaacgaccagcugaucaugaagaaccaccuccgggacaucaugggcauccccuacugcaacuacuccaaguacugcuaccugaaccacaccgucacggggcgcaccagccugccccggugcugccugguguccaacggcagcuaccucaacgagacccacuucuccgacgacaucgagcagcaggcggacaacaugaucaccgagcugcugcagaaggaguacaucgaccgccagggcaagacgccgcucgggcugguggaccuguucgucuucagcaccuccuucuaccugaucagcaucuuccuccaccuggugaagauccccacccaccggcacaucaucggcaagcccugccccaagccgcaccgccugaaccacauggggaucugcuccugcggccucuacaagcaccccggggugcccgucaaguggaagcggugaggacuaguuauaagacugacuagcccgaugggccucccaacgggcccuccuccccuccuugcaccgagauuaauaaaaaaaaaaaaaaaaaaaaaaaaaaaaaaaaaaaaaaaaaaaaaaaaaaaaaaaaaaaaaaaaaaaaaaaaaaaaaaaaaaaaaaaaaaaaaaaaaaaa

SEQ ID NO: 26265 - RNA, 1662 nt, Artificial Sequence
  mRNA product Design i-3 (A100) comprising derived and/or modified sequence from LASV(LASV254-NIG-2011;Clade II)__AIT17674__GPCmut3 (opt1)
aggagaaagcuuaccaugggccagaucaucaccuucuuccaggaggugccccacgucaucgaggaggugaugaacaucgugcugaucgcccucagccugcuggccauccucaaggggaucuacaacgucgcgaccugcggccuguucgggcugguguccuuccuccugcugugcggccgcagcugcuccacgaccuacaaggggguguacgagcuccagacccuggagcuggacaugaccaaccucaacaugacgaugccgcugagcugcaccaagaacaacucccaccacuacaucauggucggcaacgagaccggccuggagcucacccugacgaacaccagcaucaucaaccacaaguucugcaaccuguccgacgcccacaagaagaaccucuacaaccacgcccugaugagcaucaucuccaccuuccaccugagcauccccaacuucaaccaguacgaggccauguccugcgacuucaacgggggcaagaucagcgugcaguacaaccucucccacagcuacgccguggacgcggccaaccacugcgggaccaucgccaacggcguccugcagacguucaugcggauggccuggggcggguccuacaucgcgcuggacagcggcaaggggaacugggacugcaucaugaccuccuaccaguaccucaucauccagaacaccaccugggaggaccacugccaguucagccgccccucccccaucggcuaccuggggcugcucagccagcggacgcgcgacaucuacaucagccggcgccggcgcggcaccuucaccuggacccuguccgacagcgagggcaacgagacgcccgggggcuacugccugacccgguggaugcucaucgaggccgagcugaagugcuucgggaacaccgccguggccaagugcaacgagaagcacgacgaggaguucugcgacaugcugcgccucuucgacuucaacaagcaggccauccggcgccugaagaccccggcgcaggccaacauccagcugaucaacaaggccgugaacgcccucaucaacgaccagcugaucaugaagaaccaccuccgggacaucaugggcauccccuacugcaacuacuccaaguacugcuaccugaaccacacggucaccgggaagaccagccugccccgcugcugccugguguccaacggcagcuaccucaacgagacccacuucuccgacgacaucgagcagcaggccgacaacaugaucacggagcugcugcagaaggaguacauggaccggcagggcaagaccccgcucgggcugguggaccuguucgucuucagcaccuccuucuaccugaucagcaucuuccuccaccuggugaagauccccacccaccgccacgugaucggcaagcccugccccaagccgcaccggcugaaccacauggggaucugcuccugcggccucuacaagcaccccgggguccccgugaaguggaagcgcugaggacuaguuauaagacugacuagcccgaugggccucccaacgggcccuccuccccuccuugcaccgagauuaauaaaaaaaaaaaaaaaaaaaaaaaaaaaaaaaaaaaaaaaaaaaaaaaaaaaaaaaaaaaaaaaaaaaaaaaaaaaaaaaaaaaaaaaaaaaaaaaaaaaa

SEQ ID NO: 26266 - RNA, 1662 nt, Artificial Sequence
  mRNA product Design i-3 (A100) comprising derived and/or modified sequence from LASV(Nig08-A19;Clade III)__ADU56618__GPCmut3 (opt1)
aggagaaagcuuaccaugggccagaucgugaccuucuuccaggaggucccccacgugaucgaggaggugaugaacaucguccugaucgcccucagcauccuggccauccugaaggggcucuacaacaucgcgaccugcggccugaucgggcuggugacguuccuccugcuguccggccgcagcugcuccaugaccuacaaggggguguacgagcuccagacccuggagcugaacaugaacacccucaacaugacgaugccgcugagcugcaccaagaacaacucccaccacuacaucauggucggcaacgagaccggccuggagcucacccugacgaacaccagccugcuccaccacaaguucugcaaccuguccgacgcccacaagaagaaccuguacgaccacacccucaugagcaucaucuccaccuuccaccugagcauccccaacuucaaccaguacgaggccauguccugcgacuucaacgggggcaagaucacggugcaguacaaccugagccacuccuacgccaucgacgccgcgaaccacugcgggaccguggccaacggcguccuccagaccuucaugcggauggccuggggcgggagcuacaucgcccuggacuccggccgcgggaagugggacugcaucaugaccagcuaccaguaccugaucauccagaacacgaccugggaggaccacugccaguucucccggcccagccccaucggcuaccucgggcugcugucccagcgcacccgggacaucuacaucagccgccggcgccggggcaccuucacguggacccucagcgacuccgagggcaacgagacccccgggggcuacugccugacccgcuggaugcugaucgaggcggagcucaagugcuucgggaacacggccguggccaagugcaacgagaagcacgacgaggaguucugcgacaugcugcggcuguucgacuucaacaagcaggccauccgccggcucaaggccccggcgcagaugagcauccagcugaucaacaaggccgugaacgcccugaucaacgaccagcucaucaugaagaaccaccuccgcgacaucaugggcauccccuacugcaacuacuccaaguacugcuaccugaaccacaccagcaccgggcggaccucccugccccgcugcugccuggucagcaacggcuccuaccugaacgagacgcacuucagcgacgacaucgagcagcaggccgacaacaugaucaccgagaugcuccagaaggaguaccuggaccggcagggcaagaccccgcuggggcugguggaccucuucguguucuccaccagcuucuaccugaucuccaucuuccugcaccucgucaagauccccacgcaccgccacaucgugggcaagcccugccccaagccgcaccggcugaaccacauggggaucugcagcugcggccuguacaagcagcccggggugcccguccgcuggaagcggugaggacuaguuauaagacugacuagcccgaugggccucccaacgggcccuccuccccuccuugcaccgagauuaauaaaaaaaaaaaaaaaaaaaaaaaaaaaaaaaaaaaaaaaaaaaaaaaaaaaaaaaaaaaaaaaaaaaaaaaaaaaaaaaaaaaaaaaaaaaaaaaaaaaa

SEQ ID NO: 26267 - RNA, 1665 nt, Artificial Sequence
  mRNA product Design i-3 (A100) comprising derived and/or modified sequence from LASV(G1180-SLE-2010;Clade IV)__AIT17168__GPCmut3 (opt1)
aggagaaagcuuaccaugggccagaucgugaccuucuuccaggaggucccccacgugaucgaggaggugaugaacaucguccugaucgcccucagcauccuggccgugcugaaggggcucuacaacuucgcgaccugcggccugguggggcugcucacguuccugcugcucugcggccgcuccugcaccgccagccgguacaagggggucuacgagcugcagacccuggagcucaacauggagacccugaacaugacgaugccgcuguccugcaccaagaacaacagccaccacuacaucauggugggcaacgagaccggccucgagcugacccugacgaacaccuccaucaucaaccacaaguucugcaaccucagcgacgcccacaagaagaaccuguacgaccacgcccugauguccaucaucagcaccuuccaccucuccauccccaacuucaaccaguacgaggccaugagcugcgacuucaacgggggcaagaucuccgugcaguacaaccugagccacuccuacgcgggggacgccgccaaccacugcggcaccgucgccaacggggugcugcagacguucaugcgcauggcguggggcggcagcuacaucgcccucgacuccgggcacggcagcugggacugcaucaugaccuccuaccaguaccugaucauccagaacaccaccugggaggaccacugccaguucagccggcccucccccaucggguaccugggccuccugagccagcgcacgcgggacaucuacaucagccgccggcgccggggcaccuucaccuggacccuguccgacagcgaggggaaggacacgccgggcggguacugccucacccgcuggaugcugaucgaggccgagcugaagugcuucggcaacaccgccguggccaagugcaacgagaagcacgacgaggaguucugcgacaugcuccggcuguucgacuucaacaagcaggcgauccagcgccugaaggcccccgcccagauguccauccagcucaucaacaaggccgucaacgcccugaucaacgaccagcugaucaugaagaaccaccuccgggacaucauggggauccccuacugcaacuacagcaaguacugcuaccugaaccacaccacgaccggcaagaccucccugcccaagugcugccucgugagcaacggcuccuaccugaacgagacccacuucagcgacgacaucgagcagcaggcggacaacaugaucacggagaugcugcagaaggaguacauggagcgccaggggaagaccccgcucggccugguggaccuguucgucuucuccaccagcuucuaccugaucuccaucuuccuccaccuggugaagauccccacccaccggcacaucgugggcaagagcugccccaagccccaccgccugaaccacauggggaucugcuccugcgggcucuacaagcagccgggcguccccgugaaguggaagcggugaggacuaguuauaagacugacuagcccgaugggccucccaacgggcccuccuccccuccuugcaccgagauuaauaaaaaaaaaaaaaaaaaaaaaaaaaaaaaaaaaaaaaaaaaaaaaaaaaaaaaaaaaaaaaaaaaaaaaaaaaaaaaaaaaaaaaaaaaaaaaaaaaaaa

SEQ ID NO: 26268 - RNA, 1665 nt, Artificial Sequence
  mRNA product Design i-3 (A100) comprising derived and/or modified sequence from LASV(G1442-SLE-2011;Clade IV)__AIT17180__GPCmut3 (opt1)
aggagaaagcuuaccaugggccagaucgugaccuucuuccaggaggucccccacgugaucgaggaggugaugaacaucguccugaucgcccucagcauccuggccgugcugaaggggcucuacaacguggcgaccugcggccugaucgggcuggucacguuccuccugcugugcggccgcuccugcaccaccacccucuacaaggggguguacgagcugcagacgcuggagcucaacauggagacccugaacaugaccaugccgcugagcugcaccaagaacaacucccaccacuacauccgggugggcaacgagacgggccucgagcugacccugaccaacaccagcaucaucaaccacaaguucugcaaccucuccgacgcccacaagaagaaccuguacgaccacgcccugaugagcaucaucuccacguuccaccucagcauccccaacuucaaccaguacgaggccauguccugcgacuucaacgggggcaagaucagcguccaguacaaccugucccacagcuacgccggggacgcggccaaccacugcggcaccguggccaacggggugcugcagaccuucaugcgcauggccuggggcggcuccuacaucgcgcucgacagcgggcggggcaacugggacugcaucaugaccuccuaccaguaccugaucauccagaacacgaccugggacgaccacugccaguucagccgccccucccccaucggguaccugggccuccugagccagcggacccgcgacgucuacaucucccggcgccggcgcggcaccuucacguggacccugagcgacagcgaggggaaggacaccccgggcggguacugccucacccgguggaugcugaucgaggccgagcugaagugcuucggcaacacggccguggccaagugcaacgagaagcacgacgaggaguucugcgacaugcuccgccuguucgacuucaacaagcaggccauccagcggcugaaggcgcccgcccagauguccauccagcucaucaacaaggccgugaacgcccugaucaacgaccagcugaucaugaagaaccaccuccgcgacaucauggggauccccuacugcaacuacagcaaguacugcuaccugaacaacaccgccaccggcaagaccucccugcccaagugcugccucaucagcaacggcuccuaccugaacgagacgcacuucagcgacgacaucgagcaggaggcggacaacaugaucaccgagaugcugcagaaggaguacauggagcggcaggggaagaccccgcucggccuggucgaccuguucguguucuccaccagcuucuaccugaucuccaucuuccuccaccuggugaagauccccacgcaccgccacaucgucggcaagagcugccccaagccccaccggcugaaccacauggggaucugcuccugcgggcucuacaagcagccgggcgugcccgugcgcuggaagcggugaggacuaguuauaagacugacuagcccgaugggccucccaacgggcccuccuccccuccuugcaccgagauuaauaaaaaaaaaaaaaaaaaaaaaaaaaaaaaaaaaaaaaaaaaaaaaaaaaaaaaaaaaaaaaaaaaaaaaaaaaaaaaaaaaaaaaaaaaaaaaaaaaaaa

SEQ ID NO: 26269 - RNA, 1665 nt, Artificial Sequence
  mRNA product Design i-3 (A100) comprising derived and/or modified sequence from LASV(G3010-SLE-2013;Clade IV)__AIT17344__GPCmut3 (opt1)
aggagaaagcuuaccaugggccagaucgugaccuucuuccaggaggucccccacgugaucgaggaggugaugaacaucguccugaucgcccucagcauccuggccgugcugaaggggcucuacaacuucgcgaccugcggccugguggggcuggucacguuccuccugcugugcggccgcuccugcaccaccagccucuacaaggggguguacgagcugcagacccuggagcucaacauggagacgcugaacaugaccaugccgcuguccugcaccaagaacaacagccaccacuacaucauggugggcaacgagaccggccucgagcugacgcugaccaacaccuccaucaucaaccacaaguucugcaaccucagcgacgcccacaagaagaaccuguacaaccacgcccugauguccaucaucagcaccuuccaccucuccauccccaacuucaaccaguacgaggccaugagcugcgacuucaacgggggcaagaucuccguccaguacaaccugagccacuccuacgccggggacgcggccagccacugcggcacgguggccaacggggugcugcagaccuucaugcggauggccuggggcggcuccuacaucgcgcucgacagcggguacggcaagugggacugcaucaugaccuccuaccaguaccugaucauccagaacaccacgugggaggaccacugccaguucagccgccccucccccaucggguaccugggccuccugagccagcggacccgcgacaucuacaucagccggcgccggcgcggcaccuucaccuggacgcuguccgacagcgaggggaaggacaccccgggcggguacugccucacccgguggaugcugaucgaggccgagcugaagugcuucggcaacaccgccgucgccaagugcaacgagaagcacgacgaggaguucugcgacaugcuccgccuguucgacuucaacaagcaggccauccagcggcugaagacgcccgcgcagauguccauccagcucaucaacaaggccgugaacgcccugaucaacgaccagcugaucaugaagaaccaccuccgcgacaucauggggauccccuacugcaacuacagcaaguacugcuaccugaaccacaccaccaccggcaagacgucccugcccaagugcugccucgugagcaacggcuccuaccugaacgagacccacuucagcgacgacaucgagcagcaggccgacaacaugaucaccgagaugcugcagaaggaguacauggagcggcaggggaagaccccgcucggccuggucgaccuguucguguucuccacgagcuucuaccugaucuccaucuuccuccaccuggugaagauccccacccaccgccacaucgucggcaagagcugccccaagccccaccggcugaaccacauggggaucugcuccugcgggcucuacaagcagccgggcgugcccgugcgcuggaagcggugaggacuaguuauaagacugacuagcccgaugggccucccaacgggcccuccuccccuccuugcaccgagauuaauaaaaaaaaaaaaaaaaaaaaaaaaaaaaaaaaaaaaaaaaaaaaaaaaaaaaaaaaaaaaaaaaaaaaaaaaaaaaaaaaaaaaaaaaaaaaaaaaaaaa

SEQ ID NO: 26270 - RNA, 1665 nt, Artificial Sequence
  mRNA product Design i-3 (A100) comprising derived and/or modified sequence from LASV(G502-SLE-2009;Clade IV)__AIT17126__GPCmut3 (opt1)
aggagaaagcuuaccaugggccagaucgugaccuucuuccaggaggucccccacgugaucgaggaggugaugaacaucguccugaucgcccucagcauccuggccgugcugaaggggcucuacaacuucgcgaccugcggccugguggggcugcucacguuccugcugcucugcggccgcuccugcaccaccgggcuguacaagggcgucuacgagcugcagacccucgagcugaacauggagacgcugaacaugaccaugccgcucagcugcaccaagaacaacucccaccacuacaucauggugggcaacgagaccgggcuggagcugacgcucaccaacaccagcaucaucaaccacaaguucugcaaccuguccgacgcccacaagaagaaccuguacgaccacgcccucaugagcaucaucuccaccuuccaccugagcauccccaacuucaaccaguacgaggccauguccugcgacuucaacggcgggaagaucagcgugcaguacaaccugucccacagcuacgccggcgacgcggccgaccacugcgggacggucgccaacggcgugcuccagaccuucaugcggauggccuggggcggguccuacaucgcgcuggacagcggccgcgggcggugggacugcaucaugaccuccuaccaguaccugaucauccagaacaccacgugggaggaccacugccaguucagccgccccucccccaucggcuaccucggccugcugagccagcggacccgcgacaucuacaucucccggcgccggcgcgggaccuucaccuggacgcucagcgacagcgagggcaaggacacccccgggggcuacugccugacccgguggaugcugaucgaggccgagcucaagugcuucgggaacaccgccguggccaagugcaacgagaagcacgacgaggaguucugcgacaugcugcgccuguucgacuucaacaagcaggccauccagcggcucaaggcgccggcccagauguccauccagcugaucaacaaggccgucaacgcccugaucaacgaccagcucgugaugaagaaccaccuccgcgacaucaugggcauccccuacugcaacuacagccgguacugcuaccugaaccacacgaccaccggccgcaccucccugcccaagugcugccuggugagcaacggguccuaccugaacgagacgcacuucagcgacgacaucgagcagcaggccgacaacaugaucaccgagaugcuccagaaggaguacauggagcggcagggcaagaccccgcuggggcuggucgaccuguucguguucuccaccagcuucuaccucaucuccaucuuccugcaccuggugaagauccccacgcaccgccacaucgucggcaagagcugccccaagccccaccggcucaaccacauggggaucugcuccugcggccuguacaagcagccgggcgugcccgugaaguggaagcgcugaggacuaguuauaagacugacuagcccgaugggccucccaacgggcccuccuccccuccuugcaccgagauuaauaaaaaaaaaaaaaaaaaaaaaaaaaaaaaaaaaaaaaaaaaaaaaaaaaaaaaaaaaaaaaaaaaaaaaaaaaaaaaaaaaaaaaaaaaaaaaaaaaaaa

SEQ ID NO: 26271 - RNA, 1665 nt, Artificial Sequence
  mRNA product Design i-3 (A100) comprising derived and/or modified sequence from LASV(G733-SLE-2010;Clade IV)__AIT17154__GPCmut3 (opt1)
aggagaaagcuuaccaugggccagaucgugaccuucuuccaggaggucccccacgugaucgaggaggugaugaacaucguccugaucgcccucagcauccuggccgugcugaaggggcucuacaacuucgcgaccugcggcaucguggggcuggucuccuuccugcuccugugcggccgcagcugcacgaccucccuguacaaggggguguacgagcuccagacccuggagcugaacauggagacccucaacaugacgaugccgcugagcugcaccaagaacaacucccaccacuacaucauggugggcaacgagaccggccuggagcucacccugacgaacaccagcaucaucaaccacaaguucugcaaccuguccgacgcccacaagaagaaccucuacgaccacgcccugaugagcaucaucuccaccuuccaccugagcauccccaacuucaaccaguacgaggccauguccugcgacuucaacgggggcaagaucagcguccaguacaaccucucccacagcuacgccggggacgcggccaaccacugcggcaccaucgccaacggggugcugcagacguucaugcggauggccuggggcggcuccuacaucgcgcuggacagcgggcgcgaccggugggacugcaucaugaccuccuaccaguaccucaucauccagaacaccaccugggaggaccacugccaguucagccgccccucccccaucggcuaccuggggcugcucagccagcggacgcgcgacaucuacaucagccggcgccggcgcggcaccuucaccuggacccuguccgacagcgagggcaaggacacgcccgggggcuacugccugacccgguggaugcucaucgaggccgagcugaagugcuucgggaacaccgccguggccaagugcaacgagaagcacgacgaggaguucugcgacaugcugcgccucuucgacuucaacaagcaggccauccagcggcugaaggcgccggcccagauguccauccagcugaucaacaaggccgucaacgcccucaucaacgaccagcugaucaugaagaaccaccuccgcgacaucaugggcauccccuacugcaacuacagcaaguacugcuaccugaaccacaccacgaccgggaagaccucccugcccaagugcugccuggugagcaacggcuccuaccucaacgagacccacuucagcgacgacaucgagcagcaggccgacaacaugaucacggagaugcugcagaaggaguacauggagcggcagggcaagaccccgcuggggcucguggaccuguucgucuucuccaccagcuucuaccugaucuccaucuuccugcaccucgugaagauccccacccaccgccacguggucggcaagagcugccccaagccccaccggcugaaccacauggggaucugcuccugcggccuguacgggcagccgggcgugcccgugaaguggaagcgcugaggacuaguuauaagacugacuagcccgaugggccucccaacgggcccuccuccccuccuugcaccgagauuaauaaaaaaaaaaaaaaaaaaaaaaaaaaaaaaaaaaaaaaaaaaaaaaaaaaaaaaaaaaaaaaaaaaaaaaaaaaaaaaaaaaaaaaaaaaaaaaaaaaaa

SEQ ID NO: 26272 - RNA, 1665 nt, Artificial Sequence
  mRNA product Design i-3 (A100) comprising derived and/or modified sequence from MOPV/LASV reassortant(IGS-1;Clade IV)__AFY05576__GPCmut3 (opt1)
aggagaaagcuuaccaugggccagaucgugaccuucuuccaggaggucccccacgugaucgaggaggugaugaacaucguccugaucgcccucagcgugcuggccgugcugaaggggcucuacaacuucgcgaccugcggccuggucgggcuggugacguuccuccugcugugcggccgcuccugcaccaccagccucuacaaggggguguacgagcugcagacccuggagcucaacauggagacgcugaacaugaccaugccgcuguccugcaccaagaacaacagccaccacuacaucauggucggcaacgagaccggccucgagcugacgcugaccaacaccuccaucaucaaccacaaguucugcaaccucagcgacgcccacaagaagaaccuguacgaccacgcccugauguccaucaucagcaccuuccaccucuccauccccaacuucaaccaguacgaggccaugagcugcgacuucaacgggggcaagaucuccgugcaguacaaccugagccacuccuacgccggggacgcggccaaccacugcggcacgguggccaacgggguccugcagaccuucaugcggauggccuggggcggcagcuacaucgcgcucgacuccgggcgcggcaacugggacugcaucaugaccagcuaccaguaccugaucauccagaacaccacgugggaggaccacugccaguucucccggcccagccccaucggguaccugggccuccugucccagcgcacccgggacaucuacaucagccgccggcgccggggcaccuucaccuggacgcugagcgacuccgagggggaggacaccccgggcggguacugccucacccgcuggaugcugaucgaggccgagcugaagugcuucggcaacaccgccguggccaagugcaacgagaagcacgacgaggaguucugcgacaugcuccggcuguucgacuucaacaagcaggccauccagcgccugaaggcgcccgcccagaugagcauccagcucaucaacaaggccgugaacgcccugaucaacgaccagcugaucaugaagaaccaccuccgggacaucauggggauccccuacugcaacuacuccaaguacugcuaccugaaccacacgaccaccggccgcaccagccugcccaagugcugccucgucuccaacggcagcuaccugaacgagacgcacuucuccgacgacaucgagcagcaggccgacaacaugaucaccgagaugcugcagaaggaguacauggagcggcaggggaagaccccgcucggccugguggaccuguucguguucagcaccuccuucuaccugaucagcaucuuccuccaccuggucaagauccccacgcaccgccacaucguggggaaguccugccccaagccccaccggcugaaccacaugggcaucugcagcugcgggcucuacaagcagccgggcgugcccgucaaguggaagcgcugaggacuaguuauaagacugacuagcccgaugggccucccaacgggcccuccuccccuccuugcaccgagauuaauaaaaaaaaaaaaaaaaaaaaaaaaaaaaaaaaaaaaaaaaaaaaaaaaaaaaaaaaaaaaaaaaaaaaaaaaaaaaaaaaaaaaaaaaaaaaaaaaaaaa

SEQ ID NO: 26273 - RNA, 1665 nt, Artificial Sequence
  mRNA product Design i-3 (A100) comprising derived and/or modified sequence from LASV(LM765-SLE-2012;Clade IV)__AIT17814__GPCmut3 (opt1)
aggagaaagcuuaccaugggccagaucgugaccuucuuccaggaggucccccacgugaucgaggaggugaugaacaucguccugaucgcccucagcauccuggccgugcugaaggggcucuacaacuucgcgaccugcggccugguggggcuggucacguuccuccugcugugcggccgcuccugcaccaccagccucuacaaggggguguacgagcugcagacccuggagcucaacauggagacgcugaacaugaccaugccgcuguccugcaccaagaacaacagccaccacuacaucauggugggcaacgagaccggccucgagcugacgcugaccaacaccuccaucaucgaccacaaguucugcaaccucagcgacgcccaccggaagaaccuguacgaccacgcccugauguccaucaucagcaccuuccaccucuccauccccaacuucaaccaguacgaggccaugagcugcgacuucaacgggggcaagaucuccguccaguacaaccugagccacuccuacgccaaggacgcggccgaccacugcgggacgguggccaacggcgugcugcagaccuucaugcgcauggccuggggcgggagcuacaucgcgcucgacuccggccgggggcgcugggacugcaucaugaccagcuaccaguaccugaucauccagaacaccacgugggaggaccacugccaguucucccggcccagccccaucggcuaccuggggcuccugucccagcgcacccgggacaucuacaucagccgccggcgccggggcaccuucaccuggacgcugagcgacuccgagggcaaggacacccccgggggcuacugccucacccgcuggaugcugaucgaggccgagcugaagugcuucgggaacaccgccgucgccaagugcaacgagaagcacgacgaggaguucugcgacaugcuccggcuguucgacuucaacaagcaggccauccagcgccugaaggcgccggcccagaugagcauccagcucaucaacaaggccgugaacgcccugaucaacgaccagcugaucaugaagaaccaccuccgggacaucaugggcauccccuacugcaacuacuccaaguacugcuaccugaaccacacgaccaccgggaagaccagccugcccaagugcugccucguguccaacggcagcuaccugaacgagacgcacuucuccgacgacaucgagcagcaggccgacaacaugaucaccgagaugcugcagaaggaguacauggagcgccagggcaagaccccgcucgggcuggucgaccuguucguguucagcaccuccuucuaccugaucagcaucuuccuccaccuggugaagauccccacgcaccggcacaucgucggcaagcccugccccaagccgcaccgccugaaccacauggggaucugcuccugcggccucuacaagcagcccggggugcccgugaaguggaagcggugaggacuaguuauaagacugacuagcccgaugggccucccaacgggcccuccuccccuccuugcaccgagauuaauaaaaaaaaaaaaaaaaaaaaaaaaaaaaaaaaaaaaaaaaaaaaaaaaaaaaaaaaaaaaaaaaaaaaaaaaaaaaaaaaaaaaaaaaaaaaaaaaaaaa

SEQ ID NO: 26274 - RNA, 1665 nt, Artificial Sequence
  mRNA product Design i-3 (A100) comprising derived and/or modified sequence from LASV(LM776-SLE-2012;Clade IV)__AIT17824__GPCmut3 (opt1)
aggagaaagcuuaccaugggccagaucgugaccuucuuccaggaggucccccacgugaucgaggaggugaugaacaucguccugaucgcccucagcauccuggccgugcugaaggggcucuacaacuucgcgaccugcggccugguggggcuggucacguuccuccugcugugcggccgcuccugcaccaccagcguguacaaggggguguacgagcuccagacccuggagcugaacauggagacgcucaacaugaccaugccgcuguccugcaccaagaacaacagccaccacuacaucauggucggcaacgagaccggccuggagcucacgcugaccaacaccuccaucaucaaccacaaguucugcaaccugagcgacgcccacaagaagaaccucuacgaccacgcccugauguccaucaucagcaccuuccaccuguccauccccaacuucaaccaguacgaggccaugagcugcgacuucaacgggggcaagaucuccgugcaguacaaccucagccacuccuacgccggggacgcggccaaccacugcggcacgguggccaacgggguccugcagaccuucaugcggauggccuggggcggcagcuacaucgcgcuggacuccgggcacggcaagugggacugcaucaugaccagcuaccaguaccucaucauccagaacaccacgugggaggaccacugccaguucucccgccccagccccaucggguaccugggccugcucucccagcggacccgcgacaucuacaucagccggcgccggcgcggcaccuucaccuggacgcugagcgacuccgaggggaaggacaccccgggcggguacugccugacccgguggaugcucaucgaggccgagcugaagugcuucggcaacaccgccguggccaagugcaacgagaagcacgacgaggaguucugcgacaugcugcgccucuucgacuucaacaagcaggccauccagcggcugaaggcgcccgcccagaugagcauccagcugaucaacaaggccgugaacgcccucaucaacgaccagcugaucaugaagaaccaccuccgcgacaucauggggauccccuacugcaacuacuccaaguacugcuaccugaaccacacgaccaccggcaagaccagccugcccaagugcugccuggucuccaacggcagcuaccucaacgagacgcacuucuccgacgacaucgagcagcaggccgacaacaugaucaccgagaugcugcagaaggaguacauggagcggcaggggaagaccccgcugggccucguggaccuguucguguucagcaccuccuucuaccugaucagcaucuuccugcaccucgucaagauccccacgcaccgccacaucguggggaaguccugccccaagccccaccggcugaaccacaugggcaucugcagcugcgggcuguacaagcagccgggcgugcccguccgcuggaagcggugaggacuaguuauaagacugacuagcccgaugggccucccaacgggcccuccuccccuccuugcaccgagauuaauaaaaaaaaaaaaaaaaaaaaaaaaaaaaaaaaaaaaaaaaaaaaaaaaaaaaaaaaaaaaaaaaaaaaaaaaaaaaaaaaaaaaaaaaaaaaaaaaaaaa

SEQ ID NO: 26275 - RNA, 1665 nt, Artificial Sequence
  mRNA product Design i-3 (A100) comprising derived and/or modified sequence from LASV(Mad39;Clade IV)__ANH09722__GPCmut3 (opt1)
aggagaaagcuuaccaugggccagaucgugaccuucuuccaggaggucccccacgugaucgaggaggugaugaacaucguccugaucgcccucagcauccuggccgugcugaaggggcucuacaacguggcgaccugcggccugaucgggcuggucacguuccuccugcugugcggccgcuccugcaccaccacccucuacaaggggguguacgagcugcaggcccuggagcucaacauggagacgcugaacaugaccaugccgcugagcugcaccaagaacaacucccaccacuacauccgggugggcaacgagaccggccucgagcugacgcugaccaacaccagccucaucaaccacaaguucugcaaccuguccgacgcccacaagaagaaccuguacgaccacgcccucaugagcaucaucuccaccuuccaccugagcauccccaacuucaaccaguacgaggccauguccugcgacuucaacgacgggaagaucagcguccaguacaaccugucccacacguacgcgggcgacaccgccaaccacugcgggaccguggccaacggcgugcuccagaccuucaugcgcauggccuggggcgggagcuacaucgcgcuggacuccggccgcgggggcugggacugcaucaugacgagcuaccaguaccugaucauccagaacaccaccugggaggaccacugccaguucucccggcccagccccaucggguaccucggccugcugucccagcggacccgcgacaucuacaucagccggcgccggcgcggcacguucaccuggacccucuccgacagcgaggggaaggacaccccgggcggguacugccugacgcgguggaugcugaucgaggccgagcucaagugcuucggcaacaccgccgucgccaagugcaacgagaagcacgacgaggaguucugcgacaugcugcgccuguucgacuucaacaagcaggccauccagcggcucaaggcgcccgcccagaugagcauccagcugaucaacaaggccgugaacgcccugaucaacgaccagcucaucaugaagaaccaccuccgcgacaucauggggauccccuacugcaacuacuccaaguacugcuaccugaaccacaccgugaccggcaagacgagccugcccaagugcugccuggucuccaacggcagcuaccugaacgagacccacuucuccgacgacaucgagcagcaggccgacaacaugaucaccgagaugcuccagaaggaguacauggagcggcaggggaagaccccgcugggccugguggaccuguucguguucagcacguccuucuaccucaucagcaucuuccugcaccuggucaagauccccacccaccgccacgugguggggaagcccugccccaagccgcaccggcucaaccacaugggcaucugcuccugcggguucuacaagcagcccggcguccccgugcgcuggaagcggugaggacuaguuauaagacugacuagcccgaugggccucccaacgggcccuccuccccuccuugcaccgagauuaauaaaaaaaaaaaaaaaaaaaaaaaaaaaaaaaaaaaaaaaaaaaaaaaaaaaaaaaaaaaaaaaaaaaaaaaaaaaaaaaaaaaaaaaaaaaaaaaaaaaa

SEQ ID NO: 26276 - RNA, 1665 nt, Artificial Sequence
  mRNA product Design i-3 (A100) comprising derived and/or modified sequence from LASV(Z0947-SLE-2011;Clade IV)__AIT17840__GPCmut3 (opt1)
aggagaaagcuuaccaugggccagaucgugaccuucuuccaggaggucccccacgugaucgaggaggugaugaacaucguccugaucgcccucagcauccuggccgugcugaaggggcucuacaacuucgcgaccugcggccugguggggcuggucacguuccuccugcugugcggccgcuccugcaccaucagccucuacaaggggguguacgagcugcagacccuggagcucaacauggagacccugaacaugacgaugccgcuguccugcaccaagaacaacagccaccacuacaucauggugggcaacgagaccggccucgagcugacccugacgaacaccuccaucaucaaccacaaguucugcaaccucagcgacgcccacaagaagaaccuguacgaccacgcccugauguccaucaucagcaccuuccaccucuccauccccaacuucaaccaguacgaggccaugagcugcgacuucaacgggggcaagaucuccguccaguacaaccugagccacuccuacgccggggacgcggccaaccacugcggcaccguggccaacggggugcugcagacguucaugcggauggccuggggcggcagcuacaucgcgcucgacuccgggcgcgaccggugggacugcaucaugaccagcuaccaguaccugaucauccagaacaccaccugggaggaccacugccaguucucccgccccagccccaucggcuaccuggggcuccugucccagcggacgcgcgacaucuacaucagccggcgccggcgcggcaccuucaccuggacccugagcgacuccgagggcaaggacacgcccgggggcuacugccucacccgguggaugcugaucgaggccgagcugaagugcuucgggaacaccgccgucgccaagugcaacgagaagcacgacgaggaguucugcgacaugcuccgccuguucgacuucaacaagcaggccauccagcggcugaaggcgccggcccagaugagcauccagcucaucaacaaggccgugaacgcccugaucaacgaccagcugaucaugaagaaccaccuccgcgacaucaugggcauccccuacugcaacuacuccaaguacugcuaccugaaccacaccacgaccgggaagaccagccugcccaagugcugccucguguccaacggcagcuaccugaacgagacccacuucuccgacgacaucgagcagcaggccgacaacaugaucacggagaugcugcagaaggaguacauggagcggcagggcaagaccccgcucgggcuggucgaccuguucguguucagcaccuccuucuaccugaucagcaucuuccuccaccuggugaagauccccacccaccgccacaucgucggcaagcccugccccaagccgcaccggcugaaccacauggggaucugcuccugcggccucuacaagcagcccggggugcccgugaaguggaagcgcugaggacuaguuauaagacugacuagcccgaugggccucccaacgggcccuccuccccuccuugcaccgagauuaauaaaaaaaaaaaaaaaaaaaaaaaaaaaaaaaaaaaaaaaaaaaaaaaaaaaaaaaaaaaaaaaaaaaaaaaaaaaaaaaaaaaaaaaaaaaaaaaaaaaa

SEQ ID NO: 26277 - RNA, 1665 nt, Artificial Sequence
  mRNA product Design i-3 (A100) comprising derived and/or modified sequence from LASV(Josiah;Clade IV)__NP_694870__GPCmut3 (opt4)
aggagaaagcuuaccaugggccagaucgugaccuucuuccaggaggugccccacgugaucgaggaggugaugaacaucgugcugaucgcccugagcgugcuggccgugcugaagggccuguacaacuucgccaccugcggccuggugggccuggugaccuuccugcugcugugcggcagaagcugcaccaccagccuguacaagggcguguacgagcugcagacccuggagcugaacauggagacccugaacaugaccaugccccugagcugcaccaagaacaacagccaccacuacaucauggugggcaacgagaccggccuggagcugacccugaccaacaccagcaucaucaaccacaaguucugcaaccugagcgacgcccacaagaagaaccuguacgaccacgcccugaugagcaucaucagcaccuuccaccugagcauccccaacuucaaccaguacgaggccaugagcugcgacuucaacggcggcaagaucagcgugcaguacaaccugagccacagcuacgccggcgacgccgccaaccacugcggcaccguggccaacggcgugcugcagaccuucaugagaauggccuggggcggcagcuacaucgcccuggacagcggcagaggcaacugggacugcaucaugaccagcuaccaguaccugaucauccagaacaccaccugggaggaccacugccaguucagcagacccagccccaucggcuaccugggccugcugagccagagaaccagagacaucuacaucagcagaagaagaagaggcaccuucaccuggacccugagcgacagcgagggcaaggacacccccggcggcuacugccugaccagauggaugcugaucgaggccgagcugaagugcuucggcaacaccgccguggccaagugcaacgagaagcacgacgaggaguucugcgacaugcugagacuguucgacuucaacaagcaggccauccagagacugaaggcccccgcccagaugagcauccagcugaucaacaaggccgugaacgcccugaucaacgaccagcugaucaugaagaaccaccugagagacaucaugggcauccccuacugcaacuacagcaaguacugcuaccugaaccacaccaccaccggcagaaccagccugcccaagugcugccuggugagcaacggcagcuaccugaacgagacccacuucagcgacgacaucgagcagcaggccgacaacaugaucaccgagaugcugcagaaggaguacauggagagacagggcaagaccccccugggccugguggaccuguucguguucagcaccagcuucuaccugaucagcaucuuccugcaccuggugaagauccccacccacagacacaucgugggcaagagcugccccaagccccacagacugaaccacaugggcaucugcagcugcggccuguacaagcagcccggcgugcccgugaaguggaagagaugaggacuaguuauaagacugacuagcccgaugggccucccaacgggcccuccuccccuccuugcaccgagauuaauaaaaaaaaaaaaaaaaaaaaaaaaaaaaaaaaaaaaaaaaaaaaaaaaaaaaaaaaaaaaaaaaaaaaaaaaaaaaaaaaaaaaaaaaaaaaaaaaaaaa

SEQ ID NO: 26278 - RNA, 1662 nt, Artificial Sequence
  mRNA product Design i-3 (A100) comprising derived and/or modified sequence from LASV(LP;Clade I)__AAF86701__GPCmut3 (opt4)
aggagaaagcuuaccaugggccagaucaucaccuucuuccaggaggugccccacgugaucgaggaggugaugaacaucgugcugaucgcccugagccugcuggccauccugaagggccuguacaacaucgccaccugcggcaucaucggccugguggccuuccuguuccugugcggcaagagcugcagccugacccugaagggcggcuacgagcugcagacccuggagcugaacauggagacccugaacaugaccaugccccugagcugcaccaagaacagcagccaccacuacaucagagugggcaacgagaccggccuggagcugacccugaccaacaccagcaucaucaaccacaaguucugcaaccugagcgacgcccacaagaagaaccuguacgaccacgcccugaugagcaucaucagcaccuuccaccugagcauccccaacuucaaccaguacgaggccaugagcugcgacuucaacggcggcaagaucagcgugcaguacaaccugagccacagcuacgccggcgacgccgccgagcacugcggcaccguggccaacggcgugcugcagaccuucaugagaauggccuggggcggcagauacaucgcccuggacagcggcaagggcaacugggacugcaucaugaccagcuaccaguaccugaucauccagaacaccaccugggaggaccacugccaguucagcagacccagccccaucggcuaccugggccugcugagccagagaaccagagacaucuacaucagcagaagaagaagaggcaccuucaccuggacccugagcgacagcgagggcaacgagacccccggcggcuacugccugaccagauggaugcugaucgaggccgagcugaagugcuucggcaacaccgccguggccaagugcaacgagaagcacgacgaggaguucugcgacaugcugagacuguucgacuucaacaagcaggccaucagaagacugaaggcccccgcccagaugagcauccagcugaucaacaaggccgugaacgcccugaucaacgaccagcugaucaugaagaaccaccugagagacaucaugggcauccccuacugcaacuacagcaaguacugcuaccugaaccacaccagcagcggcagaaccagccugcccaagugcugccugaucagcaacggcagcuaccugaacgagacccaguucagcgacgacaucgagcagcaggccgacaacaugaucaccgagaugcugcagaaggaguacaucgagagacagggcaagaccccccugggccugguggacaucuucaucuucagcaccagcuucuaccugaucagcaucuuccugcaccugaucaagauccccacccacagacacaucgugggcaagcccugccccaagccccacagacugaaccacaugggcgugugcagcugcggccuguacaagcaccccggcgugcccaccaaguggaagagaugaggacuaguuauaagacugacuagcccgaugggccucccaacgggcccuccuccccuccuugcaccgagauuaauaaaaaaaaaaaaaaaaaaaaaaaaaaaaaaaaaaaaaaaaaaaaaaaaaaaaaaaaaaaaaaaaaaaaaaaaaaaaaaaaaaaaaaaaaaaaaaaaaaaa

SEQ ID NO: 26279 - RNA, 1662 nt, Artificial Sequence
  mRNA product Design i-3 (A100) comprising derived and/or modified sequence from LASV(803213;Clade II)__AAF86703__GPCmut3 (opt4)
aggagaaagcuuaccaugggccagaucaucaccuucuuccaggaggugccccacgugaucgaggaggugaugaacaucgugcugaucgcccugagccugcuggccauccugaagggcaucuacaacguggccaccugcggccuguucggccugaucagcuuccugcugcugugcggcagaagcugcagcgugaccuacaagggcguguacgagcugcagacccuggagcugaacauggccaaccugaacaugaccaugccccugagcugcaccaagaacaacagccaccacuacaucauggugggcaacgagaccggccuggagcugacccugaccaacaccagcaucaucaaccacaaguucugcaaccugagcgacgcccacaagaagaaccuguacgaccacgcccugaugagcaucaucagcaccuuccaccugagcauccccaacuucaaccaguacgaggccaugagcugcgacuucaacggcggcaagaucagcgugcaguacaaccugagccacagcuucgccguggacgccgccaaccacugcggcaccaucgccaacggcgugcugcagaccuucaugagaauggccuggggcggcagcuacaucgcccuggacagcggcaagggcaacugggacugcaucaugaccagcuaccaguaccugaucauccagaacaccaccugggaggaccacugccaguucagcagacccagccccaucggcuaccugggccugcugagccagagaaccagagacaucuacaucagcagaagaagaagaggcaccuucaccuggacccugagcgacagcgagggcaacgaggcccccggcggcuacugccugaccagauggaugcugaucgaggccgagcugaagugcuucggcaacaccgccguggccaagugcaacgagaagcacgacgaggaguucugcgacaugcugagacuguucgacuucaacaagcaggccaucaagagacugaagacccccgcccagaugagcauccagcugaucaacaaggccgugaacgcccugaucaacgaccagcugaucaugaagaaccaccugagagacaucaugggcauccccuacugcaacuacagcagauacugcuaccugaaccacaccgugaccggcaagaccagccugcccagaugcugccuggugagcaacggcagcuaccugaacgagacccacuucagcgacgacaucgagcagcaggccgacaacaugaucaccgagaugcugcagaaggaguacauggacagacagggcaagaccccccugggccugguggaccuguucguguucagcaccagcuucuaccugaucagcaucuuccugcaccuggugaagauccccacccacagacacaucgugggcaagcccugccccaagccccacagacugaaccacaugggcaucugcagcugcggccuguacaagcaccccggcgugcccgugaaguggaagagaugaggacuaguuauaagacugacuagcccgaugggccucccaacgggcccuccuccccuccuugcaccgagauuaauaaaaaaaaaaaaaaaaaaaaaaaaaaaaaaaaaaaaaaaaaaaaaaaaaaaaaaaaaaaaaaaaaaaaaaaaaaaaaaaaaaaaaaaaaaaaaaaaaaaa

SEQ ID NO: 26280 - RNA, 1662 nt, Artificial Sequence
  mRNA product Design i-3 (A100) comprising derived and/or modified sequence from LASV(GA391;Clade III)__CAA36645__GPCmut3 (opt4)
aggagaaagcuuaccaugggccagaucgugaccuucuuccaggaggugccccacgugaucgaggaggugaugaacaucgugcugaucgcccugagcauccuggccauccugaagggccuguacaacguggccaccugcggccugaucggccuggugaccuuccugcugcugagcggcagaagcugcagccugaucuacaagggcaccuacgagcugcagacccuggagcugaacauggagacccugaacaugaccaugccccugagcugcaccaagaacaacagccaccacuacaucagagugggcaacgagaccggccuggagcugacccugaccaacaccagcauccugaaccacaaguucugcaaccugagcgacgcccacaagagaaaccuguacgaccacagccugaugagcaucaucagcaccuuccaccugagcauccccaacuucaaccaguacgaggccaugagcugcgacuucaacggcggcaagaucaccgugcaguacaaccugagccacagcuucgccguggacgccgccggccacugcggcacccuggccaacggcgugcugcagaccuucaugagaauggccuggggcggcagcuacaucgcccuggacagcggcagaggcaacugggacugcaucaugaccagcuaccaguaccugaucauccagaacaccaccugggacgaccacugccaguucagcagacccagccccaucggcuaccugggccugcugagccagagaaccagagacaucuacaucagcagaagaagaagaggcaccuucaccuggacccugagcgacagcgagggcaacgagacccccggcggcuacugccugaccagauggaugcugaucgaggccgagcugaagugcuucggcaacaccgccguggccaagugcaacgagaagcacgacgaggaguucugcgacaugcugagacuguucgacuucaacaagcaggccaucagaagacugaagacccccgcccagaugagcauccagcugaucaacaaggccgugaacgcccugaucaacgaccagcugaucaugaagaaccaccugagagacaucaugggcauccccuacugcaacuacagcagauacugcuaccugaaccacaccagcaccggcaagaccagccugcccagaugcugccugaucagcaacggcagcuaccugaacgagaccaaguucagcgacgacaucgagcagcaggccgacaacaugaucaccgagaugcugcagaaggaguacaucgacagacagggcaagaccccccugggccugguggaccuguucguguucagcaccagcuucuaccugaucagcaucuuccugcaccuggugaagauccccacccacagacacaucgugggcaagcccugccccaagccccacagacugaaccacaugggcaucugcagcugcggccuguacaagcagcccggcgugcccgugagauggaagagaugaggacuaguuauaagacugacuagcccgaugggccucccaacgggcccuccuccccuccuugcaccgagauuaauaaaaaaaaaaaaaaaaaaaaaaaaaaaaaaaaaaaaaaaaaaaaaaaaaaaaaaaaaaaaaaaaaaaaaaaaaaaaaaaaaaaaaaaaaaaaaaaaaaaa

SEQ ID NO: 26281 - RNA, 1665 nt, Artificial Sequence
  mRNA product Design i-3 (A100) comprising derived and/or modified sequence from LASV(AV;Clade V)__CCA30314__GPCmut3 (opt4)
aggagaaagcuuaccaugggccagaucgugaccuucuuccaggaggugccccacgugaucgaggaggugaugaacaucgugcugaucgcccugagcauccuggccgugcugaagggccuguacaacaucgccaccugcggccugaucggccugaucaccuuccugcugcugugcggcagaagcugcagcagcaaccuguacaagggcguguacgagcugcagagccuggaccugaacauggagacccugaacaugaccaugccccugagcugcaccaagaacaacagccaccacuacaucagagugggcaacgacaccggccuggagcugacccugaccaacaccagcauccugaaccacaaguucugcaaccugagcgacgcccacaagaaggaccuguacgaccacgcccugaugagcaucaucagcaccuuccaccugagcauccccaacuucaaccaguacgaggccaugagcugcgacuucaacggcggcaagaucagcgugcaguacaaccugagccacagcuacgccaucgacgccgccaaccacugcggcaccguggccaacggcauccugcagaccuucaugagaauggccuggggcggcagcuacaucgcccuggacagcggcagaggcaacugggacugcaucaugaccagcuaccaguaccugaucauccagaacaccaccugggagaaccacugccaguucagcagacccagccccaucggcuaccugggccugcugagccagagaaccagagacaucuacaucagcagaagaagaagaggcaccuucaccuggacccugagcgacagcgagggcaacgccacccccggcggcuacugccugaccagauggaugcugaucgaggccgagcugaagugcuucggcaacaccgccguggccaagugcaacgagaagcacgacgaggaguucugcgacaugcugagacuguucgacuucaacaagcaggccaucagcagacugaagagccccgcccagaugagcauccagcugaucaacaaggccgugaacgcccugaucaacgaccagcugaucaugaagaaccaccugagagacaucaugggcauccccuacugcaacuacagcaaguacugcuaccugaaccacaccaucaccggcaagaccagccugcccaagugcugccuggugagcaacggcagcuaccugaacgagacccacuucagcgacgacaucgagcagcaggccgacaacaugaucaccgagaugcugcagaaggaguacauggagagacagggcaagaccccccugggccugguggaccuguucguguucagcaccagcuucuaccugaucagcaucuuccugagacuggugaagauccccacccacagacacaucgugggcaagcccugccccaagccccacagacugaaccacaugggcaucugcagcugcggccuguacaagcagcccggcgugcccgugagauggaagagaugaggacuaguuauaagacugacuagcccgaugggccucccaacgggcccuccuccccuccuugcaccgagauuaauaaaaaaaaaaaaaaaaaaaaaaaaaaaaaaaaaaaaaaaaaaaaaaaaaaaaaaaaaaaaaaaaaaaaaaaaaaaaaaaaaaaaaaaaaaaaaaaaaaaa

SEQ ID NO: 26282 - RNA, 1662 nt, Artificial Sequence
  mRNA product Design i-3 (A100) comprising derived and/or modified sequence from LASV(Togo/2016/7082;Clade VI)__AMR44577__GPCmut3 (opt4)
aggagaaagcuuaccaugggccagaucaucaccuucuuccaggaggugccccacgugaucgaggaggugaugaacaucgugcugaucgcccugagccugcuggccauccugaagggcguguacaacguggccaccugcggcaucaucggccuggugaccuuccuguuccugugcggcagaagcugcagccugaucuacaagggcagcuacgagcugcagacccuggagcugaacauggagacccugaacaugaccaugccccugagcugcaccaagaacagcagccaccacuacaucagagugggcaacgagaccggccuggagcugacccugaccaacaccagcaucaucaaccacaaguucugcaaccugagcgacgcccacaagagaaaccuguacgaccacgcccugaugagcauccugagcaccuuccaccugagcauccccaacuucaaccaguacgaggccaugagcugcgacuucaacggcggcaagaucagcgugcaguacaaccugagccacgccuacgccguggacgccgccgagcacugcggcaccguggccaacggcgugcugcagaccuucaugagaauggccuggggcggcagcuacaucgcccuggacagcggcagaggcaacugggacugcaucaugaccagcuaccaguaccugaucauccagaacaccaccugggaggaccacugccaguucagcagacccagccccaucggcuaccugggccugcugagccagagaaccagagacaucuacaucagcagaagaagaagaggcaccuucaccuggacccugagcgacagcgagggcaacgagacccccggcggcuacugccugaccagauggaugcugaucgaggccgagcugaagugcuucggcaacaccgccguggccaagugcaacgagaagcacgacgaggaguucugcgacaugcugagacuguucgacuucaacaagcaggccauccagagacugaagagccccgcccagaugagcauccagcugaucaacaaggccgugaacgcccugaucaacgaccagcugaucaugaagaaccaccugagagacaugaugggcauccccuacugcaacuacagcaaguacugcuaccugaaccacaccagcagcggcagaaccagccugcccaagugcugccuggugagcaacggcagcuaccugaacgagacccacuucagcgacgacaucgagcagcaggccgacaacaugaucaccgagaugcugcagaaggaguacaucgacagacagggcaagaccccccugggccugguggaccuguucguguucagcaccagcuucuaccugaucagcaucuuccugcaccugaucaagauccccacccacagacacaucgugggcaagcccugccccaagccccacagacugaaccacaugggcaucugcagcugcggccuguacaagcagcccggcgugcccaccagauggaagagaugaggacuaguuauaagacugacuagcccgaugggccucccaacgggcccuccuccccuccuugcaccgagauuaauaaaaaaaaaaaaaaaaaaaaaaaaaaaaaaaaaaaaaaaaaaaaaaaaaaaaaaaaaaaaaaaaaaaaaaaaaaaaaaaaaaaaaaaaaaaaaaaaaaaa

SEQ ID NO: 26283 - RNA, 1662 nt, Artificial Sequence
  mRNA product Design i-3 (A100) comprising derived and/or modified sequence from LASV(KAK-428;Clade n.d. (VII))__ANH09740__GPCmut3 (opt4)
aggagaaagcuuaccaugggccagaucgugaccuucuuccaggaggugccccacgugaucgaggaggugaugaacaucgugcugaucgcccugagccugcuggccauccugaagggccuguacaacuucgccaccugcggcgugaucggccugaucaccuuccugcugcugugcggcagaagcugcagcgccaccuacaagggccaguacgagcugcagacccuggagcugaacauggagagccugaacaugaccaugccccugagcugcaccaagaacaacagccaccacuacaucagagccggcaacaacaccggccuggagcugacccugaccaacaccagcaucaucagccacaaguucugcaaccugagcgacgcccacaagaagaaccuguacgaccacacccugaugagcaucaucaccaccuuccaccugagcauccccaacuucaaccaguacgaggccaugagcugcgacuucaacggcggcaagaucagcauccaguacaaccugagccacagcuacgccggcgacgccgcccagcacugcggcaccguggccaacggcgugcugcagaccuucaugagaauggccuggggcggcagcuaccuggcccuggacagcggcagaagaggcugggacugcaucaucagcagcuaccaguaccugaucauccagaacaccaccugggacgaccacugccaguucagcagacccagccccaucggcuaccugggcuucgugagccagaagaccagagacaucuacaucagcagaagaagaagaggcaccuucaccuggacccugagcgacagcgagggccacgacaugcccggcggcuacugccugaccagauggaugcugaucgaggccgaccugaagugcuucggcaacaccgccguggccaagugcaacgagaagcacgacgaggaguucugcgacauguggagacuguucgacuucaacaagcaggccauccagagacugaaggcccccgcccagaugaacauccagcugaucaacaaggccgugaacgcccugaucaacgaccagcugaugaugaagaaccaccugagagacaucaugggcauccccuacugcaacuacagcaaguucugcuaccugaacaacaccaccaccggcagaaccagccugcccagaugcugccugaucagcaacggcagcuaccugaacgagacccacuucagcgacgacaucgagcagcaggccgacaacaugaucaccgagaugcugcagaaggaguacauggacagacagggcaagaccccccugggccugguggaccuguucguguucagcaccagcuucuaccugaucaccaucuuccugcaccuggugaagauccccacccacagacacaucgugggcaagcccugccccaagccccacagacugaaccacaugggcaucugcagcugcggccuguacaagcagcccggcgugcccgugagauggaagagaugaggacuaguuauaagacugacuagcccgaugggccucccaacgggcccuccuccccuccuugcaccgagauuaauaaaaaaaaaaaaaaaaaaaaaaaaaaaaaaaaaaaaaaaaaaaaaaaaaaaaaaaaaaaaaaaaaaaaaaaaaaaaaaaaaaaaaaaaaaaaaaaaaaaa

SEQ ID NO: 26284 - RNA, 1662 nt, Artificial Sequence; identical to SEQ ID NO: 26278
  mRNA product Design i-3 (A100) comprising derived and/or modified sequence from LASV(Pinneo-NIG-1969;Clade I)__AIT17836__GPCmut3 (opt4)

SEQ ID NO: 26285 - RNA, 1662 nt, Artificial Sequence
  mRNA product Design i-3 (A100) comprising derived and/or modified sequence from LASV(ISTH0009-NIG-2011;Clade II)__AIT17404__GPCmut3 (opt4)
aggagaaagcuuaccaugggccagaucaucaccuucuuccaggaggugccccacgugaucgaggaggugaugaacaucgugcugaucgcccugagccugcuggccauccugaagggcaucuacaacguggccaccugcggccuguucggccuggugagcuuccugcugcugugcggcagaagcugcagcaccaccuacaagggcguguacgagcugcagacccuggagcuggacauggccagccugaacaugaccaugccccugagcugcaccaagaacaacagccaccacuacaucauggugggcaacgagaccggccuggagcugacccugaccaacaccagcaucaucaaccacaaguucugcaaccugagcgacgcccacaagaagaaccuguacgaccacgcccugaugagcaucaucagcaccuuccaccugagcauccccaacuucaaccaguacgaggccaugagcugcgacuucaacggcggcaagaucagcgugcaguacaaccugagccacgccuacgccguggacgccgccaaccacugcggcaccaucgccaacggcgugcugcagaccuucaugagaauggccuggggcggcagcuacaucgcccuggacagcggcaagggcagcugggacugcaucaugaccagcuaccaguaccugaucauccagaacaccaccugggaggaccacugccaguucagcagacccagccccaucggcuaccugggccugcugagccagagaaccagagacaucuacaucagcagaagaagaagaggcaccuucaccuggacccugagcgacagcgagggcaacgagacccccggcggcuacugccugaccagauggaugcugaucgaggccgagcugaagugcuucggcaacaccgccguggccaagugcaacgagaagcacgacgaggaguucugcgacaugcugagacuguucgacuucaacaagcaggccaucagaagacugaagacccccgcccagaugagcauccagcugaucaacaaggccgugaacgcccugaucaacgaccagcugaucaugaagaaccaccugagagacaucaugggcauccccuacugcaacuacagcaaguacugcuaccugaaccacaccgugaccggcaagaccagccugcccagaugcugccuggugagcaacggcagcuaccugaacgagacccacuucagcgacgacaucgagcagcaggccgacaacaugaucaccgagcugcugcagaaggaguacauggacagacagggcaagaccccccugggccugguggaccuguucguguucagcaccagcuucuaccugaucagcaucuuccugcaccugaucaagauccccacccacagacacaucaccggcaagcccugccccaagccccacagacugaaccacaugggcaucugcagcugcggccuguacaagcaccccggcgugcccgugaaguggaagagaugaggacuaguuauaagacugacuagcccgaugggccucccaacgggcccuccuccccuccuugcaccgagauuaauaaaaaaaaaaaaaaaaaaaaaaaaaaaaaaaaaaaaaaaaaaaaaaaaaaaaaaaaaaaaaaaaaaaaaaaaaaaaaaaaaaaaaaaaaaaaaaaaaaaa

SEQ ID NO: 26286 - RNA, 1662 nt, Artificial Sequence
  mRNA product Design i-3 (A100) comprising derived and/or modified sequence from LASV(ISTH2010-NIG-2012;Clade II)__AIT17482__GPCmut3 (opt4)
aggagaaagcuuaccaugggccagaucaucaccuucuuccaggaggugccccacgugaucgaggaggugaugaacaucgugcugaucgcccugagccugcuggccauccugaagggcaucuacaacguggccaccugcggccuguucggccuggugagcuuccugcugcugugcggcagaagcugcagcaccaccuacaagggcguguacgagcugcagacccuggagcuggacauggccagccugaacaugaccaugccccugagcugcaccaagaacaacagccaccacuacaucauggugggcaacgagaccggccuggagcugacccugaccaacaccagcaucaucaaccacaaguucugcaaccugagcgacgcccacaagaagaaccuguacgaccacgcccugaugagcaucaucagcaccuuccaccugagcauccccaacuucaaccaguacgaggccaugagcugcgacuucaacggcggcaagaucagcgugcaguacaaccugagccacgccuacgccguggacgccgccaaccacugcggcaccaucgccaacggcgugcugcagaccuucaugagaauggccuggggcggcagcuacaucgcccuggacagcggcaagggcagcugggacugcaucaugaccagcuaccaguaccugaucauccagaacaucaccugggaggaccacugccaguucagcagacccagccccaucggcuaccugggccugcugagccagagaaccagagacaucuacaucagcagaagaagaagaggcaccuucaccuggacccugagcgacagcgagggcaacgagacccccggcggcuacugccugaccagauggaugcugaucgaggccgagcugaagugcuucggcaacaccgccguggccaagugcaacgagaagcacgacgaggaguucugcgacaugcugagacuguucgacuucaacaagcaggccaucagaagacugaagacccccgcccagaugagcauccagcugaucaacaaggccgugaacgcccugaucaacgaccagcugaucaugaagaaccaccugagagacaucaugggcauccccuacugcaacuacagcaaguacugcuaccugaaccacaccgugaccggcaagaccagccugcccagaugcugccuggugagcaacggcagcuaccugaacgagacccacuucagcgacgacaucgagcagcaggccgacaacaugaucaccgagcugcugcagaaggaguacaucgacagacagggcaagaccccccugggccugguggaccuguucguguucagcaccagcuucuaccugaucagcaucuuccugcaccuggugaagauccccacccacagacacguggugggcaagcccugccccaagccccacagacugaaccacaugggcaucugcagcugcggccuguacaagcaccccggcgugcccgugaaguggaagagaugaggacuaguuauaagacugacuagcccgaugggccucccaacgggcccuccuccccuccuugcaccgagauuaauaaaaaaaaaaaaaaaaaaaaaaaaaaaaaaaaaaaaaaaaaaaaaaaaaaaaaaaaaaaaaaaaaaaaaaaaaaaaaaaaaaaaaaaaaaaaaaaaaaaa

SEQ ID NO: 26287 - RNA, 1662 nt, Artificial Sequence
  mRNA product Design i-3 (A100) comprising derived and/or modified sequence from LASV(Lassa virus/H.sapiens-wt/NGA/2015/ISTH_0543;Clade II)__AVO03639__GPCmut3 (opt4)
aggagaaagcuuaccaugggccagaucaucaccuucuuccaggaggugccccacgugaucgaggaggugaugaacaucgugcugaucgcccugagccugcuggccauccugaagggcaucuacaacguggccaccugcggccuguucggccuggugagcuuccugcugcugugcggcagaagcugcagcaccaccuacaagggcguguacgagcugcagacccuggagcuggacauggccaaccugaacaugaccaugccccugagcugcaccaagaacaacagccaccacuacaucauggugggcaacgagaccggccuggagcugacccugaccaacaccagcaucaucaaccacaaguucugcaaccugagcgacgcccacaagaagaaccuguacgaccacgcccugaugagcaucaucagcaccuuccaccugagcauccccaacuucaaccaguacgaggccaugagcugcgacuucaacggcggcaagaucagcgugcaguacaaccugagccacaccuacgccguggacgccgccaaccacugcggcaccaucgccaacggcgugcugcagaccuucaugagaauggccuggggcggcagcuacaucgcccuggacagcggcaagggcagcugggacugcaucaugaccagcuaccaguaccuggugauccagaacaccaccugggaggaccacugccaguucagcagacccagccccaucggcuaccugggccugcugagccagagaaccagagacaucuacaucagcagaagaagaagaggcaccuucaccuggacccugagcgacagcgagggcaacgagacccccggcggcuacugccugaccagauggaugcugaucgaggccgagcugaagugcuucggcaacaccgccguggccaagugcaacgagaagcacgacgaggaguucugcgacaugcugagacuguucgacuucaacaagcaggccaucagaagacugaagacccccgcccagaugagcauccagcugaucaacaaggccgugaacgcccugaucaacgaccagcugaucaugaagaaccaccugagagacaucaugggcauccccuacugcaacuacagcaaguacugcuaccugaaccacaccgugaccggcaagaccagccugcccagaugcugccuggugagcaacggcagcuaccugaacgagacccacuucagcgacgacaucgagcagcaggccgacaacaugaucaccgagcugcugcagaaggaguacaucgacagacagggcaagaccccccugggccugguggaccuguucguguucagcaccagcuucuaccugaucagcaucuuccugcaccuggugaagauccccacccacagacacaucaccggcaagcccugccccaagccccacagacugaaccacaugggcaucugcagcugcggccuguacaagcaccccggcgugcccgugaaguggaagagaugaggacuaguuauaagacugacuagcccgaugggccucccaacgggcccuccuccccuccuugcaccgagauuaauaaaaaaaaaaaaaaaaaaaaaaaaaaaaaaaaaaaaaaaaaaaaaaaaaaaaaaaaaaaaaaaaaaaaaaaaaaaaaaaaaaaaaaaaaaaaaaaaaaaa

SEQ ID NO: 26288 - RNA, 1662 nt, Artificial Sequence
  mRNA product Design i-3 (A100) comprising derived and/or modified sequence from LASV(Lassa virus/H.sapiens-wt/NGA/2016/ISTH_0009;Clade II)__AVO03571__GPCmut3 (opt4)
aggagaaagcuuaccaugggccagaucaucaccuucuuccaggaggugccccacgugaucgaggaggugaugaacaucgugcugaucgcccugagccugcuggccauccugaagggcaucuacaacguggccaccugcggccugcugggccuggugagcuuccugcugcugugcggcagaagcugcagcaccaccuacaagggcguguacgagcugcagacccuggagcuggacauggccagccugaacaugaccaugccccugagcugcaccaagaacaacagccaccacuacaucauggugggcaacgagaccggccuggagcugacccugaccaacaccagcaucaucaaccacaaguucugcaaccugagcgacgcccacaagaagaaccuguacgaccacgcccugaugagcaucaucagcaccuuccaccugagcauccccaacuucaaccaguacgaggccaugagcugcgacuucaacggcggcagaaucagcgugcaguacaaccugagccacagcuacgccguggacgccgccaaccacugcggcaccaucgccaacggcgugcugcagaccuucaugagaauggccuggggcggcagcuacaucgcccuggacagcggcaagggcagcugggacugcaucaugaccagcuaccaguaccugaucauccagaacaccaccugggaggaccacugccaguucagcagacccagccccaucggcuaccugggccugcugagccagagaaccagagacaucuacaucagcagaagaagaagaggcaccuucaccuggacccugagcgacagcgagggcaacgagacccccggcggcuacugccugaccagauggaugcugaucgaggccgagcugaagugcuucggcaacaccgccguggccaagugcaacgagaagcacgacgaggaguucugcgacaugcugagacuguucgacuucaacaagcaggccaucagaagacugaagacccccgcccagaugagcauccagcugaucaacaaggccgugaacgcccugaucaacgaccagcugaucaugaagaaccaccugagagacaucaugggcauccccuacugcaacuacagcaaguacugcuaccugaaccacaccgugaccggcaagaccagccugcccagaugcugccuggugagcaacggcagcuaccugaacgagacccacuucagcgacgacaucgagcagcaggccgacaacaugaucaccgagcugcugcagaaggaguacaucgacagacagggcaagaccccccugggccugguggaccuguucguguucagcaccagcuucuaccugaucagcaucuuccugcaccuggugaagauccccacccacagacacaucaccggcaagcccugccccaagccccacagacugaaccacaugggcaucugcagcugcggccuguacaaccaccccggcgugcccgugaaguggaagagaugaggacuaguuauaagacugacuagcccgaugggccucccaacgggcccuccuccccuccuugcaccgagauuaauaaaaaaaaaaaaaaaaaaaaaaaaaaaaaaaaaaaaaaaaaaaaaaaaaaaaaaaaaaaaaaaaaaaaaaaaaaaaaaaaaaaaaaaaaaaaaaaaaaaa

SEQ ID NO: 26289 - RNA, 1662 nt, Artificial Sequence
  mRNA product Design i-3 (A100) comprising derived and/or modified sequence from LASV(Lassa virus/H.sapiens-wt/NGA/2016/ISTH_0017;Clade II)__AVO03567__GPCmut3 (opt4)
aggagaaagcuuaccaugggccagaucaucaccuucuuccaggaggugccccacgugaucgaggaggugaugaacaucgugcugaucgcccugagccugcuggccauccugaagggcaucuacaacguggccaccugcggccuguucggccuggugagcuuccugcugcugugcggcagaagcugcagcaccaccuacaagggcguguacgagcugcagacccuggagcuggacauggccagccugaacaugaccaugccccugagcugcaccaagaacaacagccaccacuacaucauggugggcaacgagaccggccuggagcugacccugaccaacaccagcaucaucaaccacaaguucugcaaccugagcgacgcccacaagaagaaccuguacgaccacgcccugaugagcaucaucagcaccuuccaccugagcauccccaacuucaaccaguacgaggccaugagcugcgacuucaacggcggcaagaucagcgugcaguacaaccugagccacaccuacgccaucgacgccgccaaccacugcggcaccaucgccaacggcgugcugcagaccuucaugagaauggccuggggcggcagcuacaucgcccuggacagcggcaagggcagcugggacugcaucaugaccagcuaccaguaccugaucauccagaacaccaccugggaggaccacugccaguucagcagacccagccccaucggcuaccugggccugcugagccagagaaccagagacaucuacaucagcagaagaagaagaggcaccuucaccuggacccugagcgacagcgagggcaacgagacccccggcggcuacugccugaccagauggaugcugaucgaggccgagcugaagugcuucggcaacaccgccguggccaagugcaacgagaagcacgacgaggaguucugcgacaugcugagacuguucgacuucaacaagcaggccaucagaagacugaagacccccgcccagaugagcauccagcugaucaacaaggccgugaacgcccugaucaacgaccagcugaucaugaagaaccaccugagagacaucaugggcauccccuacugcaacuacagcaaguacugcuaccugaaccacaccgugaccggcaagaccagccugcccagaugcugccuggugagcaacggcagcuaccugaacgagacccacuucagcgacgacaucgagcagcaggccgacaacaugaucaccgagcugcugcagaaggaguacauggacagacagggcaagaccccccugggccugguggaccuguucguguucagcaccagcuucuaccugaucagcaucuuccugcaccuggugagaauccccacccacagacacgugaucggcaagcccugccccaagccccacagacugaaccacaugggcaucugcagcugcggccuguacaagcaccccggcgugcccgugaaguggaagagaugaggacuaguuauaagacugacuagcccgaugggccucccaacgggcccuccuccccuccuugcaccgagauuaauaaaaaaaaaaaaaaaaaaaaaaaaaaaaaaaaaaaaaaaaaaaaaaaaaaaaaaaaaaaaaaaaaaaaaaaaaaaaaaaaaaaaaaaaaaaaaaaaaaaa

SEQ ID NO: 26290 - RNA, 1662 nt, Artificial Sequence
  mRNA product Design i-3 (A100) comprising derived and/or modified sequence from LASV(Lassa virus/H.sapiens-wt/NGA/2018/ISTH_0959;Clade II)__AVV65099__GPCmut3 (opt4)
aggagaaagcuuaccaugggccagaucaucaccuucuuccaggaggugccccacgugaucgaggaggugaugaacaucgugcugaucgcccugagccugcuggccauccugaagggcaucuacaacguggugaccugcggccuguucggccuggugagcuuccugcugcugugcggcagaagcugcagcaccaccuacaagggcguguacgagcugcagacccuggagcuggacauggccagccugaacaugaccaugccccugagcugcaccaagaacaacagccaccacuacaucauggugggcaacgagaccggccuggagcugacccugaccaacaccagcaucaucaaccacaaguucugcaaccugagcgacgcccacaagaagaaccuguacgaccacgcccugaugagcaucaucagcaccuuccaccugagcauccccaacuucaaccaguacgaggccaugagcugcgacuucaacggcggcaagaucagcgugcaguacaaccugagccacgccuacgccaucgacgccgccaaccacugcggcaccaucgccaacggcgugcugcagaccuucaugagaauggccuggggcggcagcuacaucgcccuggacagcggcaagggcagcugggacugcaucaugaccagcuaccaguaccugaucauccagaacaccaccugggaggaccacugccaguucagcagacccagccccaucggcuaccugggccugcugagccagagaaccagagacaucuacaucagcagaagaagaagaggcaccuucaccuggacccugagcgacagcgagggcaacgagacccccggcggcuacugccugaccagauggaugcugaucgaggccgagcugaagugcuucggcaacaccgccguggccaagugcaacgagaagcacgacgaggaguucugcgacaugcugagacuguucgacuucaacaagcaggccaucagaagacugaagacccccgcccagaugagcauccagcugaucaacaaggccgugaacgcccugaucaacgaccagcugaucaugaagaaccaccugagagacaucaugggcauccccuacugcaacuacagcaaguacugcuaccugaaccacaccgugaccggcaagaccagccugcccagaugcugccuggugagcaacggcagcuaccugaacgagacccacuucagcgacgacaucgagcagcaggccgacaacaugaucaccgagcugcugcagaaggaguacaucgacagacagggcaagaccccccugggccugguggaccuguucguguucagcaccagcuucuaccugaucagcaucuuccugcaccuggugaagauccccacccacagacacgugaucggcaagcccugccccaagccccacagacugaaccacaugggcaucugcagcugcggccuguacaagcaccccggcgugcccgugaaguggaagagaugaggacuaguuauaagacugacuagcccgaugggccucccaacgggcccuccuccccuccuugcaccgagauuaauaaaaaaaaaaaaaaaaaaaaaaaaaaaaaaaaaaaaaaaaaaaaaaaaaaaaaaaaaaaaaaaaaaaaaaaaaaaaaaaaaaaaaaaaaaaaaaaaaaaa

SEQ ID NO: 26291 - RNA, 1662 nt, Artificial Sequence
  mRNA product Design i-3 (A100) comprising derived and/or modified sequence from LASV(LASV003-NIG-2008;Clade II)__AIT17580__GPCmut3 (opt4)
aggagaaagcuuaccaugggccagaucaucaccuucuuccaggaggugccccacgugaucgaggaggugaugaacaucgugcugaucgcccugagccugcuggccauccugaagggcaucuacaacguggccaccugcggccuguucggccuggugagcuuccugcugcugugcggcagaagcugcagcaccaccuacaagggcguguacgagcugcagacccuggagcuggacauggccagccugaacaugaccaugccccugagcugcaccaagaacaacagccaccacuacaucauggugggcaacgagaccggccuggagcugacccugaccaacaccagcaucaucaaccacaaguucugcaaccugagcgacgcccacaagaagaaccuguacgaccacgcccugaugagcaucaucagcaccuuccaccugagcauccccaacuucaaccaguacgaggccaugagcugcgacuucaacggcggcaagaucagcgugcaguacaaccugagccacaccuacgccguggacgccgccaaccacugcggcaccaucgccaacggcgugcugcagaccuucaugagaauggccuggggcggcagcuacaucgcccuggacagcggcaagggcagcugggacugcaucaugaccagcuaccaguaccugaucauccagaacaccaccugggaggaccacugccaguucagcagacccagccccaucggcuaccugggccugcugagccagagaaccagagacaucuacaucagcagaagaagaagaggcaccuucaccuggacccugagcgacagcgagagcaacgagacccccggcggcuacugccugaccagauggaugcugaucgaggccgagcugaagugcuucggcaacaccgccguggccaagugcaacgagaagcacgacgaggaguucugcgacaugcugagacuguucgacuucaacaagcaggccaucagaagacugaaggcccccgcccagaugagcauccagcugaucaacaaggccgugaacgcccugaucaacgaccagcugaucaugaagaaccaccugagagacaucaugggcauccccuacugcaacuacagcaaguacugcuaccugaaccacaccgugaccggcagaaccagccugcccagaugcugccuggugagcaacggcagcuaccugaacgagacccacuucagcgacgacaucgagcagcaggccgacaacaugaucaccgagcugcugcagaaggaguacauggacagacagggcaagaccccccugggccugguggaccuguucguguucagcaccagcuucuaccugaucagcaucuuccugcaccuggugaagauccccacccacagacacgugaucggcaagcccugccccaagccccacagacugaaccacaugggcaucugcagcugcggccuguacaagcaccccggcgugcccgugaaguggaagagaugaggacuaguuauaagacugacuagcccgaugggccucccaacgggcccuccuccccuccuugcaccgagauuaauaaaaaaaaaaaaaaaaaaaaaaaaaaaaaaaaaaaaaaaaaaaaaaaaaaaaaaaaaaaaaaaaaaaaaaaaaaaaaaaaaaaaaaaaaaaaaaaaaaaa

SEQ ID NO: 26292 - RNA, 1662 nt, Artificial Sequence
  mRNA product Design i-3 (A100) comprising derived and/or modified sequence from LASV(LASV035-NIG-2009;Clade II)__AIT17588__GPCmut3 (opt4)
aggagaaagcuuaccaugggccagaucaucaccuucuuccaggaggugccccacgugaucgaggaggugaugaacaucgugcugaucgcccugagccugcuggccauccugaagggcaucuacaacguggccaccugcggccuguucggccuggugagcuuccugcugcugugcggcagaagcugcagcaccaccuacaagggcguguacgagcugcagacccuggagcuggacauggccagccugaacaugaccaugccccugagcugcaccaagaacaacagccaccacuacaucauggugggcaacgagaccggccuggagcugacccugaccaacaccagcaucaucaaccacaaguucugcaaccugagcgacgcccacaagaagaaccuguacgaccacgcccugaugagcaucaucagcaccuuccaccugagcauccccaacuucaaccaguacgaggccaugagcugcgacuucaacggcggcaagaucagcgugcaguacaaccugagccacgccuacgccguggacgccgccaaccacugcggcaccaucgccaacggcgugcugcagaccuucaugagaauggccuggggcggcagcuacaucgcccuggacagcggcaagggcagcugggacugcaucaugaccagcuaccaguaccugaucauccagaacaccaccugggaggaccacugccaguucagcagacccagccccaucggcuaccugggccugcugagccagagaaccagagacaucuacaucagcagaagaagaagaggcaccuucaccuggacccugagcgacagcgagggcaacgagacccccggcggcuacugccugaccagauggaugcugaucgaggccgagcugaagugcuucggcaacaccgccguggccaagugcaacgagaagcacgacgaggaguucugcgacaugcugagacuguucgacuucaacaagcaggccaucagaagacugaaggcccccgcccagaugagcauccagcugaucaacaaggccgugaacgcccugaucaacgaccagcugaucaugaagaaccaccugagagacaucaugggcauccccuacugcaacuacagcaaguacugcuaccugaaccacaccgugaccggcaagaccagccugcccagaugcugccuggugagcaacggcagcuaccugaacgagacccacuucagcgacgacaucgagcagcaggccgacaacaugaucaccgagcugcugcagaaggaguacaucgacagacagggcaagaccccccugggccugguggaccuguucguguucagcaccagcuucuaccugaucagcaucuuccugcaccuggugaagauccccacccacagacacgugaucggcaagcccugccccaagccccacagacugaaccacaugggcaucugcagcugcggccuguacaagcaccccggcgugcccgugaaguggaagagaugaggacuaguuauaagacugacuagcccgaugggccucccaacgggcccuccuccccuccuugcaccgagauuaauaaaaaaaaaaaaaaaaaaaaaaaaaaaaaaaaaaaaaaaaaaaaaaaaaaaaaaaaaaaaaaaaaaaaaaaaaaaaaaaaaaaaaaaaaaaaaaaaaaaa

SEQ ID NO: 26293 - RNA, 1662 nt, Artificial Sequence
  mRNA product Design i-3 (A100) comprising derived and/or modified sequence from LASV(LASV1000-NIG-2009;Clade II)__AIT17782__GPCmut3 (opt4)
aggagaaagcuuaccaugggccagaucaucaccuucuuccaggaggugccccacgugaucgaggaggugaugaacaucgugcugaucgcccugagccugcuggccauccugaagggcaucuacaacguggccaccugcggccuguucggccuggugagcuuccugcugcugugcggcagaagcugcagcaccaccuacaagggcguguacgagcugcagacccuggagcuggacauggccagccugaacaugaccaugccccugagcugcaccaagaacaacagccaccacuacaucauggugggcaacgagaccggccuggagcugacccugaccaacaccagcaucaucaaccacaaguucugcaaccugagcgacgcccacaagaagaaccuguacgaccacgcccugaugagcaucaucagcaccuuccaccugagcauccccaacuucaaccaguacgaggccaugagcugcgacuucaacggcggcaagaucagcgugcaguacaaccugagccacaccuacgccguggacgccgccaaccacugcggcaccaucgccaacggcgugcugcagaccuucaugagaauggccuggggcggcagcuacaucgcccuggacagcggcaagggcagcugggacugcaucaugaccagcuaccaguaccugaucauccagaacaccaccugggaggaccacugccaguucagcagacccagccccaucggcuaccugggccugcugagccagagaaccagagacaucuacaucagcagaagaagaagaggcaccuucaccuggacccugagcgacagcgagggcaacgagacccccggcggcuacugccugaccagauggaugcugaucgaggccgagcugaagugcuucggcaacaccgccguggccaagugcaacgagaagcacgacgaggaguucugcgacaugcugagacuguucgacuucaacaagcaggccaucaagagacugaagacccccgcccagaugagcauccagcugaucaacaaggccgugaacgcccugaucaacgaccagcugaucaugaagaaccaccugagagacaucaugggcauccccuacugcaacuacagcaaguacugcuaccugaaccacaccgugaccggcaagaccagccugcccagaugcugccuggugagcaacggcagcuaccugaacgagacccacuucagcgacgacaucgagcagcaggccgacaacaugaucaccgagcugcugcagaaggaguacaucgacagacagggcaagaccccccugggccugguggaccuguucguguucagcaccagcuucuaccugaucagcaucuuccugcaccuggugaagauccccacccacagacacguggugggcaagcccugccccaagccccacagacugaaccacaugggcaucugcagcugcggccuguacaagcaccccggcgugcccgugaaguggaagagaugaggacuaguuauaagacugacuagcccgaugggccucccaacgggcccuccuccccuccuugcaccgagauuaauaaaaaaaaaaaaaaaaaaaaaaaaaaaaaaaaaaaaaaaaaaaaaaaaaaaaaaaaaaaaaaaaaaaaaaaaaaaaaaaaaaaaaaaaaaaaaaaaaaaa

SEQ ID NO: 26294 - RNA, 1662 nt, Artificial Sequence
  mRNA product Design i-3 (A100) comprising derived and/or modified sequence from LASV(LASV221-NIG-2010;Clade II)__AIT17624__GPCmut3 (opt4)
aggagaaagcuuaccaugggccagaucaucaccuucuuccaggaggugccccacgugaucgaggaggugaugaacaucgugcugaucgcccugagccugcuggccauccugaagggcaucuacaacguggccaccugcggccuguucggccuggugagcuuccugcugcugugcggcagaagcugcagcaccaccuacaagggcguguacgagcugcagacccuggagcuggacauggccagccugaacaugaccaugccccugagcugcaccaagaacaacagccaccacuacaucauggugggcaacgagaccggccuggagcugacccugaccaacaccagcaucaucaaccacaaguucugcaaccugagcgacgcccacaagaagaaccuguacgaccacgcccugaugagcaucaucagcaccuuccaccugagcauccccaacuucaaccaguacgaggccaugagcugcgacuucaacggcggcaagaucagcgugcaguacaaccugagccacaccuacgccaucgacgccgccaaccacugcggcaccaucgccaacggcgugcugcagaccuucaugagaauggccuggggcggcagcuacaucgcccuggacagcggcaagggcagcugggacugcaucaugaccagcuaccaguaccugaucauccagaacaccaccugggaggaccacugccaguucagcagacccagccccaucggcuaccugggccugcugagccagagaaccagagacaucuacaucagcagaagaagaagaggcaccuucaccuggacccugagcgacagcgagggcaacgagacccccggcggcuacugccugaccagauggaugcugaucgaggccgagcugaagugcuucggcaacaccgccguggccaagugcaacgagaagcacgacgaggaguucugcgacaugcugagacuguucgacuucaacaagcaggccaucagaagacugaagacccccgcccagaugagcauccagcugaucaacaaggccgugaacgcccugaucaacgaccagcugaucaugaagaaccaccugagagacaucaugggcauccccuacugcaacuacagcaaguacugcuaccugaaccacaccgugaccggcaagaccagccugcccagaugcugccuggugagcaacggcagcuaccugaacgagacccacuucagcgacgacaucgagcagcaggccgacaacaugaucaccgagaugcugcagaaggaguacauggacagacagggcaagaccccccugggccugguggaccuguucguguucagcaccagcuucuaccugaucagcaucuuccugcaccuggugaagauccccacccacagacacgugaucggcaagcccugccccaagccccacagacugaaccacaugggcaucugcagcugcggccuguacaagcaccccggcgugcccgugaaguggaagagaugaggacuaguuauaagacugacuagcccgaugggccucccaacgggcccuccuccccuccuugcaccgagauuaauaaaaaaaaaaaaaaaaaaaaaaaaaaaaaaaaaaaaaaaaaaaaaaaaaaaaaaaaaaaaaaaaaaaaaaaaaaaaaaaaaaaaaaaaaaaaaaaaaaaa

SEQ ID NO: 26295 - RNA, 1662 nt, Artificial Sequence
  mRNA product Design i-3 (A100) comprising derived and/or modified sequence from LASV(LASV237-NIG-2010;Clade II)__AIT17638__GPCmut3 (opt4)
aggagaaagcuuaccaugggccagaucaucaccuucuuccaggaggugccccacgugaucgaggaggugaugaacaucgugcugaucgcccugagccugcuggccauccugaagggcaucuacaacguggccaccugcggccuguucggccuggugagcuuccugcugcugugcggcagaagcugcagcaccaccuacaagggcguguacgagcugcagacccuggagcuggacauggccagccugaacaugaccaugccccugagcugcaccaagaacaacagccaccacuacaucauggugggcaacgagaccggccuggagcugacccugaccaacaccagcaucaucaaccacaaguucugcaaccugagcgacgcccacaagaaggaccuguacgaccacgcccugaugagcaucaucagcaccuuccaccugagcauccccaacuucaaccaguacgaggccaugagcugcgacuucaacggcggcaagaucagcgugcaguacaaccugagccacaccuacgccguggacgccgccaaccacugcggcaccaucgccaacggcgugcugcagaccuucaugagaauggccuggggcggcagcuacaucgcccuggacagcggcaagggcagcugggacugcaucaugaccagcuaccaguaccugaucauccagaacaccaccugggaggaccacugccaguucagcagacccagccccaucggcuaccugggccugcugagccagagaaccagagacaucuacaucagcagaagaagaagaggcaccuucaccuggacccugagcgacagcgagggcaacgagacccccggcggcuacugccugaccagauggaugcugaucgaggccgagcugaagugcuucggcaacaccgccguggccaagugcaacgagaagcacgacgaggaguucugcgacaugcugagacuguucgacuucaacaagcaggccaucagaagacugaagacccccgcccagaugagcauccagcugaucaacaaggccgugaacgcccugaucaacgaccagcugaucaugaagaaccaccugagagacaucaugggcauccccuacugcaacuacagcaaguacugcuaccugaaccacaccgugaccggcaagaccagccugcccagaugcugccuggugagcaacggcagcuaccugaacgagacccacuucagcgacgacaucgagcagcaggccgacaacaugaucaccgagcugcugcagaaggaguacauggacagacagggcaagaccccccugggccugguggaccuguucguguucagcaccagcuucuaccugaucagcaucuuccugcaccugaucaagauccccacccacagacacaucaccggcaagcccugccccaagccccacagacugaaccacaugggcaucugcagcugcggccuguacaagcaccccggcgugcccgugaaguggaagagaugaggacuaguuauaagacugacuagcccgaugggccucccaacgggcccuccuccccuccuugcaccgagauuaauaaaaaaaaaaaaaaaaaaaaaaaaaaaaaaaaaaaaaaaaaaaaaaaaaaaaaaaaaaaaaaaaaaaaaaaaaaaaaaaaaaaaaaaaaaaaaaaaaaaa

SEQ ID NO: 26296 - RNA, 1662 nt, Artificial Sequence
  mRNA product Design i-3 (A100) comprising derived and/or modified sequence from LASV(LASV253-NIG-2011;Clade II)__AIT17670__GPCmut3 (opt4)
aggagaaagcuuaccaugggccagaucaucaccuucuuccaggaggugccccacgugaucgaggaggugaugaacaucgugcugaucgcccugagccugcuggccauccugaagggcaucuacaacguggccaccugcggccuguucggccuggugagcuuccugcugcugugcggcagaagcugcagcaccaccuacaagggcguguacgagcugcagacccuggagcuggacauggccagccugaacaugaccaugccccugagcugcaccaagaacaacagccaccacuacaucauggugggcaacgagaccggccuggagcugacccugaccaacaccagcaucaucaaccacaaguucugcaaccugagcgacgcccacaagaagaaccuguacgaccacgcccugaugagcaucaucagcaccuuccaccugagcauccccaacuucaaccaguacgaggccaugagcugcgacuucaacggcggcaagaucagcgugcaguacaaccugagccacaccuacgccguggacgccgccaaccacugcggcaccaucgccaacggcgugcugcagaccuucaugagaauggccuggggcggcagcuacaucgcccuggacagcggcaagggcagcugggacugcaucaugaccagcuaccaguaccugaucauccagaacaccaccugggaggaccacugccaguucagcagacccagccccaucggcuaccugggccugcugagccagagaaccagagacaucuacaucagcagaagaagaagaggcaccuucaccuggacccugagcgacagcgagggcaacgagacccccggcggcuacugccugaccagauggaugcugaucgaggccgagcugaagugcuucggcaacaccgccguggccaagugcaacgagaagcacgacgaggaguucugcgacaugcugagacuguucgacuucaacaagcaggccaucagaagacugaaggcccccgcccagaugagcauccagcugaucaacaaggccgugaacgcccugaucaacgaccagcugaucaugaagaaccaccugagagacaucaugggcauccccuacugcaacuacagcaaguacugcuaccugaaccacaccgugaccggcagaaccagccugcccagaugcugccuggugagcaacggcagcuaccugaacgagacccacuucagcgacgacaucgagcagcaggccgacaacaugaucaccgagcugcugcagaaggaguacaucgacagacagggcaagaccccccugggccugguggaccuguucguguucagcaccagcuucuaccugaucagcaucuuccugcaccuggugaagauccccacccacagacacaucaucggcaagcccugccccaagccccacagacugaaccacaugggcaucugcagcugcggccuguacaagcaccccggcgugcccgugaaguggaagagaugaggacuaguuauaagacugacuagcccgaugggccucccaacgggcccuccuccccuccuugcaccgagauuaauaaaaaaaaaaaaaaaaaaaaaaaaaaaaaaaaaaaaaaaaaaaaaaaaaaaaaaaaaaaaaaaaaaaaaaaaaaaaaaaaaaaaaaaaaaaaaaaaaaaa

SEQ ID NO: 26297 - RNA, 1662 nt, Artificial Sequence
  mRNA product Design i-3 (A100) comprising derived and/or modified sequence from LASV(LASV254-NIG-2011;Clade II)__AIT17674__GPCmut3 (opt4)
aggagaaagcuuaccaugggccagaucaucaccuucuuccaggaggugccccacgugaucgaggaggugaugaacaucgugcugaucgcccugagccugcuggccauccugaagggcaucuacaacguggccaccugcggccuguucggccuggugagcuuccugcugcugugcggcagaagcugcagcaccaccuacaagggcguguacgagcugcagacccuggagcuggacaugaccaaccugaacaugaccaugccccugagcugcaccaagaacaacagccaccacuacaucauggugggcaacgagaccggccuggagcugacccugaccaacaccagcaucaucaaccacaaguucugcaaccugagcgacgcccacaagaagaaccuguacaaccacgcccugaugagcaucaucagcaccuuccaccugagcauccccaacuucaaccaguacgaggccaugagcugcgacuucaacggcggcaagaucagcgugcaguacaaccugagccacagcuacgccguggacgccgccaaccacugcggcaccaucgccaacggcgugcugcagaccuucaugagaauggccuggggcggcagcuacaucgcccuggacagcggcaagggcaacugggacugcaucaugaccagcuaccaguaccugaucauccagaacaccaccugggaggaccacugccaguucagcagacccagccccaucggcuaccugggccugcugagccagagaaccagagacaucuacaucagcagaagaagaagaggcaccuucaccuggacccugagcgacagcgagggcaacgagacccccggcggcuacugccugaccagauggaugcugaucgaggccgagcugaagugcuucggcaacaccgccguggccaagugcaacgagaagcacgacgaggaguucugcgacaugcugagacuguucgacuucaacaagcaggccaucagaagacugaagacccccgcccaggccaacauccagcugaucaacaaggccgugaacgcccugaucaacgaccagcugaucaugaagaaccaccugagagacaucaugggcauccccuacugcaacuacagcaaguacugcuaccugaaccacaccgugaccggcaagaccagccugcccagaugcugccuggugagcaacggcagcuaccugaacgagacccacuucagcgacgacaucgagcagcaggccgacaacaugaucaccgagcugcugcagaaggaguacauggacagacagggcaagaccccccugggccugguggaccuguucguguucagcaccagcuucuaccugaucagcaucuuccugcaccuggugaagauccccacccacagacacgugaucggcaagcccugccccaagccccacagacugaaccacaugggcaucugcagcugcggccuguacaagcaccccggcgugcccgugaaguggaagagaugaggacuaguuauaagacugacuagcccgaugggccucccaacgggcccuccuccccuccuugcaccgagauuaauaaaaaaaaaaaaaaaaaaaaaaaaaaaaaaaaaaaaaaaaaaaaaaaaaaaaaaaaaaaaaaaaaaaaaaaaaaaaaaaaaaaaaaaaaaaaaaaaaaaa

SEQ ID NO: 26298 - RNA, 1662 nt, Artificial Sequence
  mRNA product Design i-3 (A100) comprising derived and/or modified sequence from LASV(Nig08-A19;Clade III)__ADU56618__GPCmut3 (opt4)
aggagaaagcuuaccaugggccagaucgugaccuucuuccaggaggugccccacgugaucgaggaggugaugaacaucgugcugaucgcccugagcauccuggccauccugaagggccuguacaacaucgccaccugcggccugaucggccuggugaccuuccugcugcugagcggcagaagcugcagcaugaccuacaagggcguguacgagcugcagacccuggagcugaacaugaacacccugaacaugaccaugccccugagcugcaccaagaacaacagccaccacuacaucauggugggcaacgagaccggccuggagcugacccugaccaacaccagccugcugcaccacaaguucugcaaccugagcgacgcccacaagaagaaccuguacgaccacacccugaugagcaucaucagcaccuuccaccugagcauccccaacuucaaccaguacgaggccaugagcugcgacuucaacggcggcaagaucaccgugcaguacaaccugagccacagcuacgccaucgacgccgccaaccacugcggcaccguggccaacggcgugcugcagaccuucaugagaauggccuggggcggcagcuacaucgcccuggacagcggcagaggcaagugggacugcaucaugaccagcuaccaguaccugaucauccagaacaccaccugggaggaccacugccaguucagcagacccagccccaucggcuaccugggccugcugagccagagaaccagagacaucuacaucagcagaagaagaagaggcaccuucaccuggacccugagcgacagcgagggcaacgagacccccggcggcuacugccugaccagauggaugcugaucgaggccgagcugaagugcuucggcaacaccgccguggccaagugcaacgagaagcacgacgaggaguucugcgacaugcugagacuguucgacuucaacaagcaggccaucagaagacugaaggcccccgcccagaugagcauccagcugaucaacaaggccgugaacgcccugaucaacgaccagcugaucaugaagaaccaccugagagacaucaugggcauccccuacugcaacuacagcaaguacugcuaccugaaccacaccagcaccggcagaaccagccugcccagaugcugccuggugagcaacggcagcuaccugaacgagacccacuucagcgacgacaucgagcagcaggccgacaacaugaucaccgagaugcugcagaaggaguaccuggacagacagggcaagaccccccugggccugguggaccuguucguguucagcaccagcuucuaccugaucagcaucuuccugcaccuggugaagauccccacccacagacacaucgugggcaagcccugccccaagccccacagacugaaccacaugggcaucugcagcugcggccuguacaagcagcccggcgugcccgugagauggaagagaugaggacuaguuauaagacugacuagcccgaugggccucccaacgggcccuccuccccuccuugcaccgagauuaauaaaaaaaaaaaaaaaaaaaaaaaaaaaaaaaaaaaaaaaaaaaaaaaaaaaaaaaaaaaaaaaaaaaaaaaaaaaaaaaaaaaaaaaaaaaaaaaaaaaa

SEQ ID NO: 26299 - RNA, 1665 nt, Artificial Sequence
  mRNA product Design i-3 (A100) comprising derived and/or modified sequence from LASV(G1180-SLE-2010;Clade IV)__AIT17168__GPCmut3 (opt4)
aggagaaagcuuaccaugggccagaucgugaccuucuuccaggaggugccccacgugaucgaggaggugaugaacaucgugcugaucgcccugagcauccuggccgugcugaagggccuguacaacuucgccaccugcggccuggugggccugcugaccuuccugcugcugugcggcagaagcugcaccgccagcagauacaagggcguguacgagcugcagacccuggagcugaacauggagacccugaacaugaccaugccccugagcugcaccaagaacaacagccaccacuacaucauggugggcaacgagaccggccuggagcugacccugaccaacaccagcaucaucaaccacaaguucugcaaccugagcgacgcccacaagaagaaccuguacgaccacgcccugaugagcaucaucagcaccuuccaccugagcauccccaacuucaaccaguacgaggccaugagcugcgacuucaacggcggcaagaucagcgugcaguacaaccugagccacagcuacgccggcgacgccgccaaccacugcggcaccguggccaacggcgugcugcagaccuucaugagaauggccuggggcggcagcuacaucgcccuggacagcggccacggcagcugggacugcaucaugaccagcuaccaguaccugaucauccagaacaccaccugggaggaccacugccaguucagcagacccagccccaucggcuaccugggccugcugagccagagaaccagagacaucuacaucagcagaagaagaagaggcaccuucaccuggacccugagcgacagcgagggcaaggacacccccggcggcuacugccugaccagauggaugcugaucgaggccgagcugaagugcuucggcaacaccgccguggccaagugcaacgagaagcacgacgaggaguucugcgacaugcugagacuguucgacuucaacaagcaggccauccagagacugaaggcccccgcccagaugagcauccagcugaucaacaaggccgugaacgcccugaucaacgaccagcugaucaugaagaaccaccugagagacaucaugggcauccccuacugcaacuacagcaaguacugcuaccugaaccacaccaccaccggcaagaccagccugcccaagugcugccuggugagcaacggcagcuaccugaacgagacccacuucagcgacgacaucgagcagcaggccgacaacaugaucaccgagaugcugcagaaggaguacauggagagacagggcaagaccccccugggccugguggaccuguucguguucagcaccagcuucuaccugaucagcaucuuccugcaccuggugaagauccccacccacagacacaucgugggcaagagcugccccaagccccacagacugaaccacaugggcaucugcagcugcggccuguacaagcagcccggcgugcccgugaaguggaagagaugaggacuaguuauaagacugacuagcccgaugggccucccaacgggcccuccuccccuccuugcaccgagauuaauaaaaaaaaaaaaaaaaaaaaaaaaaaaaaaaaaaaaaaaaaaaaaaaaaaaaaaaaaaaaaaaaaaaaaaaaaaaaaaaaaaaaaaaaaaaaaaaaaaaa

SEQ ID NO: 26300 - RNA, 1665 nt, Artificial Sequence
  mRNA product Design i-3 (A100) comprising derived and/or modified sequence from LASV(G1442-SLE-2011;Clade IV)__AIT17180__GPCmut3 (opt4)
aggagaaagcuuaccaugggccagaucgugaccuucuuccaggaggugccccacgugaucgaggaggugaugaacaucgugcugaucgcccugagcauccuggccgugcugaagggccuguacaacguggccaccugcggccugaucggccuggugaccuuccugcugcugugcggcagaagcugcaccaccacccuguacaagggcguguacgagcugcagacccuggagcugaacauggagacccugaacaugaccaugccccugagcugcaccaagaacaacagccaccacuacaucagagugggcaacgagaccggccuggagcugacccugaccaacaccagcaucaucaaccacaaguucugcaaccugagcgacgcccacaagaagaaccuguacgaccacgcccugaugagcaucaucagcaccuuccaccugagcauccccaacuucaaccaguacgaggccaugagcugcgacuucaacggcggcaagaucagcgugcaguacaaccugagccacagcuacgccggcgacgccgccaaccacugcggcaccguggccaacggcgugcugcagaccuucaugagaauggccuggggcggcagcuacaucgcccuggacagcggcagaggcaacugggacugcaucaugaccagcuaccaguaccugaucauccagaacaccaccugggacgaccacugccaguucagcagacccagccccaucggcuaccugggccugcugagccagagaaccagagacguguacaucagcagaagaagaagaggcaccuucaccuggacccugagcgacagcgagggcaaggacacccccggcggcuacugccugaccagauggaugcugaucgaggccgagcugaagugcuucggcaacaccgccguggccaagugcaacgagaagcacgacgaggaguucugcgacaugcugagacuguucgacuucaacaagcaggccauccagagacugaaggcccccgcccagaugagcauccagcugaucaacaaggccgugaacgcccugaucaacgaccagcugaucaugaagaaccaccugagagacaucaugggcauccccuacugcaacuacagcaaguacugcuaccugaacaacaccgccaccggcaagaccagccugcccaagugcugccugaucagcaacggcagcuaccugaacgagacccacuucagcgacgacaucgagcaggaggccgacaacaugaucaccgagaugcugcagaaggaguacauggagagacagggcaagaccccccugggccugguggaccuguucguguucagcaccagcuucuaccugaucagcaucuuccugcaccuggugaagauccccacccacagacacaucgugggcaagagcugccccaagccccacagacugaaccacaugggcaucugcagcugcggccuguacaagcagcccggcgugcccgugagauggaagagaugaggacuaguuauaagacugacuagcccgaugggccucccaacgggcccuccuccccuccuugcaccgagauuaauaaaaaaaaaaaaaaaaaaaaaaaaaaaaaaaaaaaaaaaaaaaaaaaaaaaaaaaaaaaaaaaaaaaaaaaaaaaaaaaaaaaaaaaaaaaaaaaaaaaa

SEQ ID NO: 26301 - RNA, 1665 nt, Artificial Sequence
  mRNA product Design i-3 (A100) comprising derived and/or modified sequence from LASV(G3010-SLE-2013;Clade IV)__AIT17344__GPCmut3 (opt4)
aggagaaagcuuaccaugggccagaucgugaccuucuuccaggaggugccccacgugaucgaggaggugaugaacaucgugcugaucgcccugagcauccuggccgugcugaagggccuguacaacuucgccaccugcggccuggugggccuggugaccuuccugcugcugugcggcagaagcugcaccaccagccuguacaagggcguguacgagcugcagacccuggagcugaacauggagacccugaacaugaccaugccccugagcugcaccaagaacaacagccaccacuacaucauggugggcaacgagaccggccuggagcugacccugaccaacaccagcaucaucaaccacaaguucugcaaccugagcgacgcccacaagaagaaccuguacaaccacgcccugaugagcaucaucagcaccuuccaccugagcauccccaacuucaaccaguacgaggccaugagcugcgacuucaacggcggcaagaucagcgugcaguacaaccugagccacagcuacgccggcgacgccgccagccacugcggcaccguggccaacggcgugcugcagaccuucaugagaauggccuggggcggcagcuacaucgcccuggacagcggcuacggcaagugggacugcaucaugaccagcuaccaguaccugaucauccagaacaccaccugggaggaccacugccaguucagcagacccagccccaucggcuaccugggccugcugagccagagaaccagagacaucuacaucagcagaagaagaagaggcaccuucaccuggacccugagcgacagcgagggcaaggacacccccggcggcuacugccugaccagauggaugcugaucgaggccgagcugaagugcuucggcaacaccgccguggccaagugcaacgagaagcacgacgaggaguucugcgacaugcugagacuguucgacuucaacaagcaggccauccagagacugaagacccccgcccagaugagcauccagcugaucaacaaggccgugaacgcccugaucaacgaccagcugaucaugaagaaccaccugagagacaucaugggcauccccuacugcaacuacagcaaguacugcuaccugaaccacaccaccaccggcaagaccagccugcccaagugcugccuggugagcaacggcagcuaccugaacgagacccacuucagcgacgacaucgagcagcaggccgacaacaugaucaccgagaugcugcagaaggaguacauggagagacagggcaagaccccccugggccugguggaccuguucguguucagcaccagcuucuaccugaucagcaucuuccugcaccuggugaagauccccacccacagacacaucgugggcaagagcugccccaagccccacagacugaaccacaugggcaucugcagcugcggccuguacaagcagcccggcgugcccgugagauggaagagaugaggacuaguuauaagacugacuagcccgaugggccucccaacgggcccuccuccccuccuugcaccgagauuaauaaaaaaaaaaaaaaaaaaaaaaaaaaaaaaaaaaaaaaaaaaaaaaaaaaaaaaaaaaaaaaaaaaaaaaaaaaaaaaaaaaaaaaaaaaaaaaaaaaaa

SEQ ID NO: 26302 - RNA, 1665 nt, Artificial Sequence
  mRNA product Design i-3 (A100) comprising derived and/or modified sequence from LASV(G502-SLE-2009;Clade IV)__AIT17126__GPCmut3 (opt4)
aggagaaagcuuaccaugggccagaucgugaccuucuuccaggaggugccccacgugaucgaggaggugaugaacaucgugcugaucgcccugagcauccuggccgugcugaagggccuguacaacuucgccaccugcggccuggugggccugcugaccuuccugcugcugugcggcagaagcugcaccaccggccuguacaagggcguguacgagcugcagacccuggagcugaacauggagacccugaacaugaccaugccccugagcugcaccaagaacaacagccaccacuacaucauggugggcaacgagaccggccuggagcugacccugaccaacaccagcaucaucaaccacaaguucugcaaccugagcgacgcccacaagaagaaccuguacgaccacgcccugaugagcaucaucagcaccuuccaccugagcauccccaacuucaaccaguacgaggccaugagcugcgacuucaacggcggcaagaucagcgugcaguacaaccugagccacagcuacgccggcgacgccgccgaccacugcggcaccguggccaacggcgugcugcagaccuucaugagaauggccuggggcggcagcuacaucgcccuggacagcggcagaggcagaugggacugcaucaugaccagcuaccaguaccugaucauccagaacaccaccugggaggaccacugccaguucagcagacccagccccaucggcuaccugggccugcugagccagagaaccagagacaucuacaucagcagaagaagaagaggcaccuucaccuggacccugagcgacagcgagggcaaggacacccccggcggcuacugccugaccagauggaugcugaucgaggccgagcugaagugcuucggcaacaccgccguggccaagugcaacgagaagcacgacgaggaguucugcgacaugcugagacuguucgacuucaacaagcaggccauccagagacugaaggcccccgcccagaugagcauccagcugaucaacaaggccgugaacgcccugaucaacgaccagcuggugaugaagaaccaccugagagacaucaugggcauccccuacugcaacuacagcagauacugcuaccugaaccacaccaccaccggcagaaccagccugcccaagugcugccuggugagcaacggcagcuaccugaacgagacccacuucagcgacgacaucgagcagcaggccgacaacaugaucaccgagaugcugcagaaggaguacauggagagacagggcaagaccccccugggccugguggaccuguucguguucagcaccagcuucuaccugaucagcaucuuccugcaccuggugaagauccccacccacagacacaucgugggcaagagcugccccaagccccacagacugaaccacaugggcaucugcagcugcggccuguacaagcagcccggcgugcccgugaaguggaagagaugaggacuaguuauaagacugacuagcccgaugggccucccaacgggcccuccuccccuccuugcaccgagauuaauaaaaaaaaaaaaaaaaaaaaaaaaaaaaaaaaaaaaaaaaaaaaaaaaaaaaaaaaaaaaaaaaaaaaaaaaaaaaaaaaaaaaaaaaaaaaaaaaaaaa

SEQ ID NO: 26303 - RNA, 1665 nt, Artificial Sequence
  mRNA product Design i-3 (A100) comprising derived and/or modified sequence from LASV(G733-SLE-2010;Clade IV)__AIT17154__GPCmut3 (opt4)
aggagaaagcuuaccaugggccagaucgugaccuucuuccaggaggugccccacgugaucgaggaggugaugaacaucgugcugaucgcccugagcauccuggccgugcugaagggccuguacaacuucgccaccugcggcaucgugggccuggugagcuuccugcugcugugcggcagaagcugcaccaccagccuguacaagggcguguacgagcugcagacccuggagcugaacauggagacccugaacaugaccaugccccugagcugcaccaagaacaacagccaccacuacaucauggugggcaacgagaccggccuggagcugacccugaccaacaccagcaucaucaaccacaaguucugcaaccugagcgacgcccacaagaagaaccuguacgaccacgcccugaugagcaucaucagcaccuuccaccugagcauccccaacuucaaccaguacgaggccaugagcugcgacuucaacggcggcaagaucagcgugcaguacaaccugagccacagcuacgccggcgacgccgccaaccacugcggcaccaucgccaacggcgugcugcagaccuucaugagaauggccuggggcggcagcuacaucgcccuggacagcggcagagacagaugggacugcaucaugaccagcuaccaguaccugaucauccagaacaccaccugggaggaccacugccaguucagcagacccagccccaucggcuaccugggccugcugagccagagaaccagagacaucuacaucagcagaagaagaagaggcaccuucaccuggacccugagcgacagcgagggcaaggacacccccggcggcuacugccugaccagauggaugcugaucgaggccgagcugaagugcuucggcaacaccgccguggccaagugcaacgagaagcacgacgaggaguucugcgacaugcugagacuguucgacuucaacaagcaggccauccagagacugaaggcccccgcccagaugagcauccagcugaucaacaaggccgugaacgcccugaucaacgaccagcugaucaugaagaaccaccugagagacaucaugggcauccccuacugcaacuacagcaaguacugcuaccugaaccacaccaccaccggcaagaccagccugcccaagugcugccuggugagcaacggcagcuaccugaacgagacccacuucagcgacgacaucgagcagcaggccgacaacaugaucaccgagaugcugcagaaggaguacauggagagacagggcaagaccccccugggccugguggaccuguucguguucagcaccagcuucuaccugaucagcaucuuccugcaccuggugaagauccccacccacagacacguggugggcaagagcugccccaagccccacagacugaaccacaugggcaucugcagcugcggccuguacggccagcccggcgugcccgugaaguggaagagaugaggacuaguuauaagacugacuagcccgaugggccucccaacgggcccuccuccccuccuugcaccgagauuaauaaaaaaaaaaaaaaaaaaaaaaaaaaaaaaaaaaaaaaaaaaaaaaaaaaaaaaaaaaaaaaaaaaaaaaaaaaaaaaaaaaaaaaaaaaaaaaaaaaaa

SEQ ID NO: 26304 - RNA, 1665 nt, Artificial Sequence
  mRNA product Design i-3 (A100) comprising derived and/or modified sequence from MOPV/LASV reassortant(IGS-1;Clade IV)__AFY05576__GPCmut3 (opt4)
aggagaaagcuuaccaugggccagaucgugaccuucuuccaggaggugccccacgugaucgaggaggugaugaacaucgugcugaucgcccugagcgugcuggccgugcugaagggccuguacaacuucgccaccugcggccuggugggccuggugaccuuccugcugcugugcggcagaagcugcaccaccagccuguacaagggcguguacgagcugcagacccuggagcugaacauggagacccugaacaugaccaugccccugagcugcaccaagaacaacagccaccacuacaucauggugggcaacgagaccggccuggagcugacccugaccaacaccagcaucaucaaccacaaguucugcaaccugagcgacgcccacaagaagaaccuguacgaccacgcccugaugagcaucaucagcaccuuccaccugagcauccccaacuucaaccaguacgaggccaugagcugcgacuucaacggcggcaagaucagcgugcaguacaaccugagccacagcuacgccggcgacgccgccaaccacugcggcaccguggccaacggcgugcugcagaccuucaugagaauggccuggggcggcagcuacaucgcccuggacagcggcagaggcaacugggacugcaucaugaccagcuaccaguaccugaucauccagaacaccaccugggaggaccacugccaguucagcagacccagccccaucggcuaccugggccugcugagccagagaaccagagacaucuacaucagcagaagaagaagaggcaccuucaccuggacccugagcgacagcgagggcgaggacacccccggcggcuacugccugaccagauggaugcugaucgaggccgagcugaagugcuucggcaacaccgccguggccaagugcaacgagaagcacgacgaggaguucugcgacaugcugagacuguucgacuucaacaagcaggccauccagagacugaaggcccccgcccagaugagcauccagcugaucaacaaggccgugaacgcccugaucaacgaccagcugaucaugaagaaccaccugagagacaucaugggcauccccuacugcaacuacagcaaguacugcuaccugaaccacaccaccaccggcagaaccagccugcccaagugcugccuggugagcaacggcagcuaccugaacgagacccacuucagcgacgacaucgagcagcaggccgacaacaugaucaccgagaugcugcagaaggaguacauggagagacagggcaagaccccccugggccugguggaccuguucguguucagcaccagcuucuaccugaucagcaucuuccugcaccuggugaagauccccacccacagacacaucgugggcaagagcugccccaagccccacagacugaaccacaugggcaucugcagcugcggccuguacaagcagcccggcgugcccgugaaguggaagagaugaggacuaguuauaagacugacuagcccgaugggccucccaacgggcccuccuccccuccuugcaccgagauuaauaaaaaaaaaaaaaaaaaaaaaaaaaaaaaaaaaaaaaaaaaaaaaaaaaaaaaaaaaaaaaaaaaaaaaaaaaaaaaaaaaaaaaaaaaaaaaaaaaaaa

SEQ ID NO: 26305 - RNA, 1665 nt, Artificial Sequence
  mRNA product Design i-3 (A100) comprising derived and/or modified sequence from LASV(LM765-SLE-2012;Clade IV)__AIT17814__GPCmut3 (opt4)
aggagaaagcuuaccaugggccagaucgugaccuucuuccaggaggugccccacgugaucgaggaggugaugaacaucgugcugaucgcccugagcauccuggccgugcugaagggccuguacaacuucgccaccugcggccuggugggccuggugaccuuccugcugcugugcggcagaagcugcaccaccagccuguacaagggcguguacgagcugcagacccuggagcugaacauggagacccugaacaugaccaugccccugagcugcaccaagaacaacagccaccacuacaucauggugggcaacgagaccggccuggagcugacccugaccaacaccagcaucaucgaccacaaguucugcaaccugagcgacgcccacagaaagaaccuguacgaccacgcccugaugagcaucaucagcaccuuccaccugagcauccccaacuucaaccaguacgaggccaugagcugcgacuucaacggcggcaagaucagcgugcaguacaaccugagccacagcuacgccaaggacgccgccgaccacugcggcaccguggccaacggcgugcugcagaccuucaugagaauggccuggggcggcagcuacaucgcccuggacagcggcagaggcagaugggacugcaucaugaccagcuaccaguaccugaucauccagaacaccaccugggaggaccacugccaguucagcagacccagccccaucggcuaccugggccugcugagccagagaaccagagacaucuacaucagcagaagaagaagaggcaccuucaccuggacccugagcgacagcgagggcaaggacacccccggcggcuacugccugaccagauggaugcugaucgaggccgagcugaagugcuucggcaacaccgccguggccaagugcaacgagaagcacgacgaggaguucugcgacaugcugagacuguucgacuucaacaagcaggccauccagagacugaaggcccccgcccagaugagcauccagcugaucaacaaggccgugaacgcccugaucaacgaccagcugaucaugaagaaccaccugagagacaucaugggcauccccuacugcaacuacagcaaguacugcuaccugaaccacaccaccaccggcaagaccagccugcccaagugcugccuggugagcaacggcagcuaccugaacgagacccacuucagcgacgacaucgagcagcaggccgacaacaugaucaccgagaugcugcagaaggaguacauggagagacagggcaagaccccccugggccugguggaccuguucguguucagcaccagcuucuaccugaucagcaucuuccugcaccuggugaagauccccacccacagacacaucgugggcaagcccugccccaagccccacagacugaaccacaugggcaucugcagcugcggccuguacaagcagcccggcgugcccgugaaguggaagagaugaggacuaguuauaagacugacuagcccgaugggccucccaacgggcccuccuccccuccuugcaccgagauuaauaaaaaaaaaaaaaaaaaaaaaaaaaaaaaaaaaaaaaaaaaaaaaaaaaaaaaaaaaaaaaaaaaaaaaaaaaaaaaaaaaaaaaaaaaaaaaaaaaaaa

SEQ ID NO: 26306 - RNA, 1665 nt, Artificial Sequence
  mRNA product Design i-3 (A100) comprising derived and/or modified sequence from LASV(LM776-SLE-2012;Clade IV)__AIT17824__GPCmut3 (opt4)
aggagaaagcuuaccaugggccagaucgugaccuucuuccaggaggugccccacgugaucgaggaggugaugaacaucgugcugaucgcccugagcauccuggccgugcugaagggccuguacaacuucgccaccugcggccuggugggccuggugaccuuccugcugcugugcggcagaagcugcaccaccagcguguacaagggcguguacgagcugcagacccuggagcugaacauggagacccugaacaugaccaugccccugagcugcaccaagaacaacagccaccacuacaucauggugggcaacgagaccggccuggagcugacccugaccaacaccagcaucaucaaccacaaguucugcaaccugagcgacgcccacaagaagaaccuguacgaccacgcccugaugagcaucaucagcaccuuccaccugagcauccccaacuucaaccaguacgaggccaugagcugcgacuucaacggcggcaagaucagcgugcaguacaaccugagccacagcuacgccggcgacgccgccaaccacugcggcaccguggccaacggcgugcugcagaccuucaugagaauggccuggggcggcagcuacaucgcccuggacagcggccacggcaagugggacugcaucaugaccagcuaccaguaccugaucauccagaacaccaccugggaggaccacugccaguucagcagacccagccccaucggcuaccugggccugcugagccagagaaccagagacaucuacaucagcagaagaagaagaggcaccuucaccuggacccugagcgacagcgagggcaaggacacccccggcggcuacugccugaccagauggaugcugaucgaggccgagcugaagugcuucggcaacaccgccguggccaagugcaacgagaagcacgacgaggaguucugcgacaugcugagacuguucgacuucaacaagcaggccauccagagacugaaggcccccgcccagaugagcauccagcugaucaacaaggccgugaacgcccugaucaacgaccagcugaucaugaagaaccaccugagagacaucaugggcauccccuacugcaacuacagcaaguacugcuaccugaaccacaccaccaccggcaagaccagccugcccaagugcugccuggugagcaacggcagcuaccugaacgagacccacuucagcgacgacaucgagcagcaggccgacaacaugaucaccgagaugcugcagaaggaguacauggagagacagggcaagaccccccugggccugguggaccuguucguguucagcaccagcuucuaccugaucagcaucuuccugcaccuggugaagauccccacccacagacacaucgugggcaagagcugccccaagccccacagacugaaccacaugggcaucugcagcugcggccuguacaagcagcccggcgugcccgugagauggaagagaugaggacuaguuauaagacugacuagcccgaugggccucccaacgggcccuccuccccuccuugcaccgagauuaauaaaaaaaaaaaaaaaaaaaaaaaaaaaaaaaaaaaaaaaaaaaaaaaaaaaaaaaaaaaaaaaaaaaaaaaaaaaaaaaaaaaaaaaaaaaaaaaaaaaa

SEQ ID NO: 26307 - RNA, 1665 nt, Artificial Sequence
  mRNA product Design i-3 (A100) comprising derived and/or modified sequence from LASV(Mad39;Clade IV)__ANH09722__GPCmut3 (opt4)
aggagaaagcuuaccaugggccagaucgugaccuucuuccaggaggugccccacgugaucgaggaggugaugaacaucgugcugaucgcccugagcauccuggccgugcugaagggccuguacaacguggccaccugcggccugaucggccuggugaccuuccugcugcugugcggcagaagcugcaccaccacccuguacaagggcguguacgagcugcaggcccuggagcugaacauggagacccugaacaugaccaugccccugagcugcaccaagaacaacagccaccacuacaucagagugggcaacgagaccggccuggagcugacccugaccaacaccagccugaucaaccacaaguucugcaaccugagcgacgcccacaagaagaaccuguacgaccacgcccugaugagcaucaucagcaccuuccaccugagcauccccaacuucaaccaguacgaggccaugagcugcgacuucaacgacggcaagaucagcgugcaguacaaccugagccacaccuacgccggcgacaccgccaaccacugcggcaccguggccaacggcgugcugcagaccuucaugagaauggccuggggcggcagcuacaucgcccuggacagcggcagaggcggcugggacugcaucaugaccagcuaccaguaccugaucauccagaacaccaccugggaggaccacugccaguucagcagacccagccccaucggcuaccugggccugcugagccagagaaccagagacaucuacaucagcagaagaagaagaggcaccuucaccuggacccugagcgacagcgagggcaaggacacccccggcggcuacugccugaccagauggaugcugaucgaggccgagcugaagugcuucggcaacaccgccguggccaagugcaacgagaagcacgacgaggaguucugcgacaugcugagacuguucgacuucaacaagcaggccauccagagacugaaggcccccgcccagaugagcauccagcugaucaacaaggccgugaacgcccugaucaacgaccagcugaucaugaagaaccaccugagagacaucaugggcauccccuacugcaacuacagcaaguacugcuaccugaaccacaccgugaccggcaagaccagccugcccaagugcugccuggugagcaacggcagcuaccugaacgagacccacuucagcgacgacaucgagcagcaggccgacaacaugaucaccgagaugcugcagaaggaguacauggagagacagggcaagaccccccugggccugguggaccuguucguguucagcaccagcuucuaccugaucagcaucuuccugcaccuggugaagauccccacccacagacacguggugggcaagcccugccccaagccccacagacugaaccacaugggcaucugcagcugcggcuucuacaagcagcccggcgugcccgugagauggaagagaugaggacuaguuauaagacugacuagcccgaugggccucccaacgggcccuccuccccuccuugcaccgagauuaauaaaaaaaaaaaaaaaaaaaaaaaaaaaaaaaaaaaaaaaaaaaaaaaaaaaaaaaaaaaaaaaaaaaaaaaaaaaaaaaaaaaaaaaaaaaaaaaaaaaa

SEQ ID NO: 26308 - RNA, 1665 nt, Artificial Sequence
  mRNA product Design i-3 (A100) comprising derived and/or modified sequence from LASV(Z0947-SLE-2011;Clade IV)__AIT17840__GPCmut3 (opt4)
aggagaaagcuuaccaugggccagaucgugaccuucuuccaggaggugccccacgugaucgaggaggugaugaacaucgugcugaucgcccugagcauccuggccgugcugaagggccuguacaacuucgccaccugcggccuggugggccuggugaccuuccugcugcugugcggcagaagcugcaccaucagccuguacaagggcguguacgagcugcagacccuggagcugaacauggagacccugaacaugaccaugccccugagcugcaccaagaacaacagccaccacuacaucauggugggcaacgagaccggccuggagcugacccugaccaacaccagcaucaucaaccacaaguucugcaaccugagcgacgcccacaagaagaaccuguacgaccacgcccugaugagcaucaucagcaccuuccaccugagcauccccaacuucaaccaguacgaggccaugagcugcgacuucaacggcggcaagaucagcgugcaguacaaccugagccacagcuacgccggcgacgccgccaaccacugcggcaccguggccaacggcgugcugcagaccuucaugagaauggccuggggcggcagcuacaucgcccuggacagcggcagagacagaugggacugcaucaugaccagcuaccaguaccugaucauccagaacaccaccugggaggaccacugccaguucagcagacccagccccaucggcuaccugggccugcugagccagagaaccagagacaucuacaucagcagaagaagaagaggcaccuucaccuggacccugagcgacagcgagggcaaggacacccccggcggcuacugccugaccagauggaugcugaucgaggccgagcugaagugcuucggcaacaccgccguggccaagugcaacgagaagcacgacgaggaguucugcgacaugcugagacuguucgacuucaacaagcaggccauccagagacugaaggcccccgcccagaugagcauccagcugaucaacaaggccgugaacgcccugaucaacgaccagcugaucaugaagaaccaccugagagacaucaugggcauccccuacugcaacuacagcaaguacugcuaccugaaccacaccaccaccggcaagaccagccugcccaagugcugccuggugagcaacggcagcuaccugaacgagacccacuucagcgacgacaucgagcagcaggccgacaacaugaucaccgagaugcugcagaaggaguacauggagagacagggcaagaccccccugggccugguggaccuguucguguucagcaccagcuucuaccugaucagcaucuuccugcaccuggugaagauccccacccacagacacaucgugggcaagcccugccccaagccccacagacugaaccacaugggcaucugcagcugcggccuguacaagcagcccggcgugcccgugaaguggaagagaugaggacuaguuauaagacugacuagcccgaugggccucccaacgggcccuccuccccuccuugcaccgagauuaauaaaaaaaaaaaaaaaaaaaaaaaaaaaaaaaaaaaaaaaaaaaaaaaaaaaaaaaaaaaaaaaaaaaaaaaaaaaaaaaaaaaaaaaaaaaaaaaaaaaa

SEQ ID NO: 26309 - RNA, 1665 nt, Artificial Sequence
  mRNA product Design i-3 (A100) comprising derived and/or modified sequence from LASV(Josiah;Clade IV)__NP_694870__GPCmut3 (opt5)
aggagaaagcuuaccaugggccagaucgugaccuucuuucaagaggucccccacguuauugaagaggugaugaacaucgugcugauugcccucagcguccuggcugugcuuaaggggcuguacaauuucgccacaugcggacucguuggccuggugacguuucuucugcucugugggagauccugcaccacaucucuguauaaaggagucuacgaacugcagacccucgagcugaacauggaaacacuuaauaugaccaugccucugagcuguacaaagaacaauucccaucacuauaucauggugggcaacgagaccgggcucgagcugacgcuuaccaauacaucuauuaucaaccauaaauucugcaaucugagcgacgcgcacaagaaaaaccucuacgaucaugcucugauguccaucauuucuaccuuucaccugagcaucccgaauuucaaccaguaugaagccauguccugugacuuuaauggaggcaagauuagcguucaguacaaccucucucacuccuaugccggcgaugcugccaaucauugcgggacaguggcuaacggaguccugcaaaccuucaugcggauggccuggggcgggagcuacaucgcgcuugacucuggacgcggcaacugggauuguauuaugacguccuaccaguaucugaucauucagaauacaaccugggaggaccacugccaguuuagcagacccucuccuaucggguaccucggacugcuuucccaacggacacgcgauaucuauauuagcagacggcgcagaggcaccuucaccuggacacuguccgacucugaaggcaaggauacgcccgggggauacugucucacccgguggaugcugaucgaggccgagcugaaaugcuuuggcaacacagcuguggccaaguguaaugaaaaacaugacgaggaguucugcgauaugcuccgccuguuugacuucaacaagcaggcuauucagagacuuaaagccccugcgcagaugagcauccaacugauuaauaaggccgugaacgcucucaucaaugaucagcugaucaugaagaaccaccuucgggacauuauggggauccccuauugcaauuacuccaaauauuguuaccugaaccacaccacaaccggacgcacgagccucccuaagugcugucuggucucuaauggcuccuaccugaacgaaacacauuucagcgacgauauugaacagcaagccgacaauaugaucaccgagaugcuccagaaagaguauauggaaagacaggggaagaccccgcugggacuuguugaucuguuuguguucucuaccagcuuuuaccucauuuccaucuuccugcaccuggugaaaauccccacacaucggcacauugucggcaagucuugcccuaaaccccaucgccuuaaccacaugggcaucuguagcugcgggcucuauaagcagccuggagugcccguuaaguggaaaagaugaggacuaguuauaagacugacuagcccgaugggccucccaacgggcccuccuccccuccuugcaccgagauuaauaaaaaaaaaaaaaaaaaaaaaaaaaaaaaaaaaaaaaaaaaaaaaaaaaaaaaaaaaaaaaaaaaaaaaaaaaaaaaaaaaaaaaaaaaaaaaaaaaaaa

SEQ ID NO: 26310 - RNA, 1662 nt, Artificial Sequence
  mRNA product Design i-3 (A100) comprising derived and/or modified sequence from LASV(LP;Clade I)__AAF86701__GPCmut3 (opt5)
aggagaaagcuuaccaugggccagaucauuaccuucuuucaagaggugccccacgucaucgaagagguuaugaacauugugcugaucgcccucagccugcuugcuauucugaaggggcucuacaauaucgccacaugcggaaucauuggccugguggcguuccuuuuucugugugggaaauccugcucucucacgcugaagggaggcuaugaacugcagacccucgagcugaacauggaaacacuuaauaugaccaugccucugagcuguaccaaaaacuccucucaucacuacaucagagucgggaaugagacaggacucgagcugacacuuaccaacacgagcauuaucaaucauaaguucugcaaccuguccgacgcucacaaaaagaaucucuaugaucaugcccugaugucuauuaucagcaccuuucaccuguccauuccgaacuucaaucaguacgaagccaugagcugugacuuuaacggcggcaagaucucugugcaguauaaucucucccacagcuacgcuggggaugccgcugagcauugcggaacaguugccaacggcgugcugcaaaccuucaugcggauggcguggggagggcgcuauaucgcccuugacucuggcaaagggaauugggauuguauuaugacauccuaccaguaccugaucauucagaacaccacgugggaagaccacugccaguuuagcagacccucuccuaucggauaucucggccugcuuucccaacggacacgcgauauuuacaucagcagacggcgcagaggcaccuucacauggacccuguccgacucugaggggaacgagacccccggaggcuauugucucacacgguggaugcugaucgaagcugagcugaagugcuuugggaauacggccgucgcuaaauguaacgaaaagcaugaugaggaguucugcgacaugcuccgccuguuugauuucaauaaacaggccauuagacggcuuaaggcgccugcccagaugagcauccagcugauuaacaaggcugugaaugcccucaucaacgaccaacugauuaugaaaaaucaccuucgcgauaucaugggaauccccuacugcaacuauuccaaguacuguuaucugaaucacaccagcucuggcagaacaucccucccuaaaugcugucugauuagcaacgggucuuaccugaaugaaacccaguucagcgacgacaucgagcagcaagcugauaacaugauuacagaaaugcuccagaaggaguacaucgaacggcagggaaaaaccccgcugggccuuguugacauuuuuaucuucuccacgucuuuuuaucugauuagcaucuuccuccaucugaucaagauucccacacaccgccauaucgugggcaaaccuugccccaagccucacagacugaaucauaugggggucuguuccugcggacuuuacaagcaccccggcgugccgaccaaauggaagcggugaggacuaguuauaagacugacuagcccgaugggccucccaacgggcccuccuccccuccuugcaccgagauuaauaaaaaaaaaaaaaaaaaaaaaaaaaaaaaaaaaaaaaaaaaaaaaaaaaaaaaaaaaaaaaaaaaaaaaaaaaaaaaaaaaaaaaaaaaaaaaaaaaaaa

SEQ ID NO: 26311 - RNA, 1662 nt, Artificial Sequence
  mRNA product Design i-3 (A100) comprising derived and/or modified sequence from LASV(803213;Clade II)__AAF86703__GPCmut3 (opt5)
aggagaaagcuuaccaugggccagaucauuaccuucuuucaagaggugccccacgucaucgaagagguuaugaacauugugcugaucgcccucagccugcuugcuauucugaaggggaucuacaauguggccacaugcggacucuucggccugaucuccuuucuucugcucugugggagaucuugcagcgucacguauaaaggaguguacgaacugcagacccuggagcucaacauggcgaaucugaacaugacaaugccucuuuccuguaccaagaauaacucucaucacuauauuaugguuggcaaugaaacagggcuggagcucacccugacaaacaccagcaucauuaaucauaaauucugcaaccuuuccgacgcucacaagaaaaaucuguacgaucaugcccucaugucuaucauuagcacguuucaccuguccaucccgaacuucaaucaguaugaggccaugagcugugacuuuaacggaggcaagauuucugugcaguacaaucugucccacagcuucgcugucgaugccgcuaaccauugcggcaccaucgccaacggggugcuccaaacauuuaugcggauggcguggggaggcucuuauaucgcccuggacuccgggaagggaaauugggauuguauuaugaccagcuaccaguaccuuaucauucagaacacaaccugggaagaccacugccaguucucucgccccuccccuaucggcuaucuggggcuccugagccaaagaacgcgggauauuuacaucucccgcagacggcgcggaacauuuaccuggacacuuucugacagcgagggcaaugaagcucccggcggguauugucugaccagauggaugcucaucgaggccgagcugaaaugcuucggaaacaccgcuguugccaaguguaaugaaaaacaugaugaggaauuuugcgacaugcugcgccucuucgauuucaacaagcaggcgauuaaacggcugaagacgccugcccagauguccauccagcuuauuaauaaggcugugaacgcccugaucaaugaccaacucauuaugaaaaaccaccugagagauaucaugggcauccccuacugcaauuauagccgguacuguuaucuuaaccacacagucaccgggaagacaucucugccucgcugcugucucguguccaauggaagcuaccugaacgagacccauuuuucugacgacauugaacagcaggcugauaauaugaucacagagaugcugcaaaaagaguacauggacagacagggcaagaccccgcucgggcugguggaucuuuucgucuuuagcacguccuucuaucugauuucuaucuuucuccaccugguuaaaauucccacacaucggcacaucgugggaaagccuugccccaaaccucaucgccugaaccacaugggcauuuguagcugcggccuuuacaagcaccccggggugccggucaaguggaaaagaugaggacuaguuauaagacugacuagcccgaugggccucccaacgggcccuccuccccuccuugcaccgagauuaauaaaaaaaaaaaaaaaaaaaaaaaaaaaaaaaaaaaaaaaaaaaaaaaaaaaaaaaaaaaaaaaaaaaaaaaaaaaaaaaaaaaaaaaaaaaaaaaaaaaa

SEQ ID NO: 26312 - RNA, 1662 nt, Artificial Sequence
  mRNA product Design i-3 (A100) comprising derived and/or modified sequence from LASV(GA391;Clade III)__CAA36645__GPCmut3 (opt5)
aggagaaagcuuaccaugggccagaucgugaccuucuuucaagaggucccccacguuauugaagaggugaugaacaucgugcugauugcccucagcauccuggcuauucuuaaggggcuguacaaugucgccacaugcggacucaucggccuggugacguuccuucugcucuccgggagaucuuguagccugaucuauaaaggaaccuacgaacugcagacacucgagcugaacauggaaacccuuaauaugacaaugccucuguccugcaccaagaacaauucucaucacuauauucggguuggcaacgagacagggcucgagcugacccuuacgaauaccagcauccugaaccauaaauuuuguaaucucuccgacgcgcacaagcgcaaccuguacgaucauucucugaugagcauuaucuccacauuccaccucagcauuccgaauuuuaaccaguaugaagcuaugucuugcgacuucaauggaggcaaaaucaccgugcaguacaaccugucccacagcuuugccgucgaugccgcuggccauugugggacacuugccaauggagugcugcaaaccuucaugagaauggcuuggggcgggucuuauauugcccucgacuccggacggggcaacugggauugcaucaugacgagcuaccaguaccugaucauucagaacacaaccugggacgaucacugucaguuuucucgccccuccccuaucggguaucuuggacugcucagccaaagaacacgggacauuuacaucucccgcagacggcgcggcaccuucaccuggacacugucugauagcgagggcaaugaaacgcccgggggauauugccugaccagauggaugcucauugaggcggagcugaaguguuuuggcaacacagccguugcuaagugcaaugaaaaacaugacgaggaguucugugauaugcuucggcuguuugacuucaacaagcaggccauccgcagacucaaaaccccugcucagauguccauccagcugauuaauaaggccgugaacgcgcuuaucaaugaucaacugauuaugaaaaaccaccuccgggacaucauggggauucccuacugcaauuauagccgcuacugcuaucugaaccacacaucuaccggaaagacgucccugccuagauguugccucaucagcaauggcucuuaccugaacgaaacaaaguucagcgacgauaucgaacagcaggccgacaauaugauuaccgagaugcuucaaaaagaguacaucgaucggcaggggaagaccccgcugggacucgucgaccuguuuguguucuccacaucuuuuuaucugauuagcaucuuccuucaucucgugaaaauucccacccacagacauaucgucggcaagccuugucccaaaccucaccgccugaaccauaugggcauuugcuccugugggcuguacaagcagcccggaguuccggugcgguggaaaagaugaggacuaguuauaagacugacuagcccgaugggccucccaacgggcccuccuccccuccuugcaccgagauuaauaaaaaaaaaaaaaaaaaaaaaaaaaaaaaaaaaaaaaaaaaaaaaaaaaaaaaaaaaaaaaaaaaaaaaaaaaaaaaaaaaaaaaaaaaaaaaaaaaaaa

SEQ ID NO: 26313 - RNA, 1665 nt, Artificial Sequence
  mRNA product Design i-3 (A100) comprising derived and/or modified sequence from LASV(AV;Clade V)__CCA30314__GPCmut3 (opt5)
aggagaaagcuuaccaugggccagaucgugaccuucuuucaagaggucccccacguuauugaagaggugaugaacaucgugcugauugcccucagcauccuggcuguccuuaaggggcuguacaauauugccacaugcggacucaucggccugaucacguuccuucugcucugugggagauccugcucuagcaaccuguauaaaggaguguacgaacugcagucccucgaccugaauauggagacccuuaacaugacaaugccucugucuuguaccaagaauaacagccaucacuauauucggguuggcaaugauacagggcucgaacugacccuuacaaacaccuccauccugaaucauaaauuuugcaaccucucugacgcgcacaagaaagaucuguacgaccaugcucugaugagcauuaucuccacguuccaccucagcauuccgaauuuuaaccaguaugaggccaugucuugugauuucaauggaggcaagaucuccgugcaguacaaccugagccacucuuaugccauugacgcugccaaucauugcggcaccgucgcuaacgggauccuucaaacauuuaugcgcauggccuggggaggcuccuacaucgcgcuggauagcgggagaggaaacugggacuguauuaugaccucuuaccaguaucucaucauucagaauacaaccugggagaaccacugccaguucucccggcccagcccuaucggcuaccuggggcuucugucccaacgcacgagagauauuuauaucucucggcgcagacggggaacauuuaccuggacacucagcgacuccgaaggcaaugccacccccggcggguacugucugacccgcuggaugcugaucgaggcugaacucaagugcuucggaaacacagccguggcuaaauguaaugagaagcaugaugaggaauuuugcgacaugcugagacuuuucgauuuuaacaaacaggccauuagccggcugaagucuccugcgcagauguccauccagcucauuaauaaagccguuaacgcucugaucaaugaccaacuuauuaugaagaaccaucugcgcgacaucaugggcauccccuauugcaauuacagcaaguauuguuaccucaaccacacgauuaccgggaaaacaucucugccuaagugcugucuggugagcaauggauccuaccucaacgagacccacuucucugaugacaucgaacagcaggccgauaauaugauuacagagaugcugcaaaaagaauauauggagagacagggcaagaccccgcuugggcuggucgaccucuucguguuuagcacguccuucuaccugaucagcauuuuucugcggcuugugaaaauccccacacaccgccauauugucggaaagccuugccccaaaccucacagacucaaccauaugggcaucuguucuugcggccuguauaagcagcccgggguuccggugcgguggaagagaugaggacuaguuauaagacugacuagcccgaugggccucccaacgggcccuccuccccuccuugcaccgagauuaauaaaaaaaaaaaaaaaaaaaaaaaaaaaaaaaaaaaaaaaaaaaaaaaaaaaaaaaaaaaaaaaaaaaaaaaaaaaaaaaaaaaaaaaaaaaaaaaaaaaa

SEQ ID NO: 26314 - RNA, 1662 nt, Artificial Sequence
  mRNA product Design i-3 (A100) comprising derived and/or modified sequence from LASV(Togo/2016/7082;Clade VI)__AMR44577__GPCmut3 (opt5)
aggagaaagcuuaccaugggccagaucauuaccuucuuucaagaggugccccacgucaucgaagagguuaugaacauugugcugaucgcccucagccugcuugcuauucugaaggggguguacaaugucgccacaugcggaaucaucggccucgugacguuccuguuucuuugugggagauccugcucucugauuuauaaaggaagcuacgaacuccagacccuggagcugaacauggaaacacucaauaugaccaugccucuguccuguacaaagaacucuagccaucacuauauccggguuggcaaugagaccgggcuugagcugacacucaccaacacguccauuaucaaucauaaauucugcaaccugucugacgcgcacaagcgcaaucuuuacgaucaugcucugaugagcauucucuccaccuuucaccugagcaucccgaacuucaaucaguaugaagccaugucuugugacuuuaacggaggcaaaauuuccgugcaguacaaucugagccacgccuaugcugucgaugccgcugagcauugcggcacaguggccaacgggguucuccaaaccuucaugagaauggcguggggaggcucuuacaucgcccuggacuccgggcggggaaauugggauuguaucaugacaagcuaccaguaucuuauuauccagaacaccacgugggaagaccacugccaguuuucucgccccuccccuauuggcuaccuggggcuccugagccaaagaacacgggauaucuauauuucccgcagacggcgcggaaccuucacauggacccuuucugacagcgagggcaacgagacccccggcggguacugucugacaagauggaugcucaucgaagcugagcugaagugcuuuggaaauacggccguggcuaaguguaacgaaaaacaugaugaggaguucugcgacaugcugcggcucuuugauuucaauaagcaggccauccagcgccugaaauccccugcgcagaugagcauucaacuuaucaacaaggccgucaaugcucugauuaacgaccagcucaucaugaaaaaucaccugagagauaugaugggcauucccuauugcaacuacucuaaguauuguuaccuuaaucacaccuccagcgggcggacaucucugccuaagugcugucucgugagcaacggauccuaccugaaugaaacccauuucucugacgacaucgagcagcaagccgauaacaugaucacagaaaugcugcagaaagaguauauugaccgccagggcaagaccccgcucgggcugguggaucuuuuugucuucagcacguccuuuuaccugaucagcauuuuccuccaccugaucaaaauucccacacauagacacaucguuggaaagccuugccccaaaccucaucggcugaaucacaugggcauuuguucuugcggccuuuauaagcagcccggggugccgaccagauggaaacgcugaggacuaguuauaagacugacuagcccgaugggccucccaacgggcccuccuccccuccuugcaccgagauuaauaaaaaaaaaaaaaaaaaaaaaaaaaaaaaaaaaaaaaaaaaaaaaaaaaaaaaaaaaaaaaaaaaaaaaaaaaaaaaaaaaaaaaaaaaaaaaaaaaaaa

SEQ ID NO: 26315 - RNA, 1662 nt, Artificial Sequence
  mRNA product Design i-3 (A100) comprising derived and/or modified sequence from LASV(KAK-428;Clade n.d. (VII))__ANH09740__GPCmut3 (opt5)
aggagaaagcuuaccaugggccagaucgugaccuucuuucaagaggucccccacguuauugaagaggugaugaacaucgugcugauugcccucagccugcuugcuauccugaaggggcucuacaauuucgccacaugcggagucauuggccugaucacguuucuucugcucugugggagauccugcucugcgaccuauaaaggacaguacgaacugcagacacuggagcucaacauggaaagccugaauaugaccaugccucuuuccuguacaaagaacaauucucaucacuauauccgggcuggcaacaauaccgggcuggagcucacacugaccaacacgagcauuaucucccauaaauucugcaaucuuucugacgcccacaagaaaaaccuguacgaucauacccucaugagcauuaucacaaccuuucaccuguccauuccgaauuucaaccaguaugaggccaugagcugugacuuuaauggaggcaagaucucuauucaauacaaccugucccacagcuaugcuggcgaugccgcucagcauugcgggacaguggccaauggaguucuccagaccuucaugcgcauggcguggggcgggucuuaccuggcccuugacuccggaagacggggcugggauuguaucaucagcucuuaccaguaucugauuauccaaaacacgacaugggacgaucacugccaguuuucccgccccagcccuauuggguaccucggauucgugucccagaagaccagagacaucuauauuucucggcgcagacggggcacauuuaccuggacccugagcgauuccgaaggccaugacaugcccgggggauacugucuuacacgcuggaugcugaucgaggcugaucucaaaugcuucggcaacacggccgucgcuaaguguaaugaaaaacacgacgaggaguuuugcgauauguggagacuguucgacuucaacaagcaggccauccaacggcugaaagcgccugcccagaugaauauucagcucaucaacaaggcugugaaugcccugauuaacgaccaacuuaugaugaagaaucaucugcgcgauaucauggggauucccuauugcaacuacagcaaauuuuguuaucucaauaacaccacaaccggaagaacaucucugccucggugcugucuuaucuccaauggcagcuaccugaacgaaacccacuucucugacgauaucgagcagcaggcugacaauaugauuacggaaaugcuccagaaggaguacauggaucgccaagggaaaacaccgcugggacugguugaccucuuuguguucagcaccuccuuuuaucugaucaccauuuuccuucaccuggucaagauccccacacauagacacauugugggcaaaccuugccccaagccucaucggcucaaccacaugggcaucuguucuugcgggcuguacaaacagcccggagugccggucagauggaagcgcugaggacuaguuauaagacugacuagcccgaugggccucccaacgggcccuccuccccuccuugcaccgagauuaauaaaaaaaaaaaaaaaaaaaaaaaaaaaaaaaaaaaaaaaaaaaaaaaaaaaaaaaaaaaaaaaaaaaaaaaaaaaaaaaaaaaaaaaaaaaaaaaaaaaa

SEQ ID NO: 26316 - RNA, 1662 nt, Artificial Sequence; identical to SEQ ID NO: 26310
  mRNA product Design i-3 (A100) comprising derived and/or modified sequence from LASV(Pinneo-NIG-1969;Clade I)__AIT17836__GPCmut3 (opt5)

SEQ ID NO: 26317 - RNA, 1662 nt, Artificial Sequence
  mRNA product Design i-3 (A100) comprising derived and/or modified sequence from LASV(ISTH0009-NIG-2011;Clade II)__AIT17404__GPCmut3 (opt5)
aggagaaagcuuaccaugggccagaucauuaccuucuuucaagaggugccccacgucaucgaagagguuaugaacauugugcugaucgcccucagccugcuugcuauucugaaggggaucuacaauguggccacaugcggacucuucggccuggucuccuuucuucugcucugugggagaucuugcagcacgaccuauaaaggaguguacgaacugcagacacuggagcucgacauggcgucccugaacaugaccaugccucuuucuuguacaaagaauaacagccaucacuauaucaugguuggcaaugaaaccgggcuggagcucacacugaccaacacguccauuaucaaucauaaauucugcaaccuuucugaugcucacaagaaaaaucuguacgaccaugcccucaugagcauuaucuccaccuuucaccugagcauuccgaacuucaaucaguaugaggccaugucuugugauuuuaacggaggcaagaucuccgugcaguacaaucugagccacgcuuaugccgucgacgcugccaaccauugcggcacaauugcgaauggggugcuccaaaccuucaugcggauggccuggggaggcucuuacaucgcucuggauuccgggaagggaagcugggacuguaucaugacaucuuaccaguaucuuauuauccagaacaccacgugggaagaucacugccaguuuucccgccccagcccuauuggcuaccuggggcuccugucccaaagaacacgggacaucuauauuucucgcagacggcgcggaaccuucacauggacccuuagcgauuccgagggcaacgaaacccccggcggguacugucugacaagauggaugcucaucgaggccgagcugaaaugcuuuggaaauacggcuguugccaaguguaacgaaaaacaugacgaggaguucugcgauaugcugcggcucuuugacuucaauaagcaggcgauccgcagacugaaaaccccugcccagaugagcauucagcuuaucaacaaggcugugaaugcccugauuaacgaucaacucaucaugaagaaucaucugcgggacauuaugggcauccccuauugcaacuacucuaaauauuguuaccuuaaucacacagucaccgggaagacaucccugccucgcugcugucucgugagcaacggaucuuaccugaaugaaacccacuucagcgacgauaucgaacagcaggcugacaacaugauuacggagcugcuccaaaaagaguauauggauagacagggcaagacaccgcuggggcuuguggaccuguuugucuucuccaccucuuuuuaccucaucagcauuuuccugcaccugaucaaaauucccacccaucggcacaucacaggaaagccuugccccaaaccucaucgccuuaaucacaugggcauuuguuccugcggccucuauaagcaccccgggguuccggugaaguggaaaagaugaggacuaguuauaagacugacuagcccgaugggccucccaacgggcccuccuccccuccuugcaccgagauuaauaaaaaaaaaaaaaaaaaaaaaaaaaaaaaaaaaaaaaaaaaaaaaaaaaaaaaaaaaaaaaaaaaaaaaaaaaaaaaaaaaaaaaaaaaaaaaaaaaaaa

SEQ ID NO: 26318 - RNA, 1662 nt, Artificial Sequence
  mRNA product Design i-3 (A100) comprising derived and/or modified sequence from LASV(ISTH2010-NIG-2012;Clade II)__AIT17482__GPCmut3 (opt5)
aggagaaagcuuaccaugggccagaucauuaccuucuuucaagaggugccccacgucaucgaagagguuaugaacauugugcugaucgcccucagccugcuugcuauucugaaggggaucuacaauguggccacaugcggacucuucggccuggucuccuuucuucugcucugugggagaucuugcagcacgaccuauaaaggaguguacgaacugcagacacuggagcucgacauggcgucccugaacaugaccaugccucuuucuuguacaaagaauaacagccaucacuauaucaugguuggcaaugaaaccgggcuggagcucacacugaccaacacguccauuaucaaucauaaauucugcaaccuuucugaugcucacaagaaaaaucuguacgaccaugcccucaugagcauuaucuccaccuuucaccugagcauuccgaacuucaaucaguaugaggccaugucuugugauuuuaacggaggcaagaucuccgugcaguacaaucugagccacgcuuaugccgucgacgcugccaaccauugcggcacaauugcgaauggggugcuccaaaccuucaugcggauggccuggggaggcucuuacaucgcucuggauuccgggaagggaagcugggacuguaucaugacaucuuaccaguaucuuauuauccagaacauuaccugggaagaucacugccaguuuucccgccccagcccuaucggcuaccuggggcuccugucccaaagaacgcgggacauuuauaucucucgcagacggcgcggaacauucaccuggacacuuagcgauuccgagggcaacgaaacccccggcggguacugucugaccagauggaugcucaucgaggccgagcugaaaugcuuuggaaauacagcuguugccaaguguaacgaaaaacaugacgaggaguucugcgauaugcugcggcucuuugacuucaauaagcaggcgauucgcagacugaaaacgccugcccagaugagcauccagcuuauuaacaaggcugugaaugcccugaucaacgaucaacucauuaugaagaaucaucugcgggacaucaugggcauccccuauugcaacuacucuaaauauuguuaccuuaaucacaccgucacagggaagaccucccugccucgcugcugucucgugagcaacggaucuuaccugaaugaaacacacuucagcgacgauauugaacagcaggcugacaacaugaucaccgagcugcuccaaaaagaguauauugauagacagggcaagacgccgcuggggcuuguggaccuguuugucuucuccacaucuuuuuaccucaucagcauuuuccugcaccugguuaaaauccccacccaucggcacguggugggaaagccuugccccaaaccucaucgccuuaaucacaugggcauuuguuccugcggccucuauaagcaccccggggucccggugaaguggaaaagaugaggacuaguuauaagacugacuagcccgaugggccucccaacgggcccuccuccccuccuugcaccgagauuaauaaaaaaaaaaaaaaaaaaaaaaaaaaaaaaaaaaaaaaaaaaaaaaaaaaaaaaaaaaaaaaaaaaaaaaaaaaaaaaaaaaaaaaaaaaaaaaaaaaaa

SEQ ID NO: 26319 - RNA, 1662 nt, Artificial Sequence
  mRNA product Design i-3 (A100) comprising derived and/or modified sequence from LASV(Lassa virus/H.sapiens-wt/NGA/2015/ISTH_0543;Clade II)__AVO03639__GPCmut3 (opt5)
aggagaaagcuuaccaugggccagaucauuaccuucuuucaagaggugccccacgucaucgaagagguuaugaacauugugcugaucgcccucagccugcuugcuauucugaaggggaucuacaauguggccacaugcggacucuucggccuggucuccuuucuucugcucugugggagaucuugcagcacgaccuauaaaggaguguacgaacugcagacacuggagcucgacauggcgaaccugaauaugaccaugccucuuuccuguacaaagaacaauucucaucacuauaucaugguuggcaacgaaaccgggcuggagcucacacugaccaauacgagcauuaucaaccauaaauucugcaaucuuuccgaugcucacaagaaaaaccuguacgaccaugcccucaugucuauuaucagcaccuuucaccuguccauuccgaauuucaaccaguaugaggccaugagcugugauuuuaauggaggcaagaucucugugcaguacaaccugucccacacauaugcugucgacgccgcuaaucauugcggcaccauugccaacggggugcuccaaacauucaugcggauggcguggggaggcagcuacaucgcccuggauucugggaagggauccugggacuguaucaugaccagcuaccaguaucuuguuauucagaacacgacaugggaagaucacugccaguuuucucgccccuccccuaucggcuaccuggggcuccugagccaaagaacccgggacauuuauaucucccgcagacggcgcggaacauucaccuggacccuuucugauagcgagggcaaugaaacacccggcggguacugucugacgagauggaugcucauugaggcugagcugaaaugcuuuggaaacaccgccguggcuaaguguaaugaaaaacaugacgaggaguucugcgauaugcugcggcucuuugacuucaacaagcaggccauccgcagacugaaaaccccugcgcagauguccauccagcuuauuaauaaggccgucaacgcucugaucaaugaucaacucauuaugaagaaccaucugcgggacaucaugggcauucccuauugcaauuacagcaaauauuguuaccuuaaccacacagugacagggaagaccucucugccucgcugcugucucguguccaauggaagcuaccugaacgaaacgcacuucucugacgauaucgaacagcaggccgacaauaugaucacagagcugcuccaaaaagaguauauugauagacagggcaagaccccgcuggggcuugucgaccuguuuguuuucagcaccuccuuuuaccucaucucuauuuuccugcaccuggugaaaauccccacacaucggcacauuaccggaaagccuugccccaaaccucaucgccuuaaccacaugggcaucuguagcugcggccucuauaagcaccccggggugccggucaaguggaaaagaugaggacuaguuauaagacugacuagcccgaugggccucccaacgggcccuccuccccuccuugcaccgagauuaauaaaaaaaaaaaaaaaaaaaaaaaaaaaaaaaaaaaaaaaaaaaaaaaaaaaaaaaaaaaaaaaaaaaaaaaaaaaaaaaaaaaaaaaaaaaaaaaaaaaa

SEQ ID NO: 26320 - RNA, 1662 nt, Artificial Sequence
  mRNA product Design i-3 (A100) comprising derived and/or modified sequence from LASV(Lassa virus/H.sapiens-wt/NGA/2016/ISTH_0009;Clade II)__AVO03571__GPCmut3 (opt5)
aggagaaagcuuaccaugggccagaucauuaccuucuuucaagaggugccccacgucaucgaagagguuaugaacauugugcugaucgcccucagccugcuugcuauucugaaggggaucuacaauguggccacaugcggacuccugggccuugucuccuuccugcuccugugugggagaucuugcagcacgaccuauaaaggaguguacgaacugcagacacucgagcuggacauggcgucccuuaacaugaccaugccucugucuuguacaaagaauaacagccaucacuauaucaugguuggcaaugaaaccgggcucgagcugacacuuaccaacacguccauuaucaaucauaaauuuugcaaccugucugaugcucacaagaaaaaucucuacgaccaugcccugaugagcauuaucuccaccuuccaccugagcauuccgaacuuuaaucaguaugaggccaugucuugugauuucaacggaggccggaucuccgugcaguacaaucucagccacucuuaugcugucgacgccgcuaaccauugcggcacaauugccaauggggugcugcaaaccuuuaugcgcauggcguggggaggcuccuacaucgcccuugauagcgggaagggaucuugggacuguaucaugacauccuaccaguaucugauuauccagaacaccacgugggaagaucacugccaguucagcagacccuccccuauuggcuaccucgggcugcuuucucaacggacacgcgacaucuauauuagcagacggcgcagaggaaccuuuacauggacccuguccgauagcgagggcaacgaaacccccggcggguacugucucacacgguggaugcugaucgaggcugagcugaagugcuucggaaauacggccguugcuaaauguaacgaaaagcaugacgaggaauuuugcgauaugcuccgccuguucgacuuuaauaaacaggccaucagacggcuuaagaccccugcgcagaugucuauucagcugaucaacaaagccgugaaugcucucauuaacgaucaacugaucaugaagaaucaccuucgcgacauuaugggcauccccuauugcaacuacuccaaguauuguuaccugaaucacacagucaccgggaaaacaagccucccuagaugcugucuggugucuaacggaagcuaccugaaugagacccauuucuccgacgauaucgaacagcaggccgacaacaugauuacggagcuccugcaaaaggaguauaucgaucggcagggcaaaacaccgcuugggcugguggaccucuucgucuuuucuaccagcuucuaccugauuuccaucuuucugcaccuuguuaagauucccacccaucgccacaucacaggaaaaccuugccccaagccucauagacucaaucacaugggcauuuguagcugcggccuguauaaccaccccggggugccggugaaauggaagcggugaggacuaguuauaagacugacuagcccgaugggccucccaacgggcccuccuccccuccuugcaccgagauuaauaaaaaaaaaaaaaaaaaaaaaaaaaaaaaaaaaaaaaaaaaaaaaaaaaaaaaaaaaaaaaaaaaaaaaaaaaaaaaaaaaaaaaaaaaaaaaaaaaaaa

SEQ ID NO: 26321 - RNA, 1662 nt, Artificial Sequence
  mRNA product Design i-3 (A100) comprising derived and/or modified sequence from LASV(Lassa virus/H.sapiens-wt/NGA/2016/ISTH_0017;Clade II)__AVO03567__GPCmut3 (opt5)
aggagaaagcuuaccaugggccagaucauuaccuucuuucaagaggugccccacgucaucgaagagguuaugaacauugugcugaucgcccucagccugcuugcuauucugaaggggaucuacaauguggccacaugcggacucuucggccuggucuccuuucuucugcucugugggagaucuugcagcacgaccuauaaaggaguguacgaacugcagacacuggagcucgacauggcgucccugaacaugaccaugccucuuucuuguacaaagaauaacagccaucacuauaucaugguuggcaaugaaaccgggcuggagcucacacugaccaacacguccauuaucaaucauaaauucugcaaccuuucugaugcucacaagaaaaaucuguacgaccaugcccucaugagcauuaucuccaccuuucaccugagcauuccgaacuucaaucaguaugaggccaugucuugugauuuuaacggaggcaagaucuccgugcaguacaaucugagccacacauaugcuauugacgccgcuaaccauugcggcaccaucgccaaugggguccuccaaacauucaugcggauggcguggggaggcucuuacaucgcccuggauuccgggaagggaagcugggacuguauuaugaccucuuaccaguaucuuaucauucagaacacgacaugggaagaucacugccaguuuucccgccccagcccuaucggcuaccuggggcuccugucccaaagaacccgggacauuuauaucucucgcagacggcgcggaacauucaccuggacccuuagcgauuccgagggcaacgaaacacccggcggguacugucugacgagauggaugcucaucgaggcugagcugaaaugcuuuggaaauaccgccguggcuaaguguaacgaaaaacaugacgaggaguucugcgauaugcugcggcucuuugacuucaauaagcaggccauucgcagacugaaaaccccugcgcagaugagcauccagcuuauuaacaaggccguuaaugcucugaucaacgaucaacucauuaugaagaaucaucugcgggacaucaugggcauccccuauugcaacuacucuaaauauuguuaccuuaaucacacagugacagggaagaccucccugccucgcugcugucucgucagcaacggaucuuaccugaaugaaacgcacuucagcgacgauauugaacagcaggccgacaacaugaucacagagcugcuccaaaaagaguauauggauagacagggcaagaccccgcuggggcuuguggaccuguuuguguucuccaccucuuuuuaccucauuagcaucuuccugcaccugguccggauucccacacaucgccacguuaucggaaaaccuugccccaagccucauagacuuaaucacaugggcauuuguuccugcggccucuauaaacaccccggggugccggugaaguggaagcggugaggacuaguuauaagacugacuagcccgaugggccucccaacgggcccuccuccccuccuugcaccgagauuaauaaaaaaaaaaaaaaaaaaaaaaaaaaaaaaaaaaaaaaaaaaaaaaaaaaaaaaaaaaaaaaaaaaaaaaaaaaaaaaaaaaaaaaaaaaaaaaaaaaaa

SEQ ID NO: 26322 - RNA, 1662 nt, Artificial Sequence
  mRNA product Design i-3 (A100) comprising derived and/or modified sequence from LASV(Lassa virus/H.sapiens-wt/NGA/2018/ISTH_0959;Clade II)__AVV65099__GPCmut3 (opt5)
aggagaaagcuuaccaugggccagaucauuaccuucuuucaagaggugccccacgucaucgaagagguuaugaacauugugcugaucgcccucagccugcuugcuauucugaaggggaucuacaauguggucacaugcggacucuucggccugguguccuuucuucugcucugugggagaucuugcagcacgaccuauaaaggaguuuacgaacugcagacacuggagcucgacauggccucccugaacaugaccaugccucuuucuuguacaaagaauaacagccaucacuauaucauggugggcaaugaaaccgggcuggagcucacacugaccaacacguccauuaucaaucauaaauucugcaaccuuucugaugcgcacaagaaaaaucuguacgaccaugcucucaugagcauuaucuccaccuuucaccugagcauuccgaacuucaaucaguaugaggccaugucuugugauuuuaacggaggcaagaucuccguccaguacaaucugagccacgccuaugcuauugacgccgcuaaccauugcggcacaaucgccaauggggugcuccaaaccuucaugcggauggcguggggaggcucuuacaucgcccuggauuccgggaagggaagcugggacuguauuaugacaucuuaccaguaucuuaucauucagaacaccacgugggaagaucacugccaguuuucccgccccagcccuaucggcuaccuggggcuccugucccaaagaacacgggacauuuauaucucucgcagacggcgcggaaccuucacauggacccuuagcgauuccgagggcaacgaaacccccggcggguacugucugacaagauggaugcucaucgaggcugagcugaaaugcuuuggaaauacggccguugcuaaguguaacgaaaaacaugacgaggaguucugcgauaugcugcggcucuuugacuucaauaagcaggccauucgcagacugaaaaccccugcgcagaugagcauccagcuuauuaacaaggccgugaaugcucugaucaacgaucaacucauuaugaagaaucaucugcgggacaucaugggcauccccuauugcaacuacucuaaauauuguuaccuuaaucacacagucaccgggaagacaucccugccucgcugcugucucgugagcaacggaucuuaccugaaugaaacccacuucagcgacgauauugaacagcaggccgacaacaugaucacggagcugcuccaaaaagaguauauugauagacagggcaagacaccgcuggggcuuguggaccuguuugucuucuccaccucuuuuuaccucaucagcauuuuccugcaccugguuaaaauccccacccaucggcacgugauuggaaagccuugccccaaaccucaucgccuuaaucacaugggcaucuguuccugcggccucuauaagcaccccggggugccggucaaguggaaaagaugaggacuaguuauaagacugacuagcccgaugggccucccaacgggcccuccuccccuccuugcaccgagauuaauaaaaaaaaaaaaaaaaaaaaaaaaaaaaaaaaaaaaaaaaaaaaaaaaaaaaaaaaaaaaaaaaaaaaaaaaaaaaaaaaaaaaaaaaaaaaaaaaaaaa

SEQ ID NO: 26323 - RNA, 1662 nt, Artificial Sequence
  mRNA product Design i-3 (A100) comprising derived and/or modified sequence from LASV(LASV003-NIG-2008;Clade II)__AIT17580__GPCmut3 (opt5)
aggagaaagcuuaccaugggccagaucauuaccuucuuucaagaggugccccacgucaucgaagagguuaugaacauugugcugaucgcccucagccugcuugcuauucugaaggggaucuacaauguggccacaugcggacucuucggccuggucuccuuucuucugcucugugggagaucuugcagcacgaccuauaaaggaguguacgaacugcagacacuggagcucgacauggcgucccugaacaugaccaugccucuuucuuguacaaagaauaacagccaucacuauaucaugguuggcaaugaaaccgggcuggagcucacacugaccaacacguccauuaucaaucauaaauucugcaaccuuucugaugcucacaagaaaaaucuguacgaccaugcccucaugagcauuaucuccaccuuucaccugagcauuccgaacuucaaucaguaugaggccaugucuugugauuuuaacggaggcaagaucuccgugcaguacaaucugagccacacauaugcugucgacgccgcuaaccauugcggcaccauugccaauggggugcuccaaacauucaugcggauggcguggggaggcucuuacaucgcccuggauuccgggaagggaagcugggacuguaucaugaccucuuaccaguaucuuauuauccagaacacgacaugggaagaucacugccaguuuucccgccccagcccuauuggcuaccuggggcuccugucccaaagaacccgggacaucuauauuucucgcagacggcgcggaacauucaccuggacccuuagcgauuccgagagcaacgaaacacccggcggcuacugucugacgagauggaugcucaucgaggcugagcugaaaugcuuugggaauaccgccguugcuaaguguaacgaaaaacaugacgaggaguucugcgauaugcugcggcucuuugacuucaauaagcaggccauccgcagacugaaagcgccugcccagaugucuauucagcuuaucaacaaggcugugaaugcccugauuaacgaucaacucaucaugaagaaucaucugcgggacauuaugggaauccccuauugcaacuacuccaaauauuguuaccuuaaucacacagucaccggccgcacaagccugccuagaugcugucucgugucuaacgggagcuaccugaaugaaacccacuucuccgacgauaucgaacagcaggcugacaacaugauuacggagcugcuccaaaaggaguauauggaucggcagggaaaaacaccgcugggccuuguggaccuguuugucuucucuaccagcuuuuaccucaucuccauuuuccugcaccugguuaagauccccacccaucgccacgugauugggaaaccuugccccaagccucauagacuuaaucacaugggaaucuguagcugcggccucuauaaacaccccggcgugccggucaaguggaagcggugaggacuaguuauaagacugacuagcccgaugggccucccaacgggcccuccuccccuccuugcaccgagauuaauaaaaaaaaaaaaaaaaaaaaaaaaaaaaaaaaaaaaaaaaaaaaaaaaaaaaaaaaaaaaaaaaaaaaaaaaaaaaaaaaaaaaaaaaaaaaaaaaaaaa

SEQ ID NO: 26324 - RNA, 1662 nt, Artificial Sequence
  mRNA product Design i-3 (A100) comprising derived and/or modified sequence from LASV(LASV035-NIG-2009;Clade II)__AIT17588__GPCmut3 (opt5)
aggagaaagcuuaccaugggccagaucauuaccuucuuucaagaggugccccacgucaucgaagagguuaugaacauugugcugaucgcccucagccugcuugcuauucugaaggggaucuacaauguggccacaugcggacucuucggccuggucuccuuucuucugcucugugggagaucuugcagcacgaccuauaaaggaguguacgaacugcagacacuggagcucgacauggcgucccugaacaugaccaugccucuuucuuguacaaagaauaacagccaucacuauaucaugguuggcaaugaaaccgggcuggagcucacacugaccaacacguccauuaucaaucauaaauucugcaaccuuucugaugcucacaagaaaaaucuguacgaccaugcccucaugagcauuaucuccaccuuucaccugagcauuccgaacuucaaucaguaugaggccaugucuugugauuuuaacggaggcaagaucuccgugcaguacaaucugagccacgcuuaugccgucgacgcugccaaccauugcggcacaauugcgaauggggugcuccaaaccuucaugcggauggccuggggaggcucuuacaucgcucuggauuccgggaagggaagcugggacuguaucaugacaucuuaccaguaucuuauuauccagaacaccacgugggaagaucacugccaguuuucccgccccagcccuauuggcuaccuggggcuccugucccaaagaacacgggacaucuauauuucucgcagacggcgcggaaccuucacauggacccuuagcgauuccgagggcaacgaaacccccggcggguacugucugacaagauggaugcucaucgaggccgagcugaaaugcuuuggaaauacggcuguugccaaguguaacgaaaaacaugacgaggaguucugcgauaugcugcggcucuuugacuucaauaagcaggcgauccgcagacugaaagccccugcucagaugagcauucagcuuaucaacaaggccgugaaugcucugauuaacgaucaacucaucaugaagaaucaucugcgggacauuaugggcauccccuauugcaacuacucuaaauauuguuaccuuaaucacaccgucacagggaagaccucccugccucgcugcugucucgugagcaacggaucuuaccugaaugaaacacacuucagcgacgauaucgaacagcaggccgacaacaugauuaccgagcugcuccaaaaagaguauaucgauagacagggcaagacgccgcuggggcuuguggaccuguuugucuucuccacaucuuuuuaccucauuagcaucuuccugcaccugguuaaaauucccacccaucggcacgugaucggaaagccuugccccaaaccucaucgccuuaaucacaugggcauuuguuccugcggccucuauaagcaccccggggugccggucaaguggaaaagaugaggacuaguuauaagacugacuagcccgaugggccucccaacgggcccuccuccccuccuugcaccgagauuaauaaaaaaaaaaaaaaaaaaaaaaaaaaaaaaaaaaaaaaaaaaaaaaaaaaaaaaaaaaaaaaaaaaaaaaaaaaaaaaaaaaaaaaaaaaaaaaaaaaaa

SEQ ID NO: 26325 - RNA, 1662 nt, Artificial Sequence
  mRNA product Design i-3 (A100) comprising derived and/or modified sequence from LASV(LASV1000-NIG-2009;Clade II)__AIT17782__GPCmut3 (opt5)
aggagaaagcuuaccaugggccagaucauuaccuucuuucaagaggugccccacgucaucgaagagguuaugaacauugugcugaucgcccucagccugcuugcuauucugaaggggaucuacaauguggccacaugcggacucuucggccuggucuccuuucuucugcucugugggagaucuugcagcacgaccuauaaaggaguguacgaacugcagacacuggagcucgacauggcgucccugaacaugaccaugccucuuucuuguacaaagaauaacagccaucacuauaucaugguuggcaaugaaaccgggcuggagcucacacugaccaacacguccauuaucaaucauaaauucugcaaccuuucugaugcucacaagaaaaaucuguacgaccaugcccucaugagcauuaucuccaccuuucaccugagcauuccgaacuucaaucaguaugaggccaugucuugugauuuuaacggaggcaagaucuccgugcaguacaaucugagccacacauaugcugucgacgccgcuaaccauugcggcaccauugccaauggggugcuccaaacauucaugcggauggcguggggaggcucuuacaucgcccuggauuccgggaagggaagcugggacuguaucaugaccucuuaccaguaucuuauuauccagaacacgacaugggaagaucacugccaguuuucccgccccagcccuauuggcuaccuggggcuccugucccaaagaacccgggacaucuauauuucucgcagacggcgcggaacauucaccuggacccuuagcgauuccgagggcaacgaaacacccggcggguacugucugacgagauggaugcucaucgaggcugagcugaaaugcuuuggaaauaccgccguugcuaaguguaacgaaaaacaugacgaggaguucugcgauaugcugcggcucuuugacuucaauaagcaggccaucaaacgccugaagaccccugcgcagaugagcauucagcuuaucaacaaggccgugaaugcucugauuaacgaucaacucaucaugaaaaaucaccugagagacauuaugggcauccccuauugcaacuacucuaaguauuguuaccuuaaucacacagucacagggaaaaccucccugccucggugcugucucgugagcaacggaucuuaccugaaugaaacgcauuucagcgacgauaucgaacagcaggccgacaacaugauuacagagcugcuccaaaaggaguauaucgaucgccagggcaaaaccccgcuggggcuuguggaccuguuugucuucuccaccucuuuuuaccucauuagcaucuuccugcaccugguuaagauucccacacauagacacguggugggaaaaccuugccccaagccucaucggcuuaaucacaugggcaucuguuccugcggccucuauaagcaccccggggucccggugaaauggaagcgcugaggacuaguuauaagacugacuagcccgaugggccucccaacgggcccuccuccccuccuugcaccgagauuaauaaaaaaaaaaaaaaaaaaaaaaaaaaaaaaaaaaaaaaaaaaaaaaaaaaaaaaaaaaaaaaaaaaaaaaaaaaaaaaaaaaaaaaaaaaaaaaaaaaaa

SEQ ID NO: 26326 - RNA, 1662 nt, Artificial Sequence
  mRNA product Design i-3 (A100) comprising derived and/or modified sequence from LASV(LASV221-NIG-2010;Clade II)__AIT17624__GPCmut3 (opt5)
aggagaaagcuuaccaugggccagaucauuaccuucuuucaagaggugccccacgucaucgaagagguuaugaacauugugcugaucgcccucagccugcuugcuauucugaaggggaucuacaauguggccacaugcggacucuucggccuggucuccuuucuucugcucugugggagaucuugcagcacgaccuauaaaggaguguacgaacugcagacacuggagcucgacauggcgucccugaacaugaccaugccucuuucuuguacaaagaauaacagccaucacuauaucaugguuggcaaugaaaccgggcuggagcucacacugaccaacacguccauuaucaaucauaaauucugcaaccuuucugaugcucacaagaaaaaucuguacgaccaugcccucaugagcauuaucuccaccuuucaccugagcauuccgaacuucaaucaguaugaggccaugucuugugauuuuaacggaggcaagaucuccgugcaguacaaucugagccacacauaugcuauugacgccgcuaaccauugcggcaccaucgccaaugggguccuccaaacauucaugcggauggcguggggaggcucuuacaucgcccuggauuccgggaagggaagcugggacuguauuaugaccucuuaccaguaucuuaucauucagaacacgacaugggaagaucacugccaguuuucccgccccagcccuaucggcuaccuggggcuccugucccaaagaacccgggacauuuauaucucucgcagacggcgcggaacauucaccuggacccuuagcgauuccgagggcaacgaaacacccggcggguacugucugacgagauggaugcucaucgaggcugagcugaaaugcuuuggaaauaccgccguggcuaaguguaacgaaaaacaugacgaggaguucugcgauaugcugcggcucuuugacuucaauaagcaggccauucgcagacugaaaaccccugcgcagaugagcauccagcuuauuaacaaggccguuaaugcucugaucaacgaucaacucauuaugaagaaucaucugcgggacaucaugggcauccccuauugcaacuacucuaaauauuguuaccuuaaucacacagugacagggaagaccucccugccucgcugcugucucgucagcaacggaucuuaccugaaugaaacgcacuucagcgacgauauugaacagcaggccgacaacaugaucacagagaugcugcaaaaagaguauauggauagacagggcaagaccccgcucgggcugguggaccuuuuuguguucuccaccucuuuuuaccugauuagcaucuuccuccaccuggucaaaauucccacacaucggcacguuaucggaaagccuugccccaaaccucaucgccugaaucacaugggcauuuguuccugcggccuuuauaagcaccccggggugccggugaaguggaaaagaugaggacuaguuauaagacugacuagcccgaugggccucccaacgggcccuccuccccuccuugcaccgagauuaauaaaaaaaaaaaaaaaaaaaaaaaaaaaaaaaaaaaaaaaaaaaaaaaaaaaaaaaaaaaaaaaaaaaaaaaaaaaaaaaaaaaaaaaaaaaaaaaaaaaa

SEQ ID NO: 26327 - RNA, 1662 nt, Artificial Sequence
  mRNA product Design i-3 (A100) comprising derived and/or modified sequence from LASV(LASV237-NIG-2010;Clade II)__AIT17638__GPCmut3 (opt5)
aggagaaagcuuaccaugggccagaucauuaccuucuuucaagaggugccccacgucaucgaagagguuaugaacauugugcugaucgcccucagccugcuugcuauucugaaggggaucuacaauguggccacaugcggacucuucggccuggucuccuuucuucugcucugugggagaucuugcagcacgaccuauaaaggaguguacgaacugcagacacuggagcucgacauggcgucccugaacaugaccaugccucuuucuuguacaaagaauaacagccaucacuauaucaugguuggcaaugaaaccgggcuggagcucacacugaccaacacguccauuaucaaucauaaauucugcaaccuuucugaugcucacaagaaagaccuguacgaucaugcccucaugagcauuaucuccaccuuucaccugagcauuccgaauuucaaccaguaugaggccaugucuugugacuuuaauggaggcaagaucuccgugcaguacaaccugagccacacauaugcugucgaugccgcuaaucauugcggcaccauugccaacggggugcuccaaacauucaugcggauggcguggggaggcucuuacaucgcccuggacuccgggaagggaagcugggauuguaucaugaccucuuaccaguaucuuauuauccagaauacgacaugggaagaccacugccaguuuucccgccccagcccuauuggcuaccuggggcuccugucccaaagaacccgggauaucuauauuucucgcagacggcgcggaacauucaccuggacccuuagcgacuccgagggcaacgaaacacccggcggguacugucugacgagauggaugcucaucgaggcugagcugaaaugcuuuggaaacaccgccguugcuaaguguaaugaaaaacaugaugaggaguucugcgacaugcugcggcucuuugauuucaacaagcaggccauccgcagacugaaaaccccugcgcagaugagcauucagcuuaucaauaaggccgugaacgcucugauuaaugaccaacucaucaugaagaaccaucugcgggacauuaugggcauccccuauugcaauuacucuaaauauuguuaccuuaaccacacagucacagggaagaccucccugccucgcugcugucucgugagcaauggaucuuaccugaacgaaacgcacuucagcgaugacaucgaacagcaggccgauaauaugauuacagagcugcuccaaaaagaguauauggacagacagggcaagaccccgcuggggcuuguggaucuguuugucuucuccaccucuuuuuaccucaucagcauuuuccugcaccugaucaaaauucccacacaucggcacaucaccggaaagccuugccccaaaccucaucgccuuaaccacaugggcauuuguuccugcggccucuauaagcaccccgggguuccggugaaguggaaaagaugaggacuaguuauaagacugacuagcccgaugggccucccaacgggcccuccuccccuccuugcaccgagauuaauaaaaaaaaaaaaaaaaaaaaaaaaaaaaaaaaaaaaaaaaaaaaaaaaaaaaaaaaaaaaaaaaaaaaaaaaaaaaaaaaaaaaaaaaaaaaaaaaaaaa

SEQ ID NO: 26328 - RNA, 1662 nt, Artificial Sequence
  mRNA product Design i-3 (A100) comprising derived and/or modified sequence from LASV(LASV253-NIG-2011;Clade II)__AIT17670__GPCmut3 (opt5)
aggagaaagcuuaccaugggccagaucauuaccuucuuucaagaggugccccacgucaucgaagagguuaugaacauugugcugaucgcccucagccugcuugcuauucugaaggggaucuacaauguggccacaugcggacucuucggccuggucuccuuucuucugcucugugggagaucuugcagcacgaccuauaaaggaguguacgaacugcagacacuggagcucgacauggcgucccugaacaugaccaugccucuuucuuguacaaagaauaacagccaucacuauaucaugguuggcaaugaaaccgggcuggagcucacacugaccaacacguccauuaucaaucauaaauucugcaaccuuucugaugcucacaagaaaaaucuguacgaccaugcccucaugagcauuaucuccaccuuucaccugagcauuccgaacuucaaucaguaugaggccaugucuugugauuuuaacggaggcaagaucuccgugcaguacaaucugagccacacauaugcugucgacgccgcuaaccauugcggcaccauugccaauggggugcuccaaacauucaugcggauggcguggggaggcucuuacaucgcccuggauuccgggaagggaagcugggacuguaucaugaccucuuaccaguaucuuauuauccagaacacgacaugggaagaucacugccaguuuucccgccccagcccuauuggcuaccuggggcuccugucccaaagaacccgggacaucuauauuucucgcagacggcgcggaacauucaccuggacccuuagcgauuccgagggcaacgaaacacccggcggguacugucugacgagauggaugcucaucgaggcugagcugaaaugcuuuggaaauaccgccguugcuaaguguaacgaaaaacaugacgaggaguucugcgauaugcugcggcucuuugacuucaauaagcaggccauccgcagacugaaagcgccugcccagaugagcauucagcuuaucaacaaggcugugaaugcccugauuaacgaucaacucaucaugaagaaucaucugcgggacauuaugggcauccccuauugcaacuacucuaaauauuguuaccuuaaucacacagucaccgggcgcacaucccugccuagaugcugucucgugagcaacggaucuuaccugaaugaaacccacuucagcgacgauaucgaacagcaggcugacaacaugauuacggagcugcuccaaaaggaguauaucgaucggcagggcaaaacaccgcuggggcuuguggaccuguuugucuucuccaccucuuuuuaccucauuagcaucuuccugcaccugguuaagauucccacccaucgccacaucauuggaaaaccuugccccaagccucauagacuuaaucacaugggcaucuguuccugcggccucuauaaacaccccggggugccggugaaguggaagcggugaggacuaguuauaagacugacuagcccgaugggccucccaacgggcccuccuccccuccuugcaccgagauuaauaaaaaaaaaaaaaaaaaaaaaaaaaaaaaaaaaaaaaaaaaaaaaaaaaaaaaaaaaaaaaaaaaaaaaaaaaaaaaaaaaaaaaaaaaaaaaaaaaaaa

SEQ ID NO: 26329 - RNA, 1662 nt, Artificial Sequence
  mRNA product Design i-3 (A100) comprising derived and/or modified sequence from LASV(LASV254-NIG-2011;Clade II)__AIT17674__GPCmut3 (opt5)
aggagaaagcuuaccaugggccagaucauuaccuucuuucaagaggugccccacgucaucgaagagguuaugaacauugugcugaucgcccucagccugcuugcuauucugaaggggaucuacaauguggccacaugcggacucuucggccuggucuccuuucuucugcucugugggagaucuugcagcacgaccuauaaaggaguguacgaacugcagacacuggagcucgacaugaccaaccugaauaugacaaugccucuuuccuguaccaagaacaauucucaucacuauaucaugguuggcaacgaaacagggcuggagcucacccugacgaauaccagcauuaucaaccauaaauucugcaaucuuuccgaugcgcacaagaaaaaccuguacaaucaugcucucaugucuauuaucagcacauuucaccuguccauuccgaacuucaaucaguaugaggccaugagcugugacuuuaacggaggcaagaucucugugcaguacaaucugucccacagcuaugccgucgaugcugccaaccauugcggcaccauugcuaacggggugcuccaaacauucaugcggauggccuggggaggcucuuacaucgcgcuggacuccgggaagggaaauugggauuguaucaugaccagcuaccaguaucuuauuauccagaacacgacaugggaagaccacugccaguuuucucgccccuccccuauuggcuaccuggggcuccugagccaaagaacccgggauaucuauauuucccgcagacggcgcggaacauucaccuggacccuuucugacagcgagggcaaugaaacacccggcggguacugucugacgagauggaugcucaucgaggccgagcugaaaugcuuuggaaacaccgcuguugccaaguguaaugaaaaacaugaugaggaguucugcgacaugcugcggcucuuugauuucaacaagcaggcuauccgcagacugaaaaccccugcccaggcgaauauucagcuuaucaacaaggccgugaaugcucugauuaacgaccaacucaucaugaagaaucaucugcgggauauuaugggcauccccuauugcaacuacuccaaauauuguuaccuuaaucacacagucacagggaagaccagccugccucgcugcugucucgugucuaacggauccuaccugaaugaaacgcacuucagcgacgacaucgaacagcaggccgauaacaugauuacagagcugcuccaaaaagaguauauggacagacagggcaagaccccgcuggggcuuguggaucuguuugucuucucuaccagcuuuuaccucaucuccauuuuccugcaccugguuaaaauccccacacaucggcacgugauuggaaagccuugccccaaaccucaucgccuuaaccacaugggcaucuguucuugcggccucuauaagcaccccggggugccggucaaguggaaaagaugaggacuaguuauaagacugacuagcccgaugggccucccaacgggcccuccuccccuccuugcaccgagauuaauaaaaaaaaaaaaaaaaaaaaaaaaaaaaaaaaaaaaaaaaaaaaaaaaaaaaaaaaaaaaaaaaaaaaaaaaaaaaaaaaaaaaaaaaaaaaaaaaaaaa

SEQ ID NO: 26330 - RNA, 1662 nt, Artificial Sequence
  mRNA product Design i-3 (A100) comprising derived and/or modified sequence from LASV(Nig08-A19;Clade III)__ADU56618__GPCmut3 (opt5)
aggagaaagcuuaccaugggccagaucgugaccuucuuucaagaggucccccacguuauugaagaggugaugaacaucgugcugauugcccucagcauccuggcuauucuuaaggggcuguacaauaucgccacaugcggacucaucggccuggucacguuccuucugcucuccgggagaucuuguagcaugaccuauaaaggaguguacgaacugcagacacuggagcucaacaugaauacccugaacaugacaaugccucuuuccugcaccaagaauaacucucaucacuauauuaugguuggcaaugaaacagggcuggagcucacccugacgaacaccagccuucugcaucacaaauuuuguaaucucuccgacgcgcauaagaaaaaccuguacgaucacacacugaugucuaucauuagcaccuuccaccucuccaucccgaauuuuaaccaguaugaggcuaugagcugcgacuucaauggaggcaagauuacagugcaguacaaccugucucauuccuaugccaucgaugccgcuaaucacuguggcaccgucgccaacggggugcuucaaacguuuaugcggauggcuuggggaggcagcuacauugcccuggacucugggcgcggaaagugggauugcaucaugacauccuaccaguaucucaucauucagaacaccacaugggaagaccauugucaguucagcagacccucuccuaucggcuaccuggggcuucugucccaacggacccgcgauauuuauaucagcagacggcgcagaggaaccuuuacauggacgcucuccgacucugagggcaaugaaacccccggcggguacugccugacacgguggaugcugauugaggcggagcucaaauguuucggaaacaccgccguugcuaagugcaaugaaaaacacgaugaggaauuuugugacaugcugcgccuuuucgauuuuaacaagcaggccaucagacggcugaaagcuccugcccagaugagcauccagcucauuaauaaggcggugaacgcccugaucaaugaccaacuuauuaugaagaaccaucugcgcgauaucaugggcauucccuauugcaauuacuccaaauauugcuaccucaaccacacaagcaccgggagaacgucucugccucgguguugccuggucuccaauggaagcuaccucaacgagacacacuucucugacgacaucgaacagcaggcugauaauaugaucaccgagaugcugcaaaaggaguaucuugaccgccagggcaaaaccccgcuggggcucguggaucuguucguguuuagcacauccuucuaccugauuucuaucuuucuucaucucgucaagauucccacccacagacauaucguuggaaaaccuugucccaagccucaccggcugaaccacaugggcauuugcagcuguggccuguauaaacagcccggggugccggugagauggaagcgcugaggacuaguuauaagacugacuagcccgaugggccucccaacgggcccuccuccccuccuugcaccgagauuaauaaaaaaaaaaaaaaaaaaaaaaaaaaaaaaaaaaaaaaaaaaaaaaaaaaaaaaaaaaaaaaaaaaaaaaaaaaaaaaaaaaaaaaaaaaaaaaaaaaaa

SEQ ID NO: 26331 - RNA, 1665 nt, Artificial Sequence
  mRNA product Design i-3 (A100) comprising derived and/or modified sequence from LASV(G1180-SLE-2010;Clade IV)__AIT17168__GPCmut3 (opt5)
aggagaaagcuuaccaugggccagaucgugaccuucuuucaagaggucccccacguuauugaagaggugaugaacaucgugcugauugcccucagcauccuggcuguccuuaaggggcuguacaauuucgccacaugcggacucgugggccugcuuacguuucugcuccugugugggagauccugcaccgcgucucgguauaaaggaguuuacgaacugcagacacucgagcugaacauggaaacccuuaauaugacaaugccucugagcuguaccaagaacaauucccaucacuauauuauggugggcaacgagacagggcucgagcugacccuuacgaauaccucuaucaucaaccauaaauucugcaaucugagcgacgcucacaagaaaaaccucuacgaucaugcccugauguccauuaucucuacauuucaccugagcauuccgaauuucaaccaguaugaagccauguccugugacuuuaauggaggcaagaucagcguccaguacaaccucucucacuccuaugcuggcgaugccgcuaaucauugcgggaccguggccaacggaguucugcaaacauucaugcgcauggcguggggcgggagcuacauugcccuugacucuggacacggcuccugggauuguaucaugaccagcuaccaguaucugauuauccagaacacgacaugggaggaccauugccaguuuucuagacccuccccuaucggguaccucggacugcuuagccaacggacccgcgauauuuauaucuccagacggcgcagaggcacauucaccuggacccugucugacagcgaaggcaaggauacacccgggggauacugucucacgcgguggaugcugauugaggcugagcugaaaugcuuuggcaauaccgccguggcuaaguguaacgaaaaacacgacgaggaguucugcgauaugcuccgccuguuugacuucaauaagcaggccauccagagacuuaaagcgccugcccagauguccauucaacugaucaacaaggcugucaaugcccucaucaacgaucagcugauuaugaagaaucaccuucgggacaucauggggauucccuauugcaacuacagcaaauauuguuaccugaaucauacaaccacaggaaagaccucucucccuaaaugcugucugguguccaacggcagcuaccugaaugaaacgcacuucucugacgauaucgaacagcaagcugacaacaugauuacagagaugcuccagaaggaguauauggaacgccaggggaaaaccccgcugggacuuguggaucuguuugucuucagcaccuccuuuuaccucaucucuaucuuccugcaucugguuaagauucccacacacagacauaucgugggcaaaagcugcccuaagccccaccggcuuaaucacaugggcauuuguuccugcgggcucuauaagcagccuggagugcccgucaaauggaagcgcugaggacuaguuauaagacugacuagcccgaugggccucccaacgggcccuccuccccuccuugcaccgagauuaauaaaaaaaaaaaaaaaaaaaaaaaaaaaaaaaaaaaaaaaaaaaaaaaaaaaaaaaaaaaaaaaaaaaaaaaaaaaaaaaaaaaaaaaaaaaaaaaaaaaa

SEQ ID NO: 26332 - RNA, 1665 nt, Artificial Sequence
  mRNA product Design i-3 (A100) comprising derived and/or modified sequence from LASV(G1442-SLE-2011;Clade IV)__AIT17180__GPCmut3 (opt5)
aggagaaagcuuaccaugggccagaucgugaccuucuuucaagaggucccccacguuauugaagaggugaugaacaucgugcugauugcccucagcauccuggcuguccuuaaggggcuguacaauguggccacaugcggacucauuggccugguuacguuccuucugcucugugggagauccugcaccacaacccuguauaaaggaguguacgaacugcagacacucgagcugaacauggaaacccuuaauaugacaaugccucugucuuguaccaagaacaauagccaucacuauauccgggucggcaacgagacggggcucgagcugacccuuacaaauaccuccaucauuaaccauaaauuuugcaaucugucugacgcgcacaagaaaaaccucuacgaucaugcucugaugagcaucauuuccacauuccaccugucuaucccgaauuuuaaccaguaugaagccaugagcugugacuucaauggaggcaagauuuccgugcaguacaaccucagccacucuuaugccggcgaugcugccaaucauugcgggaccguugcuaacggagugcugcaaacguuuaugcgcauggccuggggcggguccuacaucgcgcuugacagcggaagaggcaacugggauuguauuaugacaucuuaccaguaucugaucauccagaauaccacaugggacgaucacugccaguucucccggcccagcccuauuggguaccucggacugcuuucucaacgcaccagagacgucuauaucucccggcgcagacggggcaccuuuacauggacgcugagcgauuccgagggcaaggacacccccgggggauacugucucacacgcuggaugcugauugaagccgagcugaaaugcuucggcaacaccgcuguggccaaguguaaugagaaacaugaugaagaguuuugcgacaugcucagacuguucgauuuuaacaagcaggcuauccagcggcuuaaagccccugcgcagaugucuauucaacugaucaauaaggccgugaacgcucucaucaaugaccagcugauuaugaagaaccaccuucgcgacaucauggggauucccuauugcaauuacagcaaauauuguuaccugaacaauacagccaccggaaagacgucccucccuaaaugcugucugaucagcaacggcucuuaccugaaugaaacacacuucuccgaugacauugagcaggaagcugauaacaugaucaccgagaugcuccaaaaggaguauauggaaagacaggggaaaaccccgcugggacuugucgaccuguucguuuuuagcacaucuuucuaccucaucagcauuuuucugcaucuggugaagauccccacccaccggcauauugugggcaaauccugcccuaagccccaccgccuuaaucauaugggcaucuguucuugcgggcucuauaagcagccuggaguccccgugagauggaaacggugaggacuaguuauaagacugacuagcccgaugggccucccaacgggcccuccuccccuccuugcaccgagauuaauaaaaaaaaaaaaaaaaaaaaaaaaaaaaaaaaaaaaaaaaaaaaaaaaaaaaaaaaaaaaaaaaaaaaaaaaaaaaaaaaaaaaaaaaaaaaaaaaaaaa

SEQ ID NO: 26333 - RNA, 1665 nt, Artificial Sequence
  mRNA product Design i-3 (A100) comprising derived and/or modified sequence from LASV(G3010-SLE-2013;Clade IV)__AIT17344__GPCmut3 (opt5)
aggagaaagcuuaccaugggccagaucgugaccuucuuucaagaggucccccacguuauugaagaggugaugaacaucgugcugauugcccucagcauccuggcuguccuuaaggggcuguacaauuucgccacaugcggacucgugggccugguuacguuucuucugcucugugggagauccugcaccacaucucuguauaaaggaguguacgaacugcagacccucgagcugaacauggaaacacuuaauaugaccaugccucugagcuguacaaagaacaauucccaucacuauauuauggucggcaacgagaccgggcucgagcugacgcuuaccaauacaucuaucaucaaccauaaauucugcaaucugagcgacgcgcacaagaaaaaccucuacaaucaugcucugauguccauuaucucuaccuuucaccugagcauuccgaacuucaaucaguaugaagccauguccugugauuuuaacggaggcaagaucagcgugcaguacaaucucucucacuccuaugccggcgacgcugccagccauugcgggacaguugcuaacggagugcugcaaaccuucaugcggauggccuggggcgggucuuacauugcgcuugauuccggauacggcaagugggacuguaucaugacgagcuaucaguaccugauuauccagaacacaaccugggaggaucacugccaguuuucucgccccuccccuaucggguaucucggacugcuuagccaaagaacacgggacauuuacaucucccgcagacggcgcggcaccuucaccuggacacugucugauagcgaaggcaaagacacgcccgggggauauugucucaccagauggaugcugauugaggccgagcugaagugcuuuggcaauacagcugucgccaaauguaacgaaaagcaugaugaggaguucugcgacaugcuccggcuguuugauuucaauaaacaggcuauccagcgccuuaagaccccugcccagauguccauucaacugaucaacaaggcggugaaugcccucaucaacgaccagcugauuaugaaaaaucaccuuagagauaucauggggauucccuacugcaacuauagcaaguacuguuaccugaaucacacaaccacgggaaaaacaucucucccuaagugcugucugguguccaacggcagcuaucugaaugaaacccauuucucugacgacaucgaacagcaagcugauaacaugauuaccgagaugcuccagaaagaguacauggaacggcaggggaagacaccgcugggacuugucgaccuguuuguuuucagcaccuccuuuuaucucaucucuaucuuccugcaccuggugaaaauucccacacaucgccacaucgugggcaagagcugcccuaagccccauagacuuaaucacaugggcauuuguuccugcgggcucuacaaacagccuggaguccccgugcgguggaagcgcugaggacuaguuauaagacugacuagcccgaugggccucccaacgggcccuccuccccuccuugcaccgagauuaauaaaaaaaaaaaaaaaaaaaaaaaaaaaaaaaaaaaaaaaaaaaaaaaaaaaaaaaaaaaaaaaaaaaaaaaaaaaaaaaaaaaaaaaaaaaaaaaaaaaa

SEQ ID NO: 26334 - RNA, 1665 nt, Artificial Sequence
  mRNA product Design i-3 (A100) comprising derived and/or modified sequence from LASV(G502-SLE-2009;Clade IV)__AIT17126__GPCmut3 (opt5)
aggagaaagcuuaccaugggccagaucgugaccuucuuucaagaggucccccacguuauugaagaggugaugaacaucgugcugauugcccucagcauccuggcuguccuuaaggggcuguacaauuucgccacaugcggacucgugggccugcuuacguuucugcuccugugugggagauccugcaccacaggacuguauaaaggcguuuacgaacuccagacccuggagcuuaacauggaaacacugaauaugaccaugccucucucuuguacaaagaacaauagccaucacuauauuaugguggggaacgagaccggacuggagcuuacgcugaccaauacauccaucaucaaccauaaauucugcaaucucucugacgcgcacaagaaaaaccuguacgaucaugcucugaugagcauuaucuccaccuuucaccucucuauuccgaauuucaaccaguaugaagccaugagcugugacuuuaauggcggcaagaucuccguccaguacaaccugagccacucuuaugccggggaugcugccgaccauugcggaacaguggcuaauggcguucuucaaaccuucaugcggauggccuggggaggguccuacauugcgcuggauagcggccgcgggagaugggacuguaucaugacgucuuaccaguaucucauuauccagaacacaaccugggaggaucacugccaguuuucccggcccagcccuaucggauaccugggccuucugucucaacgcacaagagacauuuauaucucccggcgcagacggggcaccuucaccuggacacucagcgauuccgaagggaaggacacgcccggaggcuacugucugacccgcuggaugcugauugaggccgagcucaaaugcuuugggaacacagcuguggccaaguguaaugaaaaacaugaugaggaguucugcgacaugcugagacuuuuugauuucaacaagcaggcuauccagcggcugaaagccccugcgcagaugucuauucaacucaucaauaaggccgucaacgcucugaucaaugaccagcuugugaugaagaaccaucugcgcgacauuaugggaauccccuauugcaauuacagcagauauuguuaccucaaccacaccacaaccggccggacgucccugccuaaaugcugucuggugagcaaugggucuuaccucaacgaaacacacuucuccgaugacauugaacagcaagccgauaauaugaucaccgagaugcugcagaaggaguauauggaacgccagggaaaaaccccgcuuggccuggucgaccucuuuguuuucagcacaucuuuuuaccugauuagcaucuuccugcaccuugugaagauccccacccauagacacauugugggcaaauccugcccuaagccccaucggcucaaccacauggggaucuguucuugcggacuguauaaacagccuggcguccccgugaaguggaagagaugaggacuaguuauaagacugacuagcccgaugggccucccaacgggcccuccuccccuccuugcaccgagauuaauaaaaaaaaaaaaaaaaaaaaaaaaaaaaaaaaaaaaaaaaaaaaaaaaaaaaaaaaaaaaaaaaaaaaaaaaaaaaaaaaaaaaaaaaaaaaaaaaaaaa

SEQ ID NO: 26335 - RNA, 1665 nt, Artificial Sequence
  mRNA product Design i-3 (A100) comprising derived and/or modified sequence from LASV(G733-SLE-2010;Clade IV)__AIT17154__GPCmut3 (opt5)
aggagaaagcuuaccaugggccagaucgugaccuucuuucaagaggucccccacguuauugaagaggugaugaacaucgugcugauugcccucagcauccuggcuguccuuaaggggcuguacaauuucgccacaugcggaauugugggccucguuuccuuucugcuucugugugggagaucuugcacgaccagccucuauaaaggaguguacgaacugcagacacuggagcucaacauggaaacccugaauaugacaaugccucuuuccuguaccaagaacaauucucaucacuauaucauggucggcaacgagacagggcuggagcucacccugacgaauaccagcaucauuaaccauaaauucugcaaucuuuccgacgcgcacaagaaaaaccuguacgaucaugcucucaugucuaucauuagcacauuucaccuguccaucccgaauuucaaccaguaugaagccaugagcugugacuuuaauggaggcaagauuucugugcaguacaaccugucccacagcuaugccggcgaugcugccaaucauugcgggaccaucgcuaacggaguucuccaaacauucaugcggauggccuggggcgggucuuacauugcgcuggacuccggacgcgauagaugggacuguaucaugaccagcuaccaguaucuuaucauucagaacacgacaugggaggaucacugccaguuuucucggcccuccccuaucggcuaccuggggcuccugagccaacgcaccagagacauuuauaucucccggcgcagacggggaacauucaccuggacccuuucugauagcgaaggcaaggacacacccggcggguacugucugacgcgcuggaugcucauugaggccgagcugaaaugcuuuggaaauaccgcuguggccaaguguaacgaaaaacaugaugaggaguucugcgacaugcugagacucuuugauuucaauaagcaggcuauccagcggcugaaagccccugcgcagauguccauccaacuuauuaacaaggccgucaaugcucugaucaacgaccagcucauuaugaagaaucaucugcgcgacaucaugggcauucccuauugcaacuacagcaaauauuguuaccuuaaucacacaaccacagggaagaccucucugccuaaaugcugucucguguccaacggaagcuaccugaaugaaacgcacuucucugaugacaucgaacagcaagccgauaacaugaucacagagaugcugcagaaggaguauauggaaagacagggcaaaaccccgcucgggcugguggaccuuuuugucuucagcaccuccuuuuaccugauuucuaucuuccuccaccugguuaagauucccacacaucggcacguggugggaaaaagcugcccuaagccccaucgccugaaucacaugggcaucuguuccugcggccuuuaugggcagccuggaguccccgugaaguggaaaagaugaggacuaguuauaagacugacuagcccgaugggccucccaacgggcccuccuccccuccuugcaccgagauuaauaaaaaaaaaaaaaaaaaaaaaaaaaaaaaaaaaaaaaaaaaaaaaaaaaaaaaaaaaaaaaaaaaaaaaaaaaaaaaaaaaaaaaaaaaaaaaaaaaaaa

SEQ ID NO: 26336 - RNA, 1665 nt, Artificial Sequence
  mRNA product Design i-3 (A100) comprising derived and/or modified sequence from MOPV/LASV reassortant(IGS-1;Clade IV)__AFY05576__GPCmut3 (opt5)
aggagaaagcuuaccaugggccagaucgugaccuucuuucaagaggucccccacguuauugaagaggugaugaacaucgugcugauugcccucagcguccuggcugugcuuaaggggcuguacaauuucgccacaugcggacucguuggccuggugacguuucuucugcucugugggagauccugcaccacaucucuguauaaaggagucuacgaacugcagacccucgagcugaacauggaaacacuuaauaugaccaugccucugagcuguacaaagaacaauucccaucacuauaucauggugggcaacgagaccgggcucgagcugacgcuuaccaauacaucuauuaucaaccauaaauucugcaaucugagcgacgcgcacaagaaaaaccucuacgaucaugcucugauguccaucauuucuaccuuucaccugagcaucccgaauuucaaccaguaugaagccauguccugugacuuuaauggaggcaagauuagcguucaguacaaccucucucacuccuaugccggcgaugcugccaaucauugcgggacaguggcuaacggaguccugcaaaccuucaugcggauggccuggggcgggagcuacaucgcgcuugacucuggacgcggcaacugggauuguauuaugacguccuaccaguaucugaucauucagaauacaaccugggaggaccacugccaguuuagcagacccucuccuaucggguaccucggacugcuuucccaacggacacgcgauaucuauauuagcagacggcgcagaggcaccuucaccuggacacuguccgacucugaaggcgaggauacgcccgggggauacugucucacccgguggaugcugaucgaggccgaacugaagugcuuuggcaacacagcuguggccaaauguaaugagaagcaugacgaagaguucugcgauaugcuccgccuguuugacuucaacaaacaggcuauucagagacuuaaggccccugcgcagaugagcauccaacugauuaauaaagccgugaacgcucucaucaaugaucagcugaucaugaagaaccaccuucgggacauuauggggauccccuauugcaauuacuccaaguauuguuaccugaaccacaccacaaccggacgcacgagccucccuaaaugcugucuggucucuaauggcuccuaccugaacgaaacacauuucagcgacgauauugagcagcaagccgacaauaugaucaccgagaugcuccagaaggaauauauggagagacaggggaaaaccccgcugggacuuguugaucuguuuguguucucuaccagcuuuuaccucauuuccaucuuccugcaccuggugaagauccccacacaucggcacauugucggcaaaucuugcccuaagccccaucgccuuaaccacaugggcaucuguagcugcgggcucuauaaacagccuggagugcccguuaaguggaagagaugaggacuaguuauaagacugacuagcccgaugggccucccaacgggcccuccuccccuccuugcaccgagauuaauaaaaaaaaaaaaaaaaaaaaaaaaaaaaaaaaaaaaaaaaaaaaaaaaaaaaaaaaaaaaaaaaaaaaaaaaaaaaaaaaaaaaaaaaaaaaaaaaaaaa

SEQ ID NO: 26337 - RNA, 1665 nt, Artificial Sequence
  mRNA product Design i-3 (A100) comprising derived and/or modified sequence from LASV(LM765-SLE-2012;Clade IV)__AIT17814__GPCmut3 (opt5)
aggagaaagcuuaccaugggccagaucgugaccuucuuucaagaggucccccacguuauugaagaggugaugaacaucgugcugauugcccucagcauccuggcuguccuuaaggggcuguacaauuucgccacaugcggacucgugggccugguuacguuucuucugcucugugggagauccugcaccacaucucuguauaaaggaguguacgaacugcagacccucgagcugaacauggaaacacuuaauaugaccaugccucugagcuguacaaagaacaauucccaucacuauauuauggucggcaacgagaccgggcucgagcugacgcuuaccaauacaucuaucaucgaccauaaauucugcaaccugagcgaugcgcaccggaagaaucucuacgaccaugcucugauguccauuaucucuaccuuucaccugagcauuccgaacuucaaucaguaugaagccauguccugugauuuuaacggaggcaaaaucagcgugcaguacaaucucucucacuccuaugccaaggacgcugccgaucauugcggcacaguugcuaacggggugcugcaaaccuucaugcgcauggccuggggaggcagcuacauugcgcuugacucugggagaggacggugggauuguaucaugacguccuaccaguaucugauuauccagaauacaaccugggaggaccacugccaguuuagccgccccucuccuaucggcuaccucgggcugcuuucccaaagaacacgggauauuuauaucagccgcagacggcgcggaaccuucaccuggacacuguccgacucugaaggcaaggauacgcccggcggguacugucucaccagauggaugcugauugaggccgagcugaaaugcuuuggaaacacagcugucgccaaguguaacgaaaaacaugacgaggaguucugcgauaugcuccggcuguuugacuucaauaagcaggcuauccagcgccuuaaagccccugcgcagaugagcauucaacugaucaacaaggccgugaaugcucucaucaacgaccagcugauuaugaagaaucaccuuagagauaucaugggcauucccuauugcaacuacuccaaauauuguuaccugaaucacaccacaaccgggaagacgagccucccuaaaugcugucuggugucuaacggauccuaccugaaugaaacacauuucagcgacgauaucgaacagcaagccgacaacaugauuaccgagaugcuccagaaggaguauauggaacggcagggcaaaaccccgcuggggcuugucgaucuguuuguuuucucuaccagcuuuuaccucaucuccaucuuccugcaccuggugaagauucccacacaucgccacaucgugggaaaaccuugccccaagccucauagacuuaaucacaugggcauuuguucuugcggccucuauaagcagcccggggucccggugaaauggaagcggugaggacuaguuauaagacugacuagcccgaugggccucccaacgggcccuccuccccuccuugcaccgagauuaauaaaaaaaaaaaaaaaaaaaaaaaaaaaaaaaaaaaaaaaaaaaaaaaaaaaaaaaaaaaaaaaaaaaaaaaaaaaaaaaaaaaaaaaaaaaaaaaaaaaa

SEQ ID NO: 26338 - RNA, 1665 nt, Artificial Sequence
  mRNA product Design i-3 (A100) comprising derived and/or modified sequence from LASV(LM776-SLE-2012;Clade IV)__AIT17824__GPCmut3 (opt5)
aggagaaagcuuaccaugggccagaucgugaccuucuuucaagaggucccccacguuauugaagaggugaugaacaucgugcugauugcccucagcauccuggcuguccuuaaggggcuguacaauuucgccacaugcggacucgugggccugguuacguuucuucugcucugugggagauccugcaccacaucuguguauaaaggagucuacgaacugcagacccuggagcucaacauggaaacacugaauaugaccaugccucuuagcuguacaaagaacaauucccaucacuauauuauggugggcaacgagaccgggcuggagcucacgcugaccaauacaucuaucaucaaccauaaauucugcaaucuuagcgacgcgcacaagaaaaaccuguacgaucaugcucucauguccauuaucucuaccuuucaccugagcauuccgaauuucaaccaguaugaagccauguccugugacuuuaauggaggcaagaucagcguucaguacaaccugucucacuccuaugccggcgaugcugccaaucauugcgggacaguggcuaacggaguccuccaaaccuucaugcggauggccuggggcgggagcuacauugcgcuggacucuggacacggcaagugggauuguaucaugacguccuaccaguaucuuauuauccagaacacaaccugggaggaccauugccaguuuagccgccccucuccuaucggguaccugggacuccugucccaaagaacacgggauauuuauaucagccgcagacggcgcggcaccuucaccuggacacuuuccgacucugaaggcaaagauacgcccgggggauacugucugaccagauggaugcucauugaggccgagcugaagugcuuuggcaauacagcuguggccaaauguaacgaaaagcacgacgaggaguucugcgauaugcugcggcucuuugacuucaauaaacaggcuauccagcgccugaaggccccugcgcagaugagcauucaacuuaucaacaaggccgugaaugcucugaucaacgaucagcucauuaugaaaaaucaccugagagacaucauggggauucccuauugcaacuacuccaaguauuguuaccuuaaucauaccacaaccggaaaaacgagccugccuaagugcugucucgucucuaacggcuccuaccugaaugaaacacacuucagcgacgauaucgaacagcaagccgacaacaugauuaccgagaugcugcagaaagaguauauggaacggcaggggaagaccccgcucggacugguugaucuuuuuguguucucuaccagcuuuuaccugaucuccaucuuccuccaucuggugaaaauucccacacaccgccauaucgucggcaagucuugcccuaagccccacagacugaaucacaugggcauuuguagcugcgggcuuuauaaacagccuggagugcccguucgguggaagcgcugaggacuaguuauaagacugacuagcccgaugggccucccaacgggcccuccuccccuccuugcaccgagauuaauaaaaaaaaaaaaaaaaaaaaaaaaaaaaaaaaaaaaaaaaaaaaaaaaaaaaaaaaaaaaaaaaaaaaaaaaaaaaaaaaaaaaaaaaaaaaaaaaaaaa

SEQ ID NO: 26339 - RNA, 1665 nt, Artificial Sequence
  mRNA product Design i-3 (A100) comprising derived and/or modified sequence from LASV(Mad39;Clade IV)__ANH09722__GPCmut3 (opt5)
aggagaaagcuuaccaugggccagaucgugaccuucuuucaagaggucccccacguuauugaagaggugaugaacaucgugcugauugcccucagcauccuggcuguccuuaaggggcuguacaauguggccacaugcggacucauuggccugguuacguuccuucugcucugugggagauccugcaccacaacccuguauaaaggaguguacgaacugcaggcgcucgagcugaacauggaaacacuuaauaugaccaugccucugucuuguacaaagaacaauagccaucacuauauccgggucggcaacgagaccgggcucgagcugacgcuuaccaauacaucccugaucaaccauaaauuuugcaaucucucugacgcucacaagaaaaaccuguacgaucaugcccugaugagcauuaucuccaccuuccaccucucuauuccgaauuuuaaccaguaugaagccaugagcugugacuucaaugauggaaagaucuccgugcaguacaaccugagccacacauaugcuggcgacaccgccaaucauugcggcacgguugcuaacggggugcuucaaacauuuaugcgcauggccuggggaggcucuuacauugcgcuggauuccgggagaggaggcugggacuguaucaugaccagcuaccaguaucucauuauccagaacacaaccugggaggaucacugccaguucucucggcccuccccuaucggguaccugggacuucugagccaacgcaccagagacauuuauaucucucggcgcagacggggcacauuuacguggacccucuccgauagcgaaggcaaggacacacccgggggauacugucugacccgcuggaugcugauugaggccgagcucaaaugcuucggcaauacagcugucgccaaguguaacgaaaaacaugaugaggaauuuugcgacaugcugagacuuuucgauuuuaauaagcaggcuauccagcggcugaaagccccugcgcagauguccauucaacucaucaacaaggccgugaaugcucugaucaacgaccagcuuauuaugaagaaucaucugcgcgacaucauggggauucccuauugcaacuacucuaaauauuguuaccucaaucacaccgugacgggaaagacaagccugccuaaaugcugucuggucuccaacggcagcuaccucaaugagacccacuucucugaugacaucgaacagcaagccgauaacaugauuaccgagaugcugcagaaggaguauauggaaagacaggggaaaacaccgcuuggacugguugaccucuucguguuuuccaccagcuucuaccugaucucuaucuuucugcaccuugugaagauucccacacaucggcacgucgugggcaaaccuugccccaagccucaucgccucaaucacaugggcaucuguagcugcggguucuauaagcagcccggaguuccggugagauggaaacggugaggacuaguuauaagacugacuagcccgaugggccucccaacgggcccuccuccccuccuugcaccgagauuaauaaaaaaaaaaaaaaaaaaaaaaaaaaaaaaaaaaaaaaaaaaaaaaaaaaaaaaaaaaaaaaaaaaaaaaaaaaaaaaaaaaaaaaaaaaaaaaaaaaaa

SEQ ID NO: 26340 - RNA, 1665 nt, Artificial Sequence
  mRNA product Design i-3 (A100) comprising derived and/or modified sequence from LASV(Z0947-SLE-2011;Clade IV)__AIT17840__GPCmut3 (opt5)
aggagaaagcuuaccaugggccagaucgugaccuucuuucaagaggucccccacguuauugaagaggugaugaacaucgugcugauugcccucagcauccuggcuguccuuaaggggcuguacaauuucgccacaugcggacucgugggccugguuacguuucuucugcucugugggagauccugcaccauuucucuguauaaaggaguguacgaacugcagacacucgagcugaacauggaaacccuuaauaugacaaugccucugagcuguaccaagaacaauucccaucacuauaucauggucggcaacgagacagggcucgagcugacccuuacgaauaccucuaucauuaaccauaaauucugcaaucugagcgacgcgcacaagaaaaaccucuacgaucaugcucugauguccaucauuucuacauuucaccugagcaucccgaauuucaaccaguaugaagccauguccugugacuuuaauggaggcaagauuagcgugcaguacaaccucucucacuccuaugccggcgaugcugccaaucauugcgggaccguugcuaacggagugcugcaaacauucaugcggauggccuggggcgggagcuacaucgcgcuugacucuggacgcgauagaugggacuguauuaugaccuccuaccaguaucugaucauccagaacacgacaugggaggaucacugccaguuuagccggcccucuccuauuggcuaccucgggcugcuuucccaacgcaccagagacaucuauauuagccggcgcagacggggaacauucaccuggacccuguccgauucugaaggcaaggacacacccggcggguacugucucacgcgcuggaugcugaucgaggccgagcugaaaugcuuuggaaauaccgcugucgccaaguguaacgaaaaacaugaugaggaguucugcgacaugcucagacuguuugauuucaauaagcaggcuauucagcggcuuaaagccccugcgcagaugagcauccaacugaucaacaaggccgugaaugcucucauuaacgaccagcugaucaugaagaaucaccuucgcgacauuaugggcauccccuauugcaacuacuccaaauauuguuaccugaaucacacaaccacagggaagaccagccucccuaaaugcugucuggugucuaacggauccuaccugaaugaaacgcauuucagcgaugacauugaacagcaagccgauaacaugaucacagagaugcuccagaaggaguauauggaaagacagggcaaaaccccgcuggggcuugucgaccuguuuguuuucucuaccagcuuuuaccucaucuccauuuuccugcaccuggugaagauccccacacaucggcacauugugggaaaaccuugccccaagccucaucgccuuaaucacaugggcaucuguucuugcggccucuauaagcagcccggggucccggugaaauggaagagaugaggacuaguuauaagacugacuagcccgaugggccucccaacgggcccuccuccccuccuugcaccgagauuaauaaaaaaaaaaaaaaaaaaaaaaaaaaaaaaaaaaaaaaaaaaaaaaaaaaaaaaaaaaaaaaaaaaaaaaaaaaaaaaaaaaaaaaaaaaaaaaaaaaaa

SEQ ID NO: 26341 - protein, 491 aa, Artificial Sequence
  derived and/or modified protein sequence (artificial) from LASV(Josiah;Clade IV)__NP_694870__GPCmut4
MGQIVTFFQEVPHVIEEVMNIVLIALSVLAVLKGLYNFATCGLVGLVTFLLLCGRSCTTSLYKGVYELQTLELNMETLNMCMPLSCTKNNSHHYIMVGNETGLELTLTNTSIINHKFCNLSDAHKKNLYDHALMSIISTFHLSIPNFNQYEAMSCDFNGGKISVQYNLSHSYAGDAANHCGTVANGVLQTFMRMAWGGSYIALDSGRGNWDCIMTSYQYLIIQNTTWEDHCQFSRPSPIGYLGLLSQRTRDIYISRRRRGTFTWTLSDSEGKDTPGGYCLTRWMLIEAELKCFGNTAVAKCNEKHDEEFCDMLRLFDFCKQAIQRLKAPAQMSIQLINKAVNALINDQLIMKNHLRDIMGIPYCNYSKYCYLNHTTTGRTSLPKCCLVSNGSYLNETHFSDDIEQQADNMITEMLQKEYMERQGKTPLGLVDLFVFSTSFYLISIFLHLVKIPTHRHIVGKSCPKPHRLNHMGICSCGLYKQPGVPVKWKR

SEQ ID NO: 26342 - protein, 490 aa, Artificial Sequence
  derived and/or modified protein sequence (artificial) from LASV(LP;Clade I)__AAF86701__GPCmut4
MGQIITFFQEVPHVIEEVMNIVLIALSLLAILKGLYNIATCGIIGLVAFLFLCGKSCSLTLKGGYELQTLELNMETLNMCMPLSCTKNSSHHYIRVGNETGLELTLTNTSIINHKFCNLSDAHKKNLYDHALMSIISTFHLSIPNFNQYEAMSCDFNGGKISVQYNLSHSYAGDAAEHCGTVANGVLQTFMRMAWGGRYIALDSGKGNWDCIMTSYQYLIIQNTTWEDHCQFSRPSPIGYLGLLSQRTRDIYISRRRRGTFTWTLSDSEGNETPGGYCLTRWMLIEAELKCFGNTAVAKCNEKHDEEFCDMLRLFDFCKQAIRRLKAPAQMSIQLINKAVNALINDQLIMKNHLRDIMGIPYCNYSKYCYLNHTSSGRTSLPKCCLISNGSYLNETQFSDDIEQQADNMITEMLQKEYIERQGKTPLGLVDIFIFSTSFYLISIFLHLIKIPTHRHIVGKPCPKPHRLNHMGVCSCGLYKHPGVPTKWKR

SEQ ID NO: 26343 - protein, 490 aa, Artificial Sequence
  derived and/or modified protein sequence (artificial) from LASV(803213;Clade II)__AAF86703__GPCmut4
MGQIITFFQEVPHVIEEVMNIVLIALSLLAILKGIYNVATCGLFGLISFLLLCGRSCSVTYKGVYELQTLELNMANLNMCMPLSCTKNNSHHYIMVGNETGLELTLTNTSIINHKFCNLSDAHKKNLYDHALMSIISTFHLSIPNFNQYEAMSCDFNGGKISVQYNLSHSFAVDAANHCGTIANGVLQTFMRMAWGGSYIALDSGKGNWDCIMTSYQYLIIQNTTWEDHCQFSRPSPIGYLGLLSQRTRDIYISRRRRGTFTWTLSDSEGNEAPGGYCLTRWMLIEAELKCFGNTAVAKCNEKHDEEFCDMLRLFDFCKQAIKRLKTPAQMSIQLINKAVNALINDQLIMKNHLRDIMGIPYCNYSRYCYLNHTVTGKTSLPRCCLVSNGSYLNETHFSDDIEQQADNMITEMLQKEYMDRQGKTPLGLVDLFVFSTSFYLISIFLHLVKIPTHRHIVGKPCPKPHRLNHMGICSCGLYKHPGVPVKWKR

SEQ ID NO: 26344 - protein, 490 aa, Artificial Sequence
  derived and/or modified protein sequence (artificial) from LASV(GA391;Clade III)__CAA36645__GPCmut4
MGQIVTFFQEVPHVIEEVMNIVLIALSILAILKGLYNVATCGLIGLVTFLLLSGRSCSLIYKGTYELQTLELNMETLNMCMPLSCTKNNSHHYIRVGNETGLELTLTNTSILNHKFCNLSDAHKRNLYDHSLMSIISTFHLSIPNFNQYEAMSCDFNGGKITVQYNLSHSFAVDAAGHCGTLANGVLQTFMRMAWGGSYIALDSGRGNWDCIMTSYQYLIIQNTTWDDHCQFSRPSPIGYLGLLSQRTRDIYISRRRRGTFTWTLSDSEGNETPGGYCLTRWMLIEAELKCFGNTAVAKCNEKHDEEFCDMLRLFDFCKQAIRRLKTPAQMSIQLINKAVNALINDQLIMKNHLRDIMGIPYCNYSRYCYLNHTSTGKTSLPRCCLISNGSYLNETKFSDDIEQQADNMITEMLQKEYIDRQGKTPLGLVDLFVFSTSFYLISIFLHLVKIPTHRHIVGKPCPKPHRLNHMGICSCGLYKQPGVPVRWKR

SEQ ID NO: 26345 - protein, 491 aa, Artificial Sequence
  derived and/or modified protein sequence (artificial) from LASV(AV;Clade V)__CCA30314__GPCmut4
MGQIVTFFQEVPHVIEEVMNIVLIALSILAVLKGLYNIATCGLIGLITFLLLCGRSCSSNLYKGVYELQSLDLNMETLNMCMPLSCTKNNSHHYIRVGNDTGLELTLTNTSILNHKFCNLSDAHKKDLYDHALMSIISTFHLSIPNFNQYEAMSCDFNGGKISVQYNLSHSYAIDAANHCGTVANGILQTFMRMAWGGSYIALDSGRGNWDCIMTSYQYLIIQNTTWENHCQFSRPSPIGYLGLLSQRTRDIYISRRRRGTFTWTLSDSEGNATPGGYCLTRWMLIEAELKCFGNTAVAKCNEKHDEEFCDMLRLFDFCKQAISRLKSPAQMSIQLINKAVNALINDQLIMKNHLRDIMGIPYCNYSKYCYLNHTITGKTSLPKCCLVSNGSYLNETHFSDDIEQQADNMITEMLQKEYMERQGKTPLGLVDLFVFSTSFYLISIFLRLVKIPTHRHIVGKPCPKPHRLNHMGICSCGLYKQPGVPVRWKR

SEQ ID NO: 26346 - protein, 490 aa, Artificial Sequence
  derived and/or modified protein sequence (artificial) from LASV(Togo/2016/7082;Clade VI)__AMR44577__GPCmut4
MGQIITFFQEVPHVIEEVMNIVLIALSLLAILKGVYNVATCGIIGLVTFLFLCGRSCSLIYKGSYELQTLELNMETLNMCMPLSCTKNSSHHYIRVGNETGLELTLTNTSIINHKFCNLSDAHKRNLYDHALMSILSTFHLSIPNFNQYEAMSCDFNGGKISVQYNLSHAYAVDAAEHCGTVANGVLQTFMRMAWGGSYIALDSGRGNWDCIMTSYQYLIIQNTTWEDHCQFSRPSPIGYLGLLSQRTRDIYISRRRRGTFTWTLSDSEGNETPGGYCLTRWMLIEAELKCFGNTAVAKCNEKHDEEFCDMLRLFDFCKQAIQRLKSPAQMSIQLINKAVNALINDQLIMKNHLRDMMGIPYCNYSKYCYLNHTSSGRTSLPKCCLVSNGSYLNETHFSDDIEQQADNMITEMLQKEYIDRQGKTPLGLVDLFVFSTSFYLISIFLHLIKIPTHRHIVGKPCPKPHRLNHMGICSCGLYKQPGVPTRWKR

SEQ ID NO: 26347 - protein, 490 aa, Artificial Sequence
  derived and/or modified protein sequence (artificial) from LASV(KAK-428;Clade n.d. (VII))__ANH09740__GPCmut4
MGQIVTFFQEVPHVIEEVMNIVLIALSLLAILKGLYNFATCGVIGLITFLLLCGRSCSATYKGQYELQTLELNMESLNMCMPLSCTKNNSHHYIRAGNNTGLELTLTNTSIISHKFCNLSDAHKKNLYDHTLMSIITTFHLSIPNFNQYEAMSCDFNGGKISIQYNLSHSYAGDAAQHCGTVANGVLQTFMRMAWGGSYLALDSGRRGWDCIISSYQYLIIQNTTWDDHCQFSRPSPIGYLGFVSQKTRDIYISRRRRGTFTWTLSDSEGHDMPGGYCLTRWMLIEADLKCFGNTAVAKCNEKHDEEFCDMWRLFDFCKQAIQRLKAPAQMNIQLINKAVNALINDQLMMKNHLRDIMGIPYCNYSKFCYLNNTTTGRTSLPRCCLISNGSYLNETHFSDDIEQQADNMITEMLQKEYMDRQGKTPLGLVDLFVFSTSFYLITIFLHLVKIPTHRHIVGKPCPKPHRLNHMGICSCGLYKQPGVPVRWKR

SEQ ID NO: 26348 - protein, 490 aa, Artificial Sequence; identical to SEQ ID NO: 26342
  derived and/or modified protein sequence (artificial) from LASV(Pinneo-NIG-1969;Clade I)__AIT17836__GPCmut4

SEQ ID NO: 26349 - protein, 490 aa, Artificial Sequence
  derived and/or modified protein sequence (artificial) from LASV(ISTH0009-NIG-2011;Clade II)__AIT17404__GPCmut4
MGQIITFFQEVPHVIEEVMNIVLIALSLLAILKGIYNVATCGLFGLVSFLLLCGRSCSTTYKGVYELQTLELDMASLNMCMPLSCTKNNSHHYIMVGNETGLELTLTNTSIINHKFCNLSDAHKKNLYDHALMSIISTFHLSIPNFNQYEAMSCDFNGGKISVQYNLSHAYAVDAANHCGTIANGVLQTFMRMAWGGSYIALDSGKGSWDCIMTSYQYLIIQNTTWEDHCQFSRPSPIGYLGLLSQRTRDIYISRRRRGTFTWTLSDSEGNETPGGYCLTRWMLIEAELKCFGNTAVAKCNEKHDEEFCDMLRLFDFCKQAIRRLKTPAQMSIQLINKAVNALINDQLIMKNHLRDIMGIPYCNYSKYCYLNHTVTGKTSLPRCCLVSNGSYLNETHFSDDIEQQADNMITELLQKEYMDRQGKTPLGLVDLFVFSTSFYLISIFLHLIKIPTHRHITGKPCPKPHRLNHMGICSCGLYKHPGVPVKWKR

SEQ ID NO: 26350 - protein, 490 aa, Artificial Sequence
  derived and/or modified protein sequence (artificial) from LASV(ISTH2010-NIG-2012;Clade II)__AIT17482__GPCmut4
MGQIITFFQEVPHVIEEVMNIVLIALSLLAILKGIYNVATCGLFGLVSFLLLCGRSCSTTYKGVYELQTLELDMASLNMCMPLSCTKNNSHHYIMVGNETGLELTLTNTSIINHKFCNLSDAHKKNLYDHALMSIISTFHLSIPNFNQYEAMSCDFNGGKISVQYNLSHAYAVDAANHCGTIANGVLQTFMRMAWGGSYIALDSGKGSWDCIMTSYQYLIIQNITWEDHCQFSRPSPIGYLGLLSQRTRDIYISRRRRGTFTWTLSDSEGNETPGGYCLTRWMLIEAELKCFGNTAVAKCNEKHDEEFCDMLRLFDFCKQAIRRLKTPAQMSIQLINKAVNALINDQLIMKNHLRDIMGIPYCNYSKYCYLNHTVTGKTSLPRCCLVSNGSYLNETHFSDDIEQQADNMITELLQKEYIDRQGKTPLGLVDLFVFSTSFYLISIFLHLVKIPTHRHVVGKPCPKPHRLNHMGICSCGLYKHPGVPVKWKR

SEQ ID NO: 26351 - protein, 490 aa, Artificial Sequence
  derived and/or modified protein sequence (artificial) from LASV(Lassa virus/H.sapiens-wt/NGA/2015/ISTH_0543;Clade II)__AVO03639__GPCmut4
MGQIITFFQEVPHVIEEVMNIVLIALSLLAILKGIYNVATCGLFGLVSFLLLCGRSCSTTYKGVYELQTLELDMANLNMCMPLSCTKNNSHHYIMVGNETGLELTLTNTSIINHKFCNLSDAHKKNLYDHALMSIISTFHLSIPNFNQYEAMSCDFNGGKISVQYNLSHTYAVDAANHCGTIANGVLQTFMRMAWGGSYIALDSGKGSWDCIMTSYQYLVIQNTTWEDHCQFSRPSPIGYLGLLSQRTRDIYISRRRRGTFTWTLSDSEGNETPGGYCLTRWMLIEAELKCFGNTAVAKCNEKHDEEFCDMLRLFDFCKQAIRRLKTPAQMSIQLINKAVNALINDQLIMKNHLRDIMGIPYCNYSKYCYLNHTVTGKTSLPRCCLVSNGSYLNETHFSDDIEQQADNMITELLQKEYIDRQGKTPLGLVDLFVFSTSFYLISIFLHLVKIPTHRHITGKPCPKPHRLNHMGICSCGLYKHPGVPVKWKR

SEQ ID NO: 26352 - protein, 490 aa, Artificial Sequence
  derived and/or modified protein sequence (artificial) from LASV(Lassa virus/H.sapiens-wt/NGA/2016/ISTH_0009;Clade II)__AVO03571__GPCmut4
MGQIITFFQEVPHVIEEVMNIVLIALSLLAILKGIYNVATCGLLGLVSFLLLCGRSCSTTYKGVYELQTLELDMASLNMCMPLSCTKNNSHHYIMVGNETGLELTLTNTSIINHKFCNLSDAHKKNLYDHALMSIISTFHLSIPNFNQYEAMSCDFNGGRISVQYNLSHSYAVDAANHCGTIANGVLQTFMRMAWGGSYIALDSGKGSWDCIMTSYQYLIIQNTTWEDHCQFSRPSPIGYLGLLSQRTRDIYISRRRRGTFTWTLSDSEGNETPGGYCLTRWMLIEAELKCFGNTAVAKCNEKHDEEFCDMLRLFDFCKQAIRRLKTPAQMSIQLINKAVNALINDQLIMKNHLRDIMGIPYCNYSKYCYLNHTVTGKTSLPRCCLVSNGSYLNETHFSDDIEQQADNMITELLQKEYIDRQGKTPLGLVDLFVFSTSFYLISIFLHLVKIPTHRHITGKPCPKPHRLNHMGICSCGLYNHPGVPVKWKR

SEQ ID NO: 26353 - protein, 490 aa, Artificial Sequence
  derived and/or modified protein sequence (artificial) from LASV(Lassa virus/H.sapiens-wt/NGA/2016/ISTH_0017;Clade II)__AVO03567__GPCmut4
MGQIITFFQEVPHVIEEVMNIVLIALSLLAILKGIYNVATCGLFGLVSFLLLCGRSCSTTYKGVYELQTLELDMASLNMCMPLSCTKNNSHHYIMVGNETGLELTLTNTSIINHKFCNLSDAHKKNLYDHALMSIISTFHLSIPNFNQYEAMSCDFNGGKISVQYNLSHTYAIDAANHCGTIANGVLQTFMRMAWGGSYIALDSGKGSWDCIMTSYQYLIIQNTTWEDHCQFSRPSPIGYLGLLSQRTRDIYISRRRRGTFTWTLSDSEGNETPGGYCLTRWMLIEAELKCFGNTAVAKCNEKHDEEFCDMLRLFDFCKQAIRRLKTPAQMSIQLINKAVNALINDQLIMKNHLRDIMGIPYCNYSKYCYLNHTVTGKTSLPRCCLVSNGSYLNETHFSDDIEQQADNMITELLQKEYMDRQGKTPLGLVDLFVFSTSFYLISIFLHLVRIPTHRHVIGKPCPKPHRLNHMGICSCGLYKHPGVPVKWKR

SEQ ID NO: 26354 - protein, 490 aa, Artificial Sequence
  derived and/or modified protein sequence (artificial) from LASV(Lassa virus/H.sapiens-wt/NGA/2018/ISTH_0959;Clade II)__AVV65099__GPCmut4
MGQIITFFQEVPHVIEEVMNIVLIALSLLAILKGIYNVVTCGLFGLVSFLLLCGRSCSTTYKGVYELQTLELDMASLNMCMPLSCTKNNSHHYIMVGNETGLELTLTNTSIINHKFCNLSDAHKKNLYDHALMSIISTFHLSIPNFNQYEAMSCDFNGGKISVQYNLSHAYAIDAANHCGTIANGVLQTFMRMAWGGSYIALDSGKGSWDCIMTSYQYLIIQNTTWEDHCQFSRPSPIGYLGLLSQRTRDIYISRRRRGTFTWTLSDSEGNETPGGYCLTRWMLIEAELKCFGNTAVAKCNEKHDEEFCDMLRLFDFCKQAIRRLKTPAQMSIQLINKAVNALINDQLIMKNHLRDIMGIPYCNYSKYCYLNHTVTGKTSLPRCCLVSNGSYLNETHFSDDIEQQADNMITELLQKEYIDRQGKTPLGLVDLFVFSTSFYLISIFLHLVKIPTHRHVIGKPCPKPHRLNHMGICSCGLYKHPGVPVKWKR

SEQ ID NO: 26355 - protein, 490 aa, Artificial Sequence
  derived and/or modified protein sequence (artificial) from LASV(LASV003-NIG-2008;Clade II)__AIT17580__GPCmut4
MGQIITFFQEVPHVIEEVMNIVLIALSLLAILKGIYNVATCGLFGLVSFLLLCGRSCSTTYKGVYELQTLELDMASLNMCMPLSCTKNNSHHYIMVGNETGLELTLTNTSIINHKFCNLSDAHKKNLYDHALMSIISTFHLSIPNFNQYEAMSCDFNGGKISVQYNLSHTYAVDAANHCGTIANGVLQTFMRMAWGGSYIALDSGKGSWDCIMTSYQYLIIQNTTWEDHCQFSRPSPIGYLGLLSQRTRDIYISRRRRGTFTWTLSDSESNETPGGYCLTRWMLIEAELKCFGNTAVAKCNEKHDEEFCDMLRLFDFCKQAIRRLKAPAQMSIQLINKAVNALINDQLIMKNHLRDIMGIPYCNYSKYCYLNHTVTGRTSLPRCCLVSNGSYLNETHFSDDIEQQADNMITELLQKEYMDRQGKTPLGLVDLFVFSTSFYLISIFLHLVKIPTHRHVIGKPCPKPHRLNHMGICSCGLYKHPGVPVKWKR

SEQ ID NO: 26356 - protein, 490 aa, Artificial Sequence
  derived and/or modified protein sequence (artificial) from LASV(LASV035-NIG-2009;Clade II)__AIT17588__GPCmut4
MGQIITFFQEVPHVIEEVMNIVLIALSLLAILKGIYNVATCGLFGLVSFLLLCGRSCSTTYKGVYELQTLELDMASLNMCMPLSCTKNNSHHYIMVGNETGLELTLTNTSIINHKFCNLSDAHKKNLYDHALMSIISTFHLSIPNFNQYEAMSCDFNGGKISVQYNLSHAYAVDAANHCGTIANGVLQTFMRMAWGGSYIALDSGKGSWDCIMTSYQYLIIQNTTWEDHCQFSRPSPIGYLGLLSQRTRDIYISRRRRGTFTWTLSDSEGNETPGGYCLTRWMLIEAELKCFGNTAVAKCNEKHDEEFCDMLRLFDFCKQAIRRLKAPAQMSIQLINKAVNALINDQLIMKNHLRDIMGIPYCNYSKYCYLNHTVTGKTSLPRCCLVSNGSYLNETHFSDDIEQQADNMITELLQKEYIDRQGKTPLGLVDLFVFSTSFYLISIFLHLVKIPTHRHVIGKPCPKPHRLNHMGICSCGLYKHPGVPVKWKR

SEQ ID NO: 26357 - protein, 490 aa, Artificial Sequence
  derived and/or modified protein sequence (artificial) from LASV(LASV1000-NIG-2009;Clade II)__AIT17782__GPCmut4
MGQIITFFQEVPHVIEEVMNIVLIALSLLAILKGIYNVATCGLFGLVSFLLLCGRSCSTTYKGVYELQTLELDMASLNMCMPLSCTKNNSHHYIMVGNETGLELTLTNTSIINHKFCNLSDAHKKNLYDHALMSIISTFHLSIPNFNQYEAMSCDFNGGKISVQYNLSHTYAVDAANHCGTIANGVLQTFMRMAWGGSYIALDSGKGSWDCIMTSYQYLIIQNTTWEDHCQFSRPSPIGYLGLLSQRTRDIYISRRRRGTFTWTLSDSEGNETPGGYCLTRWMLIEAELKCFGNTAVAKCNEKHDEEFCDMLRLFDFCKQAIKRLKTPAQMSIQLINKAVNALINDQLIMKNHLRDIMGIPYCNYSKYCYLNHTVTGKTSLPRCCLVSNGSYLNETHFSDDIEQQADNMITELLQKEYIDRQGKTPLGLVDLFVFSTSFYLISIFLHLVKIPTHRHVVGKPCPKPHRLNHMGICSCGLYKHPGVPVKWKR

SEQ ID NO: 26358 - protein, 490 aa, Artificial Sequence
  derived and/or modified protein sequence (artificial) from LASV(LASV221-NIG-2010;Clade II)__AIT17624__GPCmut4
MGQIITFFQEVPHVIEEVMNIVLIALSLLAILKGIYNVATCGLFGLVSFLLLCGRSCSTTYKGVYELQTLELDMASLNMCMPLSCTKNNSHHYIMVGNETGLELTLTNTSIINHKFCNLSDAHKKNLYDHALMSIISTFHLSIPNFNQYEAMSCDFNGGKISVQYNLSHTYAIDAANHCGTIANGVLQTFMRMAWGGSYIALDSGKGSWDCIMTSYQYLIIQNTTWEDHCQFSRPSPIGYLGLLSQRTRDIYISRRRRGTFTWTLSDSEGNETPGGYCLTRWMLIEAELKCFGNTAVAKCNEKHDEEFCDMLRLFDFCKQAIRRLKTPAQMSIQLINKAVNALINDQLIMKNHLRDIMGIPYCNYSKYCYLNHTVTGKTSLPRCCLVSNGSYLNETHFSDDIEQQADNMITEMLQKEYMDRQGKTPLGLVDLFVFSTSFYLISIFLHLVKIPTHRHVIGKPCPKPHRLNHMGICSCGLYKHPGVPVKWKR

SEQ ID NO: 26359 - protein, 490 aa, Artificial Sequence
  derived and/or modified protein sequence (artificial) from LASV(LASV237-NIG-2010;Clade II)__AIT17638__GPCmut4
MGQIITFFQEVPHVIEEVMNIVLIALSLLAILKGIYNVATCGLFGLVSFLLLCGRSCSTTYKGVYELQTLELDMASLNMCMPLSCTKNNSHHYIMVGNETGLELTLTNTSIINHKFCNLSDAHKKDLYDHALMSIISTFHLSIPNFNQYEAMSCDFNGGKISVQYNLSHTYAVDAANHCGTIANGVLQTFMRMAWGGSYIALDSGKGSWDCIMTSYQYLIIQNTTWEDHCQFSRPSPIGYLGLLSQRTRDIYISRRRRGTFTWTLSDSEGNETPGGYCLTRWMLIEAELKCFGNTAVAKCNEKHDEEFCDMLRLFDFCKQAIRRLKTPAQMSIQLINKAVNALINDQLIMKNHLRDIMGIPYCNYSKYCYLNHTVTGKTSLPRCCLVSNGSYLNETHFSDDIEQQADNMITELLQKEYMDRQGKTPLGLVDLFVFSTSFYLISIFLHLIKIPTHRHITGKPCPKPHRLNHMGICSCGLYKHPGVPVKWKR

SEQ ID NO: 26360 - protein, 490 aa, Artificial Sequence
  derived and/or modified protein sequence (artificial) from LASV(LASV253-NIG-2011;Clade II)__AIT17670__GPCmut4
MGQIITFFQEVPHVIEEVMNIVLIALSLLAILKGIYNVATCGLFGLVSFLLLCGRSCSTTYKGVYELQTLELDMASLNMCMPLSCTKNNSHHYIMVGNETGLELTLTNTSIINHKFCNLSDAHKKNLYDHALMSIISTFHLSIPNFNQYEAMSCDFNGGKISVQYNLSHTYAVDAANHCGTIANGVLQTFMRMAWGGSYIALDSGKGSWDCIMTSYQYLIIQNTTWEDHCQFSRPSPIGYLGLLSQRTRDIYISRRRRGTFTWTLSDSEGNETPGGYCLTRWMLIEAELKCFGNTAVAKCNEKHDEEFCDMLRLFDFCKQAIRRLKAPAQMSIQLINKAVNALINDQLIMKNHLRDIMGIPYCNYSKYCYLNHTVTGRTSLPRCCLVSNGSYLNETHFSDDIEQQADNMITELLQKEYIDRQGKTPLGLVDLFVFSTSFYLISIFLHLVKIPTHRHIIGKPCPKPHRLNHMGICSCGLYKHPGVPVKWKR

SEQ ID NO: 26361 - protein, 490 aa, Artificial Sequence
  derived and/or modified protein sequence (artificial) from LASV(LASV254-NIG-2011;Clade II)__AIT17674__GPCmut4
MGQIITFFQEVPHVIEEVMNIVLIALSLLAILKGIYNVATCGLFGLVSFLLLCGRSCSTTYKGVYELQTLELDMTNLNMCMPLSCTKNNSHHYIMVGNETGLELTLTNTSIINHKFCNLSDAHKKNLYNHALMSIISTFHLSIPNFNQYEAMSCDFNGGKISVQYNLSHSYAVDAANHCGTIANGVLQTFMRMAWGGSYIALDSGKGNWDCIMTSYQYLIIQNTTWEDHCQFSRPSPIGYLGLLSQRTRDIYISRRRRGTFTWTLSDSEGNETPGGYCLTRWMLIEAELKCFGNTAVAKCNEKHDEEFCDMLRLFDFCKQAIRRLKTPAQANIQLINKAVNALINDQLIMKNHLRDIMGIPYCNYSKYCYLNHTVTGKTSLPRCCLVSNGSYLNETHFSDDIEQQADNMITELLQKEYMDRQGKTPLGLVDLFVFSTSFYLISIFLHLVKIPTHRHVIGKPCPKPHRLNHMGICSCGLYKHPGVPVKWKR

SEQ ID NO: 26362 - protein, 490 aa, Artificial Sequence
  derived and/or modified protein sequence (artificial) from LASV(Nig08-A19;Clade III)__ADU56618__GPCmut4
MGQIVTFFQEVPHVIEEVMNIVLIALSILAILKGLYNIATCGLIGLVTFLLLSGRSCSMTYKGVYELQTLELNMNTLNMCMPLSCTKNNSHHYIMVGNETGLELTLTNTSLLHHKFCNLSDAHKKNLYDHTLMSIISTFHLSIPNFNQYEAMSCDFNGGKITVQYNLSHSYAIDAANHCGTVANGVLQTFMRMAWGGSYIALDSGRGKWDCIMTSYQYLIIQNTTWEDHCQFSRPSPIGYLGLLSQRTRDIYISRRRRGTFTWTLSDSEGNETPGGYCLTRWMLIEAELKCFGNTAVAKCNEKHDEEFCDMLRLFDFCKQAIRRLKAPAQMSIQLINKAVNALINDQLIMKNHLRDIMGIPYCNYSKYCYLNHTSTGRTSLPRCCLVSNGSYLNETHFSDDIEQQADNMITEMLQKEYLDRQGKTPLGLVDLFVFSTSFYLISIFLHLVKIPTHRHIVGKPCPKPHRLNHMGICSCGLYKQPGVPVRWKR

SEQ ID NO: 26363 - protein, 491 aa, Artificial Sequence
  derived and/or modified protein sequence (artificial) from LASV(G1180-SLE-2010;Clade IV)__AIT17168__GPCmut4
MGQIVTFFQEVPHVIEEVMNIVLIALSILAVLKGLYNFATCGLVGLLTFLLLCGRSCTASRYKGVYELQTLELNMETLNMCMPLSCTKNNSHHYIMVGNETGLELTLTNTSIINHKFCNLSDAHKKNLYDHALMSIISTFHLSIPNFNQYEAMSCDFNGGKISVQYNLSHSYAGDAANHCGTVANGVLQTFMRMAWGGSYIALDSGHGSWDCIMTSYQYLIIQNTTWEDHCQFSRPSPIGYLGLLSQRTRDIYISRRRRGTFTWTLSDSEGKDTPGGYCLTRWMLIEAELKCFGNTAVAKCNEKHDEEFCDMLRLFDFCKQAIQRLKAPAQMSIQLINKAVNALINDQLIMKNHLRDIMGIPYCNYSKYCYLNHTTTGKTSLPKCCLVSNGSYLNETHFSDDIEQQADNMITEMLQKEYMERQGKTPLGLVDLFVFSTSFYLISIFLHLVKIPTHRHIVGKSCPKPHRLNHMGICSCGLYKQPGVPVKWKR

SEQ ID NO: 26364 - protein, 491 aa, Artificial Sequence
  derived and/or modified protein sequence (artificial) from LASV(G1442-SLE-2011;Clade IV)__AIT17180__GPCmut4
MGQIVTFFQEVPHVIEEVMNIVLIALSILAVLKGLYNVATCGLIGLVTFLLLCGRSCTTTLYKGVYELQTLELNMETLNMCMPLSCTKNNSHHYIRVGNETGLELTLTNTSIINHKFCNLSDAHKKNLYDHALMSIISTFHLSIPNFNQYEAMSCDFNGGKISVQYNLSHSYAGDAANHCGTVANGVLQTFMRMAWGGSYIALDSGRGNWDCIMTSYQYLIIQNTTWDDHCQFSRPSPIGYLGLLSQRTRDVYISRRRRGTFTWTLSDSEGKDTPGGYCLTRWMLIEAELKCFGNTAVAKCNEKHDEEFCDMLRLFDFCKQAIQRLKAPAQMSIQLINKAVNALINDQLIMKNHLRDIMGIPYCNYSKYCYLNNTATGKTSLPKCCLISNGSYLNETHFSDDIEQEADNMITEMLQKEYMERQGKTPLGLVDLFVFSTSFYLISIFLHLVKIPTHRHIVGKSCPKPHRLNHMGICSCGLYKQPGVPVRWKR

SEQ ID NO: 26365 - protein, 491 aa, Artificial Sequence
  derived and/or modified protein sequence (artificial) from LASV(G3010-SLE-2013;Clade IV)__AIT17344__GPCmut4
MGQIVTFFQEVPHVIEEVMNIVLIALSILAVLKGLYNFATCGLVGLVTFLLLCGRSCTTSLYKGVYELQTLELNMETLNMCMPLSCTKNNSHHYIMVGNETGLELTLTNTSIINHKFCNLSDAHKKNLYNHALMSIISTFHLSIPNFNQYEAMSCDFNGGKISVQYNLSHSYAGDAASHCGTVANGVLQTFMRMAWGGSYIALDSGYGKWDCIMTSYQYLIIQNTTWEDHCQFSRPSPIGYLGLLSQRTRDIYISRRRRGTFTWTLSDSEGKDTPGGYCLTRWMLIEAELKCFGNTAVAKCNEKHDEEFCDMLRLFDFCKQAIQRLKTPAQMSIQLINKAVNALINDQLIMKNHLRDIMGIPYCNYSKYCYLNHTTTGKTSLPKCCLVSNGSYLNETHFSDDIEQQADNMITEMLQKEYMERQGKTPLGLVDLFVFSTSFYLISIFLHLVKIPTHRHIVGKSCPKPHRLNHMGICSCGLYKQPGVPVRWKR

SEQ ID NO: 26366 - protein, 491 aa, Artificial Sequence
  derived and/or modified protein sequence (artificial) from LASV(G502-SLE-2009;Clade IV)__AIT17126__GPCmut4
MGQIVTFFQEVPHVIEEVMNIVLIALSILAVLKGLYNFATCGLVGLLTFLLLCGRSCTTGLYKGVYELQTLELNMETLNMCMPLSCTKNNSHHYIMVGNETGLELTLTNTSIINHKFCNLSDAHKKNLYDHALMSIISTFHLSIPNFNQYEAMSCDFNGGKISVQYNLSHSYAGDAADHCGTVANGVLQTFMRMAWGGSYIALDSGRGRWDCIMTSYQYLIIQNTTWEDHCQFSRPSPIGYLGLLSQRTRDIYISRRRRGTFTWTLSDSEGKDTPGGYCLTRWMLIEAELKCFGNTAVAKCNEKHDEEFCDMLRLFDFCKQAIQRLKAPAQMSIQLINKAVNALINDQLVMKNHLRDIMGIPYCNYSRYCYLNHTTTGRTSLPKCCLVSNGSYLNETHFSDDIEQQADNMITEMLQKEYMERQGKTPLGLVDLFVFSTSFYLISIFLHLVKIPTHRHIVGKSCPKPHRLNHMGICSCGLYKQPGVPVKWKR

SEQ ID NO: 26367 - protein, 491 aa, Artificial Sequence
  derived and/or modified protein sequence (artificial) from LASV(G733-SLE-2010;Clade IV)__AIT17154__GPCmut4
MGQIVTFFQEVPHVIEEVMNIVLIALSILAVLKGLYNFATCGIVGLVSFLLLCGRSCTTSLYKGVYELQTLELNMETLNMCMPLSCTKNNSHHYIMVGNETGLELTLTNTSIINHKFCNLSDAHKKNLYDHALMSIISTFHLSIPNFNQYEAMSCDFNGGKISVQYNLSHSYAGDAANHCGTIANGVLQTFMRMAWGGSYIALDSGRDRWDCIMTSYQYLIIQNTTWEDHCQFSRPSPIGYLGLLSQRTRDIYISRRRRGTFTWTLSDSEGKDTPGGYCLTRWMLIEAELKCFGNTAVAKCNEKHDEEFCDMLRLFDFCKQAIQRLKAPAQMSIQLINKAVNALINDQLIMKNHLRDIMGIPYCNYSKYCYLNHTTTGKTSLPKCCLVSNGSYLNETHFSDDIEQQADNMITEMLQKEYMERQGKTPLGLVDLFVFSTSFYLISIFLHLVKIPTHRHVVGKSCPKPHRLNHMGICSCGLYGQPGVPVKWKR

SEQ ID NO: 26368 - protein, 491 aa, Artificial Sequence
  derived and/or modified protein sequence (artificial) from MOPV/LASV reassortant(IGS-1;Clade IV)__AFY05576__GPCmut4
MGQIVTFFQEVPHVIEEVMNIVLIALSVLAVLKGLYNFATCGLVGLVTFLLLCGRSCTTSLYKGVYELQTLELNMETLNMCMPLSCTKNNSHHYIMVGNETGLELTLTNTSIINHKFCNLSDAHKKNLYDHALMSIISTFHLSIPNFNQYEAMSCDFNGGKISVQYNLSHSYAGDAANHCGTVANGVLQTFMRMAWGGSYIALDSGRGNWDCIMTSYQYLIIQNTTWEDHCQFSRPSPIGYLGLLSQRTRDIYISRRRRGTFTWTLSDSEGEDTPGGYCLTRWMLIEAELKCFGNTAVAKCNEKHDEEFCDMLRLFDFCKQAIQRLKAPAQMSIQLINKAVNALINDQLIMKNHLRDIMGIPYCNYSKYCYLNHTTTGRTSLPKCCLVSNGSYLNETHFSDDIEQQADNMITEMLQKEYMERQGKTPLGLVDLFVFSTSFYLISIFLHLVKIPTHRHIVGKSCPKPHRLNHMGICSCGLYKQPGVPVKWKR

SEQ ID NO: 26369 - protein, 491 aa, Artificial Sequence
  derived and/or modified protein sequence (artificial) from LASV(LM765-SLE-2012;Clade IV)__AIT17814__GPCmut4
MGQIVTFFQEVPHVIEEVMNIVLIALSILAVLKGLYNFATCGLVGLVTFLLLCGRSCTTSLYKGVYELQTLELNMETLNMCMPLSCTKNNSHHYIMVGNETGLELTLTNTSIIDHKFCNLSDAHRKNLYDHALMSIISTFHLSIPNFNQYEAMSCDFNGGKISVQYNLSHSYAKDAADHCGTVANGVLQTFMRMAWGGSYIALDSGRGRWDCIMTSYQYLIIQNTTWEDHCQFSRPSPIGYLGLLSQRTRDIYISRRRRGTFTWTLSDSEGKDTPGGYCLTRWMLIEAELKCFGNTAVAKCNEKHDEEFCDMLRLFDFCKQAIQRLKAPAQMSIQLINKAVNALINDQLIMKNHLRDIMGIPYCNYSKYCYLNHTTTGKTSLPKCCLVSNGSYLNETHFSDDIEQQADNMITEMLQKEYMERQGKTPLGLVDLFVFSTSFYLISIFLHLVKIPTHRHIVGKPCPKPHRLNHMGICSCGLYKQPGVPVKWKR

SEQ ID NO: 26370 - protein, 491 aa, Artificial Sequence
  derived and/or modified protein sequence (artificial) from LASV(LM776-SLE-2012;Clade IV)__AIT17824__GPCmut4
MGQIVTFFQEVPHVIEEVMNIVLIALSILAVLKGLYNFATCGLVGLVTFLLLCGRSCTTSVYKGVYELQTLELNMETLNMCMPLSCTKNNSHHYIMVGNETGLELTLTNTSIINHKFCNLSDAHKKNLYDHALMSIISTFHLSIPNFNQYEAMSCDFNGGKISVQYNLSHSYAGDAANHCGTVANGVLQTFMRMAWGGSYIALDSGHGKWDCIMTSYQYLIIQNTTWEDHCQFSRPSPIGYLGLLSQRTRDIYISRRRRGTFTWTLSDSEGKDTPGGYCLTRWMLIEAELKCFGNTAVAKCNEKHDEEFCDMLRLFDFCKQAIQRLKAPAQMSIQLINKAVNALINDQLIMKNHLRDIMGIPYCNYSKYCYLNHTTTGKTSLPKCCLVSNGSYLNETHFSDDIEQQADNMITEMLQKEYMERQGKTPLGLVDLFVFSTSFYLISIFLHLVKIPTHRHIVGKSCPKPHRLNHMGICSCGLYKQPGVPVRWKR

SEQ ID NO: 26371 - protein, 491 aa, Artificial Sequence
  derived and/or modified protein sequence (artificial) from LASV(Mad39;Clade IV)__ANH09722__GPCmut4
MGQIVTFFQEVPHVIEEVMNIVLIALSILAVLKGLYNVATCGLIGLVTFLLLCGRSCTTTLYKGVYELQALELNMETLNMCMPLSCTKNNSHHYIRVGNETGLELTLTNTSLINHKFCNLSDAHKKNLYDHALMSIISTFHLSIPNFNQYEAMSCDFNDGKISVQYNLSHTYAGDTANHCGTVANGVLQTFMRMAWGGSYIALDSGRGGWDCIMTSYQYLIIQNTTWEDHCQFSRPSPIGYLGLLSQRTRDIYISRRRRGTFTWTLSDSEGKDTPGGYCLTRWMLIEAELKCFGNTAVAKCNEKHDEEFCDMLRLFDFCKQAIQRLKAPAQMSIQLINKAVNALINDQLIMKNHLRDIMGIPYCNYSKYCYLNHTVTGKTSLPKCCLVSNGSYLNETHFSDDIEQQADNMITEMLQKEYMERQGKTPLGLVDLFVFSTSFYLISIFLHLVKIPTHRHVVGKPCPKPHRLNHMGICSCGFYKQPGVPVRWKR

SEQ ID NO: 26372 - protein, 491 aa, Artificial Sequence
  derived and/or modified protein sequence (artificial) from LASV(Z0947-SLE-2011;Clade IV)__AIT17840__GPCmut4
MGQIVTFFQEVPHVIEEVMNIVLIALSILAVLKGLYNFATCGLVGLVTFLLLCGRSCTISLYKGVYELQTLELNMETLNMCMPLSCTKNNSHHYIMVGNETGLELTLTNTSIINHKFCNLSDAHKKNLYDHALMSIISTFHLSIPNFNQYEAMSCDFNGGKISVQYNLSHSYAGDAANHCGTVANGVLQTFMRMAWGGSYIALDSGRDRWDCIMTSYQYLIIQNTTWEDHCQFSRPSPIGYLGLLSQRTRDIYISRRRRGTFTWTLSDSEGKDTPGGYCLTRWMLIEAELKCFGNTAVAKCNEKHDEEFCDMLRLFDFCKQAIQRLKAPAQMSIQLINKAVNALINDQLIMKNHLRDIMGIPYCNYSKYCYLNHTTTGKTSLPKCCLVSNGSYLNETHFSDDIEQQADNMITEMLQKEYMERQGKTPLGLVDLFVFSTSFYLISIFLHLVKIPTHRHIVGKPCPKPHRLNHMGICSCGLYKQPGVPVKWKR

SEQ ID NO: 26373 - RNA, 1476 nt, Artificial Sequence
  derived and/or modified CDS sequence (opt1) from LASV(Josiah;Clade IV)__NP_694870__GPCmut4
augggccagaucgugaccuucuuccaggaggucccccacgugaucgaggaggugaugaacaucguccugaucgcccucagcgugcuggccgugcugaaggggcucuacaacuucgcgaccugcggccuggucgggcuggugacguuccuccugcugugcggccgcuccugcaccaccagccucuacaaggggguguacgagcugcagacccuggagcucaacauggagacgcugaacaugugcaugccgcuguccugcaccaagaacaacagccaccacuacaucauggucggcaacgagaccggccucgagcugacgcugaccaacaccuccaucaucaaccacaaguucugcaaccucagcgacgcccacaagaagaaccuguacgaccacgcccugauguccaucaucagcaccuuccaccucuccauccccaacuucaaccaguacgaggccaugagcugcgacuucaacgggggcaagaucuccgugcaguacaaccugagccacuccuacgccggggacgcggccaaccacugcggcacgguggccaacgggguccugcagaccuucaugcggauggccuggggcggcagcuacaucgcgcucgacuccgggcgcggcaacugggacugcaucaugaccagcuaccaguaccugaucauccagaacaccacgugggaggaccacugccaguucucccggcccagccccaucggguaccugggccuccugucccagcgcacccgggacaucuacaucagccgccggcgccggggcaccuucaccuggacgcugagcgacuccgaggggaaggacaccccgggcggguacugccugacccgcuggaugcucaucgaggccgagcugaagugcuucggcaacaccgccguggccaagugcaacgagaagcacgacgaggaguucugcgacaugcugcggcuguucgacuucugcaagcaggccauccagcgccugaaggcgcccgcccagaugagcauccagcugaucaacaaggccgugaacgcccucaucaacgaccagcugaucaugaagaaccaccuccgggacaucauggggauccccuacugcaacuacuccaaguacugcuaccucaaccacacgaccaccggccgcaccagccugcccaagugcugccuggucuccaacggcagcuaccucaacgagacgcacuucuccgacgacaucgagcagcaggccgacaacaugaucaccgagaugcugcagaaggaguacauggagcggcaggggaagacgccccugggccucguggaccuguucguguucagcaccuccuucuaccugaucagcaucuuccugcaccucgucaagaucccgacccaccgccacaucguggggaaguccugccccaagccccaccggcugaaccacaugggcaucugcagcugcgggcuguacaagcagcccggcgugccggucaaguggaagcgcuga

SEQ ID NO: 26374 - RNA, 1473 nt, Artificial Sequence
  derived and/or modified CDS sequence (opt1) from LASV(LP;Clade I)__AAF86701__GPCmut4
augggccagaucaucaccuucuuccaggaggugccccacgucaucgaggaggugaugaacaucgugcugaucgcccucagccugcuggccauccucaaggggcuguacaacaucgcgaccugcggcaucaucgggcuggucgccuuccucuuccugugcggcaaguccugcagccugacgcucaagggcggguacgagcugcagacccuggagcucaacauggagacccugaacaugugcaugccgcuguccugcacgaagaacagcucccaccacuacauccgcgugggcaacgagaccgggcucgagcugacccugaccaacacgagcaucaucaaccacaaguucugcaaccucuccgacgcccacaagaagaaccuguacgaccacgcccugaugagcaucaucuccaccuuccaccucagcauccccaacuucaaccaguacgaggccauguccugcgacuucaacggcgggaagaucagcgugcaguacaaccugucccacagcuacgcgggcgacgccgccgagcacugcgggaccgucgccaacggcgugcugcagaccuucaugcggauggcguggggcgggcgcuacaucgcccucgacuccggcaaggggaacugggacugcaucaugacgagcuaccaguaccugaucauccagaacaccaccugggaggaccacugccaguucucccggcccagccccaucggcuaccugggccuccugucccagcgcacccgggacaucuacaucagccgccggcgccgggggacguucaccuggacccugagcgacuccgagggcaacgagacccccgggggcuacugccugacgcgcuggaugcucaucgaggccgagcugaagugcuucgggaacaccgccguggccaagugcaacgagaagcacgacgaggaguucugcgacaugcugcggcuguucgacuucugcaagcaggcgauccgccggcugaaggcccccgcccagaugagcauccagcugaucaacaaggccgucaacgcccucaucaacgaccagcugaucaugaagaaccaccuccgcgacaucaugggcauccccuacugcaacuacuccaaguacugcuaccucaaccacaccagcuccggccggaccagccugcccaagugcugccugaucuccaacgggagcuaccucaacgagacgcaguucuccgacgacaucgagcagcaggcggacaacaugaucaccgagaugcugcagaaggaguacaucgagcgccagggcaagaccccgcuggggcucguggacaucuucaucuucagcaccuccuucuaccugaucagcaucuuccugcaccugaucaagaucccgacgcaccggcacaucgugggcaagcccugccccaagccccaccgccucaaccacaugggggucugcuccugcggccuguacaagcacccgggcgugcccaccaaguggaagcgguga

SEQ ID NO: 26375 - RNA, 1473 nt, Artificial Sequence
  derived and/or modified CDS sequence (opt1) from LASV(803213;Clade II)__AAF86703__GPCmut4
augggccagaucaucaccuucuuccaggaggugccccacgucaucgaggaggugaugaacaucgugcugaucgcccucagccugcuggccauccucaaggggaucuacaacgucgcgaccugcggccuguucgggcugaucuccuuccuccugcugugcggccgcagcugcuccgugacguacaaggggguguacgagcuccagacccuggagcugaacauggccaaccucaacaugugcaugccgcugagcugcaccaagaacaacucccaccacuacaucauggucggcaacgagacgggccuggagcucacccugaccaacaccagcaucaucaaccacaaguucugcaaccuguccgacgcccacaagaagaaccucuacgaccacgcccugaugagcaucaucuccacguuccaccugagcauccccaacuucaaccaguacgaggccauguccugcgacuucaacgggggcaagaucagcgugcaguacaaccucucccacagcuucgcgguggacgccgccaaccacugcgggaccaucgccaacggcguccugcagaccuucaugcggauggcguggggcggguccuacaucgcccuggacagcggcaaggggaacugggacugcaucaugaccuccuaccaguaccucaucauccagaacacgaccugggaggaccacugccaguucagccgccccucccccaucggcuaccuggggcugcucagccagcggacccgcgacaucuacaucagccggcgccgccggggcaccuucacguggacccucuccgacagcgagggcaacgaggcccccgggggcuacugccugacccgguggaugcugaucgaggccgagcucaagugcuucgggaacaccgccguggcgaagugcaacgagaagcacgacgaggaguucugcgacaugcugcgccuguucgacuucugcaagcaggccaucaagcggcucaagacgcccgcccagauguccauccagcugaucaacaaggccgugaacgcccugaucaacgaccagcucaucaugaagaaccaccuccgcgacaucaugggcauccccuacugcaacuacagccgguacugcuaccugaaccacaccgucaccgggaagaccucccugccccgcugcugccuggugagcaacggcuccuaccugaacgagacgcacuucagcgacgacaucgagcagcaggcggacaacaugaucaccgagaugcuccagaaggaguacauggaccggcagggcaagaccccgcuggggcugguggaccucuucgucuucuccaccagcuucuaccugaucuccaucuuccugcaccuggugaagaucccgacgcaccgccacaucgugggcaagcccugccccaagccccaccggcucaaccacauggggaucugcagcugcggccuguacaagcacccggggguccccgugaaguggaagcgcuga

SEQ ID NO: 26376 - RNA, 1473 nt, Artificial Sequence
  derived and/or modified CDS sequence (opt1) from LASV(GA391;Clade III)__CAA36645__GPCmut4
augggccagaucgugaccuucuuccaggaggucccccacgugaucgaggaggugaugaacaucguccugaucgcccucagcauccuggccauccugaaggggcucuacaacguggcgaccugcggccugaucgggcuggugacguuccuccugcuguccggccgcagcugcucccucaucuacaaggggaccuacgagcugcagacccuggagcucaacauggagacccugaacaugugcaugccgcugagcugcaccaagaacaacucccaccacuacauccgggucggcaacgagaccggccucgagcugacccugacgaacaccagcauccucaaccacaaguucugcaaccuguccgacgcccacaagcgcaaccuguacgaccacagccucauguccaucaucagcaccuuccaccuguccauccccaacuucaaccaguacgaggccaugagcugcgacuucaacgggggcaagaucaccgugcaguacaaccugucccacagcuucgccguggacgccgcggggcacugcggcacgcucgccaacgggguccugcagaccuucaugcggauggccuggggcggcuccuacaucgcccuggacagcgggcgcggcaacugggacugcaucaugaccuccuaccaguaccucaucauccagaacaccacgugggacgaccacugccaguucagccggcccucccccaucggguaccugggccugcucagccagcgcacccgggacaucuacaucagccgccggcgccggggcaccuucaccuggacgcucuccgacagcgaggggaacgagaccccgggcggguacugccugacccgcuggaugcugaucgaggcggagcucaagugcuucggcaacaccgccguggccaagugcaacgagaagcacgacgaggaguucugcgacaugcugcggcuguucgacuucugcaagcaggccauccgccggcucaagacgcccgcccagauguccauccagcugaucaacaaggcggugaacgcccugaucaacgaccagcucaucaugaagaaccaccuccgcgacaucauggggauccccuacugcaacuacagccgguacugcuaccugaaccacaccuccaccggcaagaccagccugccccgcugcugccugaucuccaacggcagcuaccugaacgagacgaaguucuccgacgacaucgagcagcaggccgacaacaugaucaccgagaugcuccagaaggaguacaucgaccggcaggggaagacgccccugggccuggucgaccuguucguguucagcaccuccuucuaccucaucagcaucuuccugcaccuggugaagaucccgacccaccgccacaucgucgggaagcccugccccaagccccaccggcucaaccacaugggcaucugcuccugcgggcuguacaagcagccgggcgugcccgugcgcuggaagcgguga

SEQ ID NO: 26377 - RNA, 1476 nt, Artificial Sequence
  derived and/or modified CDS sequence (opt1) from LASV(AV;Clade V)__CCA30314__GPCmut4
augggccagaucgugaccuucuuccaggaggucccccacgugaucgaggaggugaugaacaucguccugaucgcccucagcauccuggccgugcugaaggggcucuacaacaucgcgaccugcggccugaucgggcugaucacguuccuccugcugugcggccgcuccugcagcuccaaccucuacaaggggguguacgagcugcagagccuggaccucaacauggagacccugaacaugugcaugccgcuguccugcaccaagaacaacagccaccacuacauccgggucggcaacgacacgggccucgagcugacccugaccaacaccuccauccucaaccacaaguucugcaaccugagcgacgcccacaagaaggaccuguacgaccacgcccucauguccaucaucagcacguuccaccuguccauccccaacuucaaccaguacgaggccaugagcugcgacuucaacgggggcaagaucuccgugcaguacaaccugagccacuccuacgccaucgacgcggccaaccacugcgggaccguggccaacggcauccuccagaccuucaugcgcauggccuggggcgggagcuacaucgcgcuggacuccggccgggggaacugggacugcaucaugaccagcuaccaguaccugaucauccagaacacgaccugggagaaccacugccaguucucccgccccagccccaucggcuaccucgggcugcugagccagcggacccgcgacaucuacaucucccggcgccgccggggcaccuucacguggacccugagcgacuccgagggcaacgccacccccgggggcuacugccucacccgguggaugcugaucgaggccgagcugaagugcuucgggaacacggccgucgccaagugcaacgagaagcacgacgaggaguucugcgacaugcuccgccuguucgacuucugcaagcaggcgaucagccggcugaagucccccgcccagaugagcauccagcucaucaacaaggccgugaacgcccugaucaacgaccagcugaucaugaagaaccaccuccgcgacaucaugggcauccccuacugcaacuacuccaaguacugcuaccugaaccacaccaucaccgggaagaccagccugcccaagugcugccucguguccaacggcagcuaccugaacgagacgcacuucuccgacgacaucgagcagcaggccgacaacaugaucaccgagaugcugcagaaggaguacauggagcggcagggcaagaccccgcucgggcuggucgaccuguucguguucagcaccuccuucuaccugaucagcaucuuccuccgccuggugaagaucccgacgcaccggcacaucgucggcaagcccugccccaagccccaccgccugaaccacauggggaucugcuccugcggccucuacaagcagccgggggugcccgugcgguggaagcgcuga

SEQ ID NO: 26378 - RNA, 1473 nt, Artificial Sequence
  derived and/or modified CDS sequence (opt1) from LASV(Togo/2016/7082;Clade VI)__AMR44577__GPCmut4
augggccagaucaucaccuucuuccaggaggugccccacgucaucgaggaggugaugaacaucgugcugaucgcccucagccugcuggccauccucaagggggucuacaacguggcgaccugcggcaucaucgggcuggugacguuccuguuccucugcggccgcuccugcagccugaucuacaagggguccuacgagcugcagacccucgagcugaacauggagacccugaacaugugcaugccgcucagcugcacgaagaacuccagccaccacuacauccgggucggcaacgagaccggccuggagcugacccucaccaacacguccaucaucaaccacaaguucugcaaccugagcgacgcccacaagcgcaaccuguacgaccacgcccucauguccauccugagcaccuuccaccuguccauccccaacuucaaccaguacgaggccaugagcugcgacuucaacgggggcaagaucuccgugcaguacaaccucagccacgccuacgcgguggacgccgccgagcacugcgggaccgucgccaacggcgugcugcagaccuucaugcggauggcguggggcggguccuacaucgcccuggacagcggccgcgggaacugggacugcaucaugacguccuaccaguaccucaucauccagaacaccaccugggaggaccacugccaguucagccggcccucccccaucggcuaccuggggcugcucagccagcgcacccgggacaucuacaucagccgccggcgccggggcacguucaccuggacccucuccgacagcgagggcaacgagacccccgggggcuacugccugacgcgcuggaugcugaucgaggccgagcucaagugcuucgggaacaccgccguggccaagugcaacgagaagcacgacgaggaguucugcgacaugcugcggcuguucgacuucugcaagcaggcgauccagcgccucaagucccccgcccagaugagcauccagcugaucaacaaggccgucaacgcccugaucaacgaccagcucaucaugaagaaccaccuccgggacaugaugggcauccccuacugcaacuacuccaaguacugcuaccugaaccacaccagcuccgggcgcaccagccugcccaagugcugccugguguccaacggcagcuaccugaacgagacgcacuucuccgacgacaucgagcagcaggccgacaacaugaucaccgagaugcuccagaaggaguacaucgaccggcagggcaagaccccgcuggggcugguggaccucuucgucuucagcaccuccuucuaccugaucagcaucuuccugcaccugaucaagaucccgacgcaccgccacaucgugggcaagcccugccccaagccccaccggcucaaccacauggggaucugcuccugcggccuguacaagcagccgggggugcccacccgcuggaagcgguga

SEQ ID NO: 26379 - RNA, 1473 nt, Artificial Sequence
  derived and/or modified CDS sequence (opt1) from LASV(KAK-428;Clade n.d. (VII))__ANH09740__GPCmut4
augggccagaucgugaccuucuuccaggaggucccccacgugaucgaggaggugaugaacaucguccugaucgcccucagccugcuggccauccucaaggggcuguacaacuucgcgaccugcggcgugaucgggcugaucacguuccuccugcugugcggccgcuccugcagcgccaccuacaaggggcaguacgagcuccagacccuggagcugaacauggagucccucaacaugugcaugccgcugagcugcacgaagaacaacucccaccacuacauccgggccggcaacaacaccggccuggagcucacccugaccaacacgagcaucaucucccacaaguucugcaaccugagcgacgcccacaagaagaaccucuacgaccacacccugauguccaucaucaccaccuuccaccugagcauccccaacuucaaccaguacgaggccauguccugcgacuucaacgggggcaagaucagcauccaguacaaccucucccacagcuacgcgggggacgccgcccagcacugcggcacgguggccaacgggguccugcagaccuucaugcgcauggcguggggcggcuccuaccuggcccucgacagcgggcggcgcggcugggacugcaucaucuccagcuaccaguaccugaucauccagaacaccaccugggacgaccacugccaguucucccggcccagccccaucggguaccugggcuucgugagccagaagacgcgcgacaucuacaucucccggcgccgccggggcaccuucaccuggacccugagcgacuccgaggggcacgacaugccgggcggguacugccucacgcgguggaugcugaucgaggccgaccugaagugcuucggcaacaccgccguggccaagugcaacgagaagcacgacgaggaguucugcgacauguggcgccucuucgacuucugcaagcaggcgauccagcggcugaaggcccccgcccagaugaacauccagcugaucaacaaggccgucaacgcccucaucaacgaccagcugaugaugaagaaccaccuccgcgacaucauggggauccccuacugcaacuacagcaaguucugcuaccugaacaacaccaccacgggccggaccucccugccccgcugcugccugaucagcaacggcuccuaccucaacgagacccacuucagcgacgacaucgagcagcaggcggacaacaugaucaccgagaugcugcagaaggaguacauggaccggcaggggaagacgccccugggccucguggaccuguucguguucuccaccagcuucuaccugaucaccaucuuccuccaccuggucaagaucccgacccaccgccacaucguggggaagcccugccccaagccccaccggcugaaccacaugggcaucugcuccugcgggcuguacaagcagccgggcgugcccguccgcuggaagcgguga

SEQ ID NO: 26380 - RNA, 1473 nt, Artificial Sequence; identical to SEQ ID NO: 26374
  derived and/or modified CDS sequence (opt1) from LASV(Pinneo-NIG-1969;Clade I)__AIT17836__GPCmut4

SEQ ID NO: 26381 - RNA, 1473 nt, Artificial Sequence
  derived and/or modified CDS sequence (opt1) from LASV(ISTH0009-NIG-2011;Clade II)__AIT17404__GPCmut4
augggccagaucaucaccuucuuccaggaggugccccacgucaucgaggaggugaugaacaucgugcugaucgcccucagccugcuggccauccucaaggggaucuacaacgucgcgaccugcggccuguucgggcugguguccuuccuccugcugugcggccgcagcugcuccacgaccuacaaggggguguacgagcuccagacccuggagcuggacauggccagccucaacaugugcaugccgcuguccugcacgaagaacaacagccaccacuacaucauggucggcaacgagaccggccuggagcucacccugaccaacacguccaucaucaaccacaaguucugcaaccugagcgacgcccacaagaagaaccucuacgaccacgcccugauguccaucaucagcaccuuccaccuguccauccccaacuucaaccaguacgaggccaugagcugcgacuucaacgggggcaagaucuccgugcaguacaaccucagccacgcguacgccguggacgccgccaaccacugcgggaccaucgcgaacggcguccugcagaccuucaugcggauggccuggggcggguccuacaucgcccuggacagcggcaagggguccugggacugcaucaugacgagcuaccaguaccucaucauccagaacaccaccugggaggaccacugccaguucucccgccccagccccaucggcuaccuggggcugcucagccagcggacccgcgacaucuacaucucccggcgccgccggggcacguucaccuggacccucagcgacuccgagggcaacgagacccccgggggcuacugccugacgcgguggaugcugaucgaggccgagcucaagugcuucgggaacaccgccguggcgaagugcaacgagaagcacgacgaggaguucugcgacaugcugcgccuguucgacuucugcaagcaggccauccggcgccucaagacccccgcccagaugagcauccagcugaucaacaaggccgugaacgcccugaucaacgaccagcucaucaugaagaaccaccuccgggacaucaugggcaucccguacugcaacuacuccaaguacugcuaccugaaccacaccgucacggggaagaccagccugccccgcugcugccugguguccaacggcagcuaccugaacgagacccacuucuccgacgacaucgagcagcaggcggacaacaugaucaccgagcuccugcagaaggaguacauggaccggcagggcaagacgccccuggggcucguggaccuguucgucuucagcaccuccuucuaccugaucagcaucuuccugcaccucaucaagaucccgacccaccgccacaucaccggcaagcccugccccaagccccaccggcugaaccacauggggaucugcuccugcggccuguacaagcacccgggggugcccgugaaguggaagcgcuga

SEQ ID NO: 26382 - RNA, 1473 nt, Artificial Sequence
  derived and/or modified CDS sequence (opt1) from LASV(ISTH2010-NIG-2012;Clade II)__AIT17482__GPCmut4
augggccagaucaucaccuucuuccaggaggugccccacgucaucgaggaggugaugaacaucgugcugaucgcccucagccugcuggccauccucaaggggaucuacaacgucgcgaccugcggccuguucgggcugguguccuuccuccugcugugcggccgcagcugcuccacgaccuacaaggggguguacgagcuccagacccuggagcuggacauggccagccucaacaugugcaugccgcuguccugcacgaagaacaacagccaccacuacaucauggucggcaacgagaccggccuggagcucacccugaccaacacguccaucaucaaccacaaguucugcaaccugagcgacgcccacaagaagaaccucuacgaccacgcccugauguccaucaucagcaccuuccaccuguccauccccaacuucaaccaguacgaggccaugagcugcgacuucaacgggggcaagaucuccgugcaguacaaccucagccacgcguacgccguggacgccgccaaccacugcgggaccaucgcgaacggcguccugcagaccuucaugcggauggccuggggcggguccuacaucgcccuggacagcggcaagggguccugggacugcaucaugacgagcuaccaguaccucaucauccagaacaucaccugggaggaccacugccaguucucccgccccagccccaucggcuaccuggggcugcucagccagcggacccgcgacaucuacaucucccggcgccgccggggcaccuucacguggacccucagcgacuccgagggcaacgagacccccgggggcuacugccugacccgguggaugcugaucgaggccgagcucaagugcuucgggaacacggccguggcgaagugcaacgagaagcacgacgaggaguucugcgacaugcugcgccuguucgacuucugcaagcaggccauccggcgccucaagacccccgcccagaugagcauccagcugaucaacaaggccgugaacgcccugaucaacgaccagcucaucaugaagaaccaccuccgggacaucaugggcauccccuacugcaacuacuccaaguacugcuaccugaaccacaccgucaccgggaagacgagccugccccgcugcugccugguguccaacggcagcuaccugaacgagacccacuucuccgacgacaucgagcagcaggcggacaacaugaucaccgagcuccugcagaaggaguacaucgaccggcagggcaagaccccgcuggggcucguggaccuguucgucuucagcacguccuucuaccugaucagcaucuuccugcaccucgugaagaucccgacccaccgccacguggucggcaagcccugccccaagccccaccggcugaaccacauggggaucugcuccugcggccuguacaagcacccgggggugcccgugaaguggaagcgcuga

SEQ ID NO: 26383 - RNA, 1473 nt, Artificial Sequence
  derived and/or modified CDS sequence (opt1) from LASV(Lassa virus/H.sapiens-wt/NGA/2015/ISTH_0543;Clade II)__AVO03639__GPCmut4
augggccagaucaucaccuucuuccaggaggugccccacgucaucgaggaggugaugaacaucgugcugaucgcccucagccugcuggccauccucaaggggaucuacaacgucgcgaccugcggccuguucgggcugguguccuuccuccugcugugcggccgcagcugcuccacgaccuacaaggggguguacgagcuccagacccuggagcuggacauggccaaccucaacaugugcaugccgcugagcugcacgaagaacaacucccaccacuacaucauggucggcaacgagaccggccuggagcucacccugaccaacacgagcaucaucaaccacaaguucugcaaccuguccgacgcccacaagaagaaccucuacgaccacgcccugaugagcaucaucuccaccuuccaccugagcauccccaacuucaaccaguacgaggccauguccugcgacuucaacgggggcaagaucagcgugcaguacaaccucucccacaccuacgcgguggacgccgccaaccacugcgggaccaucgccaacggcguccugcagacguucaugcggauggcguggggcgggagcuacaucgcccuggacuccggcaaggggagcugggacugcaucaugaccuccuaccaguaccucgugauccagaacaccaccugggaggaccacugccaguucagccgccccucccccaucggcuaccuggggcugcucagccagcggacgcgcgacaucuacaucagccggcgccgccggggcaccuucaccuggacccucuccgacagcgagggcaacgagacgcccgggggcuacugccugacccgguggaugcugaucgaggccgagcucaagugcuucgggaacaccgccguggccaagugcaacgagaagcacgacgaggaguucugcgacaugcugcgccuguucgacuucugcaagcaggcgauccggcgccucaagacccccgcccagauguccauccagcugaucaacaaggccgucaacgcccugaucaacgaccagcucaucaugaagaaccaccuccgggacaucaugggcauccccuacugcaacuacagcaaguacugcuaccugaaccacacggugaccgggaagaccucccugccccgcugcugccuggugagcaacggcuccuaccugaacgagacccacuucagcgacgacaucgagcagcaggccgacaacaugaucacggagcuccugcagaaggaguacaucgaccggcagggcaagaccccgcuggggcucgucgaccuguucguguucuccaccagcuucuaccugaucuccaucuuccugcaccucgugaagaucccgacccaccgccacaucacgggcaagcccugccccaagccccaccggcugaaccacauggggaucugcagcugcggccuguacaagcacccggggguccccgugaaguggaagcgcuga

SEQ ID NO: 26384 - RNA, 1473 nt, Artificial Sequence
  derived and/or modified CDS sequence (opt1) from LASV(Lassa virus/H.sapiens-wt/NGA/2016/ISTH_0009;Clade II)__AVO03571__GPCmut4
augggccagaucaucaccuucuuccaggaggugccccacgucaucgaggaggugaugaacaucgugcugaucgcccucagccugcuggccauccucaaggggaucuacaacgucgcgaccugcggccugcuggggcucguguccuuccugcugcucugcggccgcagcugcuccacgaccuacaaggggguguacgagcugcagacccuggagcucgacauggccagccugaacaugugcaugccgcuguccugcacgaagaacaacagccaccacuacaucauggucggcaacgagaccggccucgagcugacccugaccaacacguccaucaucaaccacaaguucugcaaccucagcgacgcccacaagaagaaccuguacgaccacgcccugauguccaucaucagcaccuuccaccucuccauccccaacuucaaccaguacgaggccaugagcugcgacuucaacgggggccggaucuccgugcaguacaaccugagccacuccuacgcgguggacgccgccaaccacugcgggaccaucgccaacggcguccugcagaccuucaugcgcauggcguggggcgggagcuacaucgcccucgacuccggcaaggggagcugggacugcaucaugacguccuaccaguaccugaucauccagaacaccaccugggaggaccacugccaguucagccggcccagccccaucggcuaccuggggcuccugucccagcgcacccgggacaucuacaucagccgccggcgccggggcacguucaccuggacccuguccgacagcgagggcaacgagacccccgggggcuacugccugacgcgcuggaugcucaucgaggccgagcugaagugcuucgggaacaccgccguggccaagugcaacgagaagcacgacgaggaguucugcgacaugcugcggcuguucgacuucugcaagcaggcgauccgccggcugaagacccccgcccagauguccauccagcugaucaacaaggccgugaacgcccucaucaacgaccagcugaucaugaagaaccaccuccgcgacaucaugggcaucccguacugcaacuacagcaaguacugcuaccucaaccacaccgucacggggaagaccucccugccccggugcugccuggugagcaacggcuccuaccucaacgagacccacuucagcgacgacaucgagcagcaggccgacaacaugaucaccgagcugcugcagaaggaguacaucgaccgccagggcaagacgccccucgggcugguggaccuguucgucuucuccaccagcuucuaccugaucuccaucuuccuccaccuggugaagaucccgacccaccggcacaucaccggcaagcccugccccaagccccaccgccugaaccacauggggaucugcagcugcggccucuacaaccacccgggggugcccgucaaguggaagcgguga

SEQ ID NO: 26385 - RNA, 1473 nt, Artificial Sequence
  derived and/or modified CDS sequence (opt1) from LASV(Lassa virus/H.sapiens-wt/NGA/2016/ISTH_0017;Clade II)__AVO03567__GPCmut4
augggccagaucaucaccuucuuccaggaggugccccacgucaucgaggaggugaugaacaucgugcugaucgcccucagccugcuggccauccucaaggggaucuacaacgucgcgaccugcggccuguucgggcugguguccuuccuccugcugugcggccgcagcugcuccacgaccuacaaggggguguacgagcuccagacccuggagcuggacauggccagccucaacaugugcaugccgcuguccugcacgaagaacaacagccaccacuacaucauggucggcaacgagaccggccuggagcucacccugaccaacacguccaucaucaaccacaaguucugcaaccugagcgacgcccacaagaagaaccucuacgaccacgcccugauguccaucaucagcaccuuccaccuguccauccccaacuucaaccaguacgaggccaugagcugcgacuucaacgggggcaagaucuccgugcaguacaaccucagccacaccuacgcgaucgacgccgccaaccacugcgggaccaucgccaacggcgugcugcagacguucaugcggauggcguggggcggguccuacaucgcccuggacagcggcaagggguccugggacugcaucaugaccagcuaccaguaccucaucauccagaacaccaccugggaggaccacugccaguucucccgccccagccccaucggcuaccuggggcugcucagccagcggacgcgcgacaucuacaucucccggcgccgccggggcaccuucaccuggacccucagcgacuccgagggcaacgagacgcccgggggcuacugccugacccgguggaugcugaucgaggccgagcucaagugcuucgggaacaccgccgucgccaagugcaacgagaagcacgacgaggaguucugcgacaugcugcgccuguucgacuucugcaagcaggcgauccggcgccucaagacccccgcccagaugagcauccagcugaucaacaaggccgugaacgcccugaucaacgaccagcucaucaugaagaaccaccuccgggacaucaugggcauccccuacugcaacuacuccaaguacugcuaccugaaccacacggugaccgggaagaccagccugccccgcugcugccuggucuccaacggcagcuaccugaacgagacccacuucuccgacgacaucgagcagcaggccgacaacaugaucacggagcuccugcagaaggaguacauggaccggcagggcaagaccccgcuggggcucguggaccuguucguguucagcaccuccuucuaccugaucagcaucuuccugcaccucguccgcaucccgacccaccggcacgugaucggcaagcccugccccaagccccaccgccugaaccacauggggaucugcuccugcggccuguacaagcacccgggggugcccgucaaguggaagcgguga

SEQ ID NO: 26386 - RNA, 1473 nt, Artificial Sequence
  derived and/or modified CDS sequence (opt1) from LASV(Lassa virus/H.sapiens-wt/NGA/2018/ISTH_0959;Clade II)__AVV65099__GPCmut4
augggccagaucaucaccuucuuccaggaggugccccacgucaucgaggaggugaugaacaucgugcugaucgcccucagccugcuggccauccucaaggggaucuacaacgucgugaccugcggccuguucgggcugguguccuuccuccugcugugcggccgcagcugcuccacgaccuacaagggggucuacgagcuccagacccuggagcuggacauggcgagccucaacaugugcaugccgcuguccugcacgaagaacaacagccaccacuacaucauggugggcaacgagaccggccuggagcucacccugaccaacacguccaucaucaaccacaaguucugcaaccugagcgacgcccacaagaagaaccucuacgaccacgcccugauguccaucaucagcaccuuccaccuguccauccccaacuucaaccaguacgaggccaugagcugcgacuucaacgggggcaagaucuccgugcaguacaaccucagccacgccuacgcgaucgacgccgccaaccacugcgggaccaucgccaacggcguccugcagaccuucaugcggauggcguggggcggguccuacaucgcccuggacagcggcaagggguccugggacugcaucaugacgagcuaccaguaccucaucauccagaacaccaccugggaggaccacugccaguucucccgccccagccccaucggcuaccuggggcugcucagccagcggacccgcgacaucuacaucucccggcgccgccggggcacguucaccuggacccucagcgacuccgagggcaacgagacccccgggggcuacugccugacgcgguggaugcugaucgaggccgagcucaagugcuucgggaacaccgccguggccaagugcaacgagaagcacgacgaggaguucugcgacaugcugcgccuguucgacuucugcaagcaggcgauccggcgccucaagacccccgcccagaugagcauccagcugaucaacaaggccgugaacgcccugaucaacgaccagcucaucaugaagaaccaccuccgggacaucaugggcaucccguacugcaacuacuccaaguacugcuaccugaaccacaccgucacggggaagaccagccugccccgcugcugccugguguccaacggcagcuaccugaacgagacccacuucuccgacgacaucgagcagcaggccgacaacaugaucaccgagcuccugcagaaggaguacaucgaccggcagggcaagacgccccuggggcucguggaccuguucgucuucagcaccuccuucuaccugaucagcaucuuccugcaccucgugaagaucccgacccaccgccacgugaucggcaagcccugccccaagccccaccggcugaaccacauggggaucugcuccugcggccuguacaagcacccggggguccccgugaaguggaagcgcuga

SEQ ID NO: 26387 - RNA, 1473 nt, Artificial Sequence
  derived and/or modified CDS sequence (opt1) from LASV(LASV003-NIG-2008;Clade II)__AIT17580__GPCmut4
augggccagaucaucaccuucuuccaggaggugccccacgucaucgaggaggugaugaacaucgugcugaucgcccucagccugcuggccauccucaaggggaucuacaacgucgcgaccugcggccuguucgggcugguguccuuccuccugcugugcggccgcagcugcuccacgaccuacaaggggguguacgagcuccagacccuggagcuggacauggccagccucaacaugugcaugccgcuguccugcacgaagaacaacagccaccacuacaucauggucggcaacgagaccggccuggagcucacccugaccaacacguccaucaucaaccacaaguucugcaaccugagcgacgcccacaagaagaaccucuacgaccacgcccugauguccaucaucagcaccuuccaccuguccauccccaacuucaaccaguacgaggccaugagcugcgacuucaacgggggcaagaucuccgugcaguacaaccucagccacaccuacgcgguggacgccgccaaccacugcgggaccaucgccaacggcguccugcagacguucaugcggauggcguggggcggguccuacaucgcccuggacagcggcaagggguccugggacugcaucaugaccagcuaccaguaccucaucauccagaacaccaccugggaggaccacugccaguucucccgccccagccccaucggcuaccuggggcugcucagccagcggacgcgcgacaucuacaucucccggcgccgccggggcaccuucaccuggacccucagcgacuccgagagcaacgagacgccgggcggguacugccugacccgguggaugcugaucgaggccgagcucaagugcuucggcaacaccgccguggccaagugcaacgagaagcacgacgaggaguucugcgacaugcugcgccuguucgacuucugcaagcaggcgauccggcgccucaaggcccccgcccagauguccauccagcugaucaacaaggccgugaacgcccugaucaacgaccagcucaucaugaagaaccaccuccgggacaucauggggauccccuacugcaacuacagcaaguacugcuaccugaaccacaccgucacgggccgcaccucccugccccggugcugccuggugagcaacggguccuaccugaacgagacccacuucagcgacgacaucgagcagcaggcggacaacaugaucaccgagcuccugcagaaggaguacauggaccgccagggcaagacgccccugggccucguggaccuguucgucuucuccaccagcuucuaccugaucuccaucuuccugcaccucgugaagaucccgacccaccggcacgugaucgggaagcccugccccaagccccaccgccugaaccacaugggcaucugcagcugcgggcuguacaagcacccgggcguccccgugaaguggaagcgguga

SEQ ID NO: 26388 - RNA, 1473 nt, Artificial Sequence
  derived and/or modified CDS sequence (opt1) from LASV(LASV035-NIG-2009;Clade II)__AIT17588__GPCmut4
augggccagaucaucaccuucuuccaggaggugccccacgucaucgaggaggugaugaacaucgugcugaucgcccucagccugcuggccauccucaaggggaucuacaacgucgcgaccugcggccuguucgggcugguguccuuccuccugcugugcggccgcagcugcuccacgaccuacaaggggguguacgagcuccagacccuggagcuggacauggccagccucaacaugugcaugccgcuguccugcacgaagaacaacagccaccacuacaucauggucggcaacgagaccggccuggagcucacccugaccaacacguccaucaucaaccacaaguucugcaaccugagcgacgcccacaagaagaaccucuacgaccacgcccugauguccaucaucagcaccuuccaccuguccauccccaacuucaaccaguacgaggccaugagcugcgacuucaacgggggcaagaucuccgugcaguacaaccucagccacgcguacgccguggacgccgccaaccacugcgggaccaucgcgaacggcguccugcagaccuucaugcggauggccuggggcggguccuacaucgcccuggacagcggcaagggguccugggacugcaucaugacgagcuaccaguaccucaucauccagaacaccaccugggaggaccacugccaguucucccgccccagccccaucggcuaccuggggcugcucagccagcggacccgcgacaucuacaucucccggcgccgccggggcacguucaccuggacccucagcgacuccgagggcaacgagacccccgggggcuacugccugacgcgguggaugcugaucgaggccgagcucaagugcuucgggaacaccgccguggcgaagugcaacgagaagcacgacgaggaguucugcgacaugcugcgccuguucgacuucugcaagcaggccauccggcgccucaaggcccccgcccagaugagcauccagcugaucaacaaggccgugaacgcgcugaucaacgaccagcucaucaugaagaaccaccuccgggacaucaugggcauccccuacugcaacuacuccaaguacugcuaccugaaccacaccgucaccgggaagacgagccugccccgcugcugccugguguccaacggcagcuaccugaacgagacccacuucuccgacgacaucgagcagcaggccgacaacaugaucaccgagcuccugcagaaggaguacaucgaccggcagggcaagaccccgcuggggcucguggaccuguucgucuucagcacguccuucuaccugaucagcaucuuccugcaccucgugaagaucccgacccaccgccacgugaucggcaagcccugccccaagccccaccggcugaaccacauggggaucugcuccugcggccuguacaagcacccggggguccccgugaaguggaagcgcuga

SEQ ID NO: 26389 - RNA, 1473 nt, Artificial Sequence
  derived and/or modified CDS sequence (opt1) from LASV(LASV1000-NIG-2009;Clade II)__AIT17782__GPCmut4
augggccagaucaucaccuucuuccaggaggugccccacgucaucgaggaggugaugaacaucgugcugaucgcccucagccugcuggccauccucaaggggaucuacaacgucgcgaccugcggccuguucgggcugguguccuuccuccugcugugcggccgcagcugcuccacgaccuacaaggggguguacgagcuccagacccuggagcuggacauggccagccucaacaugugcaugccgcuguccugcacgaagaacaacagccaccacuacaucauggucggcaacgagaccggccuggagcucacccugaccaacacguccaucaucaaccacaaguucugcaaccugagcgacgcccacaagaagaaccucuacgaccacgcccugauguccaucaucagcaccuuccaccuguccauccccaacuucaaccaguacgaggccaugagcugcgacuucaacgggggcaagaucuccgugcaguacaaccucagccacaccuacgcgguggacgccgccaaccacugcgggaccaucgccaacggcguccugcagacguucaugcggauggcguggggcggguccuacaucgcccuggacagcggcaagggguccugggacugcaucaugaccagcuaccaguaccucaucauccagaacaccaccugggaggaccacugccaguucucccgccccagccccaucggcuaccuggggcugcucagccagcggacgcgcgacaucuacaucucccggcgccgccggggcaccuucaccuggacccucagcgacuccgagggcaacgagacgcccgggggcuacugccugacccgguggaugcugaucgaggccgagcucaagugcuucgggaacaccgccguggccaagugcaacgagaagcacgacgaggaguucugcgacaugcugcgccuguucgacuucugcaagcaggcgaucaagcggcucaagacccccgcccagaugagcauccagcugaucaacaaggccgugaacgcccugaucaacgaccagcucaucaugaagaaccaccuccgcgacaucaugggcauccccuacugcaacuacuccaaguacugcuaccugaaccacacggucaccgggaagaccagccugccccggugcugccugguguccaacggcagcuaccugaacgagacccacuucuccgacgacaucgagcagcaggccgacaacaugaucacggagcuccugcagaaggaguacaucgaccgccagggcaagaccccgcuggggcucguggaccuguucgucuucagcaccuccuucuaccugaucagcaucuuccugcaccucgugaagaucccgacccaccggcacguggucggcaagcccugccccaagccccaccgccugaaccacauggggaucugcuccugcggccuguacaagcacccgggggugcccgugaaguggaagcgguga

SEQ ID NO: 26390 - RNA, 1473 nt, Artificial Sequence
  derived and/or modified CDS sequence (opt1) from LASV(LASV221-NIG-2010;Clade II)__AIT17624__GPCmut4
augggccagaucaucaccuucuuccaggaggugccccacgucaucgaggaggugaugaacaucgugcugaucgcccucagccugcuggccauccucaaggggaucuacaacgucgcgaccugcggccuguucgggcugguguccuuccuccugcugugcggccgcagcugcuccacgaccuacaaggggguguacgagcuccagacccuggagcuggacauggccagccucaacaugugcaugccgcuguccugcacgaagaacaacagccaccacuacaucauggucggcaacgagaccggccuggagcucacccugaccaacacguccaucaucaaccacaaguucugcaaccugagcgacgcccacaagaagaaccucuacgaccacgcccugauguccaucaucagcaccuuccaccuguccauccccaacuucaaccaguacgaggccaugagcugcgacuucaacgggggcaagaucuccgugcaguacaaccucagccacaccuacgcgaucgacgccgccaaccacugcgggaccaucgccaacggcgugcugcagacguucaugcggauggcguggggcggguccuacaucgcccuggacagcggcaagggguccugggacugcaucaugaccagcuaccaguaccucaucauccagaacaccaccugggaggaccacugccaguucucccgccccagccccaucggcuaccuggggcugcucagccagcggacgcgcgacaucuacaucucccggcgccgccggggcaccuucaccuggacccucagcgacuccgagggcaacgagacgcccgggggcuacugccugacccgguggaugcugaucgaggccgagcucaagugcuucgggaacaccgccgucgccaagugcaacgagaagcacgacgaggaguucugcgacaugcugcgccuguucgacuucugcaagcaggcgauccggcgccucaagacccccgcccagaugagcauccagcugaucaacaaggccgugaacgcccugaucaacgaccagcucaucaugaagaaccaccuccgggacaucaugggcauccccuacugcaacuacuccaaguacugcuaccugaaccacacggugaccgggaagaccagccugccccgcugcugccuggucuccaacggcagcuaccugaacgagacccacuucuccgacgacaucgagcagcaggccgacaacaugaucacggagaugcuccagaaggaguacauggaccggcagggcaagaccccgcuggggcugguggaccucuucguguucagcaccuccuucuaccugaucagcaucuuccugcaccuggucaagaucccgacccaccgccacgugaucggcaagcccugccccaagccccaccggcucaaccacauggggaucugcuccugcggccuguacaagcacccgggggugcccgucaaguggaagcgcuga

SEQ ID NO: 26391 - RNA, 1473 nt, Artificial Sequence
  derived and/or modified CDS sequence (opt1) from LASV(LASV237-NIG-2010;Clade II)__AIT17638__GPCmut4
augggccagaucaucaccuucuuccaggaggugccccacgucaucgaggaggugaugaacaucgugcugaucgcccucagccugcuggccauccucaaggggaucuacaacgucgcgaccugcggccuguucgggcugguguccuuccuccugcugugcggccgcagcugcuccacgaccuacaaggggguguacgagcuccagacccuggagcuggacauggccagccucaacaugugcaugccgcuguccugcacgaagaacaacagccaccacuacaucauggucggcaacgagaccggccuggagcucacccugaccaacacguccaucaucaaccacaaguucugcaaccugagcgacgcccacaagaaggaccucuacgaccacgcccugauguccaucaucagcaccuuccaccuguccauccccaacuucaaccaguacgaggccaugagcugcgacuucaacgggggcaagaucuccgugcaguacaaccucagccacaccuacgcgguggacgccgccaaccacugcgggaccaucgccaacggcguccugcagacguucaugcggauggcguggggcggguccuacaucgcccuggacagcggcaagggguccugggacugcaucaugaccagcuaccaguaccucaucauccagaacaccaccugggaggaccacugccaguucucccgccccagccccaucggcuaccuggggcugcucagccagcggacgcgcgacaucuacaucucccggcgccgccggggcaccuucaccuggacccucagcgacuccgagggcaacgagacgcccgggggcuacugccugacccgguggaugcugaucgaggccgagcucaagugcuucgggaacaccgccguggccaagugcaacgagaagcacgacgaggaguucugcgacaugcugcgccuguucgacuucugcaagcaggcgauccggcgccucaagacccccgcccagaugagcauccagcugaucaacaaggccgugaacgcccugaucaacgaccagcucaucaugaagaaccaccuccgggacaucaugggcauccccuacugcaacuacuccaaguacugcuaccugaaccacacggucaccgggaagaccagccugccccgcugcugccugguguccaacggcagcuaccugaacgagacccacuucuccgacgacaucgagcagcaggccgacaacaugaucacggagcuccugcagaaggaguacauggaccggcagggcaagaccccgcuggggcucguggaccuguucgucuucagcaccuccuucuaccugaucagcaucuuccugcaccucaucaagaucccgacccaccgccacaucacgggcaagcccugccccaagccccaccggcugaaccacauggggaucugcuccugcggccuguacaagcacccgggggugcccgugaaguggaagcgcuga

SEQ ID NO: 26392 - RNA, 1473 nt, Artificial Sequence
  derived and/or modified CDS sequence (opt1) from LASV(LASV253-NIG-2011;Clade II)__AIT17670__GPCmut4
augggccagaucaucaccuucuuccaggaggugccccacgucaucgaggaggugaugaacaucgugcugaucgcccucagccugcuggccauccucaaggggaucuacaacgucgcgaccugcggccuguucgggcugguguccuuccuccugcugugcggccgcagcugcuccacgaccuacaaggggguguacgagcuccagacccuggagcuggacauggccagccucaacaugugcaugccgcuguccugcacgaagaacaacagccaccacuacaucauggucggcaacgagaccggccuggagcucacccugaccaacacguccaucaucaaccacaaguucugcaaccugagcgacgcccacaagaagaaccucuacgaccacgcccugauguccaucaucagcaccuuccaccuguccauccccaacuucaaccaguacgaggccaugagcugcgacuucaacgggggcaagaucuccgugcaguacaaccucagccacaccuacgcgguggacgccgccaaccacugcgggaccaucgccaacggcguccugcagacguucaugcggauggcguggggcggguccuacaucgcccuggacagcggcaagggguccugggacugcaucaugaccagcuaccaguaccucaucauccagaacaccaccugggaggaccacugccaguucucccgccccagccccaucggcuaccuggggcugcucagccagcggacgcgcgacaucuacaucucccggcgccgccggggcaccuucaccuggacccucagcgacuccgagggcaacgagacgcccgggggcuacugccugacccgguggaugcugaucgaggccgagcucaagugcuucgggaacaccgccguggccaagugcaacgagaagcacgacgaggaguucugcgacaugcugcgccuguucgacuucugcaagcaggcgauccggcgccucaaggcccccgcccagaugagcauccagcugaucaacaaggccgugaacgcccugaucaacgaccagcucaucaugaagaaccaccuccgggacaucaugggcaucccguacugcaacuacuccaaguacugcuaccugaaccacaccgucacggggcgcaccagccugccccggugcugccugguguccaacggcagcuaccugaacgagacccacuucuccgacgacaucgagcagcaggcggacaacaugaucaccgagcuccugcagaaggaguacaucgaccgccagggcaagacgccccuggggcucguggaccuguucgucuucagcaccuccuucuaccugaucagcaucuuccugcaccucgugaagaucccgacccaccggcacaucaucggcaagcccugccccaagccccaccgccugaaccacauggggaucugcuccugcggccuguacaagcacccgggggugcccgucaaguggaagcgguga

SEQ ID NO: 26393 - RNA, 1473 nt, Artificial Sequence
  derived and/or modified CDS sequence (opt1) from LASV(LASV254-NIG-2011;Clade II)__AIT17674__GPCmut4
augggccagaucaucaccuucuuccaggaggugccccacgucaucgaggaggugaugaacaucgugcugaucgcccucagccugcuggccauccucaaggggaucuacaacgucgcgaccugcggccuguucgggcugguguccuuccuccugcugugcggccgcagcugcuccacgaccuacaaggggguguacgagcuccagacccuggagcuggacaugaccaaccucaacaugugcaugccgcugagcugcaccaagaacaacucccaccacuacaucauggucggcaacgagaccggccuggagcucacccugacgaacaccagcaucaucaaccacaaguucugcaaccuguccgacgcccacaagaagaaccucuacaaccacgcccugaugagcaucaucuccaccuuccaccugagcauccccaacuucaaccaguacgaggccauguccugcgacuucaacgggggcaagaucagcgugcaguacaaccucucccacagcuacgccguggacgcggccaaccacugcgggaccaucgccaacggcguccugcagacguucaugcggauggccuggggcggguccuacaucgcgcuggacagcggcaaggggaacugggacugcaucaugaccuccuaccaguaccucaucauccagaacaccaccugggaggaccacugccaguucagccgccccucccccaucggcuaccuggggcugcucagccagcggacgcgcgacaucuacaucagccggcgccgccggggcaccuucaccuggacccucuccgacagcgagggcaacgagacgcccgggggcuacugccugacccgguggaugcugaucgaggccgagcucaagugcuucgggaacaccgccguggccaagugcaacgagaagcacgacgaggaguucugcgacaugcugcgccuguucgacuucugcaagcaggccauccggcgccucaagacccccgcgcaggccaacauccagcugaucaacaaggccgugaacgcccugaucaacgaccagcucaucaugaagaaccaccuccgggacaucaugggcauccccuacugcaacuacuccaaguacugcuaccugaaccacacggucaccgggaagaccagccugccccgcugcugccugguguccaacggcagcuaccugaacgagacccacuucuccgacgacaucgagcagcaggccgacaacaugaucacggagcuccugcagaaggaguacauggaccggcagggcaagaccccgcuggggcucguggaccuguucgucuucagcaccuccuucuaccugaucagcaucuuccugcaccucgugaagaucccgacccaccgccacgugaucggcaagcccugccccaagccccaccggcugaaccacauggggaucugcuccugcggccuguacaagcacccggggguccccgugaaguggaagcgcuga

SEQ ID NO: 26394 - RNA, 1473 nt, Artificial Sequence
  derived and/or modified CDS sequence (opt1) from LASV(Nig08-A19;Clade III)__ADU56618__GPCmut4
augggccagaucgugaccuucuuccaggaggucccccacgugaucgaggaggugaugaacaucguccugaucgcccucagcauccuggccauccugaaggggcucuacaacaucgcgaccugcggccugaucgggcuggugacguuccuccugcuguccggccgcagcugcuccaugaccuacaaggggguguacgagcuccagacccuggagcugaacaugaacacccucaacaugugcaugccgcugagcugcaccaagaacaacucccaccacuacaucauggucggcaacgagaccggccuggagcucacccugacgaacaccagccugcuccaccacaaguucugcaaccuguccgacgcccacaagaagaaccuguacgaccacacccucaugagcaucaucuccaccuuccaccugagcauccccaacuucaaccaguacgaggccauguccugcgacuucaacgggggcaagaucacggugcaguacaaccugagccacuccuacgccaucgacgccgcgaaccacugcgggaccguggccaacggcguccuccagaccuucaugcggauggccuggggcgggagcuacaucgcccuggacuccggccgcgggaagugggacugcaucaugaccagcuaccaguaccugaucauccagaacacgaccugggaggaccacugccaguucucccggcccagccccaucggcuaccucgggcugcugucccagcgcacccgggacaucuacaucagccgccggcgccggggcaccuucacguggacccugagcgacuccgagggcaacgagacccccgggggcuacugccucacccgcuggaugcugaucgaggcggagcugaagugcuucgggaacacggccguggccaagugcaacgagaagcacgacgaggaguucugcgacaugcuccggcuguucgacuucugcaagcaggccauccgccggcugaaggcccccgcgcagaugagcauccagcucaucaacaaggccgugaacgcccugaucaacgaccagcugaucaugaagaaccaccuccgcgacaucaugggcauccccuacugcaacuacuccaaguacugcuaccugaaccacaccagcaccgggcggaccucccugccccgcugcugccucgucagcaacggcuccuaccugaacgagacgcacuucagcgacgacaucgagcagcaggccgacaacaugaucaccgagaugcugcagaaggaguaccucgaccggcagggcaagaccccgcuggggcugguggaccuguucguguucuccaccagcuucuaccucaucuccaucuuccugcaccuggucaagaucccgacgcaccgccacaucgugggcaagcccugccccaagccccaccggcucaaccacauggggaucugcagcugcggccuguacaagcagccgggggugcccguccgcuggaagcgguga

SEQ ID NO: 26395 - RNA, 1476 nt, Artificial Sequence
  derived and/or modified CDS sequence (opt1) from LASV(G1180-SLE-2010;Clade IV)__AIT17168__GPCmut4
augggccagaucgugaccuucuuccaggaggucccccacgugaucgaggaggugaugaacaucguccugaucgcccucagcauccuggccgugcugaaggggcucuacaacuucgcgaccugcggccugguggggcugcucaccuuccugcugcucugcggccgcuccugcaccgccagccgguacaagggggucuacgagcugcagacccuggagcucaacauggagacccugaacaugugcaugccgcuguccugcaccaagaacaacagccaccacuacaucauggugggcaacgagaccggccucgagcugacccugacgaacaccuccaucaucaaccacaaguucugcaaccucagcgacgcccacaagaagaaccuguacgaccacgcccugauguccaucaucagcaccuuccaccucuccauccccaacuucaaccaguacgaggccaugagcugcgacuucaacgggggcaagaucuccgugcaguacaaccugagccacuccuacgcgggggacgccgccaaccacugcggcaccgucgccaacggggugcugcagacguucaugcgcauggcguggggcggcagcuacaucgcccucgacuccgggcacggcagcugggacugcaucaugaccuccuaccaguaccugaucauccagaacaccaccugggaggaccacugccaguucagccggcccucccccaucggguaccugggccuccugagccagcgcacgcgggacaucuacaucagccgccggcgccggggcaccuucaccuggacccuguccgacagcgaggggaaggacacgccgggcggguacugccugacccgcuggaugcucaucgaggccgagcugaagugcuucggcaacaccgccguggccaagugcaacgagaagcacgacgaggaguucugcgacaugcugcggcuguucgacuucugcaagcaggcgauccagcgccugaaggcccccgcccagauguccauccagcugaucaacaaggccgucaacgcccucaucaacgaccagcugaucaugaagaaccaccuccgggacaucauggggauccccuacugcaacuacagcaaguacugcuaccucaaccacaccacgaccggcaagaccucccugcccaagugcugccuggugagcaacggcuccuaccucaacgagacccacuucagcgacgacaucgagcagcaggcggacaacaugaucacggagaugcugcagaaggaguacauggagcgccaggggaagacgccccugggccucguggaccuguucgucuucuccaccagcuucuaccugaucuccaucuuccugcaccucgugaagaucccgacccaccggcacaucgugggcaagagcugccccaagccccaccgccugaaccacauggggaucugcuccugcgggcuguacaagcagcccggcgucccggugaaguggaagcgguga

SEQ ID NO: 26396 - RNA, 1476 nt, Artificial Sequence
  derived and/or modified CDS sequence (opt1) from LASV(G1442-SLE-2011;Clade IV)__AIT17180__GPCmut4
augggccagaucgugaccuucuuccaggaggucccccacgugaucgaggaggugaugaacaucguccugaucgcccucagcauccuggccgugcugaaggggcucuacaacguggcgaccugcggccugaucgggcuggucacguuccuccugcugugcggccgcuccugcaccaccacccucuacaaggggguguacgagcugcagacgcuggagcucaacauggagacccugaacaugugcaugccgcugagcugcaccaagaacaacucccaccacuacauccgggugggcaacgagacgggccucgagcugacccugaccaacaccagcaucaucaaccacaaguucugcaaccucuccgacgcccacaagaagaaccuguacgaccacgcccugaugagcaucaucuccacguuccaccucagcauccccaacuucaaccaguacgaggccauguccugcgacuucaacgggggcaagaucagcguccaguacaaccugucccacagcuacgccggggacgcggccaaccacugcggcaccguggccaacggggugcugcagaccuucaugcgcauggccuggggcggcuccuacaucgcgcucgacagcgggcggggcaacugggacugcaucaugaccuccuaccaguaccugaucauccagaacacgaccugggacgaccacugccaguucagccgccccucccccaucggguaccugggccuccugagccagcggacccgcgacgucuacaucucccggcgccgccggggcaccuucacguggacccugagcgacagcgaggggaaggacaccccgggcggguacugccugacccgguggaugcucaucgaggccgagcugaagugcuucggcaacacggccguggccaagugcaacgagaagcacgacgaggaguucugcgacaugcugcgccucuucgacuucugcaagcaggccauccagcggcugaaggcgcccgcccagauguccauccagcugaucaacaaggccgugaacgcccucaucaacgaccagcugaucaugaagaaccaccuccgcgacaucauggggauccccuacugcaacuacagcaaguacugcuaccugaacaacaccgccaccggcaagaccucccugcccaagugcugccugaucagcaacggcuccuaccucaacgagacgcacuucagcgacgacaucgagcaggaggcggacaacaugaucaccgagaugcugcagaaggaguacauggagcggcaggggaagacgccccugggccucgucgaccuguucguguucuccaccagcuucuaccugaucuccaucuuccugcaccucgugaagaucccgacccaccgccacaucgucggcaagagcugccccaagccccaccggcugaaccacauggggaucugcuccugcgggcuguacaagcagcccggcgugccggugcgcuggaagcgguga

SEQ ID NO: 26397 - RNA, 1476 nt, Artificial Sequence
  derived and/or modified CDS sequence (opt1) from LASV(G3010-SLE-2013;Clade IV)__AIT17344__GPCmut4
augggccagaucgugaccuucuuccaggaggucccccacgugaucgaggaggugaugaacaucguccugaucgcccucagcauccuggccgugcugaaggggcucuacaacuucgcgaccugcggccugguggggcuggucacguuccuccugcugugcggccgcuccugcaccaccagccucuacaaggggguguacgagcugcagacccuggagcucaacauggagacgcugaacaugugcaugccgcuguccugcaccaagaacaacagccaccacuacaucauggugggcaacgagaccggccucgagcugacgcugaccaacaccuccaucaucaaccacaaguucugcaaccucagcgacgcccacaagaagaaccuguacaaccacgcccugauguccaucaucagcaccuuccaccucuccauccccaacuucaaccaguacgaggccaugagcugcgacuucaacgggggcaagaucuccguccaguacaaccugagccacuccuacgccggggacgcggccagccacugcggcacgguggccaacggggugcugcagaccuucaugcggauggccuggggcggcuccuacaucgcgcucgacagcggguacggcaagugggacugcaucaugaccuccuaccaguaccugaucauccagaacaccacgugggaggaccacugccaguucagccgccccucccccaucggguaccugggccuccugagccagcggacccgcgacaucuacaucagccggcgccgccggggcaccuucaccuggacgcuguccgacagcgaggggaaggacaccccgggcggguacugccugacccgguggaugcucaucgaggccgagcugaagugcuucggcaacaccgccgucgccaagugcaacgagaagcacgacgaggaguucugcgacaugcugcgccucuucgacuucugcaagcaggccauccagcggcugaagacgcccgcgcagauguccauccagcugaucaacaaggccgugaacgcccucaucaacgaccagcugaucaugaagaaccaccuccgcgacaucauggggauccccuacugcaacuacagcaaguacugcuaccugaaccacaccaccaccggcaagacgucccugcccaagugcugccuggugagcaacggcuccuaccucaacgagacccacuucagcgacgacaucgagcagcaggccgacaacaugaucaccgagaugcugcagaaggaguacauggagcggcaggggaagacgccccugggccucgucgaccuguucguguucuccaccagcuucuaccugaucuccaucuuccugcaccucgugaagaucccgacccaccgccacaucgucggcaagagcugccccaagccccaccggcugaaccacauggggaucugcuccugcgggcuguacaagcagcccggcgugccggugcgcuggaagcgguga

SEQ ID NO: 26398 - RNA, 1476 nt, Artificial Sequence
  derived and/or modified CDS sequence (opt1) from LASV(G502-SLE-2009;Clade IV)__AIT17126__GPCmut4
augggccagaucgugaccuucuuccaggaggucccccacgugaucgaggaggugaugaacaucguccugaucgcccucagcauccuggccgugcugaaggggcucuacaacuucgcgaccugcggccugguggggcugcucacguuccugcugcucugcggccgcuccugcaccaccgggcuguacaagggcgucuacgagcugcagacccucgagcugaacauggagacgcugaacaugugcaugccgcucagcugcaccaagaacaacucccaccacuacaucauggugggcaacgagaccgggcuggagcugacgcucaccaacaccagcaucaucaaccacaaguucugcaaccuguccgacgcccacaagaagaaccuguacgaccacgcccucaugagcaucaucuccaccuuccaccugagcauccccaacuucaaccaguacgaggccauguccugcgacuucaacggcgggaagaucagcgugcaguacaaccugucccacagcuacgccggcgacgcggccgaccacugcgggacggucgccaacggcgugcuccagaccuucaugcggauggccuggggcggguccuacaucgcgcuggacagcggccgcgggcggugggacugcaucaugaccuccuaccaguaccugaucauccagaacaccacgugggaggaccacugccaguucagccgccccucccccaucggcuaccucggccugcugagccagcggacccgcgacaucuacaucucccggcgccgccgggggaccuucaccuggacgcugagcgacagcgagggcaaggacacccccgggggcuacugccucacccgguggaugcugaucgaggccgagcugaagugcuucgggaacaccgccguggccaagugcaacgagaagcacgacgaggaguucugcgacaugcuccgccuguucgacuucugcaagcaggccauccagcggcugaaggcgcccgcccagauguccauccagcucaucaacaaggccgucaacgcccugaucaacgaccagcuggugaugaagaaccaccuccgcgacaucaugggcauccccuacugcaacuacagccgguacugcuaccugaaccacacgaccaccggccgcaccucccugcccaagugcugccucgugagcaacggguccuaccugaacgagacgcacuucagcgacgacaucgagcagcaggccgacaacaugaucaccgagaugcugcagaaggaguacauggagcggcagggcaagaccccgcucgggcuggucgaccuguucguguucuccaccagcuucuaccugaucuccaucuuccuccaccuggugaagaucccgacgcaccgccacaucgucggcaagagcugccccaagccccaccggcugaaccacauggggaucugcuccugcggccucuacaagcagcccggcgugccggugaaguggaagcgcuga

SEQ ID NO: 26399 - RNA, 1476 nt, Artificial Sequence
  derived and/or modified CDS sequence (opt1) from LASV(G733-SLE-2010;Clade IV)__AIT17154__GPCmut4
augggccagaucgugaccuucuuccaggaggucccccacgugaucgaggaggugaugaacaucguccugaucgcccucagcauccuggccgugcugaaggggcucuacaacuucgcgaccugcggcaucguggggcuggucuccuuccugcuccugugcggccgcagcugcacgaccucccuguacaaggggguguacgagcuccagacccuggagcugaacauggagacccucaacaugugcaugccgcugagcugcaccaagaacaacucccaccacuacaucauggugggcaacgagaccggccuggagcucacccugacgaacaccagcaucaucaaccacaaguucugcaaccuguccgacgcccacaagaagaaccucuacgaccacgcccugaugagcaucaucuccaccuuccaccugagcauccccaacuucaaccaguacgaggccauguccugcgacuucaacgggggcaagaucagcguccaguacaaccucucccacagcuacgccggggacgcggccaaccacugcggcaccaucgccaacggggugcugcagacguucaugcggauggccuggggcggcuccuacaucgcgcuggacagcgggcgcgaccggugggacugcaucaugaccuccuaccaguaccucaucauccagaacaccaccugggaggaccacugccaguucagccgccccucccccaucggcuaccuggggcugcucagccagcggacgcgcgacaucuacaucagccggcgccgccggggcaccuucaccuggacccucuccgacagcgagggcaaggacacgcccgggggcuacugccugacccgguggaugcugaucgaggccgagcucaagugcuucgggaacaccgccguggccaagugcaacgagaagcacgacgaggaguucugcgacaugcugcgccuguucgacuucugcaagcaggccauccagcggcucaaggcgcccgcccagauguccauccagcugaucaacaaggccgucaacgcccugaucaacgaccagcucaucaugaagaaccaccuccgcgacaucaugggcauccccuacugcaacuacagcaaguacugcuaccugaaccacaccacgaccgggaagaccucccugcccaagugcugccuggugagcaacggcuccuaccugaacgagacccacuucagcgacgacaucgagcagcaggccgacaacaugaucacggagaugcuccagaaggaguacauggagcggcagggcaagaccccgcuggggcugguggaccucuucgucuucuccaccagcuucuaccugaucuccaucuuccugcaccuggugaagaucccgacccaccgccacguggucggcaagagcugccccaagccccaccggcucaaccacauggggaucugcuccugcggccuguacgggcagcccggcgugccggugaaguggaagcgcuga

SEQ ID NO: 26400 - RNA, 1476 nt, Artificial Sequence
  derived and/or modified CDS sequence (opt1) from MOPV/LASV reassortant(IGS-1;Clade IV)__AFY05576__GPCmut4
augggccagaucgugaccuucuuccaggaggucccccacgugaucgaggaggugaugaacaucguccugaucgcccucagcgugcuggccgugcugaaggggcucuacaacuucgcgaccugcggccuggucgggcuggugacguuccuccugcugugcggccgcuccugcaccaccagccucuacaaggggguguacgagcugcagacccuggagcucaacauggagacgcugaacaugugcaugccgcuguccugcaccaagaacaacagccaccacuacaucauggucggcaacgagaccggccucgagcugacgcugaccaacaccuccaucaucaaccacaaguucugcaaccucagcgacgcccacaagaagaaccuguacgaccacgcccugauguccaucaucagcaccuuccaccucuccauccccaacuucaaccaguacgaggccaugagcugcgacuucaacgggggcaagaucuccgugcaguacaaccugagccacuccuacgccggggacgcggccaaccacugcggcacgguggccaacgggguccugcagaccuucaugcggauggccuggggcggcagcuacaucgcgcucgacuccgggcgcggcaacugggacugcaucaugaccagcuaccaguaccugaucauccagaacaccacgugggaggaccacugccaguucucccggcccagccccaucggguaccugggccuccugucccagcgcacccgggacaucuacaucagccgccggcgccggggcaccuucaccuggacgcugagcgacuccgagggggaggacaccccgggcggguacugccugacccgcuggaugcucaucgaggccgagcugaagugcuucggcaacaccgccguggccaagugcaacgagaagcacgacgaggaguucugcgacaugcugcggcuguucgacuucugcaagcaggccauccagcgccugaaggcgcccgcccagaugagcauccagcugaucaacaaggccgugaacgcccucaucaacgaccagcugaucaugaagaaccaccuccgggacaucauggggauccccuacugcaacuacuccaaguacugcuaccucaaccacacgaccaccggccgcaccagccugcccaagugcugccuggucuccaacggcagcuaccucaacgagacgcacuucuccgacgacaucgagcagcaggccgacaacaugaucaccgagaugcugcagaaggaguacauggagcggcaggggaagacgccccugggccucguggaccuguucguguucagcaccuccuucuaccugaucagcaucuuccugcaccucgucaagaucccgacccaccgccacaucguggggaaguccugccccaagccccaccggcugaaccacaugggcaucugcagcugcgggcuguacaagcagcccggcgugccggucaaguggaagcgcuga

SEQ ID NO: 26401 - RNA, 1476 nt, Artificial Sequence
  derived and/or modified CDS sequence (opt1) from LASV(LM765-SLE-2012;Clade IV)__AIT17814__GPCmut4
augggccagaucgugaccuucuuccaggaggucccccacgugaucgaggaggugaugaacaucguccugaucgcccucagcauccuggccgugcugaaggggcucuacaacuucgcgaccugcggccugguggggcuggucacguuccuccugcugugcggccgcuccugcaccaccagccucuacaaggggguguacgagcugcagacccuggagcucaacauggagacgcugaacaugugcaugccgcuguccugcaccaagaacaacagccaccacuacaucauggugggcaacgagaccggccucgagcugacgcugaccaacaccuccaucaucgaccacaaguucugcaaccucagcgacgcccaccggaagaaccuguacgaccacgcccugauguccaucaucagcaccuuccaccucuccauccccaacuucaaccaguacgaggccaugagcugcgacuucaacgggggcaagaucuccguccaguacaaccugagccacuccuacgccaaggacgcggccgaccacugcgggacgguggccaacggcgugcugcagaccuucaugcgcauggccuggggcgggagcuacaucgcgcucgacuccggccgggggcgcugggacugcaucaugaccagcuaccaguaccugaucauccagaacaccacgugggaggaccacugccaguucucccggcccagccccaucggcuaccuggggcuccugucccagcgcacccgggacaucuacaucagccgccggcgccggggcaccuucaccuggacgcugagcgacuccgagggcaaggacacccccgggggcuacugccugacccgcuggaugcucaucgaggccgagcugaagugcuucgggaacaccgccgucgccaagugcaacgagaagcacgacgaggaguucugcgacaugcugcggcuguucgacuucugcaagcaggccauccagcgccugaaggcgcccgcccagaugagcauccagcugaucaacaaggccgugaacgcccucaucaacgaccagcugaucaugaagaaccaccuccgggacaucaugggcauccccuacugcaacuacuccaaguacugcuaccucaaccacacgaccaccgggaagaccagccugcccaagugcugccugguguccaacggcagcuaccucaacgagacgcacuucuccgacgacaucgagcagcaggccgacaacaugaucaccgagaugcugcagaaggaguacauggagcgccagggcaagaccccgcuggggcucgucgaccuguucguguucagcaccuccuucuaccugaucagcaucuuccugcaccucgugaagaucccgacgcaccggcacaucgucggcaagcccugccccaagccccaccgccugaaccacauggggaucugcuccugcggccuguacaagcagccgggggugcccgugaaguggaagcgguga

SEQ ID NO: 26402 - RNA, 1476 nt, Artificial Sequence
  derived and/or modified CDS sequence (opt1) from LASV(LM776-SLE-2012;Clade IV)__AIT17824__GPCmut4
augggccagaucgugaccuucuuccaggaggucccccacgugaucgaggaggugaugaacaucguccugaucgcccucagcauccuggccgugcugaaggggcucuacaacuucgcgaccugcggccugguggggcuggucacguuccuccugcugugcggccgcuccugcaccaccagcguguacaaggggguguacgagcuccagacccuggagcugaacauggagacgcucaacaugugcaugccgcuguccugcaccaagaacaacagccaccacuacaucauggucggcaacgagaccggccuggagcucacgcugaccaacaccuccaucaucaaccacaaguucugcaaccugagcgacgcccacaagaagaaccucuacgaccacgcccugauguccaucaucagcaccuuccaccuguccauccccaacuucaaccaguacgaggccaugagcugcgacuucaacgggggcaagaucuccgugcaguacaaccucagccacuccuacgccggggacgcggccaaccacugcggcacgguggccaacgggguccugcagaccuucaugcggauggccuggggcggcagcuacaucgcgcuggacuccgggcacggcaagugggacugcaucaugaccagcuaccaguaccucaucauccagaacaccacgugggaggaccacugccaguucucccgccccagccccaucggguaccugggccugcucucccagcggacccgcgacaucuacaucagccggcgccgccggggcaccuucaccuggacgcucagcgacuccgaggggaaggacaccccgggcggguacugccugacccgguggaugcugaucgaggccgagcucaagugcuucggcaacaccgccguggccaagugcaacgagaagcacgacgaggaguucugcgacaugcugcgccuguucgacuucugcaagcaggccauccagcggcucaaggcgcccgcccagaugagcauccagcugaucaacaaggccgugaacgcccugaucaacgaccagcucaucaugaagaaccaccuccgcgacaucauggggauccccuacugcaacuacuccaaguacugcuaccugaaccacacgaccaccggcaagaccagccugcccaagugcugccuggucuccaacggcagcuaccugaacgagacgcacuucuccgacgacaucgagcagcaggccgacaacaugaucaccgagaugcuccagaaggaguacauggagcggcaggggaagacgccccugggccugguggaccucuucguguucagcaccuccuucuaccugaucagcaucuuccugcaccuggucaagaucccgacccaccgccacaucguggggaaguccugccccaagccccaccggcucaaccacaugggcaucugcagcugcgggcuguacaagcagcccggcgugccgguccgcuggaagcgguga

SEQ ID NO: 26403 - RNA, 1476 nt, Artificial Sequence
  derived and/or modified CDS sequence (opt1) from LASV(Mad39;Clade IV)__ANH09722__GPCmut4
augggccagaucgugaccuucuuccaggaggucccccacgugaucgaggaggugaugaacaucguccugaucgcccucagcauccuggccgugcugaaggggcucuacaacguggcgaccugcggccugaucgggcuggucacguuccuccugcugugcggccgcuccugcaccaccacccucuacaaggggguguacgagcugcaggcccuggagcucaacauggagacgcugaacaugugcaugccgcugagcugcaccaagaacaacucccaccacuacauccgggugggcaacgagaccggccucgagcugacgcugaccaacaccagccucaucaaccacaaguucugcaaccuguccgacgcccacaagaagaaccuguacgaccacgcccucaugagcaucaucuccaccuuccaccugagcauccccaacuucaaccaguacgaggccauguccugcgacuucaacgacgggaagaucagcguccaguacaaccugucccacacguacgcgggcgacaccgccaaccacugcgggaccguggccaacggcgugcuccagaccuucaugcgcauggccuggggcgggagcuacaucgcgcuggacuccggccgcgggggcugggacugcaucaugacgagcuaccaguaccugaucauccagaacaccaccugggaggaccacugccaguucucccggcccagccccaucggguaccucggccugcugucccagcggacccgcgacaucuacaucagccggcgccgccggggcacguucaccuggacccuguccgacagcgaggggaaggacaccccgggcggguacugccucacgcgguggaugcugaucgaggccgagcugaagugcuucggcaacaccgccgucgccaagugcaacgagaagcacgacgaggaguucugcgacaugcuccgccuguucgacuucugcaagcaggccauccagcggcugaaggcgcccgcccagaugagcauccagcucaucaacaaggccgugaacgcccugaucaacgaccagcugaucaugaagaaccaccuccgcgacaucauggggauccccuacugcaacuacuccaaguacugcuaccugaaccacaccgugaccggcaagacgagccugcccaagugcugccucgucuccaacggcagcuaccugaacgagacccacuucuccgacgacaucgagcagcaggccgacaacaugaucaccgagaugcugcagaaggaguacauggagcggcaggggaagacgccccucggccugguggaccuguucguguucagcaccuccuucuaccugaucagcaucuuccuccaccuggucaagaucccgacccaccgccacgugguggggaagcccugccccaagccccaccggcugaaccacaugggcaucugcuccugcggguucuacaagcagccgggcguccccgugcgcuggaagcgguga

SEQ ID NO: 26404 - RNA, 1476 nt, Artificial Sequence
  derived and/or modified CDS sequence (opt1) from LASV(Z0947-SLE-2011;Clade IV)__AIT17840__GPCmut4
augggccagaucgugaccuucuuccaggaggucccccacgugaucgaggaggugaugaacaucguccugaucgcccucagcauccuggccgugcugaaggggcucuacaacuucgcgaccugcggccugguggggcuggucacguuccuccugcugugcggccgcuccugcaccaucagccucuacaaggggguguacgagcugcagacccuggagcucaacauggagacccugaacaugugcaugccgcuguccugcaccaagaacaacagccaccacuacaucauggugggcaacgagaccggccucgagcugacccugacgaacaccuccaucaucaaccacaaguucugcaaccucagcgacgcccacaagaagaaccuguacgaccacgcccugauguccaucaucagcaccuuccaccucuccauccccaacuucaaccaguacgaggccaugagcugcgacuucaacgggggcaagaucuccguccaguacaaccugagccacuccuacgccggggacgcggccaaccacugcggcaccguggccaacggggugcugcagacguucaugcggauggccuggggcggcagcuacaucgcgcucgacuccgggcgcgaccggugggacugcaucaugaccagcuaccaguaccugaucauccagaacaccaccugggaggaccacugccaguucucccgccccagccccaucggcuaccuggggcuccugucccagcggacgcgcgacaucuacaucagccggcgccgccggggcaccuucaccuggacccugagcgacuccgagggcaaggacacgcccgggggcuacugccugacccgguggaugcucaucgaggccgagcugaagugcuucgggaacaccgccgucgccaagugcaacgagaagcacgacgaggaguucugcgacaugcugcgccucuucgacuucugcaagcaggccauccagcggcugaaggcgcccgcccagaugagcauccagcugaucaacaaggccgugaacgcccucaucaacgaccagcugaucaugaagaaccaccuccgcgacaucaugggcauccccuacugcaacuacuccaaguacugcuaccugaaccacaccacgaccgggaagaccagccugcccaagugcugccugguguccaacggcagcuaccucaacgagacccacuucuccgacgacaucgagcagcaggccgacaacaugaucacggagaugcugcagaaggaguacauggagcggcagggcaagaccccgcuggggcucgucgaccuguucguguucagcaccuccuucuaccugaucagcaucuuccugcaccucgugaagaucccgacccaccgccacaucgucggcaagcccugccccaagccccaccggcugaaccacauggggaucugcuccugcggccuguacaagcagccgggggugcccgugaaguggaagcgcuga

SEQ ID NO: 26405 - RNA, 1476 nt, Artificial Sequence
  derived and/or modified CDS sequence (opt1) from LASV(Josiah;Clade IV)__NP_694870__GPCmut4
augggccagaucgugaccuucuuccaggaggucccccacgugaucgaggaggugaugaacaucguccugaucgcccucagcgugcuggccgugcugaaggggcucuacaacuucgcgaccugcggccuggucgggcuggugacguuccuccugcugugcggccgcuccugcaccaccagccucuacaaggggguguacgagcugcagacccuggagcucaacauggagacgcugaacaugugcaugccgcuguccugcaccaagaacaacagccaccacuacaucauggucggcaacgagaccggccucgagcugacccugacgaacaccuccaucaucaaccacaaguucugcaaccucagcgacgcccacaagaagaaccuguacgaccacgcccugauguccaucaucagcaccuuccaccucuccauccccaacuucaaccaguacgaggccaugagcugcgacuucaacgggggcaagaucuccgugcaguacaaccugagccacuccuacgccggggacgcggccaaccacugcggcaccguggccaacgggguccugcagacguucaugcggauggccuggggcggcagcuacaucgcgcucgacuccgggcgcggcaacugggacugcaucaugaccagcuaccaguaccugaucauccagaacaccaccugggaggaccacugccaguucucccggcccagccccaucggguaccugggccuccugucccagcgcacgcgggacaucuacaucagccgccggcgccggggcaccuucaccuggacccugagcgacuccgaggggaaggacacgccgggcggguacugccucacccgcuggaugcugaucgaggccgagcugaagugcuucggcaacaccgccguggccaagugcaacgagaagcacgacgaggaguucugcgacaugcuccggcuguucgacuucugcaagcaggccauccagcgccugaaggcgcccgcccagaugagcauccagcucaucaacaaggccgugaacgcccugaucaacgaccagcugaucaugaagaaccaccuccgggacaucauggggauccccuacugcaacuacuccaaguacugcuaccugaaccacaccacgaccggccgcaccagccugcccaagugcugccucgucuccaacggcagcuaccugaacgagacccacuucuccgacgacaucgagcagcaggccgacaacaugaucacggagaugcugcagaaggaguacauggagcggcaggggaagaccccgcucggccugguggaccuguucguguucagcaccuccuucuaccugaucagcaucuuccuccaccuggucaagauccccacccaccgccacaucguggggaaguccugccccaagccccaccggcugaaccacaugggcaucugcagcugcgggcucuacaagcagccgggcgugcccgucaaguggaagcgcuga

SEQ ID NO: 26406 - RNA, 1473 nt, Artificial Sequence
  derived and/or modified CDS sequence (opt1) from LASV(LP;Clade I)__AAF86701__GPCmut4
augggccagaucaucaccuucuuccaggaggugccccacgucaucgaggaggugaugaacaucgugcugaucgcccucagccugcuggccauccucaaggggcuguacaacaucgcgaccugcggcaucaucgggcuggucgccuuccucuuccugugcggcaaguccugcagccugacgcucaagggcggguacgagcugcagacccuggagcucaacauggagacccugaacaugugcaugccgcuguccugcaccaagaacagcucccaccacuacauccgcgugggcaacgagacggggcucgagcugacccugaccaacaccagcaucaucaaccacaaguucugcaaccucuccgacgcccacaagaagaaccuguacgaccacgcccugaugagcaucaucuccacguuccaccucagcauccccaacuucaaccaguacgaggccauguccugcgacuucaacggcgggaagaucagcgugcaguacaaccugucccacagcuacgcgggcgacgccgccgagcacugcgggaccgucgccaacggcgugcugcagaccuucaugcggauggcguggggcgggcgcuacaucgcccucgacuccggcaaggggaacugggacugcaucaugaccagcuaccaguaccugaucauccagaacacgaccugggaggaccacugccaguucucccggcccagccccaucggcuaccugggccuccugucccagcgcacccgggacaucuacaucagccgccggcgccgggggaccuucacguggacccugagcgacuccgagggcaacgagacccccgggggcuacugccucacccgcuggaugcugaucgaggccgagcugaagugcuucgggaacacggccguggccaagugcaacgagaagcacgacgaggaguucugcgacaugcuccggcuguucgacuucugcaagcaggcgauccgccggcugaaggccccggcccagaugagcauccagcucaucaacaaggccgucaacgcccugaucaacgaccagcugaucaugaagaaccaccuccgcgacaucaugggcauccccuacugcaacuacuccaaguacugcuaccugaaccacaccagcuccggccggaccagccugcccaagugcugccucaucuccaacgggagcuaccugaacgagacccaguucuccgacgacaucgagcagcaggcggacaacaugaucacggagaugcugcagaaggaguacaucgagcgccagggcaagaccccgcucgggcugguggacaucuucaucuucagcaccuccuucuaccugaucagcaucuuccugcaccucaucaagauccccacccaccggcacaucgugggcaagcccugccccaagccgcaccgccugaaccacaugggggucugcuccugcggccuguacaagcaccccggcgugcccacgaaguggaagcgguga

SEQ ID NO: 26407 - RNA, 1473 nt, Artificial Sequence
  derived and/or modified CDS sequence (opt1) from LASV(803213;Clade II)__AAF86703__GPCmut4
augggccagaucaucaccuucuuccaggaggugccccacgucaucgaggaggugaugaacaucgugcugaucgcccucagccugcuggccauccucaaggggaucuacaacgucgcgaccugcggccuguucgggcugaucuccuuccuccugcugugcggccgcagcugcuccgugacguacaaggggguguacgagcuccagacccuggagcugaacauggccaaccucaacaugugcaugccgcugagcugcaccaagaacaacucccaccacuacaucauggucggcaacgagaccggccuggagcucacgcugaccaacaccagcaucaucaaccacaaguucugcaaccuguccgacgcccacaagaagaaccucuacgaccacgcccugaugagcaucaucuccaccuuccaccugagcauccccaacuucaaccaguacgaggccauguccugcgacuucaacgggggcaagaucagcgugcaguacaaccucucccacagcuucgcgguggacgccgccaaccacugcgggacgaucgccaacggcguccugcagaccuucaugcggauggcguggggcggguccuacaucgcccuggacagcggcaaggggaacugggacugcaucaugaccuccuaccaguaccucaucauccagaacaccacgugggaggaccacugccaguucagccgccccucccccaucggcuaccuggggcugcucagccagcggacccgcgacaucuacaucagccggcgccggcgcggcaccuucaccuggacgcuguccgacagcgagggcaacgaggcccccgggggcuacugccugacccgguggaugcucaucgaggccgagcugaagugcuucgggaacaccgccguggcgaagugcaacgagaagcacgacgaggaguucugcgacaugcugcgccucuucgacuucugcaagcaggccaucaagcggcugaagaccccggcccagauguccauccagcugaucaacaaggccgugaacgcccucaucaacgaccagcugaucaugaagaaccaccuccgcgacaucaugggcauccccuacugcaacuacagccgguacugcuaccugaaccacacggucaccgggaagaccucccugccccgcugcugccuggugagcaacggcuccuaccucaacgagacccacuucagcgacgacaucgagcagcaggcggacaacaugaucacggagaugcugcagaaggaguacauggaccggcagggcaagaccccgcuggggcucguggaccuguucgucuucuccaccagcuucuaccugaucuccaucuuccugcaccucgugaagauccccacccaccgccacaucgugggcaagcccugccccaagccgcaccggcugaaccacauggggaucugcagcugcggccuguacaagcaccccgggguccccgugaaguggaagcgcuga

SEQ ID NO: 26408 - RNA, 1473 nt, Artificial Sequence
  derived and/or modified CDS sequence (opt1) from LASV(GA391;Clade III)__CAA36645__GPCmut4
augggccagaucgugaccuucuuccaggaggucccccacgugaucgaggaggugaugaacaucguccugaucgcccucagcauccuggccauccugaaggggcucuacaacguggcgaccugcggccugaucgggcuggugacguuccuccugcuguccggccgcagcugcucccucaucuacaaggggaccuacgagcugcagacccuggagcucaacauggagacccugaacaugugcaugccgcugagcugcacgaagaacaacucccaccacuacauccgggucggcaacgagaccggccucgagcugacccugaccaacacgagcauccucaaccacaaguucugcaaccuguccgacgcccacaagcgcaaccuguacgaccacagccucauguccaucaucagcaccuuccaccuguccauccccaacuucaaccaguacgaggccaugagcugcgacuucaacgggggcaagaucaccgugcaguacaaccugucccacagcuucgccguggacgccgcggggcacugcggcacccucgccaacgggguccugcagacguucaugcggauggccuggggcggcuccuacaucgcccuggacagcgggcgcggcaacugggacugcaucaugaccuccuaccaguaccucaucauccagaacaccaccugggacgaccacugccaguucagccggcccucccccaucggguaccugggccugcucagccagcgcacgcgggacaucuacaucagccgccggcgccggggcaccuucaccuggacccuguccgacagcgaggggaacgagacgccgggcggguacugccugacccgcuggaugcucaucgaggcggagcugaagugcuucggcaacaccgccguggccaagugcaacgagaagcacgacgaggaguucugcgacaugcugcggcuguucgacuucugcaagcaggccauccgccggcugaagacccccgcccagauguccauccagcugaucaacaaggcggugaacgcccucaucaacgaccagcugaucaugaagaaccaccuccgcgacaucauggggauccccuacugcaacuacagccgguacugcuaccucaaccacacguccaccggcaagaccagccugccccgcugcugccugaucuccaacggcagcuaccucaacgagaccaaguucuccgacgacaucgagcagcaggccgacaacaugaucacggagaugcugcagaaggaguacaucgaccggcaggggaagaccccgcugggccuggucgaccucuucguguucagcaccuccuucuaccugaucagcaucuuccugcaccucgugaagauccccacccaccgccacaucgucgggaagcccugccccaagccgcaccggcugaaccacaugggcaucugcuccugcgggcuguacaagcagcccggcgugcccgugcgcuggaagcgcuga

SEQ ID NO: 26409 - RNA, 1476 nt, Artificial Sequence
  derived and/or modified CDS sequence (opt1) from LASV(AV;Clade V)__CCA30314__GPCmut4
augggccagaucgugaccuucuuccaggaggucccccacgugaucgaggaggugaugaacaucguccugaucgcccucagcauccuggccgugcugaaggggcucuacaacaucgcgaccugcggccugaucgggcugaucacguuccuccugcugugcggccgcuccugcagcuccaaccucuacaaggggguguacgagcugcagagccuggaccucaacauggagacccugaacaugugcaugccgcuguccugcaccaagaacaacagccaccacuacauccgggucggcaacgacaccggccucgagcugacgcugaccaacaccuccauccucaaccacaaguucugcaaccugagcgacgcccacaagaaggaccuguacgaccacgcccucauguccaucaucagcaccuuccaccuguccauccccaacuucaaccaguacgaggccaugagcugcgacuucaacgggggcaagaucuccgugcaguacaaccugagccacuccuacgccaucgacgcggccaaccacugcgggacgguggccaacggcauccuccagaccuucaugcgcauggccuggggcgggagcuacaucgcgcuggacuccggccgggggaacugggacugcaucaugaccagcuaccaguaccugaucauccagaacaccacgugggagaaccacugccaguucucccgccccagccccaucggcuaccucgggcugcugagccagcggacccgcgacaucuacaucucccggcgccggcgcggcaccuucaccuggacgcucagcgacuccgagggcaacgccacccccgggggcuacugccugacccgguggaugcugaucgaggccgagcucaagugcuucgggaacaccgccgucgccaagugcaacgagaagcacgacgaggaguucugcgacaugcugcgccuguucgacuucugcaagcaggcgaucagccggcucaaguccccggcccagaugagcauccagcugaucaacaaggccgugaacgcccugaucaacgaccagcucaucaugaagaaccaccuccgcgacaucaugggcauccccuacugcaacuacuccaaguacugcuaccugaaccacacgaucaccgggaagaccagccugcccaagugcugccugguguccaacggcagcuaccugaacgagacccacuucuccgacgacaucgagcagcaggccgacaacaugaucacggagaugcuccagaaggaguacauggagcggcagggcaagaccccgcuggggcuggucgaccuguucguguucagcaccuccuucuaccucaucagcaucuuccugcgccuggugaagauccccacccaccggcacaucgucggcaagcccugccccaagccgcaccgccucaaccacauggggaucugcuccugcggccuguacaagcagcccggggugcccgugcgguggaagcgcuga

SEQ ID NO: 26410 - RNA, 1473 nt, Artificial Sequence
  derived and/or modified CDS sequence (opt1) from LASV(Togo/2016/7082;Clade VI)__AMR44577__GPCmut4
augggccagaucaucaccuucuuccaggaggugccccacgucaucgaggaggugaugaacaucgugcugaucgcccucagccugcuggccauccucaagggggucuacaacguggcgaccugcggcaucaucgggcuggugacguuccuguuccucugcggccgcuccugcagccugaucuacaagggguccuacgagcugcagacccucgagcugaacauggagacccugaacaugugcaugccgcucagcugcaccaagaacuccagccaccacuacauccgggucggcaacgagacgggccuggagcugacccucaccaacaccuccaucaucaaccacaaguucugcaaccugagcgacgcccacaagcgcaaccuguacgaccacgcccucauguccauccugagcacguuccaccuguccauccccaacuucaaccaguacgaggccaugagcugcgacuucaacgggggcaagaucuccgugcaguacaaccucagccacgccuacgcgguggacgccgccgagcacugcgggaccgucgccaacggcgugcugcagaccuucaugcggauggcguggggcggguccuacaucgcccuggacagcggccgcgggaacugggacugcaucaugaccuccuaccaguaccucaucauccagaacacgaccugggaggaccacugccaguucagccggcccucccccaucggcuaccuggggcugcucagccagcgcacccgggacaucuacaucagccgccggcgccggggcaccuucacguggacccuguccgacagcgagggcaacgagacccccgggggcuacugccugacccgcuggaugcucaucgaggccgagcugaagugcuucgggaacacggccguggccaagugcaacgagaagcacgacgaggaguucugcgacaugcugcggcuguucgacuucugcaagcaggcgauccagcgccugaaguccccggcccagaugagcauccagcugaucaacaaggccgucaacgcccucaucaacgaccagcugaucaugaagaaccaccuccgggacaugaugggcauccccuacugcaacuacuccaaguacugcuaccucaaccacaccagcuccgggcgcaccagccugcccaagugcugccugguguccaacggcagcuaccucaacgagacccacuucuccgacgacaucgagcagcaggccgacaacaugaucacggagaugcugcagaaggaguacaucgaccggcagggcaagaccccgcuggggcucguggaccuguucgucuucagcaccuccuucuaccugaucagcaucuuccugcaccucaucaagauccccacccaccgccacaucgugggcaagcccugccccaagccgcaccggcugaaccacauggggaucugcuccugcggccuguacaagcagcccggggugcccacgcgcuggaagcgguga

SEQ ID NO: 26411 - RNA, 1473 nt, Artificial Sequence
  derived and/or modified CDS sequence (opt1) from LASV(KAK-428;Clade n.d. (VII))__ANH09740__GPCmut4
augggccagaucgugaccuucuuccaggaggucccccacgugaucgaggaggugaugaacaucguccugaucgcccucagccugcuggccauccucaaggggcuguacaacuucgcgaccugcggcgugaucgggcugaucacguuccuccugcugugcggccgcuccugcagcgccaccuacaaggggcaguacgagcuccagacccuggagcugaacauggagucccucaacaugugcaugccgcugagcugcaccaagaacaacucccaccacuacauccgggccggcaacaacacgggccuggagcucacccugaccaacaccagcaucaucucccacaaguucugcaaccugagcgacgcccacaagaagaaccucuacgaccacacgcugauguccaucaucaccaccuuccaccugagcauccccaacuucaaccaguacgaggccauguccugcgacuucaacgggggcaagaucagcauccaguacaaccucucccacagcuacgcgggggacgccgcccagcacugcggcaccguggccaacgggguccugcagacguucaugcgcauggcguggggcggcuccuaccuggcccucgacagcgggcggcgcggcugggacugcaucaucuccagcuaccaguaccugaucauccagaacaccaccugggacgaccacugccaguucucccggcccagccccaucggguaccugggcuucgugagccagaagacccgcgacaucuacaucucccggcgccggcgcggcacguucaccuggacccucagcgacuccgaggggcacgacaugccgggcggguacugccugacccgguggaugcugaucgaggccgaccucaagugcuucggcaacacggccguggccaagugcaacgagaagcacgacgaggaguucugcgacauguggcgccuguucgacuucugcaagcaggcgauccagcggcugaaggcccccgcccagaugaacauccagcucaucaacaaggccgucaacgcccugaucaacgaccagcugaugaugaagaaccaccuccgcgacaucauggggauccccuacugcaacuacagcaaguucugcuaccugaacaacaccaccaccggccggacgucccugccccgcugcugccucaucagcaacggcuccuaccugaacgagacccacuucagcgacgacaucgagcagcaggcggacaacaugaucaccgagaugcugcagaaggaguacauggaccggcaggggaagaccccgcucggccugguggaccuguucguguucuccacgagcuucuaccucaucaccaucuuccugcaccuggucaagauccccacccaccgccacaucguggggaagcccugccccaagccgcaccggcugaaccacaugggcaucugcuccugcgggcucuacaagcagcccggcgugcccguccgcuggaagcgguga

SEQ ID NO: 26412 - RNA, 1473 nt, Artificial Sequence; identical to SEQ ID NO: 26406
  derived and/or modified CDS sequence (opt1) from LASV(Pinneo-NIG-1969;Clade I)__AIT17836__GPCmut4

SEQ ID NO: 26413 - RNA, 1473 nt, Artificial Sequence
  derived and/or modified CDS sequence (opt1) from LASV(ISTH0009-NIG-2011;Clade II)__AIT17404__GPCmut4
augggccagaucaucaccuucuuccaggaggugccccacgucaucgaggaggugaugaacaucgugcugaucgcccucagccugcuggccauccucaaggggaucuacaacgucgcgaccugcggccuguucgggcugguguccuuccuccugcugugcggccgcagcugcuccacgaccuacaaggggguguacgagcuccagacccuggagcuggacauggccagccucaacaugugcaugccgcuguccugcaccaagaacaacagccaccacuacaucauggucggcaacgagacgggccuggagcucacccugaccaacaccuccaucaucaaccacaaguucugcaaccugagcgacgcccacaagaagaaccucuacgaccacgcccugauguccaucaucagcacguuccaccuguccauccccaacuucaaccaguacgaggccaugagcugcgacuucaacgggggcaagaucuccgugcaguacaaccucagccacgcguacgccguggacgccgccaaccacugcgggaccaucgcgaacggcguccugcagaccuucaugcggauggccuggggcggguccuacaucgcccuggacagcggcaagggguccugggacugcaucaugaccagcuaccaguaccucaucauccagaacacgaccugggaggaccacugccaguucucccgccccagccccaucggcuaccuggggcugcucagccagcggacccgcgacaucuacaucucccggcgccggcgcggcaccuucacguggacccugagcgacuccgagggcaacgagacccccgggggcuacugccugacccgguggaugcucaucgaggccgagcugaagugcuucgggaacacggccguggcgaagugcaacgagaagcacgacgaggaguucugcgacaugcugcgccucuucgacuucugcaagcaggccauccggcgccugaagaccccggcccagaugagcauccagcugaucaacaaggccgugaacgcccucaucaacgaccagcugaucaugaagaaccaccuccgggacaucaugggcauccccuacugcaacuacuccaaguacugcuaccugaaccacaccgucaccgggaagacgagccugccccgcugcugccugguguccaacggcagcuaccucaacgagacccacuucuccgacgacaucgagcagcaggcggacaacaugaucaccgagcugcugcagaaggaguacauggaccggcagggcaagaccccgcucgggcugguggaccuguucgucuucagcacguccuucuaccugaucagcaucuuccuccaccugaucaagauccccacccaccgccacaucaccggcaagcccugccccaagccgcaccggcugaaccacauggggaucugcuccugcggccucuacaagcaccccggggugcccgugaaguggaagcgcuga

SEQ ID NO: 26414 - RNA, 1473 nt, Artificial Sequence
  derived and/or modified CDS sequence (opt1) from LASV(ISTH2010-NIG-2012;Clade II)__AIT17482__GPCmut4
augggccagaucaucaccuucuuccaggaggugccccacgucaucgaggaggugaugaacaucgugcugaucgcccucagccugcuggccauccucaaggggaucuacaacgucgcgaccugcggccuguucgggcugguguccuuccuccugcugugcggccgcagcugcuccacgaccuacaaggggguguacgagcuccagacccuggagcuggacauggccagccucaacaugugcaugccgcuguccugcaccaagaacaacagccaccacuacaucauggucggcaacgagacgggccuggagcucacccugaccaacaccuccaucaucaaccacaaguucugcaaccugagcgacgcccacaagaagaaccucuacgaccacgcccugauguccaucaucagcacguuccaccuguccauccccaacuucaaccaguacgaggccaugagcugcgacuucaacgggggcaagaucuccgugcaguacaaccucagccacgcguacgccguggacgccgccaaccacugcgggaccaucgcgaacggcguccugcagaccuucaugcggauggccuggggcggguccuacaucgcccuggacagcggcaagggguccugggacugcaucaugaccagcuaccaguaccucaucauccagaacaucacgugggaggaccacugccaguucucccgccccagccccaucggcuaccuggggcugcucagccagcggacccgcgacaucuacaucucccggcgccggcgcggcaccuucaccuggacgcugagcgacuccgagggcaacgagacccccgggggcuacugccugacccgguggaugcucaucgaggccgagcugaagugcuucgggaacaccgccguggcgaagugcaacgagaagcacgacgaggaguucugcgacaugcugcgccucuucgacuucugcaagcaggccauccggcgccugaagacgccggcccagaugagcauccagcugaucaacaaggccgugaacgcccucaucaacgaccagcugaucaugaagaaccaccuccgggacaucaugggcauccccuacugcaacuacuccaaguacugcuaccugaaccacaccgucaccgggaagaccagccugccccgcugcugccugguguccaacggcagcuaccucaacgagacgcacuucuccgacgacaucgagcagcaggcggacaacaugaucaccgagcugcugcagaaggaguacaucgaccggcagggcaagaccccgcucgggcugguggaccuguucgucuucagcaccuccuucuaccugaucagcaucuuccuccaccuggugaagauccccacgcaccgccacguggucggcaagcccugccccaagccgcaccggcugaaccacauggggaucugcuccugcggccucuacaagcaccccggggugcccgugaaguggaagcgcuga

SEQ ID NO: 26415 - RNA, 1473 nt, Artificial Sequence
  derived and/or modified CDS sequence (opt1) from LASV(Lassa virus/H.sapiens-wt/NGA/2015/ISTH_0543;Clade II)__AVO03639__GPCmut4
augggccagaucaucaccuucuuccaggaggugccccacgucaucgaggaggugaugaacaucgugcugaucgcccucagccugcuggccauccucaaggggaucuacaacgucgcgaccugcggccuguucgggcugguguccuuccuccugcugugcggccgcagcugcuccacgaccuacaaggggguguacgagcuccagacccuggagcuggacauggccaaccucaacaugugcaugccgcugagcugcaccaagaacaacucccaccacuacaucauggucggcaacgagacgggccuggagcucacccugaccaacaccagcaucaucaaccacaaguucugcaaccuguccgacgcccacaagaagaaccucuacgaccacgcccugaugagcaucaucuccacguuccaccugagcauccccaacuucaaccaguacgaggccauguccugcgacuucaacgggggcaagaucagcgugcaguacaaccucucccacaccuacgcgguggacgccgccaaccacugcgggaccaucgccaacggcguccugcagaccuucaugcggauggcguggggcgggagcuacaucgcccuggacuccggcaaggggagcugggacugcaucaugacguccuaccaguaccucgugauccagaacaccaccugggaggaccacugccaguucagccgccccucccccaucggcuaccuggggcugcucagccagcggacccgcgacaucuacaucagccggcgccggcgcggcacguucaccuggacccuguccgacagcgagggcaacgagacccccgggggcuacugccugacgcgguggaugcucaucgaggccgagcugaagugcuucgggaacaccgccguggccaagugcaacgagaagcacgacgaggaguucugcgacaugcugcgccucuucgacuucugcaagcaggcgauccggcgccugaagaccccggcccagauguccauccagcugaucaacaaggccgucaacgcccucaucaacgaccagcugaucaugaagaaccaccuccgggacaucaugggcauccccuacugcaacuacagcaaguacugcuaccugaaccacaccgugacggggaagaccucccugccccgcugcugccuggugagcaacggcuccuaccucaacgagacccacuucagcgacgacaucgagcagcaggccgacaacaugaucaccgagcugcugcagaaggaguacaucgaccggcagggcaagacgccgcucgggcuggucgaccuguucguguucuccaccagcuucuaccugaucuccaucuuccuccaccuggugaagauccccacccaccgccacaucaccggcaagcccugccccaagccgcaccggcugaaccacauggggaucugcagcugcggccucuacaagcaccccgggguccccgugaaguggaagcgcuga

SEQ ID NO: 26416 - RNA, 1473 nt, Artificial Sequence
  derived and/or modified CDS sequence (opt1) from LASV(Lassa virus/H.sapiens-wt/NGA/2016/ISTH_0009;Clade II)__AVO03571__GPCmut4
augggccagaucaucaccuucuuccaggaggugccccacgucaucgaggaggugaugaacaucgugcugaucgcccucagccugcuggccauccucaaggggaucuacaacgucgcgaccugcggccugcuggggcucguguccuuccugcugcucugcggccgcagcugcuccacgaccuacaaggggguguacgagcugcagacccuggagcucgacauggccagccugaacaugugcaugccgcuguccugcaccaagaacaacagccaccacuacaucauggucggcaacgagacgggccucgagcugacccugaccaacaccuccaucaucaaccacaaguucugcaaccucagcgacgcccacaagaagaaccuguacgaccacgcccugauguccaucaucagcacguuccaccucuccauccccaacuucaaccaguacgaggccaugagcugcgacuucaacgggggccggaucuccgugcaguacaaccugagccacuccuacgcgguggacgccgccaaccacugcgggaccaucgccaacggcguccugcagaccuucaugcgcauggcguggggcgggagcuacaucgcccucgacuccggcaaggggagcugggacugcaucaugaccuccuaccaguaccugaucauccagaacacgaccugggaggaccacugccaguucagccggcccagccccaucggcuaccuggggcuccugucccagcgcacccgggacaucuacaucagccgccggcgccggggcaccuucacguggacccuguccgacagcgagggcaacgagacccccgggggcuacugccucacccgcuggaugcugaucgaggccgagcugaagugcuucgggaacacggccguggccaagugcaacgagaagcacgacgaggaguucugcgacaugcuccggcuguucgacuucugcaagcaggcgauccgccggcugaagaccccggcccagauguccauccagcucaucaacaaggccgugaacgcccugaucaacgaccagcugaucaugaagaaccaccuccgcgacaucaugggcauccccuacugcaacuacagcaaguacugcuaccugaaccacaccgucaccgggaagacgucccugccccggugcugccucgugagcaacggcuccuaccugaacgagacccacuucagcgacgacaucgagcagcaggccgacaacaugaucaccgagcugcuccagaaggaguacaucgaccgccagggcaagaccccgcuggggcugguggaccuguucgucuucuccacgagcuucuaccucaucuccaucuuccugcaccuggugaagauccccacccaccggcacaucaccggcaagcccugccccaagccgcaccgccucaaccacauggggaucugcagcugcggccuguacaaccaccccggggugcccgucaaguggaagcgguga

SEQ ID NO: 26417 - RNA, 1473 nt, Artificial Sequence
  derived and/or modified CDS sequence (opt1) from LASV(Lassa virus/H.sapiens-wt/NGA/2016/ISTH_0017;Clade II)__AVO03567__GPCmut4
augggccagaucaucaccuucuuccaggaggugccccacgucaucgaggaggugaugaacaucgugcugaucgcccucagccugcuggccauccucaaggggaucuacaacgucgcgaccugcggccuguucgggcugguguccuuccuccugcugugcggccgcagcugcuccacgaccuacaaggggguguacgagcuccagacccuggagcuggacauggccagccucaacaugugcaugccgcuguccugcaccaagaacaacagccaccacuacaucauggucggcaacgagacgggccuggagcucacccugaccaacaccuccaucaucaaccacaaguucugcaaccugagcgacgcccacaagaagaaccucuacgaccacgcccugauguccaucaucagcacguuccaccuguccauccccaacuucaaccaguacgaggccaugagcugcgacuucaacgggggcaagaucuccgugcaguacaaccucagccacaccuacgcgaucgacgccgccaaccacugcgggaccaucgccaacggcgugcugcagaccuucaugcggauggcguggggcggguccuacaucgcccuggacagcggcaagggguccugggacugcaucaugacgagcuaccaguaccucaucauccagaacaccaccugggaggaccacugccaguucucccgccccagccccaucggcuaccuggggcugcucagccagcggacccgcgacaucuacaucucccggcgccggcgcggcacguucaccuggacccugagcgacuccgagggcaacgagacccccgggggcuacugccugacgcgguggaugcucaucgaggccgagcugaagugcuucgggaacaccgccgucgccaagugcaacgagaagcacgacgaggaguucugcgacaugcugcgccucuucgacuucugcaagcaggcgauccggcgccugaagaccccggcccagaugagcauccagcugaucaacaaggccgugaacgcccucaucaacgaccagcugaucaugaagaaccaccuccgggacaucaugggcauccccuacugcaacuacuccaaguacugcuaccugaaccacaccgugacggggaagaccagccugccccgcugcugccuggucuccaacggcagcuaccucaacgagacccacuucuccgacgacaucgagcagcaggccgacaacaugaucaccgagcugcugcagaaggaguacauggaccggcagggcaagacgccgcucgggcugguggaccuguucguguucagcaccuccuucuaccugaucagcaucuuccuccaccugguccgcauccccacccaccggcacgugaucggcaagcccugccccaagccgcaccgccugaaccacauggggaucugcuccugcggccucuacaagcaccccggggugcccgucaaguggaagcgguga

SEQ ID NO: 26418 - RNA, 1473 nt, Artificial Sequence
  derived and/or modified CDS sequence (opt1) from LASV(Lassa virus/H.sapiens-wt/NGA/2018/ISTH_0959;Clade II)__AVV65099__GPCmut4
augggccagaucaucaccuucuuccaggaggugccccacgucaucgaggaggugaugaacaucgugcugaucgcccucagccugcuggccauccucaaggggaucuacaacgucgugaccugcggccuguucgggcugguguccuuccuccugcugugcggccgcagcugcuccacgaccuacaagggggucuacgagcuccagacccuggagcuggacauggcgagccucaacaugugcaugccgcuguccugcaccaagaacaacagccaccacuacaucauggugggcaacgagacgggccuggagcucacccugaccaacaccuccaucaucaaccacaaguucugcaaccugagcgacgcccacaagaagaaccucuacgaccacgcccugauguccaucaucagcacguuccaccuguccauccccaacuucaaccaguacgaggccaugagcugcgacuucaacgggggcaagaucuccgugcaguacaaccucagccacgccuacgcgaucgacgccgccaaccacugcgggaccaucgccaacggcguccugcagaccuucaugcggauggcguggggcggguccuacaucgcccuggacagcggcaagggguccugggacugcaucaugaccagcuaccaguaccucaucauccagaacacgaccugggaggaccacugccaguucucccgccccagccccaucggcuaccuggggcugcucagccagcggacccgcgacaucuacaucucccggcgccggcgcggcaccuucacguggacccugagcgacuccgagggcaacgagacccccgggggcuacugccugacccgguggaugcucaucgaggccgagcugaagugcuucgggaacacggccguggccaagugcaacgagaagcacgacgaggaguucugcgacaugcugcgccucuucgacuucugcaagcaggcgauccggcgccugaagaccccggcccagaugagcauccagcugaucaacaaggccgugaacgcccucaucaacgaccagcugaucaugaagaaccaccuccgggacaucaugggcauccccuacugcaacuacuccaaguacugcuaccugaaccacaccgucaccgggaagacgagccugccccgcugcugccugguguccaacggcagcuaccucaacgagacccacuucuccgacgacaucgagcagcaggccgacaacaugaucaccgagcugcugcagaaggaguacaucgaccggcagggcaagaccccgcucgggcugguggaccuguucgucuucagcacguccuucuaccugaucagcaucuuccuccaccuggugaagauccccacccaccgccacgugaucggcaagcccugccccaagccgcaccggcugaaccacauggggaucugcuccugcggccucuacaagcaccccgggguccccgugaaguggaagcgcuga

SEQ ID NO: 26419 - RNA, 1473 nt, Artificial Sequence
  derived and/or modified CDS sequence (opt1) from LASV(LASV003-NIG-2008;Clade II)__AIT17580__GPCmut4
augggccagaucaucaccuucuuccaggaggugccccacgucaucgaggaggugaugaacaucgugcugaucgcccucagccugcuggccauccucaaggggaucuacaacgucgcgaccugcggccuguucgggcugguguccuuccuccugcugugcggccgcagcugcuccacgaccuacaaggggguguacgagcuccagacccuggagcuggacauggccagccucaacaugugcaugccgcuguccugcaccaagaacaacagccaccacuacaucauggucggcaacgagacgggccuggagcucacccugaccaacaccuccaucaucaaccacaaguucugcaaccugagcgacgcccacaagaagaaccucuacgaccacgcccugauguccaucaucagcacguuccaccuguccauccccaacuucaaccaguacgaggccaugagcugcgacuucaacgggggcaagaucuccgugcaguacaaccucagccacaccuacgcgguggacgccgccaaccacugcgggaccaucgccaacggcguccugcagaccuucaugcggauggcguggggcggguccuacaucgcccuggacagcggcaagggguccugggacugcaucaugacgagcuaccaguaccucaucauccagaacaccaccugggaggaccacugccaguucucccgccccagccccaucggcuaccuggggcugcucagccagcggacccgcgacaucuacaucucccggcgccggcgcggcacguucaccuggacccugagcgacuccgagagcaacgagaccccgggcggguacugccugacgcgguggaugcucaucgaggccgagcugaagugcuucggcaacaccgccguggccaagugcaacgagaagcacgacgaggaguucugcgacaugcugcgccucuucgacuucugcaagcaggcgauccggcgccugaaggcccccgcccagauguccauccagcugaucaacaaggccgugaacgcccucaucaacgaccagcugaucaugaagaaccaccuccgggacaucauggggauccccuacugcaacuacagcaaguacugcuaccugaaccacaccgucaccggccgcacgucccugccccggugcugccuggugagcaacggguccuaccucaacgagacccacuucagcgacgacaucgagcagcaggcggacaacaugaucaccgagcugcugcagaaggaguacauggaccgccagggcaagaccccgcucggccugguggaccuguucgucuucuccacgagcuucuaccugaucuccaucuuccuccaccuggugaagauccccacccaccggcacgugaucgggaagcccugccccaagccgcaccgccugaaccacaugggcaucugcagcugcgggcucuacaagcaccccggcguccccgugaaguggaagcgguga

SEQ ID NO: 26420 - RNA, 1473 nt, Artificial Sequence
  derived and/or modified CDS sequence (opt1) from LASV(LASV035-NIG-2009;Clade II)__AIT17588__GPCmut4
augggccagaucaucaccuucuuccaggaggugccccacgucaucgaggaggugaugaacaucgugcugaucgcccucagccugcuggccauccucaaggggaucuacaacgucgcgaccugcggccuguucgggcugguguccuuccuccugcugugcggccgcagcugcuccacgaccuacaaggggguguacgagcuccagacccuggagcuggacauggccagccucaacaugugcaugccgcuguccugcaccaagaacaacagccaccacuacaucauggucggcaacgagacgggccuggagcucacccugaccaacaccuccaucaucaaccacaaguucugcaaccugagcgacgcccacaagaagaaccucuacgaccacgcccugauguccaucaucagcacguuccaccuguccauccccaacuucaaccaguacgaggccaugagcugcgacuucaacgggggcaagaucuccgugcaguacaaccucagccacgcguacgccguggacgccgccaaccacugcgggaccaucgcgaacggcguccugcagaccuucaugcggauggccuggggcggguccuacaucgcccuggacagcggcaagggguccugggacugcaucaugaccagcuaccaguaccucaucauccagaacacgaccugggaggaccacugccaguucucccgccccagccccaucggcuaccuggggcugcucagccagcggacccgcgacaucuacaucucccggcgccggcgcggcaccuucacguggacccugagcgacuccgagggcaacgagacccccgggggcuacugccugacccgguggaugcucaucgaggccgagcugaagugcuucgggaacacggccguggcgaagugcaacgagaagcacgacgaggaguucugcgacaugcugcgccucuucgacuucugcaagcaggccauccggcgccugaaggccccggcccagaugagcauccagcugaucaacaaggccgugaacgcgcucaucaacgaccagcugaucaugaagaaccaccuccgggacaucaugggcauccccuacugcaacuacuccaaguacugcuaccugaaccacaccgucaccgggaagaccagccugccccgcugcugccugguguccaacggcagcuaccucaacgagacgcacuucuccgacgacaucgagcagcaggccgacaacaugaucaccgagcugcugcagaaggaguacaucgaccggcagggcaagaccccgcucgggcugguggaccuguucgucuucagcaccuccuucuaccugaucagcaucuuccuccaccuggugaagauccccacgcaccgccacgugaucggcaagcccugccccaagccgcaccggcugaaccacauggggaucugcuccugcggccucuacaagcaccccgggguccccgugaaguggaagcgcuga

SEQ ID NO: 26421 - RNA, 1473 nt, Artificial Sequence
  derived and/or modified CDS sequence (opt1) from LASV(LASV1000-NIG-2009;Clade II)__AIT17782__GPCmut4
augggccagaucaucaccuucuuccaggaggugccccacgucaucgaggaggugaugaacaucgugcugaucgcccucagccugcuggccauccucaaggggaucuacaacgucgcgaccugcggccuguucgggcugguguccuuccuccugcugugcggccgcagcugcuccacgaccuacaaggggguguacgagcuccagacccuggagcuggacauggccagccucaacaugugcaugccgcuguccugcaccaagaacaacagccaccacuacaucauggucggcaacgagacgggccuggagcucacccugaccaacaccuccaucaucaaccacaaguucugcaaccugagcgacgcccacaagaagaaccucuacgaccacgcccugauguccaucaucagcacguuccaccuguccauccccaacuucaaccaguacgaggccaugagcugcgacuucaacgggggcaagaucuccgugcaguacaaccucagccacaccuacgcgguggacgccgccaaccacugcgggaccaucgccaacggcguccugcagaccuucaugcggauggcguggggcggguccuacaucgcccuggacagcggcaagggguccugggacugcaucaugacgagcuaccaguaccucaucauccagaacaccaccugggaggaccacugccaguucucccgccccagccccaucggcuaccuggggcugcucagccagcggacccgcgacaucuacaucucccggcgccggcgcggcacguucaccuggacccugagcgacuccgagggcaacgagacccccgggggcuacugccugacgcgguggaugcucaucgaggccgagcugaagugcuucgggaacaccgccguggccaagugcaacgagaagcacgacgaggaguucugcgacaugcugcgccucuucgacuucugcaagcaggcgaucaagcggcugaagaccccggcccagaugagcauccagcugaucaacaaggccgugaacgcccucaucaacgaccagcugaucaugaagaaccaccuccgcgacaucaugggcauccccuacugcaacuacuccaaguacugcuaccugaaccacaccgucacggggaagaccagccugccccggugcugccugguguccaacggcagcuaccucaacgagacccacuucuccgacgacaucgagcagcaggccgacaacaugaucaccgagcugcugcagaaggaguacaucgaccgccagggcaagacgccgcucgggcugguggaccuguucgucuucagcaccuccuucuaccugaucagcaucuuccuccaccuggugaagauccccacccaccggcacguggucggcaagcccugccccaagccgcaccgccugaaccacauggggaucugcuccugcggccucuacaagcaccccggggugcccgugaaguggaagcgguga

SEQ ID NO: 26422 - RNA, 1473 nt, Artificial Sequence
  derived and/or modified CDS sequence (opt1) from LASV(LASV221-NIG-2010;Clade II)__AIT17624__GPCmut4
augggccagaucaucaccuucuuccaggaggugccccacgucaucgaggaggugaugaacaucgugcugaucgcccucagccugcuggccauccucaaggggaucuacaacgucgcgaccugcggccuguucgggcugguguccuuccuccugcugugcggccgcagcugcuccacgaccuacaaggggguguacgagcuccagacccuggagcuggacauggccagccucaacaugugcaugccgcuguccugcaccaagaacaacagccaccacuacaucauggucggcaacgagacgggccuggagcucacccugaccaacaccuccaucaucaaccacaaguucugcaaccugagcgacgcccacaagaagaaccucuacgaccacgcccugauguccaucaucagcacguuccaccuguccauccccaacuucaaccaguacgaggccaugagcugcgacuucaacgggggcaagaucuccgugcaguacaaccucagccacaccuacgcgaucgacgccgccaaccacugcgggaccaucgccaacggcgugcugcagaccuucaugcggauggcguggggcggguccuacaucgcccuggacagcggcaagggguccugggacugcaucaugacgagcuaccaguaccucaucauccagaacaccaccugggaggaccacugccaguucucccgccccagccccaucggcuaccuggggcugcucagccagcggacccgcgacaucuacaucucccggcgccggcgcggcacguucaccuggacccugagcgacuccgagggcaacgagacccccgggggcuacugccugacgcgguggaugcucaucgaggccgagcugaagugcuucgggaacaccgccgucgccaagugcaacgagaagcacgacgaggaguucugcgacaugcugcgccucuucgacuucugcaagcaggcgauccggcgccugaagaccccggcccagaugagcauccagcugaucaacaaggccgugaacgcccucaucaacgaccagcugaucaugaagaaccaccuccgggacaucaugggcauccccuacugcaacuacuccaaguacugcuaccugaaccacaccgugacggggaagaccagccugccccgcugcugccuggucuccaacggcagcuaccucaacgagacccacuucuccgacgacaucgagcagcaggccgacaacaugaucaccgagaugcugcagaaggaguacauggaccggcagggcaagacgccgcuggggcucguggaccuguucguguucagcaccuccuucuaccugaucagcaucuuccugcaccucgucaagauccccacccaccgccacgugaucggcaagcccugccccaagccgcaccggcugaaccacauggggaucugcuccugcggccuguacaagcaccccggggugcccgucaaguggaagcgcuga

SEQ ID NO: 26423 - RNA, 1473 nt, Artificial Sequence
  derived and/or modified CDS sequence (opt1) from LASV(LASV237-NIG-2010;Clade II)__AIT17638__GPCmut4
augggccagaucaucaccuucuuccaggaggugccccacgucaucgaggaggugaugaacaucgugcugaucgcccucagccugcuggccauccucaaggggaucuacaacgucgcgaccugcggccuguucgggcugguguccuuccuccugcugugcggccgcagcugcuccacgaccuacaaggggguguacgagcuccagacccuggagcuggacauggccagccucaacaugugcaugccgcuguccugcaccaagaacaacagccaccacuacaucauggucggcaacgagacgggccuggagcucacccugaccaacaccuccaucaucaaccacaaguucugcaaccugagcgacgcccacaagaaggaccucuacgaccacgcccugauguccaucaucagcacguuccaccuguccauccccaacuucaaccaguacgaggccaugagcugcgacuucaacgggggcaagaucuccgugcaguacaaccucagccacaccuacgcgguggacgccgccaaccacugcgggaccaucgccaacggcguccugcagaccuucaugcggauggcguggggcggguccuacaucgcccuggacagcggcaagggguccugggacugcaucaugacgagcuaccaguaccucaucauccagaacaccaccugggaggaccacugccaguucucccgccccagccccaucggcuaccuggggcugcucagccagcggacccgcgacaucuacaucucccggcgccggcgcggcacguucaccuggacccugagcgacuccgagggcaacgagacccccgggggcuacugccugacgcgguggaugcucaucgaggccgagcugaagugcuucgggaacaccgccguggccaagugcaacgagaagcacgacgaggaguucugcgacaugcugcgccucuucgacuucugcaagcaggcgauccggcgccugaagaccccggcccagaugagcauccagcugaucaacaaggccgugaacgcccucaucaacgaccagcugaucaugaagaaccaccuccgggacaucaugggcauccccuacugcaacuacuccaaguacugcuaccugaaccacaccgucacggggaagaccagccugccccgcugcugccugguguccaacggcagcuaccucaacgagacccacuucuccgacgacaucgagcagcaggccgacaacaugaucaccgagcugcugcagaaggaguacauggaccggcagggcaagacgccgcucgggcugguggaccuguucgucuucagcaccuccuucuaccugaucagcaucuuccuccaccugaucaagauccccacccaccgccacaucaccggcaagcccugccccaagccgcaccggcugaaccacauggggaucugcuccugcggccucuacaagcaccccggggugcccgugaaguggaagcgcuga

SEQ ID NO: 26424 - RNA, 1473 nt, Artificial Sequence
  derived and/or modified CDS sequence (opt1) from LASV(LASV253-NIG-2011;Clade II)__AIT17670__GPCmut4
augggccagaucaucaccuucuuccaggaggugccccacgucaucgaggaggugaugaacaucgugcugaucgcccucagccugcuggccauccucaaggggaucuacaacgucgcgaccugcggccuguucgggcugguguccuuccuccugcugugcggccgcagcugcuccacgaccuacaaggggguguacgagcuccagacccuggagcuggacauggccagccucaacaugugcaugccgcuguccugcaccaagaacaacagccaccacuacaucauggucggcaacgagacgggccuggagcucacccugaccaacaccuccaucaucaaccacaaguucugcaaccugagcgacgcccacaagaagaaccucuacgaccacgcccugauguccaucaucagcacguuccaccuguccauccccaacuucaaccaguacgaggccaugagcugcgacuucaacgggggcaagaucuccgugcaguacaaccucagccacaccuacgcgguggacgccgccaaccacugcgggaccaucgccaacggcguccugcagaccuucaugcggauggcguggggcggguccuacaucgcccuggacagcggcaagggguccugggacugcaucaugacgagcuaccaguaccucaucauccagaacaccaccugggaggaccacugccaguucucccgccccagccccaucggcuaccuggggcugcucagccagcggacccgcgacaucuacaucucccggcgccggcgcggcacguucaccuggacccugagcgacuccgagggcaacgagacccccgggggcuacugccugacgcgguggaugcucaucgaggccgagcugaagugcuucgggaacaccgccguggccaagugcaacgagaagcacgacgaggaguucugcgacaugcugcgccucuucgacuucugcaagcaggcgauccggcgccugaaggccccggcccagaugagcauccagcugaucaacaaggccgugaacgcccucaucaacgaccagcugaucaugaagaaccaccuccgggacaucaugggcauccccuacugcaacuacuccaaguacugcuaccugaaccacaccgucaccgggcgcacgagccugccccggugcugccugguguccaacggcagcuaccucaacgagacccacuucuccgacgacaucgagcagcaggcggacaacaugaucaccgagcugcugcagaaggaguacaucgaccgccagggcaagaccccgcucgggcugguggaccuguucgucuucagcacguccuucuaccugaucagcaucuuccuccaccuggugaagauccccacccaccggcacaucaucggcaagcccugccccaagccgcaccgccugaaccacauggggaucugcuccugcggccucuacaagcaccccggggugcccgucaaguggaagcgguga

SEQ ID NO: 26425 - RNA, 1473 nt, Artificial Sequence
  derived and/or modified CDS sequence (opt1) from LASV(LASV254-NIG-2011;Clade II)__AIT17674__GPCmut4
augggccagaucaucaccuucuuccaggaggugccccacgucaucgaggaggugaugaacaucgugcugaucgcccucagccugcuggccauccucaaggggaucuacaacgucgcgaccugcggccuguucgggcugguguccuuccuccugcugugcggccgcagcugcuccacgaccuacaaggggguguacgagcuccagacccuggagcuggacaugaccaaccucaacaugugcaugccgcugagcugcacgaagaacaacucccaccacuacaucauggucggcaacgagaccggccuggagcucacccugaccaacacgagcaucaucaaccacaaguucugcaaccuguccgacgcccacaagaagaaccucuacaaccacgcccugaugagcaucaucuccaccuuccaccugagcauccccaacuucaaccaguacgaggccauguccugcgacuucaacgggggcaagaucagcgugcaguacaaccucucccacagcuacgccguggacgcggccaaccacugcgggaccaucgccaacggcguccugcagaccuucaugcggauggccuggggcggguccuacaucgcgcuggacagcggcaaggggaacugggacugcaucaugacguccuaccaguaccucaucauccagaacaccaccugggaggaccacugccaguucagccgccccucccccaucggcuaccuggggcugcucagccagcggacccgcgacaucuacaucagccggcgccggcgcggcacguucaccuggacccuguccgacagcgagggcaacgagacccccgggggcuacugccugacgcgguggaugcucaucgaggccgagcugaagugcuucgggaacaccgccguggccaagugcaacgagaagcacgacgaggaguucugcgacaugcugcgccucuucgacuucugcaagcaggccauccggcgccugaagaccccggcgcaggccaacauccagcugaucaacaaggccgugaacgcccucaucaacgaccagcugaucaugaagaaccaccuccgggacaucaugggcauccccuacugcaacuacuccaaguacugcuaccugaaccacaccgucacggggaagaccagccugccccgcugcugccugguguccaacggcagcuaccucaacgagacccacuucuccgacgacaucgagcagcaggccgacaacaugaucaccgagcugcugcagaaggaguacauggaccggcagggcaagacgccgcucgggcugguggaccuguucgucuucagcaccuccuucuaccugaucagcaucuuccuccaccuggugaagauccccacccaccgccacgugaucggcaagcccugccccaagccgcaccggcugaaccacauggggaucugcuccugcggccucuacaagcaccccgggguccccgugaaguggaagcgcuga

SEQ ID NO: 26426 - RNA, 1473 nt, Artificial Sequence
  derived and/or modified CDS sequence (opt1) from LASV(Nig08-A19;Clade III)__ADU56618__GPCmut4
augggccagaucgugaccuucuuccaggaggucccccacgugaucgaggaggugaugaacaucguccugaucgcccucagcauccuggccauccugaaggggcucuacaacaucgcgaccugcggccugaucgggcuggugacguuccuccugcuguccggccgcagcugcuccaugaccuacaaggggguguacgagcuccagacccuggagcugaacaugaacacccucaacaugugcaugccgcugagcugcacgaagaacaacucccaccacuacaucauggucggcaacgagaccggccuggagcucacccugaccaacacgagccugcuccaccacaaguucugcaaccuguccgacgcccacaagaagaaccuguacgaccacacccucaugagcaucaucuccaccuuccaccugagcauccccaacuucaaccaguacgaggccauguccugcgacuucaacgggggcaagaucaccgugcaguacaaccugagccacuccuacgccaucgacgccgcgaaccacugcgggacgguggccaacggcguccuccagaccuucaugcggauggccuggggcgggagcuacaucgcccuggacuccggccgcgggaagugggacugcaucaugaccagcuaccaguaccugaucauccagaacaccacgugggaggaccacugccaguucucccggcccagccccaucggcuaccucgggcugcugucccagcgcacccgggacaucuacaucagccgccggcgccggggcaccuucaccuggacgcucagcgacuccgagggcaacgagacccccgggggcuacugccugacccgcuggaugcugaucgaggcggagcucaagugcuucgggaacaccgccguggccaagugcaacgagaagcacgacgaggaguucugcgacaugcugcggcuguucgacuucugcaagcaggccauccgccggcucaaggccccggcgcagaugagcauccagcugaucaacaaggccgugaacgcccugaucaacgaccagcucaucaugaagaaccaccuccgcgacaucaugggcauccccuacugcaacuacuccaaguacugcuaccugaaccacacgagcaccgggcggaccucccugccccgcugcugccuggucagcaacggcuccuaccugaacgagacccacuucagcgacgacaucgagcagcaggccgacaacaugaucacggagaugcuccagaaggaguaccuggaccggcagggcaagaccccgcuggggcugguggaccucuucguguucuccaccagcuucuaccugaucuccaucuuccugcaccucgucaagauccccacccaccgccacaucgugggcaagcccugccccaagccgcaccggcugaaccacauggggaucugcagcugcggccuguacaagcagcccggggugcccguccgcuggaagcgguga

SEQ ID NO: 26427 - RNA, 1476 nt, Artificial Sequence
  derived and/or modified CDS sequence (opt1) from LASV(G1180-SLE-2010;Clade IV)__AIT17168__GPCmut4
augggccagaucgugaccuucuuccaggaggucccccacgugaucgaggaggugaugaacaucguccugaucgcccucagcauccuggccgugcugaaggggcucuacaacuucgcgaccugcggccugguggggcugcucacguuccugcugcucugcggccgcuccugcaccgccagccgguacaagggggucuacgagcugcagacccuggagcucaacauggagacccugaacaugugcaugccgcuguccugcacgaagaacaacagccaccacuacaucauggugggcaacgagaccggccucgagcugacccugaccaacacguccaucaucaaccacaaguucugcaaccucagcgacgcccacaagaagaaccuguacgaccacgcccugauguccaucaucagcaccuuccaccucuccauccccaacuucaaccaguacgaggccaugagcugcgacuucaacgggggcaagaucuccgugcaguacaaccugagccacuccuacgcgggggacgccgccaaccacugcggcaccgucgccaacggggugcugcagaccuucaugcgcauggcguggggcggcagcuacaucgcccucgacuccgggcacggcagcugggacugcaucaugacguccuaccaguaccugaucauccagaacaccaccugggaggaccacugccaguucagccggcccucccccaucggguaccugggccuccugagccagcgcacccgggacaucuacaucagccgccggcgccggggcacguucaccuggacccuguccgacagcgaggggaaggacaccccgggcggguacugccucacgcgcuggaugcugaucgaggccgagcugaagugcuucggcaacaccgccguggccaagugcaacgagaagcacgacgaggaguucugcgacaugcuccggcuguucgacuucugcaagcaggcgauccagcgccugaaggcccccgcccagauguccauccagcucaucaacaaggccgucaacgcccugaucaacgaccagcugaucaugaagaaccaccuccgggacaucauggggauccccuacugcaacuacagcaaguacugcuaccugaaccacaccaccacgggcaagaccucccugcccaagugcugccucgugagcaacggcuccuaccugaacgagacccacuucagcgacgacaucgagcagcaggcggacaacaugaucaccgagaugcugcagaaggaguacauggagcgccaggggaagacgccgcucggccugguggaccuguucgucuucuccaccagcuucuaccugaucuccaucuuccuccaccuggugaagauccccacccaccggcacaucgugggcaagagcugccccaagccccaccgccugaaccacauggggaucugcuccugcgggcucuacaagcagccgggcguccccgugaaguggaagcgguga

SEQ ID NO: 26428 - RNA, 1476 nt, Artificial Sequence
  derived and/or modified CDS sequence (opt1) from LASV(G1442-SLE-2011;Clade IV)__AIT17180__GPCmut4
augggccagaucgugaccuucuuccaggaggucccccacgugaucgaggaggugaugaacaucguccugaucgcccucagcauccuggccgugcugaaggggcucuacaacguggcgaccugcggccugaucgggcuggucacguuccuccugcugugcggccgcuccugcaccaccacccucuacaaggggguguacgagcugcagacgcuggagcucaacauggagacccugaacaugugcaugccgcugagcugcaccaagaacaacucccaccacuacauccgggugggcaacgagaccggccucgagcugacgcugaccaacaccagcaucaucaaccacaaguucugcaaccucuccgacgcccacaagaagaaccuguacgaccacgcccugaugagcaucaucuccaccuuccaccucagcauccccaacuucaaccaguacgaggccauguccugcgacuucaacgggggcaagaucagcguccaguacaaccugucccacagcuacgccggggacgcggccaaccacugcggcacgguggccaacggggugcugcagaccuucaugcgcauggccuggggcggcuccuacaucgcgcucgacagcgggcggggcaacugggacugcaucaugaccuccuaccaguaccugaucauccagaacaccacgugggacgaccacugccaguucagccgccccucccccaucggguaccugggccuccugagccagcggacccgcgacgucuacaucucccggcgccggcgcggcaccuucaccuggacgcugagcgacagcgaggggaaggacaccccgggcggguacugccucacccgguggaugcugaucgaggccgagcugaagugcuucggcaacaccgccguggccaagugcaacgagaagcacgacgaggaguucugcgacaugcuccgccuguucgacuucugcaagcaggccauccagcggcugaaggcgcccgcccagauguccauccagcucaucaacaaggccgugaacgcccugaucaacgaccagcugaucaugaagaaccaccuccgcgacaucauggggauccccuacugcaacuacagcaaguacugcuaccugaacaacacggccaccggcaagaccucccugcccaagugcugccucaucagcaacggcuccuaccugaacgagacccacuucagcgacgacaucgagcaggaggcggacaacaugaucacggagaugcugcagaaggaguacauggagcggcaggggaagaccccgcucggccuggucgaccuguucguguucuccaccagcuucuaccugaucuccaucuuccuccaccuggugaagauccccacccaccgccacaucgucggcaagagcugccccaagccccaccggcugaaccacauggggaucugcuccugcgggcucuacaagcagccgggcgugcccgugcgcuggaagcgguga

SEQ ID NO: 26429 - RNA, 1476 nt, Artificial Sequence
  derived and/or modified CDS sequence (opt1) from LASV(G3010-SLE-2013;Clade IV)__AIT17344__GPCmut4
augggccagaucgugaccuucuuccaggaggucccccacgugaucgaggaggugaugaacaucguccugaucgcccucagcauccuggccgugcugaaggggcucuacaacuucgcgaccugcggccugguggggcuggucacguuccuccugcugugcggccgcuccugcaccaccagccucuacaaggggguguacgagcugcagacccuggagcucaacauggagacgcugaacaugugcaugccgcuguccugcaccaagaacaacagccaccacuacaucauggugggcaacgagaccggccucgagcugacccugacgaacaccuccaucaucaaccacaaguucugcaaccucagcgacgcccacaagaagaaccuguacaaccacgcccugauguccaucaucagcaccuuccaccucuccauccccaacuucaaccaguacgaggccaugagcugcgacuucaacgggggcaagaucuccguccaguacaaccugagccacuccuacgccggggacgcggccagccacugcggcaccguggccaacggggugcugcagacguucaugcggauggccuggggcggcuccuacaucgcgcucgacagcggguacggcaagugggacugcaucaugaccuccuaccaguaccugaucauccagaacaccaccugggaggaccacugccaguucagccgccccucccccaucggguaccugggccuccugagccagcggacgcgcgacaucuacaucagccggcgccggcgcggcaccuucaccuggacccuguccgacagcgaggggaaggacacgccgggcggguacugccucacccgguggaugcugaucgaggccgagcugaagugcuucggcaacaccgccgucgccaagugcaacgagaagcacgacgaggaguucugcgacaugcuccgccuguucgacuucugcaagcaggccauccagcggcugaagacccccgcgcagauguccauccagcucaucaacaaggccgugaacgcccugaucaacgaccagcugaucaugaagaaccaccuccgcgacaucauggggauccccuacugcaacuacagcaaguacugcuaccugaaccacacgaccaccggcaagaccucccugcccaagugcugccucgugagcaacggcuccuaccugaacgagacgcacuucagcgacgacaucgagcagcaggccgacaacaugaucaccgagaugcugcagaaggaguacauggagcggcaggggaagaccccgcucggccuggucgaccuguucguguucuccaccagcuucuaccugaucuccaucuuccuccaccuggugaagauccccacgcaccgccacaucgucggcaagagcugccccaagccccaccggcugaaccacauggggaucugcuccugcgggcucuacaagcagccgggcgugcccgugcgcuggaagcgguga

SEQ ID NO: 26430 - RNA, 1476 nt, Artificial Sequence
  derived and/or modified CDS sequence (opt1) from LASV(G502-SLE-2009;Clade IV)__AIT17126__GPCmut4
augggccagaucgugaccuucuuccaggaggucccccacgugaucgaggaggugaugaacaucguccugaucgcccucagcauccuggccgugcugaaggggcucuacaacuucgcgaccugcggccugguggggcugcucacguuccugcugcucugcggccgcuccugcaccaccgggcuguacaagggcgucuacgagcugcagacccucgagcugaacauggagacgcugaacaugugcaugccgcucagcugcaccaagaacaacucccaccacuacaucauggugggcaacgagaccgggcuggagcugacccucacgaacaccagcaucaucaaccacaaguucugcaaccuguccgacgcccacaagaagaaccuguacgaccacgcccucaugagcaucaucuccaccuuccaccugagcauccccaacuucaaccaguacgaggccauguccugcgacuucaacggcgggaagaucagcgugcaguacaaccugucccacagcuacgccggcgacgcggccgaccacugcgggaccgucgccaacggcgugcuccagacguucaugcggauggccuggggcggguccuacaucgcgcuggacagcggccgcgggcggugggacugcaucaugaccuccuaccaguaccugaucauccagaacaccaccugggaggaccacugccaguucagccgccccucccccaucggcuaccucggccugcugagccagcggacgcgcgacaucuacaucucccggcgccggcgcgggaccuucaccuggacccucagcgacagcgagggcaaggacacgcccgggggcuacugccugacccgguggaugcugaucgaggccgagcucaagugcuucgggaacaccgccguggccaagugcaacgagaagcacgacgaggaguucugcgacaugcugcgccuguucgacuucugcaagcaggccauccagcggcucaaggcgccggcccagauguccauccagcugaucaacaaggccgucaacgcccugaucaacgaccagcucgugaugaagaaccaccuccgcgacaucaugggcauccccuacugcaacuacagccgguacugcuaccugaaccacaccacgaccggccgcaccucccugcccaagugcugccuggugagcaacggguccuaccugaacgagacccacuucagcgacgacaucgagcagcaggccgacaacaugaucacggagaugcuccagaaggaguacauggagcggcagggcaagaccccgcuggggcuggucgaccuguucguguucuccaccagcuucuaccucaucuccaucuuccugcaccuggugaagauccccacccaccgccacaucgucggcaagagcugccccaagccccaccggcucaaccacauggggaucugcuccugcggccuguacaagcagccgggcgugcccgugaaguggaagcgcuga

SEQ ID NO: 26431 - RNA, 1476 nt, Artificial Sequence
  derived and/or modified CDS sequence (opt1) from LASV(G733-SLE-2010;Clade IV)__AIT17154__GPCmut4
augggccagaucgugaccuucuuccaggaggucccccacgugaucgaggaggugaugaacaucguccugaucgcccucagcauccuggccgugcugaaggggcucuacaacuucgcgaccugcggcaucguggggcuggucuccuuccugcuccugugcggccgcagcugcacgaccucccuguacaaggggguguacgagcuccagacccuggagcugaacauggagacccucaacaugugcaugccgcugagcugcacgaagaacaacucccaccacuacaucauggugggcaacgagaccggccuggagcucacccugaccaacacgagcaucaucaaccacaaguucugcaaccuguccgacgcccacaagaagaaccucuacgaccacgcccugaugagcaucaucuccaccuuccaccugagcauccccaacuucaaccaguacgaggccauguccugcgacuucaacgggggcaagaucagcguccaguacaaccucucccacagcuacgccggggacgcggccaaccacugcggcaccaucgccaacggggugcugcagaccuucaugcggauggccuggggcggcuccuacaucgcgcuggacagcgggcgcgaccggugggacugcaucaugacguccuaccaguaccucaucauccagaacaccaccugggaggaccacugccaguucagccgccccucccccaucggcuaccuggggcugcucagccagcggacccgcgacaucuacaucagccggcgccggcgcggcacguucaccuggacccuguccgacagcgagggcaaggacacccccgggggcuacugccugacgcgguggaugcucaucgaggccgagcugaagugcuucgggaacaccgccguggccaagugcaacgagaagcacgacgaggaguucugcgacaugcugcgccucuucgacuucugcaagcaggccauccagcggcugaaggcgccggcccagauguccauccagcugaucaacaaggccgucaacgcccucaucaacgaccagcugaucaugaagaaccaccuccgcgacaucaugggcauccccuacugcaacuacagcaaguacugcuaccugaaccacaccaccacggggaagaccucccugcccaagugcugccuggugagcaacggcuccuaccucaacgagacccacuucagcgacgacaucgagcagcaggccgacaacaugaucaccgagaugcugcagaaggaguacauggagcggcagggcaagacgccgcuggggcucguggaccuguucgucuucuccaccagcuucuaccugaucuccaucuuccugcaccucgugaagauccccacccaccgccacguggucggcaagagcugccccaagccccaccggcugaaccacauggggaucugcuccugcggccuguacgggcagccgggcgugcccgugaaguggaagcgcuga

SEQ ID NO: 26432 - RNA, 1476 nt, Artificial Sequence
  derived and/or modified CDS sequence (opt1) from MOPV/LASV reassortant(IGS-1;Clade IV)__AFY05576__GPCmut4
augggccagaucgugaccuucuuccaggaggucccccacgugaucgaggaggugaugaacaucguccugaucgcccucagcgugcuggccgugcugaaggggcucuacaacuucgcgaccugcggccuggucgggcuggugacguuccuccugcugugcggccgcuccugcaccaccagccucuacaaggggguguacgagcugcagacccuggagcucaacauggagacgcugaacaugugcaugccgcuguccugcaccaagaacaacagccaccacuacaucauggucggcaacgagaccggccucgagcugacccugacgaacaccuccaucaucaaccacaaguucugcaaccucagcgacgcccacaagaagaaccuguacgaccacgcccugauguccaucaucagcaccuuccaccucuccauccccaacuucaaccaguacgaggccaugagcugcgacuucaacgggggcaagaucuccgugcaguacaaccugagccacuccuacgccggggacgcggccaaccacugcggcaccguggccaacgggguccugcagacguucaugcggauggccuggggcggcagcuacaucgcgcucgacuccgggcgcggcaacugggacugcaucaugaccagcuaccaguaccugaucauccagaacaccaccugggaggaccacugccaguucucccggcccagccccaucggguaccugggccuccugucccagcgcacgcgggacaucuacaucagccgccggcgccggggcaccuucaccuggacccugagcgacuccgagggggaggacacgccgggcggguacugccucacccgcuggaugcugaucgaggccgagcugaagugcuucggcaacaccgccguggccaagugcaacgagaagcacgacgaggaguucugcgacaugcuccggcuguucgacuucugcaagcaggccauccagcgccugaaggcgcccgcccagaugagcauccagcucaucaacaaggccgugaacgcccugaucaacgaccagcugaucaugaagaaccaccuccgggacaucauggggauccccuacugcaacuacuccaaguacugcuaccugaaccacaccacgaccggccgcaccagccugcccaagugcugccucgucuccaacggcagcuaccugaacgagacccacuucuccgacgacaucgagcagcaggccgacaacaugaucacggagaugcugcagaaggaguacauggagcggcaggggaagaccccgcucggccugguggaccuguucguguucagcaccuccuucuaccugaucagcaucuuccuccaccuggucaagauccccacccaccgccacaucguggggaaguccugccccaagccccaccggcugaaccacaugggcaucugcagcugcgggcucuacaagcagccgggcgugcccgucaaguggaagcgcuga

SEQ ID NO: 26433 - RNA, 1476 nt, Artificial Sequence
  derived and/or modified CDS sequence (opt1) from LASV(LM765-SLE-2012;Clade IV)__AIT17814__GPCmut4
augggccagaucgugaccuucuuccaggaggucccccacgugaucgaggaggugaugaacaucguccugaucgcccucagcauccuggccgugcugaaggggcucuacaacuucgcgaccugcggccugguggggcuggucacguuccuccugcugugcggccgcuccugcaccaccagccucuacaaggggguguacgagcugcagacccuggagcucaacauggagacgcugaacaugugcaugccgcuguccugcaccaagaacaacagccaccacuacaucauggugggcaacgagaccggccucgagcugacccugacgaacaccuccaucaucgaccacaaguucugcaaccucagcgacgcccaccggaagaaccuguacgaccacgcccugauguccaucaucagcaccuuccaccucuccauccccaacuucaaccaguacgaggccaugagcugcgacuucaacgggggcaagaucuccguccaguacaaccugagccacuccuacgccaaggacgcggccgaccacugcgggaccguggccaacggcgugcugcagacguucaugcgcauggccuggggcgggagcuacaucgcgcucgacuccggccgggggcgcugggacugcaucaugaccagcuaccaguaccugaucauccagaacaccaccugggaggaccacugccaguucucccggcccagccccaucggcuaccuggggcuccugucccagcgcacgcgggacaucuacaucagccgccggcgccggggcaccuucaccuggacccugagcgacuccgagggcaaggacacgcccgggggcuacugccucacccgcuggaugcugaucgaggccgagcugaagugcuucgggaacaccgccgucgccaagugcaacgagaagcacgacgaggaguucugcgacaugcuccggcuguucgacuucugcaagcaggccauccagcgccugaaggcgccggcccagaugagcauccagcucaucaacaaggccgugaacgcccugaucaacgaccagcugaucaugaagaaccaccuccgggacaucaugggcauccccuacugcaacuacuccaaguacugcuaccugaaccacaccacgaccgggaagaccagccugcccaagugcugccucguguccaacggcagcuaccugaacgagacccacuucuccgacgacaucgagcagcaggccgacaacaugaucacggagaugcugcagaaggaguacauggagcgccagggcaagaccccgcucgggcuggucgaccuguucguguucagcaccuccuucuaccugaucagcaucuuccuccaccuggugaagauccccacccaccggcacaucgucggcaagcccugccccaagccgcaccgccugaaccacauggggaucugcuccugcggccucuacaagcagcccggggugcccgugaaguggaagcgguga

SEQ ID NO: 26434 - RNA, 1476 nt, Artificial Sequence
  derived and/or modified CDS sequence (opt1) from LASV(LM776-SLE-2012;Clade IV)__AIT17824__GPCmut4
augggccagaucgugaccuucuuccaggaggucccccacgugaucgaggaggugaugaacaucguccugaucgcccucagcauccuggccgugcugaaggggcucuacaacuucgcgaccugcggccugguggggcuggucacguuccuccugcugugcggccgcuccugcaccaccagcguguacaaggggguguacgagcuccagacccuggagcugaacauggagacgcucaacaugugcaugccgcuguccugcaccaagaacaacagccaccacuacaucauggucggcaacgagaccggccuggagcucacccugacgaacaccuccaucaucaaccacaaguucugcaaccugagcgacgcccacaagaagaaccucuacgaccacgcccugauguccaucaucagcaccuuccaccuguccauccccaacuucaaccaguacgaggccaugagcugcgacuucaacgggggcaagaucuccgugcaguacaaccucagccacuccuacgccggggacgcggccaaccacugcggcaccguggccaacgggguccugcagacguucaugcggauggccuggggcggcagcuacaucgcgcuggacuccgggcacggcaagugggacugcaucaugaccagcuaccaguaccucaucauccagaacaccaccugggaggaccacugccaguucucccgccccagccccaucggguaccugggccugcucucccagcggacgcgcgacaucuacaucagccggcgccggcgcggcaccuucaccuggacccugagcgacuccgaggggaaggacacgccgggcggguacugccugacccgguggaugcucaucgaggccgagcugaagugcuucggcaacaccgccguggccaagugcaacgagaagcacgacgaggaguucugcgacaugcugcgccucuucgacuucugcaagcaggccauccagcggcugaaggcgcccgcccagaugagcauccagcugaucaacaaggccgugaacgcccucaucaacgaccagcugaucaugaagaaccaccuccgcgacaucauggggauccccuacugcaacuacuccaaguacugcuaccugaaccacaccacgaccggcaagaccagccugcccaagugcugccuggucuccaacggcagcuaccucaacgagacccacuucuccgacgacaucgagcagcaggccgacaacaugaucacggagaugcugcagaaggaguacauggagcggcaggggaagaccccgcugggccucguggaccuguucguguucagcaccuccuucuaccugaucagcaucuuccugcaccucgucaagauccccacccaccgccacaucguggggaaguccugccccaagccccaccggcugaaccacaugggcaucugcagcugcgggcuguacaagcagccgggcgugcccguccgcuggaagcgguga

SEQ ID NO: 26435 - RNA, 1476 nt, Artificial Sequence
  derived and/or modified CDS sequence (opt1) from LASV(Mad39;Clade IV)__ANH09722__GPCmut4
augggccagaucgugaccuucuuccaggaggucccccacgugaucgaggaggugaugaacaucguccugaucgcccucagcauccuggccgugcugaaggggcucuacaacguggcgaccugcggccugaucgggcuggucacguuccuccugcugugcggccgcuccugcaccaccacccucuacaaggggguguacgagcugcaggcccuggagcucaacauggagacgcugaacaugugcaugccgcugagcugcaccaagaacaacucccaccacuacauccgggugggcaacgagaccggccucgagcugacccugacgaacaccagccucaucaaccacaaguucugcaaccuguccgacgcccacaagaagaaccuguacgaccacgcccucaugagcaucaucuccaccuuccaccugagcauccccaacuucaaccaguacgaggccauguccugcgacuucaacgacgggaagaucagcguccaguacaaccugucccacaccuacgcgggcgacacggccaaccacugcgggaccguggccaacggcgugcuccagaccuucaugcgcauggccuggggcgggagcuacaucgcgcuggacuccggccgcgggggcugggacugcaucaugaccagcuaccaguaccugaucauccagaacacgaccugggaggaccacugccaguucucccggcccagccccaucggguaccucggccugcugucccagcggacccgcgacaucuacaucagccggcgccggcgcggcaccuucacguggacccucuccgacagcgaggggaaggacaccccgggcggguacugccugacccgguggaugcugaucgaggccgagcucaagugcuucggcaacacggccgucgccaagugcaacgagaagcacgacgaggaguucugcgacaugcugcgccuguucgacuucugcaagcaggccauccagcggcucaaggcgcccgcccagaugagcauccagcugaucaacaaggccgugaacgcccugaucaacgaccagcucaucaugaagaaccaccuccgcgacaucauggggauccccuacugcaacuacuccaaguacugcuaccugaaccacaccgugaccggcaagaccagccugcccaagugcugccuggucuccaacggcagcuaccugaacgagacgcacuucuccgacgacaucgagcagcaggccgacaacaugaucaccgagaugcuccagaaggaguacauggagcggcaggggaagaccccgcugggccugguggaccuguucguguucagcaccuccuucuaccucaucagcaucuuccugcaccuggucaagauccccacgcaccgccacgugguggggaagcccugccccaagccgcaccggcucaaccacaugggcaucugcuccugcggguucuacaagcagcccggcguccccgugcgcuggaagcgguga

SEQ ID NO: 26436 - RNA, 1476 nt, Artificial Sequence
  derived and/or modified CDS sequence (opt1) from LASV(Z0947-SLE-2011;Clade IV)__AIT17840__GPCmut4
augggccagaucgugaccuucuuccaggaggucccccacgugaucgaggaggugaugaacaucguccugaucgcccucagcauccuggccgugcugaaggggcucuacaacuucgcgaccugcggccugguggggcuggucacguuccuccugcugugcggccgcuccugcaccaucagccucuacaaggggguguacgagcugcagacccuggagcucaacauggagacccugaacaugugcaugccgcuguccugcacgaagaacaacagccaccacuacaucauggugggcaacgagaccggccucgagcugacccugaccaacacguccaucaucaaccacaaguucugcaaccucagcgacgcccacaagaagaaccuguacgaccacgcccugauguccaucaucagcaccuuccaccucuccauccccaacuucaaccaguacgaggccaugagcugcgacuucaacgggggcaagaucuccguccaguacaaccugagccacuccuacgccggggacgcggccaaccacugcggcaccguggccaacggggugcugcagaccuucaugcggauggccuggggcggcagcuacaucgcgcucgacuccgggcgcgaccggugggacugcaucaugacgagcuaccaguaccugaucauccagaacaccaccugggaggaccacugccaguucucccgccccagccccaucggcuaccuggggcuccugucccagcggacccgcgacaucuacaucagccggcgccggcgcggcacguucaccuggacccugagcgacuccgagggcaaggacacccccgggggcuacugccucacgcgguggaugcugaucgaggccgagcugaagugcuucgggaacaccgccgucgccaagugcaacgagaagcacgacgaggaguucugcgacaugcuccgccuguucgacuucugcaagcaggccauccagcggcugaaggcgccggcccagaugagcauccagcucaucaacaaggccgugaacgcccugaucaacgaccagcugaucaugaagaaccaccuccgcgacaucaugggcauccccuacugcaacuacuccaaguacugcuaccugaaccacaccaccacggggaagaccagccugcccaagugcugccucguguccaacggcagcuaccugaacgagacccacuucuccgacgacaucgagcagcaggccgacaacaugaucaccgagaugcugcagaaggaguacauggagcggcagggcaagacgccgcucgggcuggucgaccuguucguguucagcaccuccuucuaccugaucagcaucuuccuccaccuggugaagauccccacccaccgccacaucgucggcaagcccugccccaagccgcaccggcugaaccacauggggaucugcuccugcggccucuacaagcagcccggggugcccgugaaguggaagcgcuga

SEQ ID NO: 26437 - RNA, 1476 nt, Artificial Sequence
  derived and/or modified CDS sequence (opt4) from LASV(Josiah;Clade IV)__NP_694870__GPCmut4
augggccagaucgugaccuucuuccaggaggugccccacgugaucgaggaggugaugaacaucgugcugaucgcccugagcgugcuggccgugcugaagggccuguacaacuucgccaccugcggccuggugggccuggugaccuuccugcugcugugcggcagaagcugcaccaccagccuguacaagggcguguacgagcugcagacccuggagcugaacauggagacccugaacaugugcaugccccugagcugcaccaagaacaacagccaccacuacaucauggugggcaacgagaccggccuggagcugacccugaccaacaccagcaucaucaaccacaaguucugcaaccugagcgacgcccacaagaagaaccuguacgaccacgcccugaugagcaucaucagcaccuuccaccugagcauccccaacuucaaccaguacgaggccaugagcugcgacuucaacggcggcaagaucagcgugcaguacaaccugagccacagcuacgccggcgacgccgccaaccacugcggcaccguggccaacggcgugcugcagaccuucaugagaauggccuggggcggcagcuacaucgcccuggacagcggcagaggcaacugggacugcaucaugaccagcuaccaguaccugaucauccagaacaccaccugggaggaccacugccaguucagcagacccagccccaucggcuaccugggccugcugagccagagaaccagagacaucuacaucagcagaagaagaagaggcaccuucaccuggacccugagcgacagcgagggcaaggacacccccggcggcuacugccugaccagauggaugcugaucgaggccgagcugaagugcuucggcaacaccgccguggccaagugcaacgagaagcacgacgaggaguucugcgacaugcugagacuguucgacuucugcaagcaggccauccagagacugaaggcccccgcccagaugagcauccagcugaucaacaaggccgugaacgcccugaucaacgaccagcugaucaugaagaaccaccugagagacaucaugggcauccccuacugcaacuacagcaaguacugcuaccugaaccacaccaccaccggcagaaccagccugcccaagugcugccuggugagcaacggcagcuaccugaacgagacccacuucagcgacgacaucgagcagcaggccgacaacaugaucaccgagaugcugcagaaggaguacauggagagacagggcaagaccccccugggccugguggaccuguucguguucagcaccagcuucuaccugaucagcaucuuccugcaccuggugaagauccccacccacagacacaucgugggcaagagcugccccaagccccacagacugaaccacaugggcaucugcagcugcggccuguacaagcagcccggcgugcccgugaaguggaagagauga

SEQ ID NO: 26438 - RNA, 1473 nt, Artificial Sequence
  derived and/or modified CDS sequence (opt4) from LASV(LP;Clade I)__AAF86701__GPCmut4
augggccagaucaucaccuucuuccaggaggugccccacgugaucgaggaggugaugaacaucgugcugaucgcccugagccugcuggccauccugaagggccuguacaacaucgccaccugcggcaucaucggccugguggccuuccuguuccugugcggcaagagcugcagccugacccugaagggcggcuacgagcugcagacccuggagcugaacauggagacccugaacaugugcaugccccugagcugcaccaagaacagcagccaccacuacaucagagugggcaacgagaccggccuggagcugacccugaccaacaccagcaucaucaaccacaaguucugcaaccugagcgacgcccacaagaagaaccuguacgaccacgcccugaugagcaucaucagcaccuuccaccugagcauccccaacuucaaccaguacgaggccaugagcugcgacuucaacggcggcaagaucagcgugcaguacaaccugagccacagcuacgccggcgacgccgccgagcacugcggcaccguggccaacggcgugcugcagaccuucaugagaauggccuggggcggcagauacaucgcccuggacagcggcaagggcaacugggacugcaucaugaccagcuaccaguaccugaucauccagaacaccaccugggaggaccacugccaguucagcagacccagccccaucggcuaccugggccugcugagccagagaaccagagacaucuacaucagcagaagaagaagaggcaccuucaccuggacccugagcgacagcgagggcaacgagacccccggcggcuacugccugaccagauggaugcugaucgaggccgagcugaagugcuucggcaacaccgccguggccaagugcaacgagaagcacgacgaggaguucugcgacaugcugagacuguucgacuucugcaagcaggccaucagaagacugaaggcccccgcccagaugagcauccagcugaucaacaaggccgugaacgcccugaucaacgaccagcugaucaugaagaaccaccugagagacaucaugggcauccccuacugcaacuacagcaaguacugcuaccugaaccacaccagcagcggcagaaccagccugcccaagugcugccugaucagcaacggcagcuaccugaacgagacccaguucagcgacgacaucgagcagcaggccgacaacaugaucaccgagaugcugcagaaggaguacaucgagagacagggcaagaccccccugggccugguggacaucuucaucuucagcaccagcuucuaccugaucagcaucuuccugcaccugaucaagauccccacccacagacacaucgugggcaagcccugccccaagccccacagacugaaccacaugggcgugugcagcugcggccuguacaagcaccccggcgugcccaccaaguggaagagauga

SEQ ID NO: 26439 - RNA, 1473 nt, Artificial Sequence
  derived and/or modified CDS sequence (opt4) from LASV(803213;Clade II)__AAF86703__GPCmut4
augggccagaucaucaccuucuuccaggaggugccccacgugaucgaggaggugaugaacaucgugcugaucgcccugagccugcuggccauccugaagggcaucuacaacguggccaccugcggccuguucggccugaucagcuuccugcugcugugcggcagaagcugcagcgugaccuacaagggcguguacgagcugcagacccuggagcugaacauggccaaccugaacaugugcaugccccugagcugcaccaagaacaacagccaccacuacaucauggugggcaacgagaccggccuggagcugacccugaccaacaccagcaucaucaaccacaaguucugcaaccugagcgacgcccacaagaagaaccuguacgaccacgcccugaugagcaucaucagcaccuuccaccugagcauccccaacuucaaccaguacgaggccaugagcugcgacuucaacggcggcaagaucagcgugcaguacaaccugagccacagcuucgccguggacgccgccaaccacugcggcaccaucgccaacggcgugcugcagaccuucaugagaauggccuggggcggcagcuacaucgcccuggacagcggcaagggcaacugggacugcaucaugaccagcuaccaguaccugaucauccagaacaccaccugggaggaccacugccaguucagcagacccagccccaucggcuaccugggccugcugagccagagaaccagagacaucuacaucagcagaagaagaagaggcaccuucaccuggacccugagcgacagcgagggcaacgaggcccccggcggcuacugccugaccagauggaugcugaucgaggccgagcugaagugcuucggcaacaccgccguggccaagugcaacgagaagcacgacgaggaguucugcgacaugcugagacuguucgacuucugcaagcaggccaucaagagacugaagacccccgcccagaugagcauccagcugaucaacaaggccgugaacgcccugaucaacgaccagcugaucaugaagaaccaccugagagacaucaugggcauccccuacugcaacuacagcagauacugcuaccugaaccacaccgugaccggcaagaccagccugcccagaugcugccuggugagcaacggcagcuaccugaacgagacccacuucagcgacgacaucgagcagcaggccgacaacaugaucaccgagaugcugcagaaggaguacauggacagacagggcaagaccccccugggccugguggaccuguucguguucagcaccagcuucuaccugaucagcaucuuccugcaccuggugaagauccccacccacagacacaucgugggcaagcccugccccaagccccacagacugaaccacaugggcaucugcagcugcggccuguacaagcaccccggcgugcccgugaaguggaagagauga

SEQ ID NO: 26440 - RNA, 1473 nt, Artificial Sequence
  derived and/or modified CDS sequence (opt4) from LASV(GA391;Clade III)__CAA36645__GPCmut4
augggccagaucgugaccuucuuccaggaggugccccacgugaucgaggaggugaugaacaucgugcugaucgcccugagcauccuggccauccugaagggccuguacaacguggccaccugcggccugaucggccuggugaccuuccugcugcugagcggcagaagcugcagccugaucuacaagggcaccuacgagcugcagacccuggagcugaacauggagacccugaacaugugcaugccccugagcugcaccaagaacaacagccaccacuacaucagagugggcaacgagaccggccuggagcugacccugaccaacaccagcauccugaaccacaaguucugcaaccugagcgacgcccacaagagaaaccuguacgaccacagccugaugagcaucaucagcaccuuccaccugagcauccccaacuucaaccaguacgaggccaugagcugcgacuucaacggcggcaagaucaccgugcaguacaaccugagccacagcuucgccguggacgccgccggccacugcggcacccuggccaacggcgugcugcagaccuucaugagaauggccuggggcggcagcuacaucgcccuggacagcggcagaggcaacugggacugcaucaugaccagcuaccaguaccugaucauccagaacaccaccugggacgaccacugccaguucagcagacccagccccaucggcuaccugggccugcugagccagagaaccagagacaucuacaucagcagaagaagaagaggcaccuucaccuggacccugagcgacagcgagggcaacgagacccccggcggcuacugccugaccagauggaugcugaucgaggccgagcugaagugcuucggcaacaccgccguggccaagugcaacgagaagcacgacgaggaguucugcgacaugcugagacuguucgacuucugcaagcaggccaucagaagacugaagacccccgcccagaugagcauccagcugaucaacaaggccgugaacgcccugaucaacgaccagcugaucaugaagaaccaccugagagacaucaugggcauccccuacugcaacuacagcagauacugcuaccugaaccacaccagcaccggcaagaccagccugcccagaugcugccugaucagcaacggcagcuaccugaacgagaccaaguucagcgacgacaucgagcagcaggccgacaacaugaucaccgagaugcugcagaaggaguacaucgacagacagggcaagaccccccugggccugguggaccuguucguguucagcaccagcuucuaccugaucagcaucuuccugcaccuggugaagauccccacccacagacacaucgugggcaagcccugccccaagccccacagacugaaccacaugggcaucugcagcugcggccuguacaagcagcccggcgugcccgugagauggaagagauga

SEQ ID NO: 26441 - RNA, 1476 nt, Artificial Sequence
  derived and/or modified CDS sequence (opt4) from LASV(AV;Clade V)__CCA30314__GPCmut4
augggccagaucgugaccuucuuccaggaggugccccacgugaucgaggaggugaugaacaucgugcugaucgcccugagcauccuggccgugcugaagggccuguacaacaucgccaccugcggccugaucggccugaucaccuuccugcugcugugcggcagaagcugcagcagcaaccuguacaagggcguguacgagcugcagagccuggaccugaacauggagacccugaacaugugcaugccccugagcugcaccaagaacaacagccaccacuacaucagagugggcaacgacaccggccuggagcugacccugaccaacaccagcauccugaaccacaaguucugcaaccugagcgacgcccacaagaaggaccuguacgaccacgcccugaugagcaucaucagcaccuuccaccugagcauccccaacuucaaccaguacgaggccaugagcugcgacuucaacggcggcaagaucagcgugcaguacaaccugagccacagcuacgccaucgacgccgccaaccacugcggcaccguggccaacggcauccugcagaccuucaugagaauggccuggggcggcagcuacaucgcccuggacagcggcagaggcaacugggacugcaucaugaccagcuaccaguaccugaucauccagaacaccaccugggagaaccacugccaguucagcagacccagccccaucggcuaccugggccugcugagccagagaaccagagacaucuacaucagcagaagaagaagaggcaccuucaccuggacccugagcgacagcgagggcaacgccacccccggcggcuacugccugaccagauggaugcugaucgaggccgagcugaagugcuucggcaacaccgccguggccaagugcaacgagaagcacgacgaggaguucugcgacaugcugagacuguucgacuucugcaagcaggccaucagcagacugaagagccccgcccagaugagcauccagcugaucaacaaggccgugaacgcccugaucaacgaccagcugaucaugaagaaccaccugagagacaucaugggcauccccuacugcaacuacagcaaguacugcuaccugaaccacaccaucaccggcaagaccagccugcccaagugcugccuggugagcaacggcagcuaccugaacgagacccacuucagcgacgacaucgagcagcaggccgacaacaugaucaccgagaugcugcagaaggaguacauggagagacagggcaagaccccccugggccugguggaccuguucguguucagcaccagcuucuaccugaucagcaucuuccugagacuggugaagauccccacccacagacacaucgugggcaagcccugccccaagccccacagacugaaccacaugggcaucugcagcugcggccuguacaagcagcccggcgugcccgugagauggaagagauga

SEQ ID NO: 26442 - RNA, 1473 nt, Artificial Sequence
  derived and/or modified CDS sequence (opt4) from LASV(Togo/2016/7082;Clade VI)__AMR44577__GPCmut4
augggccagaucaucaccuucuuccaggaggugccccacgugaucgaggaggugaugaacaucgugcugaucgcccugagccugcuggccauccugaagggcguguacaacguggccaccugcggcaucaucggccuggugaccuuccuguuccugugcggcagaagcugcagccugaucuacaagggcagcuacgagcugcagacccuggagcugaacauggagacccugaacaugugcaugccccugagcugcaccaagaacagcagccaccacuacaucagagugggcaacgagaccggccuggagcugacccugaccaacaccagcaucaucaaccacaaguucugcaaccugagcgacgcccacaagagaaaccuguacgaccacgcccugaugagcauccugagcaccuuccaccugagcauccccaacuucaaccaguacgaggccaugagcugcgacuucaacggcggcaagaucagcgugcaguacaaccugagccacgccuacgccguggacgccgccgagcacugcggcaccguggccaacggcgugcugcagaccuucaugagaauggccuggggcggcagcuacaucgcccuggacagcggcagaggcaacugggacugcaucaugaccagcuaccaguaccugaucauccagaacaccaccugggaggaccacugccaguucagcagacccagccccaucggcuaccugggccugcugagccagagaaccagagacaucuacaucagcagaagaagaagaggcaccuucaccuggacccugagcgacagcgagggcaacgagacccccggcggcuacugccugaccagauggaugcugaucgaggccgagcugaagugcuucggcaacaccgccguggccaagugcaacgagaagcacgacgaggaguucugcgacaugcugagacuguucgacuucugcaagcaggccauccagagacugaagagccccgcccagaugagcauccagcugaucaacaaggccgugaacgcccugaucaacgaccagcugaucaugaagaaccaccugagagacaugaugggcauccccuacugcaacuacagcaaguacugcuaccugaaccacaccagcagcggcagaaccagccugcccaagugcugccuggugagcaacggcagcuaccugaacgagacccacuucagcgacgacaucgagcagcaggccgacaacaugaucaccgagaugcugcagaaggaguacaucgacagacagggcaagaccccccugggccugguggaccuguucguguucagcaccagcuucuaccugaucagcaucuuccugcaccugaucaagauccccacccacagacacaucgugggcaagcccugccccaagccccacagacugaaccacaugggcaucugcagcugcggccuguacaagcagcccggcgugcccaccagauggaagagauga

SEQ ID NO: 26443 - RNA, 1473 nt, Artificial Sequence
  derived and/or modified CDS sequence (opt4) from LASV(KAK-428;Clade n.d. (VII))__ANH09740__GPCmut4
augggccagaucgugaccuucuuccaggaggugccccacgugaucgaggaggugaugaacaucgugcugaucgcccugagccugcuggccauccugaagggccuguacaacuucgccaccugcggcgugaucggccugaucaccuuccugcugcugugcggcagaagcugcagcgccaccuacaagggccaguacgagcugcagacccuggagcugaacauggagagccugaacaugugcaugccccugagcugcaccaagaacaacagccaccacuacaucagagccggcaacaacaccggccuggagcugacccugaccaacaccagcaucaucagccacaaguucugcaaccugagcgacgcccacaagaagaaccuguacgaccacacccugaugagcaucaucaccaccuuccaccugagcauccccaacuucaaccaguacgaggccaugagcugcgacuucaacggcggcaagaucagcauccaguacaaccugagccacagcuacgccggcgacgccgcccagcacugcggcaccguggccaacggcgugcugcagaccuucaugagaauggccuggggcggcagcuaccuggcccuggacagcggcagaagaggcugggacugcaucaucagcagcuaccaguaccugaucauccagaacaccaccugggacgaccacugccaguucagcagacccagccccaucggcuaccugggcuucgugagccagaagaccagagacaucuacaucagcagaagaagaagaggcaccuucaccuggacccugagcgacagcgagggccacgacaugcccggcggcuacugccugaccagauggaugcugaucgaggccgaccugaagugcuucggcaacaccgccguggccaagugcaacgagaagcacgacgaggaguucugcgacauguggagacuguucgacuucugcaagcaggccauccagagacugaaggcccccgcccagaugaacauccagcugaucaacaaggccgugaacgcccugaucaacgaccagcugaugaugaagaaccaccugagagacaucaugggcauccccuacugcaacuacagcaaguucugcuaccugaacaacaccaccaccggcagaaccagccugcccagaugcugccugaucagcaacggcagcuaccugaacgagacccacuucagcgacgacaucgagcagcaggccgacaacaugaucaccgagaugcugcagaaggaguacauggacagacagggcaagaccccccugggccugguggaccuguucguguucagcaccagcuucuaccugaucaccaucuuccugcaccuggugaagauccccacccacagacacaucgugggcaagcccugccccaagccccacagacugaaccacaugggcaucugcagcugcggccuguacaagcagcccggcgugcccgugagauggaagagauga

SEQ ID NO: 26444 - RNA, 1473 nt, Artificial Sequence; identical to SEQ ID NO: 26438
  derived and/or modified CDS sequence (opt4) from LASV(Pinneo-NIG-1969;Clade I)__AIT17836__GPCmut4

SEQ ID NO: 26445 - RNA, 1473 nt, Artificial Sequence
  derived and/or modified CDS sequence (opt4) from LASV(ISTH0009-NIG-2011;Clade II)__AIT17404__GPCmut4
augggccagaucaucaccuucuuccaggaggugccccacgugaucgaggaggugaugaacaucgugcugaucgcccugagccugcuggccauccugaagggcaucuacaacguggccaccugcggccuguucggccuggugagcuuccugcugcugugcggcagaagcugcagcaccaccuacaagggcguguacgagcugcagacccuggagcuggacauggccagccugaacaugugcaugccccugagcugcaccaagaacaacagccaccacuacaucauggugggcaacgagaccggccuggagcugacccugaccaacaccagcaucaucaaccacaaguucugcaaccugagcgacgcccacaagaagaaccuguacgaccacgcccugaugagcaucaucagcaccuuccaccugagcauccccaacuucaaccaguacgaggccaugagcugcgacuucaacggcggcaagaucagcgugcaguacaaccugagccacgccuacgccguggacgccgccaaccacugcggcaccaucgccaacggcgugcugcagaccuucaugagaauggccuggggcggcagcuacaucgcccuggacagcggcaagggcagcugggacugcaucaugaccagcuaccaguaccugaucauccagaacaccaccugggaggaccacugccaguucagcagacccagccccaucggcuaccugggccugcugagccagagaaccagagacaucuacaucagcagaagaagaagaggcaccuucaccuggacccugagcgacagcgagggcaacgagacccccggcggcuacugccugaccagauggaugcugaucgaggccgagcugaagugcuucggcaacaccgccguggccaagugcaacgagaagcacgacgaggaguucugcgacaugcugagacuguucgacuucugcaagcaggccaucagaagacugaagacccccgcccagaugagcauccagcugaucaacaaggccgugaacgcccugaucaacgaccagcugaucaugaagaaccaccugagagacaucaugggcauccccuacugcaacuacagcaaguacugcuaccugaaccacaccgugaccggcaagaccagccugcccagaugcugccuggugagcaacggcagcuaccugaacgagacccacuucagcgacgacaucgagcagcaggccgacaacaugaucaccgagcugcugcagaaggaguacauggacagacagggcaagaccccccugggccugguggaccuguucguguucagcaccagcuucuaccugaucagcaucuuccugcaccugaucaagauccccacccacagacacaucaccggcaagcccugccccaagccccacagacugaaccacaugggcaucugcagcugcggccuguacaagcaccccggcgugcccgugaaguggaagagauga

SEQ ID NO: 26446 - RNA, 1473 nt, Artificial Sequence
  derived and/or modified CDS sequence (opt4) from LASV(ISTH2010-NIG-2012;Clade II)__AIT17482__GPCmut4
augggccagaucaucaccuucuuccaggaggugccccacgugaucgaggaggugaugaacaucgugcugaucgcccugagccugcuggccauccugaagggcaucuacaacguggccaccugcggccuguucggccuggugagcuuccugcugcugugcggcagaagcugcagcaccaccuacaagggcguguacgagcugcagacccuggagcuggacauggccagccugaacaugugcaugccccugagcugcaccaagaacaacagccaccacuacaucauggugggcaacgagaccggccuggagcugacccugaccaacaccagcaucaucaaccacaaguucugcaaccugagcgacgcccacaagaagaaccuguacgaccacgcccugaugagcaucaucagcaccuuccaccugagcauccccaacuucaaccaguacgaggccaugagcugcgacuucaacggcggcaagaucagcgugcaguacaaccugagccacgccuacgccguggacgccgccaaccacugcggcaccaucgccaacggcgugcugcagaccuucaugagaauggccuggggcggcagcuacaucgcccuggacagcggcaagggcagcugggacugcaucaugaccagcuaccaguaccugaucauccagaacaucaccugggaggaccacugccaguucagcagacccagccccaucggcuaccugggccugcugagccagagaaccagagacaucuacaucagcagaagaagaagaggcaccuucaccuggacccugagcgacagcgagggcaacgagacccccggcggcuacugccugaccagauggaugcugaucgaggccgagcugaagugcuucggcaacaccgccguggccaagugcaacgagaagcacgacgaggaguucugcgacaugcugagacuguucgacuucugcaagcaggccaucagaagacugaagacccccgcccagaugagcauccagcugaucaacaaggccgugaacgcccugaucaacgaccagcugaucaugaagaaccaccugagagacaucaugggcauccccuacugcaacuacagcaaguacugcuaccugaaccacaccgugaccggcaagaccagccugcccagaugcugccuggugagcaacggcagcuaccugaacgagacccacuucagcgacgacaucgagcagcaggccgacaacaugaucaccgagcugcugcagaaggaguacaucgacagacagggcaagaccccccugggccugguggaccuguucguguucagcaccagcuucuaccugaucagcaucuuccugcaccuggugaagauccccacccacagacacguggugggcaagcccugccccaagccccacagacugaaccacaugggcaucugcagcugcggccuguacaagcaccccggcgugcccgugaaguggaagagauga

SEQ ID NO: 26447 - RNA, 1473 nt, Artificial Sequence
  derived and/or modified CDS sequence (opt4) from LASV(Lassa virus/H.sapiens-wt/NGA/2015/ISTH_0543;Clade II)__AVO03639__GPCmut4
augggccagaucaucaccuucuuccaggaggugccccacgugaucgaggaggugaugaacaucgugcugaucgcccugagccugcuggccauccugaagggcaucuacaacguggccaccugcggccuguucggccuggugagcuuccugcugcugugcggcagaagcugcagcaccaccuacaagggcguguacgagcugcagacccuggagcuggacauggccaaccugaacaugugcaugccccugagcugcaccaagaacaacagccaccacuacaucauggugggcaacgagaccggccuggagcugacccugaccaacaccagcaucaucaaccacaaguucugcaaccugagcgacgcccacaagaagaaccuguacgaccacgcccugaugagcaucaucagcaccuuccaccugagcauccccaacuucaaccaguacgaggccaugagcugcgacuucaacggcggcaagaucagcgugcaguacaaccugagccacaccuacgccguggacgccgccaaccacugcggcaccaucgccaacggcgugcugcagaccuucaugagaauggccuggggcggcagcuacaucgcccuggacagcggcaagggcagcugggacugcaucaugaccagcuaccaguaccuggugauccagaacaccaccugggaggaccacugccaguucagcagacccagccccaucggcuaccugggccugcugagccagagaaccagagacaucuacaucagcagaagaagaagaggcaccuucaccuggacccugagcgacagcgagggcaacgagacccccggcggcuacugccugaccagauggaugcugaucgaggccgagcugaagugcuucggcaacaccgccguggccaagugcaacgagaagcacgacgaggaguucugcgacaugcugagacuguucgacuucugcaagcaggccaucagaagacugaagacccccgcccagaugagcauccagcugaucaacaaggccgugaacgcccugaucaacgaccagcugaucaugaagaaccaccugagagacaucaugggcauccccuacugcaacuacagcaaguacugcuaccugaaccacaccgugaccggcaagaccagccugcccagaugcugccuggugagcaacggcagcuaccugaacgagacccacuucagcgacgacaucgagcagcaggccgacaacaugaucaccgagcugcugcagaaggaguacaucgacagacagggcaagaccccccugggccugguggaccuguucguguucagcaccagcuucuaccugaucagcaucuuccugcaccuggugaagauccccacccacagacacaucaccggcaagcccugccccaagccccacagacugaaccacaugggcaucugcagcugcggccuguacaagcaccccggcgugcccgugaaguggaagagauga

SEQ ID NO: 26448 - RNA, 1473 nt, Artificial Sequence
  derived and/or modified CDS sequence (opt4) from LASV(Lassa virus/H.sapiens-wt/NGA/2016/ISTH_0009;Clade II)__AVO03571__GPCmut4
augggccagaucaucaccuucuuccaggaggugccccacgugaucgaggaggugaugaacaucgugcugaucgcccugagccugcuggccauccugaagggcaucuacaacguggccaccugcggccugcugggccuggugagcuuccugcugcugugcggcagaagcugcagcaccaccuacaagggcguguacgagcugcagacccuggagcuggacauggccagccugaacaugugcaugccccugagcugcaccaagaacaacagccaccacuacaucauggugggcaacgagaccggccuggagcugacccugaccaacaccagcaucaucaaccacaaguucugcaaccugagcgacgcccacaagaagaaccuguacgaccacgcccugaugagcaucaucagcaccuuccaccugagcauccccaacuucaaccaguacgaggccaugagcugcgacuucaacggcggcagaaucagcgugcaguacaaccugagccacagcuacgccguggacgccgccaaccacugcggcaccaucgccaacggcgugcugcagaccuucaugagaauggccuggggcggcagcuacaucgcccuggacagcggcaagggcagcugggacugcaucaugaccagcuaccaguaccugaucauccagaacaccaccugggaggaccacugccaguucagcagacccagccccaucggcuaccugggccugcugagccagagaaccagagacaucuacaucagcagaagaagaagaggcaccuucaccuggacccugagcgacagcgagggcaacgagacccccggcggcuacugccugaccagauggaugcugaucgaggccgagcugaagugcuucggcaacaccgccguggccaagugcaacgagaagcacgacgaggaguucugcgacaugcugagacuguucgacuucugcaagcaggccaucagaagacugaagacccccgcccagaugagcauccagcugaucaacaaggccgugaacgcccugaucaacgaccagcugaucaugaagaaccaccugagagacaucaugggcauccccuacugcaacuacagcaaguacugcuaccugaaccacaccgugaccggcaagaccagccugcccagaugcugccuggugagcaacggcagcuaccugaacgagacccacuucagcgacgacaucgagcagcaggccgacaacaugaucaccgagcugcugcagaaggaguacaucgacagacagggcaagaccccccugggccugguggaccuguucguguucagcaccagcuucuaccugaucagcaucuuccugcaccuggugaagauccccacccacagacacaucaccggcaagcccugccccaagccccacagacugaaccacaugggcaucugcagcugcggccuguacaaccaccccggcgugcccgugaaguggaagagauga

SEQ ID NO: 26449 - RNA, 1473 nt, Artificial Sequence
  derived and/or modified CDS sequence (opt4) from LASV(Lassa virus/H.sapiens-wt/NGA/2016/ISTH_0017;Clade II)__AVO03567__GPCmut4
augggccagaucaucaccuucuuccaggaggugccccacgugaucgaggaggugaugaacaucgugcugaucgcccugagccugcuggccauccugaagggcaucuacaacguggccaccugcggccuguucggccuggugagcuuccugcugcugugcggcagaagcugcagcaccaccuacaagggcguguacgagcugcagacccuggagcuggacauggccagccugaacaugugcaugccccugagcugcaccaagaacaacagccaccacuacaucauggugggcaacgagaccggccuggagcugacccugaccaacaccagcaucaucaaccacaaguucugcaaccugagcgacgcccacaagaagaaccuguacgaccacgcccugaugagcaucaucagcaccuuccaccugagcauccccaacuucaaccaguacgaggccaugagcugcgacuucaacggcggcaagaucagcgugcaguacaaccugagccacaccuacgccaucgacgccgccaaccacugcggcaccaucgccaacggcgugcugcagaccuucaugagaauggccuggggcggcagcuacaucgcccuggacagcggcaagggcagcugggacugcaucaugaccagcuaccaguaccugaucauccagaacaccaccugggaggaccacugccaguucagcagacccagccccaucggcuaccugggccugcugagccagagaaccagagacaucuacaucagcagaagaagaagaggcaccuucaccuggacccugagcgacagcgagggcaacgagacccccggcggcuacugccugaccagauggaugcugaucgaggccgagcugaagugcuucggcaacaccgccguggccaagugcaacgagaagcacgacgaggaguucugcgacaugcugagacuguucgacuucugcaagcaggccaucagaagacugaagacccccgcccagaugagcauccagcugaucaacaaggccgugaacgcccugaucaacgaccagcugaucaugaagaaccaccugagagacaucaugggcauccccuacugcaacuacagcaaguacugcuaccugaaccacaccgugaccggcaagaccagccugcccagaugcugccuggugagcaacggcagcuaccugaacgagacccacuucagcgacgacaucgagcagcaggccgacaacaugaucaccgagcugcugcagaaggaguacauggacagacagggcaagaccccccugggccugguggaccuguucguguucagcaccagcuucuaccugaucagcaucuuccugcaccuggugagaauccccacccacagacacgugaucggcaagcccugccccaagccccacagacugaaccacaugggcaucugcagcugcggccuguacaagcaccccggcgugcccgugaaguggaagagauga

SEQ ID NO: 26450 - RNA, 1473 nt, Artificial Sequence
  derived and/or modified CDS sequence (opt4) from LASV(Lassa virus/H.sapiens-wt/NGA/2018/ISTH_0959;Clade II)__AVV65099__GPCmut4
augggccagaucaucaccuucuuccaggaggugccccacgugaucgaggaggugaugaacaucgugcugaucgcccugagccugcuggccauccugaagggcaucuacaacguggugaccugcggccuguucggccuggugagcuuccugcugcugugcggcagaagcugcagcaccaccuacaagggcguguacgagcugcagacccuggagcuggacauggccagccugaacaugugcaugccccugagcugcaccaagaacaacagccaccacuacaucauggugggcaacgagaccggccuggagcugacccugaccaacaccagcaucaucaaccacaaguucugcaaccugagcgacgcccacaagaagaaccuguacgaccacgcccugaugagcaucaucagcaccuuccaccugagcauccccaacuucaaccaguacgaggccaugagcugcgacuucaacggcggcaagaucagcgugcaguacaaccugagccacgccuacgccaucgacgccgccaaccacugcggcaccaucgccaacggcgugcugcagaccuucaugagaauggccuggggcggcagcuacaucgcccuggacagcggcaagggcagcugggacugcaucaugaccagcuaccaguaccugaucauccagaacaccaccugggaggaccacugccaguucagcagacccagccccaucggcuaccugggccugcugagccagagaaccagagacaucuacaucagcagaagaagaagaggcaccuucaccuggacccugagcgacagcgagggcaacgagacccccggcggcuacugccugaccagauggaugcugaucgaggccgagcugaagugcuucggcaacaccgccguggccaagugcaacgagaagcacgacgaggaguucugcgacaugcugagacuguucgacuucugcaagcaggccaucagaagacugaagacccccgcccagaugagcauccagcugaucaacaaggccgugaacgcccugaucaacgaccagcugaucaugaagaaccaccugagagacaucaugggcauccccuacugcaacuacagcaaguacugcuaccugaaccacaccgugaccggcaagaccagccugcccagaugcugccuggugagcaacggcagcuaccugaacgagacccacuucagcgacgacaucgagcagcaggccgacaacaugaucaccgagcugcugcagaaggaguacaucgacagacagggcaagaccccccugggccugguggaccuguucguguucagcaccagcuucuaccugaucagcaucuuccugcaccuggugaagauccccacccacagacacgugaucggcaagcccugccccaagccccacagacugaaccacaugggcaucugcagcugcggccuguacaagcaccccggcgugcccgugaaguggaagagauga

SEQ ID NO: 26451 - RNA, 1473 nt, Artificial Sequence
  derived and/or modified CDS sequence (opt4) from LASV(LASV003-NIG-2008;Clade II)__AIT17580__GPCmut4
augggccagaucaucaccuucuuccaggaggugccccacgugaucgaggaggugaugaacaucgugcugaucgcccugagccugcuggccauccugaagggcaucuacaacguggccaccugcggccuguucggccuggugagcuuccugcugcugugcggcagaagcugcagcaccaccuacaagggcguguacgagcugcagacccuggagcuggacauggccagccugaacaugugcaugccccugagcugcaccaagaacaacagccaccacuacaucauggugggcaacgagaccggccuggagcugacccugaccaacaccagcaucaucaaccacaaguucugcaaccugagcgacgcccacaagaagaaccuguacgaccacgcccugaugagcaucaucagcaccuuccaccugagcauccccaacuucaaccaguacgaggccaugagcugcgacuucaacggcggcaagaucagcgugcaguacaaccugagccacaccuacgccguggacgccgccaaccacugcggcaccaucgccaacggcgugcugcagaccuucaugagaauggccuggggcggcagcuacaucgcccuggacagcggcaagggcagcugggacugcaucaugaccagcuaccaguaccugaucauccagaacaccaccugggaggaccacugccaguucagcagacccagccccaucggcuaccugggccugcugagccagagaaccagagacaucuacaucagcagaagaagaagaggcaccuucaccuggacccugagcgacagcgagagcaacgagacccccggcggcuacugccugaccagauggaugcugaucgaggccgagcugaagugcuucggcaacaccgccguggccaagugcaacgagaagcacgacgaggaguucugcgacaugcugagacuguucgacuucugcaagcaggccaucagaagacugaaggcccccgcccagaugagcauccagcugaucaacaaggccgugaacgcccugaucaacgaccagcugaucaugaagaaccaccugagagacaucaugggcauccccuacugcaacuacagcaaguacugcuaccugaaccacaccgugaccggcagaaccagccugcccagaugcugccuggugagcaacggcagcuaccugaacgagacccacuucagcgacgacaucgagcagcaggccgacaacaugaucaccgagcugcugcagaaggaguacauggacagacagggcaagaccccccugggccugguggaccuguucguguucagcaccagcuucuaccugaucagcaucuuccugcaccuggugaagauccccacccacagacacgugaucggcaagcccugccccaagccccacagacugaaccacaugggcaucugcagcugcggccuguacaagcaccccggcgugcccgugaaguggaagagauga

SEQ ID NO: 26452 - RNA, 1473 nt, Artificial Sequence
  derived and/or modified CDS sequence (opt4) from LASV(LASV035-NIG-2009;Clade II)__AIT17588__GPCmut4
augggccagaucaucaccuucuuccaggaggugccccacgugaucgaggaggugaugaacaucgugcugaucgcccugagccugcuggccauccugaagggcaucuacaacguggccaccugcggccuguucggccuggugagcuuccugcugcugugcggcagaagcugcagcaccaccuacaagggcguguacgagcugcagacccuggagcuggacauggccagccugaacaugugcaugccccugagcugcaccaagaacaacagccaccacuacaucauggugggcaacgagaccggccuggagcugacccugaccaacaccagcaucaucaaccacaaguucugcaaccugagcgacgcccacaagaagaaccuguacgaccacgcccugaugagcaucaucagcaccuuccaccugagcauccccaacuucaaccaguacgaggccaugagcugcgacuucaacggcggcaagaucagcgugcaguacaaccugagccacgccuacgccguggacgccgccaaccacugcggcaccaucgccaacggcgugcugcagaccuucaugagaauggccuggggcggcagcuacaucgcccuggacagcggcaagggcagcugggacugcaucaugaccagcuaccaguaccugaucauccagaacaccaccugggaggaccacugccaguucagcagacccagccccaucggcuaccugggccugcugagccagagaaccagagacaucuacaucagcagaagaagaagaggcaccuucaccuggacccugagcgacagcgagggcaacgagacccccggcggcuacugccugaccagauggaugcugaucgaggccgagcugaagugcuucggcaacaccgccguggccaagugcaacgagaagcacgacgaggaguucugcgacaugcugagacuguucgacuucugcaagcaggccaucagaagacugaaggcccccgcccagaugagcauccagcugaucaacaaggccgugaacgcccugaucaacgaccagcugaucaugaagaaccaccugagagacaucaugggcauccccuacugcaacuacagcaaguacugcuaccugaaccacaccgugaccggcaagaccagccugcccagaugcugccuggugagcaacggcagcuaccugaacgagacccacuucagcgacgacaucgagcagcaggccgacaacaugaucaccgagcugcugcagaaggaguacaucgacagacagggcaagaccccccugggccugguggaccuguucguguucagcaccagcuucuaccugaucagcaucuuccugcaccuggugaagauccccacccacagacacgugaucggcaagcccugccccaagccccacagacugaaccacaugggcaucugcagcugcggccuguacaagcaccccggcgugcccgugaaguggaagagauga

SEQ ID NO: 26453 - RNA, 1473 nt, Artificial Sequence
  derived and/or modified CDS sequence (opt4) from LASV(LASV1000-NIG-2009;Clade II)__AIT17782__GPCmut4
augggccagaucaucaccuucuuccaggaggugccccacgugaucgaggaggugaugaacaucgugcugaucgcccugagccugcuggccauccugaagggcaucuacaacguggccaccugcggccuguucggccuggugagcuuccugcugcugugcggcagaagcugcagcaccaccuacaagggcguguacgagcugcagacccuggagcuggacauggccagccugaacaugugcaugccccugagcugcaccaagaacaacagccaccacuacaucauggugggcaacgagaccggccuggagcugacccugaccaacaccagcaucaucaaccacaaguucugcaaccugagcgacgcccacaagaagaaccuguacgaccacgcccugaugagcaucaucagcaccuuccaccugagcauccccaacuucaaccaguacgaggccaugagcugcgacuucaacggcggcaagaucagcgugcaguacaaccugagccacaccuacgccguggacgccgccaaccacugcggcaccaucgccaacggcgugcugcagaccuucaugagaauggccuggggcggcagcuacaucgcccuggacagcggcaagggcagcugggacugcaucaugaccagcuaccaguaccugaucauccagaacaccaccugggaggaccacugccaguucagcagacccagccccaucggcuaccugggccugcugagccagagaaccagagacaucuacaucagcagaagaagaagaggcaccuucaccuggacccugagcgacagcgagggcaacgagacccccggcggcuacugccugaccagauggaugcugaucgaggccgagcugaagugcuucggcaacaccgccguggccaagugcaacgagaagcacgacgaggaguucugcgacaugcugagacuguucgacuucugcaagcaggccaucaagagacugaagacccccgcccagaugagcauccagcugaucaacaaggccgugaacgcccugaucaacgaccagcugaucaugaagaaccaccugagagacaucaugggcauccccuacugcaacuacagcaaguacugcuaccugaaccacaccgugaccggcaagaccagccugcccagaugcugccuggugagcaacggcagcuaccugaacgagacccacuucagcgacgacaucgagcagcaggccgacaacaugaucaccgagcugcugcagaaggaguacaucgacagacagggcaagaccccccugggccugguggaccuguucguguucagcaccagcuucuaccugaucagcaucuuccugcaccuggugaagauccccacccacagacacguggugggcaagcccugccccaagccccacagacugaaccacaugggcaucugcagcugcggccuguacaagcaccccggcgugcccgugaaguggaagagauga

SEQ ID NO: 26454 - RNA, 1473 nt, Artificial Sequence
  derived and/or modified CDS sequence (opt4) from LASV(LASV221-NIG-2010;Clade II)__AIT17624__GPCmut4
augggccagaucaucaccuucuuccaggaggugccccacgugaucgaggaggugaugaacaucgugcugaucgcccugagccugcuggccauccugaagggcaucuacaacguggccaccugcggccuguucggccuggugagcuuccugcugcugugcggcagaagcugcagcaccaccuacaagggcguguacgagcugcagacccuggagcuggacauggccagccugaacaugugcaugccccugagcugcaccaagaacaacagccaccacuacaucauggugggcaacgagaccggccuggagcugacccugaccaacaccagcaucaucaaccacaaguucugcaaccugagcgacgcccacaagaagaaccuguacgaccacgcccugaugagcaucaucagcaccuuccaccugagcauccccaacuucaaccaguacgaggccaugagcugcgacuucaacggcggcaagaucagcgugcaguacaaccugagccacaccuacgccaucgacgccgccaaccacugcggcaccaucgccaacggcgugcugcagaccuucaugagaauggccuggggcggcagcuacaucgcccuggacagcggcaagggcagcugggacugcaucaugaccagcuaccaguaccugaucauccagaacaccaccugggaggaccacugccaguucagcagacccagccccaucggcuaccugggccugcugagccagagaaccagagacaucuacaucagcagaagaagaagaggcaccuucaccuggacccugagcgacagcgagggcaacgagacccccggcggcuacugccugaccagauggaugcugaucgaggccgagcugaagugcuucggcaacaccgccguggccaagugcaacgagaagcacgacgaggaguucugcgacaugcugagacuguucgacuucugcaagcaggccaucagaagacugaagacccccgcccagaugagcauccagcugaucaacaaggccgugaacgcccugaucaacgaccagcugaucaugaagaaccaccugagagacaucaugggcauccccuacugcaacuacagcaaguacugcuaccugaaccacaccgugaccggcaagaccagccugcccagaugcugccuggugagcaacggcagcuaccugaacgagacccacuucagcgacgacaucgagcagcaggccgacaacaugaucaccgagaugcugcagaaggaguacauggacagacagggcaagaccccccugggccugguggaccuguucguguucagcaccagcuucuaccugaucagcaucuuccugcaccuggugaagauccccacccacagacacgugaucggcaagcccugccccaagccccacagacugaaccacaugggcaucugcagcugcggccuguacaagcaccccggcgugcccgugaaguggaagagauga

SEQ ID NO: 26455 - RNA, 1473 nt, Artificial Sequence
  derived and/or modified CDS sequence (opt4) from LASV(LASV237-NIG-2010;Clade II)__AIT17638__GPCmut4
augggccagaucaucaccuucuuccaggaggugccccacgugaucgaggaggugaugaacaucgugcugaucgcccugagccugcuggccauccugaagggcaucuacaacguggccaccugcggccuguucggccuggugagcuuccugcugcugugcggcagaagcugcagcaccaccuacaagggcguguacgagcugcagacccuggagcuggacauggccagccugaacaugugcaugccccugagcugcaccaagaacaacagccaccacuacaucauggugggcaacgagaccggccuggagcugacccugaccaacaccagcaucaucaaccacaaguucugcaaccugagcgacgcccacaagaaggaccuguacgaccacgcccugaugagcaucaucagcaccuuccaccugagcauccccaacuucaaccaguacgaggccaugagcugcgacuucaacggcggcaagaucagcgugcaguacaaccugagccacaccuacgccguggacgccgccaaccacugcggcaccaucgccaacggcgugcugcagaccuucaugagaauggccuggggcggcagcuacaucgcccuggacagcggcaagggcagcugggacugcaucaugaccagcuaccaguaccugaucauccagaacaccaccugggaggaccacugccaguucagcagacccagccccaucggcuaccugggccugcugagccagagaaccagagacaucuacaucagcagaagaagaagaggcaccuucaccuggacccugagcgacagcgagggcaacgagacccccggcggcuacugccugaccagauggaugcugaucgaggccgagcugaagugcuucggcaacaccgccguggccaagugcaacgagaagcacgacgaggaguucugcgacaugcugagacuguucgacuucugcaagcaggccaucagaagacugaagacccccgcccagaugagcauccagcugaucaacaaggccgugaacgcccugaucaacgaccagcugaucaugaagaaccaccugagagacaucaugggcauccccuacugcaacuacagcaaguacugcuaccugaaccacaccgugaccggcaagaccagccugcccagaugcugccuggugagcaacggcagcuaccugaacgagacccacuucagcgacgacaucgagcagcaggccgacaacaugaucaccgagcugcugcagaaggaguacauggacagacagggcaagaccccccugggccugguggaccuguucguguucagcaccagcuucuaccugaucagcaucuuccugcaccugaucaagauccccacccacagacacaucaccggcaagcccugccccaagccccacagacugaaccacaugggcaucugcagcugcggccuguacaagcaccccggcgugcccgugaaguggaagagauga

SEQ ID NO: 26456 - RNA, 1473 nt, Artificial Sequence
  derived and/or modified CDS sequence (opt4) from LASV(LASV253-NIG-2011;Clade II)__AIT17670__GPCmut4
augggccagaucaucaccuucuuccaggaggugccccacgugaucgaggaggugaugaacaucgugcugaucgcccugagccugcuggccauccugaagggcaucuacaacguggccaccugcggccuguucggccuggugagcuuccugcugcugugcggcagaagcugcagcaccaccuacaagggcguguacgagcugcagacccuggagcuggacauggccagccugaacaugugcaugccccugagcugcaccaagaacaacagccaccacuacaucauggugggcaacgagaccggccuggagcugacccugaccaacaccagcaucaucaaccacaaguucugcaaccugagcgacgcccacaagaagaaccuguacgaccacgcccugaugagcaucaucagcaccuuccaccugagcauccccaacuucaaccaguacgaggccaugagcugcgacuucaacggcggcaagaucagcgugcaguacaaccugagccacaccuacgccguggacgccgccaaccacugcggcaccaucgccaacggcgugcugcagaccuucaugagaauggccuggggcggcagcuacaucgcccuggacagcggcaagggcagcugggacugcaucaugaccagcuaccaguaccugaucauccagaacaccaccugggaggaccacugccaguucagcagacccagccccaucggcuaccugggccugcugagccagagaaccagagacaucuacaucagcagaagaagaagaggcaccuucaccuggacccugagcgacagcgagggcaacgagacccccggcggcuacugccugaccagauggaugcugaucgaggccgagcugaagugcuucggcaacaccgccguggccaagugcaacgagaagcacgacgaggaguucugcgacaugcugagacuguucgacuucugcaagcaggccaucagaagacugaaggcccccgcccagaugagcauccagcugaucaacaaggccgugaacgcccugaucaacgaccagcugaucaugaagaaccaccugagagacaucaugggcauccccuacugcaacuacagcaaguacugcuaccugaaccacaccgugaccggcagaaccagccugcccagaugcugccuggugagcaacggcagcuaccugaacgagacccacuucagcgacgacaucgagcagcaggccgacaacaugaucaccgagcugcugcagaaggaguacaucgacagacagggcaagaccccccugggccugguggaccuguucguguucagcaccagcuucuaccugaucagcaucuuccugcaccuggugaagauccccacccacagacacaucaucggcaagcccugccccaagccccacagacugaaccacaugggcaucugcagcugcggccuguacaagcaccccggcgugcccgugaaguggaagagauga

SEQ ID NO: 26457 - RNA, 1473 nt, Artificial Sequence
  derived and/or modified CDS sequence (opt4) from LASV(LASV254-NIG-2011;Clade II)__AIT17674__GPCmut4
augggccagaucaucaccuucuuccaggaggugccccacgugaucgaggaggugaugaacaucgugcugaucgcccugagccugcuggccauccugaagggcaucuacaacguggccaccugcggccuguucggccuggugagcuuccugcugcugugcggcagaagcugcagcaccaccuacaagggcguguacgagcugcagacccuggagcuggacaugaccaaccugaacaugugcaugccccugagcugcaccaagaacaacagccaccacuacaucauggugggcaacgagaccggccuggagcugacccugaccaacaccagcaucaucaaccacaaguucugcaaccugagcgacgcccacaagaagaaccuguacaaccacgcccugaugagcaucaucagcaccuuccaccugagcauccccaacuucaaccaguacgaggccaugagcugcgacuucaacggcggcaagaucagcgugcaguacaaccugagccacagcuacgccguggacgccgccaaccacugcggcaccaucgccaacggcgugcugcagaccuucaugagaauggccuggggcggcagcuacaucgcccuggacagcggcaagggcaacugggacugcaucaugaccagcuaccaguaccugaucauccagaacaccaccugggaggaccacugccaguucagcagacccagccccaucggcuaccugggccugcugagccagagaaccagagacaucuacaucagcagaagaagaagaggcaccuucaccuggacccugagcgacagcgagggcaacgagacccccggcggcuacugccugaccagauggaugcugaucgaggccgagcugaagugcuucggcaacaccgccguggccaagugcaacgagaagcacgacgaggaguucugcgacaugcugagacuguucgacuucugcaagcaggccaucagaagacugaagacccccgcccaggccaacauccagcugaucaacaaggccgugaacgcccugaucaacgaccagcugaucaugaagaaccaccugagagacaucaugggcauccccuacugcaacuacagcaaguacugcuaccugaaccacaccgugaccggcaagaccagccugcccagaugcugccuggugagcaacggcagcuaccugaacgagacccacuucagcgacgacaucgagcagcaggccgacaacaugaucaccgagcugcugcagaaggaguacauggacagacagggcaagaccccccugggccugguggaccuguucguguucagcaccagcuucuaccugaucagcaucuuccugcaccuggugaagauccccacccacagacacgugaucggcaagcccugccccaagccccacagacugaaccacaugggcaucugcagcugcggccuguacaagcaccccggcgugcccgugaaguggaagagauga

SEQ ID NO: 26458 - RNA, 1473 nt, Artificial Sequence
  derived and/or modified CDS sequence (opt4) from LASV(Nig08-A19;Clade III)__ADU56618__GPCmut4
augggccagaucgugaccuucuuccaggaggugccccacgugaucgaggaggugaugaacaucgugcugaucgcccugagcauccuggccauccugaagggccuguacaacaucgccaccugcggccugaucggccuggugaccuuccugcugcugagcggcagaagcugcagcaugaccuacaagggcguguacgagcugcagacccuggagcugaacaugaacacccugaacaugugcaugccccugagcugcaccaagaacaacagccaccacuacaucauggugggcaacgagaccggccuggagcugacccugaccaacaccagccugcugcaccacaaguucugcaaccugagcgacgcccacaagaagaaccuguacgaccacacccugaugagcaucaucagcaccuuccaccugagcauccccaacuucaaccaguacgaggccaugagcugcgacuucaacggcggcaagaucaccgugcaguacaaccugagccacagcuacgccaucgacgccgccaaccacugcggcaccguggccaacggcgugcugcagaccuucaugagaauggccuggggcggcagcuacaucgcccuggacagcggcagaggcaagugggacugcaucaugaccagcuaccaguaccugaucauccagaacaccaccugggaggaccacugccaguucagcagacccagccccaucggcuaccugggccugcugagccagagaaccagagacaucuacaucagcagaagaagaagaggcaccuucaccuggacccugagcgacagcgagggcaacgagacccccggcggcuacugccugaccagauggaugcugaucgaggccgagcugaagugcuucggcaacaccgccguggccaagugcaacgagaagcacgacgaggaguucugcgacaugcugagacuguucgacuucugcaagcaggccaucagaagacugaaggcccccgcccagaugagcauccagcugaucaacaaggccgugaacgcccugaucaacgaccagcugaucaugaagaaccaccugagagacaucaugggcauccccuacugcaacuacagcaaguacugcuaccugaaccacaccagcaccggcagaaccagccugcccagaugcugccuggugagcaacggcagcuaccugaacgagacccacuucagcgacgacaucgagcagcaggccgacaacaugaucaccgagaugcugcagaaggaguaccuggacagacagggcaagaccccccugggccugguggaccuguucguguucagcaccagcuucuaccugaucagcaucuuccugcaccuggugaagauccccacccacagacacaucgugggcaagcccugccccaagccccacagacugaaccacaugggcaucugcagcugcggccuguacaagcagcccggcgugcccgugagauggaagagauga

SEQ ID NO: 26459 - RNA, 1476 nt, Artificial Sequence
  derived and/or modified CDS sequence (opt4) from LASV(G1180-SLE-2010;Clade IV)__AIT17168__GPCmut4
augggccagaucgugaccuucuuccaggaggugccccacgugaucgaggaggugaugaacaucgugcugaucgcccugagcauccuggccgugcugaagggccuguacaacuucgccaccugcggccuggugggccugcugaccuuccugcugcugugcggcagaagcugcaccgccagcagauacaagggcguguacgagcugcagacccuggagcugaacauggagacccugaacaugugcaugccccugagcugcaccaagaacaacagccaccacuacaucauggugggcaacgagaccggccuggagcugacccugaccaacaccagcaucaucaaccacaaguucugcaaccugagcgacgcccacaagaagaaccuguacgaccacgcccugaugagcaucaucagcaccuuccaccugagcauccccaacuucaaccaguacgaggccaugagcugcgacuucaacggcggcaagaucagcgugcaguacaaccugagccacagcuacgccggcgacgccgccaaccacugcggcaccguggccaacggcgugcugcagaccuucaugagaauggccuggggcggcagcuacaucgcccuggacagcggccacggcagcugggacugcaucaugaccagcuaccaguaccugaucauccagaacaccaccugggaggaccacugccaguucagcagacccagccccaucggcuaccugggccugcugagccagagaaccagagacaucuacaucagcagaagaagaagaggcaccuucaccuggacccugagcgacagcgagggcaaggacacccccggcggcuacugccugaccagauggaugcugaucgaggccgagcugaagugcuucggcaacaccgccguggccaagugcaacgagaagcacgacgaggaguucugcgacaugcugagacuguucgacuucugcaagcaggccauccagagacugaaggcccccgcccagaugagcauccagcugaucaacaaggccgugaacgcccugaucaacgaccagcugaucaugaagaaccaccugagagacaucaugggcauccccuacugcaacuacagcaaguacugcuaccugaaccacaccaccaccggcaagaccagccugcccaagugcugccuggugagcaacggcagcuaccugaacgagacccacuucagcgacgacaucgagcagcaggccgacaacaugaucaccgagaugcugcagaaggaguacauggagagacagggcaagaccccccugggccugguggaccuguucguguucagcaccagcuucuaccugaucagcaucuuccugcaccuggugaagauccccacccacagacacaucgugggcaagagcugccccaagccccacagacugaaccacaugggcaucugcagcugcggccuguacaagcagcccggcgugcccgugaaguggaagagauga

SEQ ID NO: 26460 - RNA, 1476 nt, Artificial Sequence
  derived and/or modified CDS sequence (opt4) from LASV(G1442-SLE-2011;Clade IV)__AIT17180__GPCmut4
augggccagaucgugaccuucuuccaggaggugccccacgugaucgaggaggugaugaacaucgugcugaucgcccugagcauccuggccgugcugaagggccuguacaacguggccaccugcggccugaucggccuggugaccuuccugcugcugugcggcagaagcugcaccaccacccuguacaagggcguguacgagcugcagacccuggagcugaacauggagacccugaacaugugcaugccccugagcugcaccaagaacaacagccaccacuacaucagagugggcaacgagaccggccuggagcugacccugaccaacaccagcaucaucaaccacaaguucugcaaccugagcgacgcccacaagaagaaccuguacgaccacgcccugaugagcaucaucagcaccuuccaccugagcauccccaacuucaaccaguacgaggccaugagcugcgacuucaacggcggcaagaucagcgugcaguacaaccugagccacagcuacgccggcgacgccgccaaccacugcggcaccguggccaacggcgugcugcagaccuucaugagaauggccuggggcggcagcuacaucgcccuggacagcggcagaggcaacugggacugcaucaugaccagcuaccaguaccugaucauccagaacaccaccugggacgaccacugccaguucagcagacccagccccaucggcuaccugggccugcugagccagagaaccagagacguguacaucagcagaagaagaagaggcaccuucaccuggacccugagcgacagcgagggcaaggacacccccggcggcuacugccugaccagauggaugcugaucgaggccgagcugaagugcuucggcaacaccgccguggccaagugcaacgagaagcacgacgaggaguucugcgacaugcugagacuguucgacuucugcaagcaggccauccagagacugaaggcccccgcccagaugagcauccagcugaucaacaaggccgugaacgcccugaucaacgaccagcugaucaugaagaaccaccugagagacaucaugggcauccccuacugcaacuacagcaaguacugcuaccugaacaacaccgccaccggcaagaccagccugcccaagugcugccugaucagcaacggcagcuaccugaacgagacccacuucagcgacgacaucgagcaggaggccgacaacaugaucaccgagaugcugcagaaggaguacauggagagacagggcaagaccccccugggccugguggaccuguucguguucagcaccagcuucuaccugaucagcaucuuccugcaccuggugaagauccccacccacagacacaucgugggcaagagcugccccaagccccacagacugaaccacaugggcaucugcagcugcggccuguacaagcagcccggcgugcccgugagauggaagagauga

SEQ ID NO: 26461 - RNA, 1476 nt, Artificial Sequence
  derived and/or modified CDS sequence (opt4) from LASV(G3010-SLE-2013;Clade IV)__AIT17344__GPCmut4
augggccagaucgugaccuucuuccaggaggugccccacgugaucgaggaggugaugaacaucgugcugaucgcccugagcauccuggccgugcugaagggccuguacaacuucgccaccugcggccuggugggccuggugaccuuccugcugcugugcggcagaagcugcaccaccagccuguacaagggcguguacgagcugcagacccuggagcugaacauggagacccugaacaugugcaugccccugagcugcaccaagaacaacagccaccacuacaucauggugggcaacgagaccggccuggagcugacccugaccaacaccagcaucaucaaccacaaguucugcaaccugagcgacgcccacaagaagaaccuguacaaccacgcccugaugagcaucaucagcaccuuccaccugagcauccccaacuucaaccaguacgaggccaugagcugcgacuucaacggcggcaagaucagcgugcaguacaaccugagccacagcuacgccggcgacgccgccagccacugcggcaccguggccaacggcgugcugcagaccuucaugagaauggccuggggcggcagcuacaucgcccuggacagcggcuacggcaagugggacugcaucaugaccagcuaccaguaccugaucauccagaacaccaccugggaggaccacugccaguucagcagacccagccccaucggcuaccugggccugcugagccagagaaccagagacaucuacaucagcagaagaagaagaggcaccuucaccuggacccugagcgacagcgagggcaaggacacccccggcggcuacugccugaccagauggaugcugaucgaggccgagcugaagugcuucggcaacaccgccguggccaagugcaacgagaagcacgacgaggaguucugcgacaugcugagacuguucgacuucugcaagcaggccauccagagacugaagacccccgcccagaugagcauccagcugaucaacaaggccgugaacgcccugaucaacgaccagcugaucaugaagaaccaccugagagacaucaugggcauccccuacugcaacuacagcaaguacugcuaccugaaccacaccaccaccggcaagaccagccugcccaagugcugccuggugagcaacggcagcuaccugaacgagacccacuucagcgacgacaucgagcagcaggccgacaacaugaucaccgagaugcugcagaaggaguacauggagagacagggcaagaccccccugggccugguggaccuguucguguucagcaccagcuucuaccugaucagcaucuuccugcaccuggugaagauccccacccacagacacaucgugggcaagagcugccccaagccccacagacugaaccacaugggcaucugcagcugcggccuguacaagcagcccggcgugcccgugagauggaagagauga

SEQ ID NO: 26462 - RNA, 1476 nt, Artificial Sequence
  derived and/or modified CDS sequence (opt4) from LASV(G502-SLE-2009;Clade IV)__AIT17126__GPCmut4
augggccagaucgugaccuucuuccaggaggugccccacgugaucgaggaggugaugaacaucgugcugaucgcccugagcauccuggccgugcugaagggccuguacaacuucgccaccugcggccuggugggccugcugaccuuccugcugcugugcggcagaagcugcaccaccggccuguacaagggcguguacgagcugcagacccuggagcugaacauggagacccugaacaugugcaugccccugagcugcaccaagaacaacagccaccacuacaucauggugggcaacgagaccggccuggagcugacccugaccaacaccagcaucaucaaccacaaguucugcaaccugagcgacgcccacaagaagaaccuguacgaccacgcccugaugagcaucaucagcaccuuccaccugagcauccccaacuucaaccaguacgaggccaugagcugcgacuucaacggcggcaagaucagcgugcaguacaaccugagccacagcuacgccggcgacgccgccgaccacugcggcaccguggccaacggcgugcugcagaccuucaugagaauggccuggggcggcagcuacaucgcccuggacagcggcagaggcagaugggacugcaucaugaccagcuaccaguaccugaucauccagaacaccaccugggaggaccacugccaguucagcagacccagccccaucggcuaccugggccugcugagccagagaaccagagacaucuacaucagcagaagaagaagaggcaccuucaccuggacccugagcgacagcgagggcaaggacacccccggcggcuacugccugaccagauggaugcugaucgaggccgagcugaagugcuucggcaacaccgccguggccaagugcaacgagaagcacgacgaggaguucugcgacaugcugagacuguucgacuucugcaagcaggccauccagagacugaaggcccccgcccagaugagcauccagcugaucaacaaggccgugaacgcccugaucaacgaccagcuggugaugaagaaccaccugagagacaucaugggcauccccuacugcaacuacagcagauacugcuaccugaaccacaccaccaccggcagaaccagccugcccaagugcugccuggugagcaacggcagcuaccugaacgagacccacuucagcgacgacaucgagcagcaggccgacaacaugaucaccgagaugcugcagaaggaguacauggagagacagggcaagaccccccugggccugguggaccuguucguguucagcaccagcuucuaccugaucagcaucuuccugcaccuggugaagauccccacccacagacacaucgugggcaagagcugccccaagccccacagacugaaccacaugggcaucugcagcugcggccuguacaagcagcccggcgugcccgugaaguggaagagauga

SEQ ID NO: 26463 - RNA, 1476 nt, Artificial Sequence
  derived and/or modified CDS sequence (opt4) from LASV(G733-SLE-2010;Clade IV)__AIT17154__GPCmut4
augggccagaucgugaccuucuuccaggaggugccccacgugaucgaggaggugaugaacaucgugcugaucgcccugagcauccuggccgugcugaagggccuguacaacuucgccaccugcggcaucgugggccuggugagcuuccugcugcugugcggcagaagcugcaccaccagccuguacaagggcguguacgagcugcagacccuggagcugaacauggagacccugaacaugugcaugccccugagcugcaccaagaacaacagccaccacuacaucauggugggcaacgagaccggccuggagcugacccugaccaacaccagcaucaucaaccacaaguucugcaaccugagcgacgcccacaagaagaaccuguacgaccacgcccugaugagcaucaucagcaccuuccaccugagcauccccaacuucaaccaguacgaggccaugagcugcgacuucaacggcggcaagaucagcgugcaguacaaccugagccacagcuacgccggcgacgccgccaaccacugcggcaccaucgccaacggcgugcugcagaccuucaugagaauggccuggggcggcagcuacaucgcccuggacagcggcagagacagaugggacugcaucaugaccagcuaccaguaccugaucauccagaacaccaccugggaggaccacugccaguucagcagacccagccccaucggcuaccugggccugcugagccagagaaccagagacaucuacaucagcagaagaagaagaggcaccuucaccuggacccugagcgacagcgagggcaaggacacccccggcggcuacugccugaccagauggaugcugaucgaggccgagcugaagugcuucggcaacaccgccguggccaagugcaacgagaagcacgacgaggaguucugcgacaugcugagacuguucgacuucugcaagcaggccauccagagacugaaggcccccgcccagaugagcauccagcugaucaacaaggccgugaacgcccugaucaacgaccagcugaucaugaagaaccaccugagagacaucaugggcauccccuacugcaacuacagcaaguacugcuaccugaaccacaccaccaccggcaagaccagccugcccaagugcugccuggugagcaacggcagcuaccugaacgagacccacuucagcgacgacaucgagcagcaggccgacaacaugaucaccgagaugcugcagaaggaguacauggagagacagggcaagaccccccugggccugguggaccuguucguguucagcaccagcuucuaccugaucagcaucuuccugcaccuggugaagauccccacccacagacacguggugggcaagagcugccccaagccccacagacugaaccacaugggcaucugcagcugcggccuguacggccagcccggcgugcccgugaaguggaagagauga

SEQ ID NO: 26464 - RNA, 1476 nt, Artificial Sequence
  derived and/or modified CDS sequence (opt4) from MOPV/LASV reassortant(IGS-1;Clade IV)__AFY05576__GPCmut4
augggccagaucgugaccuucuuccaggaggugccccacgugaucgaggaggugaugaacaucgugcugaucgcccugagcgugcuggccgugcugaagggccuguacaacuucgccaccugcggccuggugggccuggugaccuuccugcugcugugcggcagaagcugcaccaccagccuguacaagggcguguacgagcugcagacccuggagcugaacauggagacccugaacaugugcaugccccugagcugcaccaagaacaacagccaccacuacaucauggugggcaacgagaccggccuggagcugacccugaccaacaccagcaucaucaaccacaaguucugcaaccugagcgacgcccacaagaagaaccuguacgaccacgcccugaugagcaucaucagcaccuuccaccugagcauccccaacuucaaccaguacgaggccaugagcugcgacuucaacggcggcaagaucagcgugcaguacaaccugagccacagcuacgccggcgacgccgccaaccacugcggcaccguggccaacggcgugcugcagaccuucaugagaauggccuggggcggcagcuacaucgcccuggacagcggcagaggcaacugggacugcaucaugaccagcuaccaguaccugaucauccagaacaccaccugggaggaccacugccaguucagcagacccagccccaucggcuaccugggccugcugagccagagaaccagagacaucuacaucagcagaagaagaagaggcaccuucaccuggacccugagcgacagcgagggcgaggacacccccggcggcuacugccugaccagauggaugcugaucgaggccgagcugaagugcuucggcaacaccgccguggccaagugcaacgagaagcacgacgaggaguucugcgacaugcugagacuguucgacuucugcaagcaggccauccagagacugaaggcccccgcccagaugagcauccagcugaucaacaaggccgugaacgcccugaucaacgaccagcugaucaugaagaaccaccugagagacaucaugggcauccccuacugcaacuacagcaaguacugcuaccugaaccacaccaccaccggcagaaccagccugcccaagugcugccuggugagcaacggcagcuaccugaacgagacccacuucagcgacgacaucgagcagcaggccgacaacaugaucaccgagaugcugcagaaggaguacauggagagacagggcaagaccccccugggccugguggaccuguucguguucagcaccagcuucuaccugaucagcaucuuccugcaccuggugaagauccccacccacagacacaucgugggcaagagcugccccaagccccacagacugaaccacaugggcaucugcagcugcggccuguacaagcagcccggcgugcccgugaaguggaagagauga

SEQ ID NO: 26465 - RNA, 1476 nt, Artificial Sequence
  derived and/or modified CDS sequence (opt4) from LASV(LM765-SLE-2012;Clade IV)__AIT17814__GPCmut4
augggccagaucgugaccuucuuccaggaggugccccacgugaucgaggaggugaugaacaucgugcugaucgcccugagcauccuggccgugcugaagggccuguacaacuucgccaccugcggccuggugggccuggugaccuuccugcugcugugcggcagaagcugcaccaccagccuguacaagggcguguacgagcugcagacccuggagcugaacauggagacccugaacaugugcaugccccugagcugcaccaagaacaacagccaccacuacaucauggugggcaacgagaccggccuggagcugacccugaccaacaccagcaucaucgaccacaaguucugcaaccugagcgacgcccacagaaagaaccuguacgaccacgcccugaugagcaucaucagcaccuuccaccugagcauccccaacuucaaccaguacgaggccaugagcugcgacuucaacggcggcaagaucagcgugcaguacaaccugagccacagcuacgccaaggacgccgccgaccacugcggcaccguggccaacggcgugcugcagaccuucaugagaauggccuggggcggcagcuacaucgcccuggacagcggcagaggcagaugggacugcaucaugaccagcuaccaguaccugaucauccagaacaccaccugggaggaccacugccaguucagcagacccagccccaucggcuaccugggccugcugagccagagaaccagagacaucuacaucagcagaagaagaagaggcaccuucaccuggacccugagcgacagcgagggcaaggacacccccggcggcuacugccugaccagauggaugcugaucgaggccgagcugaagugcuucggcaacaccgccguggccaagugcaacgagaagcacgacgaggaguucugcgacaugcugagacuguucgacuucugcaagcaggccauccagagacugaaggcccccgcccagaugagcauccagcugaucaacaaggccgugaacgcccugaucaacgaccagcugaucaugaagaaccaccugagagacaucaugggcauccccuacugcaacuacagcaaguacugcuaccugaaccacaccaccaccggcaagaccagccugcccaagugcugccuggugagcaacggcagcuaccugaacgagacccacuucagcgacgacaucgagcagcaggccgacaacaugaucaccgagaugcugcagaaggaguacauggagagacagggcaagaccccccugggccugguggaccuguucguguucagcaccagcuucuaccugaucagcaucuuccugcaccuggugaagauccccacccacagacacaucgugggcaagcccugccccaagccccacagacugaaccacaugggcaucugcagcugcggccuguacaagcagcccggcgugcccgugaaguggaagagauga

SEQ ID NO: 26466 - RNA, 1476 nt, Artificial Sequence
  derived and/or modified CDS sequence (opt4) from LASV(LM776-SLE-2012;Clade IV)__AIT17824__GPCmut4
augggccagaucgugaccuucuuccaggaggugccccacgugaucgaggaggugaugaacaucgugcugaucgcccugagcauccuggccgugcugaagggccuguacaacuucgccaccugcggccuggugggccuggugaccuuccugcugcugugcggcagaagcugcaccaccagcguguacaagggcguguacgagcugcagacccuggagcugaacauggagacccugaacaugugcaugccccugagcugcaccaagaacaacagccaccacuacaucauggugggcaacgagaccggccuggagcugacccugaccaacaccagcaucaucaaccacaaguucugcaaccugagcgacgcccacaagaagaaccuguacgaccacgcccugaugagcaucaucagcaccuuccaccugagcauccccaacuucaaccaguacgaggccaugagcugcgacuucaacggcggcaagaucagcgugcaguacaaccugagccacagcuacgccggcgacgccgccaaccacugcggcaccguggccaacggcgugcugcagaccuucaugagaauggccuggggcggcagcuacaucgcccuggacagcggccacggcaagugggacugcaucaugaccagcuaccaguaccugaucauccagaacaccaccugggaggaccacugccaguucagcagacccagccccaucggcuaccugggccugcugagccagagaaccagagacaucuacaucagcagaagaagaagaggcaccuucaccuggacccugagcgacagcgagggcaaggacacccccggcggcuacugccugaccagauggaugcugaucgaggccgagcugaagugcuucggcaacaccgccguggccaagugcaacgagaagcacgacgaggaguucugcgacaugcugagacuguucgacuucugcaagcaggccauccagagacugaaggcccccgcccagaugagcauccagcugaucaacaaggccgugaacgcccugaucaacgaccagcugaucaugaagaaccaccugagagacaucaugggcauccccuacugcaacuacagcaaguacugcuaccugaaccacaccaccaccggcaagaccagccugcccaagugcugccuggugagcaacggcagcuaccugaacgagacccacuucagcgacgacaucgagcagcaggccgacaacaugaucaccgagaugcugcagaaggaguacauggagagacagggcaagaccccccugggccugguggaccuguucguguucagcaccagcuucuaccugaucagcaucuuccugcaccuggugaagauccccacccacagacacaucgugggcaagagcugccccaagccccacagacugaaccacaugggcaucugcagcugcggccuguacaagcagcccggcgugcccgugagauggaagagauga

SEQ ID NO: 26467 - RNA, 1476 nt, Artificial Sequence
  derived and/or modified CDS sequence (opt4) from LASV(Mad39;Clade IV)__ANH09722__GPCmut4
augggccagaucgugaccuucuuccaggaggugccccacgugaucgaggaggugaugaacaucgugcugaucgcccugagcauccuggccgugcugaagggccuguacaacguggccaccugcggccugaucggccuggugaccuuccugcugcugugcggcagaagcugcaccaccacccuguacaagggcguguacgagcugcaggcccuggagcugaacauggagacccugaacaugugcaugccccugagcugcaccaagaacaacagccaccacuacaucagagugggcaacgagaccggccuggagcugacccugaccaacaccagccugaucaaccacaaguucugcaaccugagcgacgcccacaagaagaaccuguacgaccacgcccugaugagcaucaucagcaccuuccaccugagcauccccaacuucaaccaguacgaggccaugagcugcgacuucaacgacggcaagaucagcgugcaguacaaccugagccacaccuacgccggcgacaccgccaaccacugcggcaccguggccaacggcgugcugcagaccuucaugagaauggccuggggcggcagcuacaucgcccuggacagcggcagaggcggcugggacugcaucaugaccagcuaccaguaccugaucauccagaacaccaccugggaggaccacugccaguucagcagacccagccccaucggcuaccugggccugcugagccagagaaccagagacaucuacaucagcagaagaagaagaggcaccuucaccuggacccugagcgacagcgagggcaaggacacccccggcggcuacugccugaccagauggaugcugaucgaggccgagcugaagugcuucggcaacaccgccguggccaagugcaacgagaagcacgacgaggaguucugcgacaugcugagacuguucgacuucugcaagcaggccauccagagacugaaggcccccgcccagaugagcauccagcugaucaacaaggccgugaacgcccugaucaacgaccagcugaucaugaagaaccaccugagagacaucaugggcauccccuacugcaacuacagcaaguacugcuaccugaaccacaccgugaccggcaagaccagccugcccaagugcugccuggugagcaacggcagcuaccugaacgagacccacuucagcgacgacaucgagcagcaggccgacaacaugaucaccgagaugcugcagaaggaguacauggagagacagggcaagaccccccugggccugguggaccuguucguguucagcaccagcuucuaccugaucagcaucuuccugcaccuggugaagauccccacccacagacacguggugggcaagcccugccccaagccccacagacugaaccacaugggcaucugcagcugcggcuucuacaagcagcccggcgugcccgugagauggaagagauga

SEQ ID NO: 26468 - RNA, 1476 nt, Artificial Sequence
  derived and/or modified CDS sequence (opt4) from LASV(Z0947-SLE-2011;Clade IV)__AIT17840__GPCmut4
augggccagaucgugaccuucuuccaggaggugccccacgugaucgaggaggugaugaacaucgugcugaucgcccugagcauccuggccgugcugaagggccuguacaacuucgccaccugcggccuggugggccuggugaccuuccugcugcugugcggcagaagcugcaccaucagccuguacaagggcguguacgagcugcagacccuggagcugaacauggagacccugaacaugugcaugccccugagcugcaccaagaacaacagccaccacuacaucauggugggcaacgagaccggccuggagcugacccugaccaacaccagcaucaucaaccacaaguucugcaaccugagcgacgcccacaagaagaaccuguacgaccacgcccugaugagcaucaucagcaccuuccaccugagcauccccaacuucaaccaguacgaggccaugagcugcgacuucaacggcggcaagaucagcgugcaguacaaccugagccacagcuacgccggcgacgccgccaaccacugcggcaccguggccaacggcgugcugcagaccuucaugagaauggccuggggcggcagcuacaucgcccuggacagcggcagagacagaugggacugcaucaugaccagcuaccaguaccugaucauccagaacaccaccugggaggaccacugccaguucagcagacccagccccaucggcuaccugggccugcugagccagagaaccagagacaucuacaucagcagaagaagaagaggcaccuucaccuggacccugagcgacagcgagggcaaggacacccccggcggcuacugccugaccagauggaugcugaucgaggccgagcugaagugcuucggcaacaccgccguggccaagugcaacgagaagcacgacgaggaguucugcgacaugcugagacuguucgacuucugcaagcaggccauccagagacugaaggcccccgcccagaugagcauccagcugaucaacaaggccgugaacgcccugaucaacgaccagcugaucaugaagaaccaccugagagacaucaugggcauccccuacugcaacuacagcaaguacugcuaccugaaccacaccaccaccggcaagaccagccugcccaagugcugccuggugagcaacggcagcuaccugaacgagacccacuucagcgacgacaucgagcagcaggccgacaacaugaucaccgagaugcugcagaaggaguacauggagagacagggcaagaccccccugggccugguggaccuguucguguucagcaccagcuucuaccugaucagcaucuuccugcaccuggugaagauccccacccacagacacaucgugggcaagcccugccccaagccccacagacugaaccacaugggcaucugcagcugcggccuguacaagcagcccggcgugcccgugaaguggaagagauga

SEQ ID NO: 26469 - RNA, 1476 nt, Artificial Sequence
  derived and/or modified CDS sequence (opt5) from LASV(Josiah;Clade IV)__NP_694870__GPCmut4
augggccagaucgugaccuucuuucaagaggucccccacguuauugaagaggugaugaacaucgugcugauugcccucagcguccuggcugugcuuaaggggcuguacaauuucgccacaugcggacucguuggccuggugacguuucuucugcucugugggagauccugcaccacaucucuguauaaaggagucuacgaacugcagacccucgagcugaacauggaaacacuuaauauguguaugccucugagcugcaccaagaacaauucccaucacuauaucauggugggcaacgagacagggcucgagcugacccuuacgaauaccucuauuaucaaccauaaauucuguaaucugagcgacgcgcacaagaaaaaccucuacgaucaugcucugauguccaucauuucuacauuucaccugagcaucccgaauuucaaccaguaugaagccauguccugcgacuuuaauggaggcaagauuagcguucaguacaaccucucucacuccuaugccggcgaugcugccaaucauugugggaccguggcuaacggaguccugcaaacauucaugcggauggccuggggcgggagcuacaucgcgcuugacucuggacgcggcaacugggauugcauuaugaccuccuaccaguaucugaucauucagaauacgacaugggaggaccacugucaguuuagcagacccucuccuaucggguaccucggacugcuuucccaacggacccgcgauaucuauauuagcagacggcgcagaggcacauucaccuggacccuguccgacucugaaggcaaggauacacccgggggauacugccucacgcgguggaugcugaucgaggccgagcugaaauguuuuggcaacaccgcuguggccaagugcaaugaaaaacaugacgaggaguucugcgauaugcuccgccuguuugacuucuguaagcaggcuauucagagacuuaaagccccugcgcagaugagcauccaacugauuaacaaggccgugaaugcucucaucaacgaucagcugaucaugaagaaucaccuucgggacauuauggggauccccuauugcaacuacuccaaauauuguuaccugaaucacacaaccacaggacgcaccagccucccuaagugcugucuggucucuaacggcuccuaccugaaugaaacgcauuucagcgacgauauugaacagcaagccgacaacaugaucacagagaugcuccagaaagaguauauggaaagacaggggaagaccccgcugggacuuguugaucuguuuguguucucuaccagcuuuuaccucauuuccaucuuccugcaccuggugaaaauccccacacaucggcacauugucggcaagucuugcccuaaaccccaucgccuuaaucacaugggcaucuguagcugcgggcucuauaagcagccuggagugcccguuaaguggaaaagauga

SEQ ID NO: 26470 - RNA, 1473 nt, Artificial Sequence
  derived and/or modified CDS sequence (opt5) from LASV(LP;Clade I)__AAF86701__GPCmut4
augggccagaucauuaccuucuuucaagaggugccccacgucaucgaagagguuaugaacauugugcugaucgcccucagccugcuugcuauucugaaggggcucuacaauaucgccacaugcggaaucauuggccugguggcguuccuuuuucugugugggaaauccugcucucucacgcugaagggaggcuaugaacugcagacccucgagcugaacauggaaacacuuaauauguguaugccucugagcugcaccaaaaacuccucucaucacuacaucagagucgggaaugagacaggacucgagcugacccuuacaaacaccagcauuaucaaucauaaguucuguaaccuguccgacgcucacaaaaagaaucucuaugaucaugcccugaugucuauuaucagcacguuucaccuguccauuccgaacuucaaucaguacgaagccaugagcugcgacuuuaacggcggcaagaucucugugcaguauaaucucucccacagcuacgcuggggaugccgcugagcauuguggaaccguugccaacggcgugcugcaaacauucaugcggauggcguggggagggcgcuauaucgcccuugacucuggcaaagggaauugggauugcauuaugaccuccuaccaguaccugaucauucagaacacaaccugggaagaccacugucaguuuagcagacccucuccuaucggauaucucggccugcuuucccaacggacgcgcgauauuuacaucagcagacggcgcagaggcacauucaccuggacacuguccgacucugaggggaacgagacccccggaggcuauugccucacccgguggaugcugaucgaagcugagcugaaguguuuugggaauacagccgucgcuaaaugcaacgaaaagcaugaugaggaguucugcgacaugcuccgccuguuugauuucuguaaacaggccauuagacggcuuaaggcgccugcccagaugagcauccagcugauuaauaaggcugugaacgcccucaucaaugaccaacugauuaugaaaaaccaccuucgcgauaucaugggaauccccuacugcaauuauuccaaguacuguuaucugaaccacacgagcucuggcagaaccucccucccuaaaugcugucugauuagcaaugggucuuaccugaacgaaacacaguucagcgacgacaucgagcagcaagcugauaauaugauuaccgaaaugcuccagaaggaguacaucgaacggcagggaaaaacaccgcugggccuuguugacauuuuuaucuucuccaccucuuuuuaucugauuagcaucuuccuccaucugaucaagauucccacgcaccgccauaucgugggcaaaccuugccccaagccucacagacugaaccauaugggggucuguuccugcggacuuuacaagcaccccggcgugccgacaaaauggaagcgguga

SEQ ID NO: 26471 - RNA, 1473 nt, Artificial Sequence
  derived and/or modified CDS sequence (opt5) from LASV(803213;Clade II)__AAF86703__GPCmut4
augggccagaucauuaccuucuuucaagaggugccccacgucaucgaagagguuaugaacauugugcugaucgcccucagccugcuugcuauucugaaggggaucuacaauguggccacaugcggacucuucggccugaucuccuuucuucugcucugugggagaucuugcagcgucacguauaaaggaguguacgaacugcagacccuggagcucaacauggcgaaucugaacauguguaugccucuuuccugcacaaagaauaacucucaucacuauauuaugguuggcaaugaaaccgggcuggagcucacacugaccaacacaagcaucauuaaucauaaauucuguaaccuuuccgacgcucacaagaaaaaucuguacgaucaugcccucaugucuaucauuagcaccuuucaccuguccaucccgaacuucaaucaguaugaggccaugagcugcgacuuuaacggaggcaagauuucugugcaguacaaucugucccacagcuucgcugucgaugccgcuaaccauuguggcacgaucgccaacggggugcuccaaaccuuuaugcggauggcguggggaggcucuuauaucgcccuggacuccgggaagggaaauugggauugcauuaugacaagcuaccaguaccuuaucauucagaacaccacaugggaagaccacugucaguucucucgccccuccccuaucggcuaucuggggcuccugagccaaagaacccgggauauuuacaucucccgcagacggcgcggaacguuuacauggacccuuucugacagcgagggcaaugaagcucccggcggguauugccugacaagauggaugcucaucgaggccgagcugaaauguuucggaaacaccgcuguugccaagugcaaugaaaaacaugaugaggaauuuugcgacaugcugcgccucuucgauuucuguaagcaggcgauuaaacggcugaagaccccugcccagauguccauccagcuuauuaacaaggcugugaaugcccugaucaacgaccaacucauuaugaaaaaucaccugagagauaucaugggcauccccuacugcaacuauagccgguacuguuaucuuaaucacacagucacggggaagaccucucugccucgcugcugucucguguccaacggaagcuaccugaaugagacacauuuuucugacgacauugaacagcaggcugauaacaugaucaccgagaugcugcaaaaagaguacauggacagacagggcaagacaccgcucgggcugguggaucuuuucgucuuuagcaccuccuucuaucugauuucuaucuuucuccaccugguuaaaauucccacgcaucggcacaucgugggaaagccuugccccaaaccucaucgccugaaucacaugggcauuuguagcugcggccuuuacaagcaccccggggugccggucaaguggaaaagauga

SEQ ID NO: 26472 - RNA, 1473 nt, Artificial Sequence
  derived and/or modified CDS sequence (opt5) from LASV(GA391;Clade III)__CAA36645__GPCmut4
augggccagaucgugaccuucuuucaagaggucccccacguuauugaagaggugaugaacaucgugcugauugcccucagcauccuggcuauucuuaaggggcuguacaaugucgccacaugcggacucaucggccuggugacguuccuucugcucuccgggagaucuuguagccugaucuauaaaggaaccuacgaacugcagacacucgagcugaacauggaaacccuuaauaugugcaugccucuguccuguacaaagaacaauucucaucacuauauucggguuggcaacgagaccgggcucgagcugacacuuaccaauacgagcauccugaaccauaaauuuugcaaucucuccgacgcgcacaagcgcaaccuguacgaucauucucugaugagcauuaucuccaccuuccaccucagcauuccgaauuuuaaccaguaugaagcuaugucuugugacuucaauggaggcaaaaucacagugcaguacaaccugucccacagcuuugccgucgaugccgcuggccauugcgggacccuugccaauggagugcugcaaacauucaugagaauggcuuggggcgggucuuauauugcccucgacuccggacggggcaacugggauuguaucaugaccagcuaccaguaccugaucauucagaacacgacaugggacgaucacugccaguuuucucgccccuccccuaucggguaucuuggacugcucagccaaagaacccgggacauuuacaucucccgcagacggcgcggcacauucaccuggacccugucugauagcgagggcaaugaaacacccgggggauauugucugacgagauggaugcucauugaggcggagcugaagugcuuuggcaacaccgccguugcuaaguguaaugaaaaacaugacgaggaguucugcgauaugcuucggcuguuugacuucugcaagcaggccauccgcagacucaaaaccccugcucagauguccauccagcugauuaacaaggccgugaaugcgcuuaucaacgaucaacugauuaugaaaaaucaccuccgggacaucauggggauucccuacuguaacuauagccgcuacugcuaucugaaucacacaucuacaggaaagaccucccugccuagauguugccucaucagcaacggcucuuaccugaaugaaacgaaguucagcgacgauaucgaacagcaggccgacaacaugauuacagagaugcuucaaaaagaguacaucgaucggcaggggaagaccccgcugggacucgucgaccuguuuguguucuccaccucuuuuuaucugauuagcaucuuccuucaucucgugaaaauucccacacacagacauaucgucggcaagccuugucccaaaccucaccgccugaaucauaugggcauuugcuccugugggcuguacaagcagcccggaguuccggugcgguggaaaagauga

SEQ ID NO: 26473 - RNA, 1476 nt, Artificial Sequence
  derived and/or modified CDS sequence (opt5) from LASV(AV;Clade V)__CCA30314__GPCmut4
augggccagaucgugaccuucuuucaagaggucccccacguuauugaagaggugaugaacaucgugcugauugcccucagcauccuggcuguccuuaaggggcuguacaauauugccacaugcggacucaucggccugaucacguuccuucugcucugugggagauccugcucuagcaaccuguauaaaggaguguacgaacugcagucccucgaccugaauauggagacccuuaacauguguaugccucugucuugcacaaagaauaacagccaucacuauauucggguuggcaaugauaccgggcucgaacugacacuuaccaacacauccauccugaaucauaaauuuuguaaccucucugacgcgcacaagaaagaucuguacgaccaugcucugaugagcauuaucuccaccuuccaccucagcauuccgaauuuuaaccaguaugaggccaugucuugcgauuucaauggaggcaagaucuccgugcaguacaaccugagccacucuuaugccauugacgcugccaaucauuguggcacggucgcuaacgggauccuucaaaccuuuaugcgcauggccuggggaggcuccuacaucgcgcuggauagcgggagaggaaacugggacugcauuaugacaucuuaccaguaucucaucauucagaauaccacaugggagaaccacugucaguucucccggcccagcccuaucggcuaccuggggcuucugucccaacgcaccagagauauuuauaucucucggcgcagacggggaacguuuacauggacccucagcgacuccgaaggcaaugccacacccggcggguacugccugacccgcuggaugcugaucgaggcugaacucaaguguuucggaaacaccgccguggcuaaaugcaaugagaagcaugaugaggaauuuugcgacaugcugagacuuuucgauuuuuguaaacaggccauuagccggcugaagucuccugcgcagauguccauccagcucauuaacaaagccguuaaugcucugaucaacgaccaacuuauuaugaagaaucaucugcgcgacaucaugggcauccccuauugcaacuacagcaaguauuguuaccucaaucacacaauuacggggaaaaccucucugccuaagugcugucuggugagcaacggauccuaccucaaugagacacacuucucugaugacaucgaacagcaggccgauaacaugauuaccgagaugcugcaaaaagaauauauggagagacagggcaagacaccgcuugggcuggucgaccucuucguguuuagcaccuccuucuaccugaucagcauuuuucugcggcuugugaaaauccccacgcaccgccauauugucggaaagccuugccccaaaccucacagacucaaucauaugggcaucuguucuugcggccuguauaagcagcccgggguuccggugcgguggaagagauga

SEQ ID NO: 26474 - RNA, 1473 nt, Artificial Sequence
  derived and/or modified CDS sequence (opt5) from LASV(Togo/2016/7082;Clade VI)__AMR44577__GPCmut4
augggccagaucauuaccuucuuucaagaggugccccacgucaucgaagagguuaugaacauugugcugaucgcccucagccugcuugcuauucugaaggggguguacaaugucgccacaugcggaaucaucggccucgugacguuccuguuucuuugugggagauccugcucucugauuuauaaaggaagcuacgaacuccagacccuggagcugaacauggaaacacucaauauguguaugccucuguccugcaccaagaacucuagccaucacuauauccggguuggcaaugagacagggcuugagcugacccucacaaacaccuccauuaucaaucauaaauucuguaaccugucugacgcgcacaagcgcaaucuuuacgaucaugcucugaugagcauucucuccacguuucaccugagcaucccgaacuucaaucaguaugaagccaugucuugcgacuuuaacggaggcaaaauuuccgugcaguacaaucugagccacgccuaugcugucgaugccgcugagcauuguggcaccguggccaacgggguucuccaaacauucaugagaauggcguggggaggcucuuacaucgcccuggacuccgggcggggaaauugggauugcaucaugaccagcuaccaguaucuuauuauccagaacacaaccugggaagaccacugucaguuuucucgccccuccccuauuggcuaccuggggcuccugagccaaagaacgcgggauaucuauauuucccgcagacggcgcggaacauucaccuggacacuuucugacagcgagggcaacgagacccccggcggguacugccugaccagauggaugcucaucgaagcugagcugaaguguuuuggaaauacagccguggcuaagugcaacgaaaaacaugaugaggaguucugcgacaugcugcggcucuuugauuucuguaagcaggccauccagcgccugaaauccccugcgcagaugagcauucaacuuaucaauaaggccgucaacgcucugauuaaugaccagcucaucaugaaaaaccaccugagagauaugaugggcauucccuauugcaauuacucuaaguauuguuaccuuaaccacacguccagcgggcggaccucucugccuaagugcugucucgugagcaauggauccuaccugaacgaaacacauuucucugacgacaucgagcagcaagccgauaauaugaucaccgaaaugcugcagaaagaguauauugaccgccagggcaagacaccgcucgggcugguggaucuuuuugucuucagcaccuccuuuuaccugaucagcauuuuccuccaccugaucaaaauucccacgcauagacacaucguuggaaagccuugccccaaaccucaucggcugaaccacaugggcauuuguucuugcggccuuuauaagcagcccggggugccgacaagauggaaacgcuga

SEQ ID NO: 26475 - RNA, 1473 nt, Artificial Sequence
  derived and/or modified CDS sequence (opt5) from LASV(KAK-428;Clade n.d. (VII))__ANH09740__GPCmut4
augggccagaucgugaccuucuuucaagaggucccccacguuauugaagaggugaugaacaucgugcugauugcccucagccugcuugcuauccugaaggggcucuacaauuucgccacaugcggagucauuggccugaucacguuucuucugcucugugggagauccugcucugcgaccuauaaaggacaguacgaacugcagacacuggagcucaacauggaaagccugaauauguguaugccucuuuccugcaccaagaacaauucucaucacuauauccgggcuggcaacaauacagggcuggagcucacccugacaaacaccagcauuaucucccauaaauucuguaaucuuucugacgcccacaagaaaaaccuguacgaucauacgcucaugagcauuaucaccacauuucaccuguccauuccgaauuucaaccaguaugaggccaugagcugcgacuuuaauggaggcaagaucucuauucaauacaaccugucccacagcuaugcuggcgaugccgcucagcauugugggaccguggccaauggaguucuccagacauucaugcgcauggcguggggcgggucuuaccuggcccuugacuccggaagacggggcugggauugcaucaucagcucuuaccaguaucugauuauccaaaacaccacgugggacgaucacugucaguuuucccgccccagcccuauuggguaccucggauucgugucccagaagacaagagacaucuauauuucucggcgcagacggggcaccuuuacauggacccugagcgauuccgaaggccaugacaugcccgggggauacugccuuacccgcuggaugcugaucgaggcugaucucaaauguuucggcaacacagccgucgcuaagugcaaugaaaaacacgacgaggaguuuugcgauauguggagacuguucgacuucuguaagcaggccauccaacggcugaaagcgccugcccagaugaacauucagcucaucaauaaggcugugaacgcccugauuaaugaccaacuuaugaugaagaaccaucugcgcgauaucauggggauucccuauugcaauuacagcaaauuuuguuaucucaacaauacgaccacaggaagaaccucucugccucggugcugucuuaucuccaacggcagcuaccugaaugaaacacacuucucugacgauaucgagcagcaggcugacaacaugauuaccgaaaugcuccagaaggaguacauggaucgccaagggaaaacgccgcugggacugguugaccucuuuguguucagcacauccuuuuaucugaucaccauuuuccuucaccuggucaagauccccacccauagacacauugugggcaaaccuugccccaagccucaucggcucaaucacaugggcaucuguucuugcgggcuguacaaacagcccggagugccggucagauggaagcgcuga

SEQ ID NO: 26476 - RNA, 1473 nt, Artificial Sequence; identical to SEQ ID NO: 26470
  derived and/or modified CDS sequence (opt5) from LASV(Pinneo-NIG-1969;Clade I)__AIT17836__GPCmut4

SEQ ID NO: 26477 - RNA, 1473 nt, Artificial Sequence
  derived and/or modified CDS sequence (opt5) from LASV(ISTH0009-NIG-2011;Clade II)__AIT17404__GPCmut4
augggccagaucauuaccuucuuucaagaggugccccacgucaucgaagagguuaugaacauugugcugaucgcccucagccugcuugcuauucugaaggggaucuacaauguggccacaugcggacucuucggccuggucuccuuucuucugcucugugggagaucuugcagcacgaccuauaaaggaguguacgaacugcagacacuggagcucgacauggcgucccugaacauguguaugccucuuucuugcaccaagaauaacagccaucacuauaucaugguuggcaaugaaacagggcuggagcucacccugacaaacaccuccauuaucaaucauaaauucuguaaccuuucugaugcucacaagaaaaaucuguacgaccaugcccucaugagcauuaucuccacguuucaccugagcauuccgaacuucaaucaguaugaggccaugucuugcgauuuuaacggaggcaagaucuccgugcaguacaaucugagccacgcuuaugccgucgacgcugccaaccauuguggcaccauugcgaauggggugcuccaaacauucaugcggauggccuggggaggcucuuacaucgcucuggauuccgggaagggaagcugggacugcaucaugaccucuuaccaguaucuuauuauccagaacacaaccugggaagaucacugucaguuuucccgccccagcccuauuggcuaccuggggcuccugucccaaagaacgcgggacaucuauauuucucgcagacggcgcggaacauucaccuggacacuuagcgauuccgagggcaacgaaacccccggcggguacugccugaccagauggaugcucaucgaggccgagcugaaauguuuuggaaauacagcuguugccaagugcaacgaaaaacaugacgaggaguucugcgauaugcugcggcucuuugacuucuguaagcaggcgauccgcagacugaaaacgccugcccagaugagcauucagcuuaucaauaaggcugugaacgcccugauuaaugaucaacucaucaugaagaaccaucugcgggacauuaugggcauccccuauugcaauuacucuaaauauuguuaccuuaaccacaccgucacagggaagaccucccugccucgcugcugucucgugagcaauggaucuuaccugaacgaaacacacuucagcgacgauaucgaacagcaggcugacaauaugauuaccgagcugcuccaaaaagaguauauggauagacagggcaagacgccgcuggggcuuguggaccuguuugucuucuccacaucuuuuuaccucaucagcauuuuccugcaccugaucaaaauucccacccaucggcacaucaccggaaagccuugccccaaaccucaucgccuuaaccacaugggcauuuguuccugcggccucuauaagcaccccgggguuccggugaaguggaaaagauga

SEQ ID NO: 26478 - RNA, 1473 nt, Artificial Sequence
  derived and/or modified CDS sequence (opt5) from LASV(ISTH2010-NIG-2012;Clade II)__AIT17482__GPCmut4
augggccagaucauuaccuucuuucaagaggugccccacgucaucgaagagguuaugaacauugugcugaucgcccucagccugcuugcuauucugaaggggaucuacaauguggccacaugcggacucuucggccuggucuccuuucuucugcucugugggagaucuugcagcacgaccuauaaaggaguguacgaacugcagacacuggagcucgacauggcgucccugaacauguguaugccucuuucuugcaccaagaauaacagccaucacuauaucaugguuggcaaugaaacagggcuggagcucacccugacaaacaccuccauuaucaaucauaaauucuguaaccuuucugaugcucacaagaaaaaucuguacgaccaugcccucaugagcauuaucuccacguuucaccugagcauuccgaacuucaaucaguaugaggccaugucuugcgauuuuaacggaggcaagaucuccgugcaguacaaucugagccacgcuuaugccgucgacgcugccaaccauuguggcaccauugcgaauggggugcuccaaacauucaugcggauggccuggggaggcucuuacaucgcucuggauuccgggaagggaagcugggacugcaucaugaccucuuaccaguaucuuauuauccagaacauuacaugggaagaucacugucaguuuucccgccccagcccuaucggcuaccuggggcuccugucccaaagaacccgggacauuuauaucucucgcagacggcgcggaacguucacauggacccuuagcgauuccgagggcaacgaaacacccggcggguacugccugaccagauggaugcucaucgaggccgagcugaaauguuuuggaaauaccgcuguugccaagugcaacgaaaaacaugacgaggaguucugcgauaugcugcggcucuuugacuucuguaagcaggcgauucgcagacugaaaacgccugcccagaugagcauccagcuuauuaauaaggcugugaacgcccugaucaaugaucaacucauuaugaagaaccaucugcgggacaucaugggcauccccuauugcaauuacucuaaauauuguuaccuuaaccacacagucaccgggaagacaucccugccucgcugcugucucgugagcaauggaucuuaccugaacgaaacccacuucagcgacgauauugaacagcaggcugacaauaugaucacagagcugcuccaaaaagaguauauugauagacagggcaagaccccgcuggggcuuguggaccuguuugucuucuccacgucuuuuuaccucaucagcauuuuccugcaccugguuaaaauccccacacaucggcacguggugggaaagccuugccccaaaccucaucgccuuaaccacaugggcauuuguuccugcggccucuauaagcaccccggggucccggugaaguggaaaagauga

SEQ ID NO: 26479 - RNA, 1473 nt, Artificial Sequence
  derived and/or modified CDS sequence (opt5) from LASV(Lassa virus/H.sapiens-wt/NGA/2015/ISTH_0543;Clade II)__AVO03639__GPCmut4
augggccagaucauuaccuucuuucaagaggugccccacgucaucgaagagguuaugaacauugugcugaucgcccucagccugcuugcuauucugaaggggaucuacaauguggccacaugcggacucuucggccuggucuccuuucuucugcucugugggagaucuugcagcacgaccuauaaaggaguguacgaacugcagacacuggagcucgacauggcgaaccugaauauguguaugccucuuuccugcaccaagaacaauucucaucacuauaucaugguuggcaacgaaacagggcuggagcucacccugacaaauaccagcauuaucaaccauaaauucuguaaucuuuccgaugcucacaagaaaaaccuguacgaccaugcccucaugucuauuaucagcacguuucaccuguccauuccgaauuucaaccaguaugaggccaugagcugcgauuuuaauggaggcaagaucucugugcaguacaaccugucccacaccuaugcugucgacgccgcuaaucauuguggcacaauugccaacggggugcuccaaaccuucaugcggauggcguggggaggcagcuacaucgcccuggauucugggaagggauccugggacugcaucaugacaagcuaccaguaucuuguuauucagaacaccacgugggaagaucacugucaguuuucucgccccuccccuaucggcuaccuggggcuccugagccaaagaacacgggacauuuauaucucccgcagacggcgcggaaccuucacauggacccuuucugauagcgagggcaaugaaacccccggcggguacugccugacaagauggaugcucauugaggcugagcugaaauguuuuggaaacacggccguggcuaagugcaaugaaaaacaugacgaggaguucugcgauaugcugcggcucuuugacuucuguaagcaggccauccgcagacugaaaaccccugcgcagauguccauccagcuuauuaacaaggccgucaaugcucugaucaacgaucaacucauuaugaagaaucaucugcgggacaucaugggcauucccuauugcaacuacagcaaauauuguuaccuuaaucacacagugaccgggaagacaucucugccucgcugcugucucguguccaacggaagcuaccugaaugaaacccacuucucugacgauaucgaacagcaggccgacaacaugaucacggagcugcuccaaaaagaguauauugauagacagggcaagacaccgcuggggcuugucgaccuguuuguuuucagcaccuccuuuuaccucaucucuauuuuccugcaccuggugaaaauccccacccaucggcacauuacaggaaagccuugccccaaaccucaucgccuuaaucacaugggcaucuguagcugcggccucuauaagcaccccggggugccggucaaguggaaaagauga

SEQ ID NO: 26480 - RNA, 1473 nt, Artificial Sequence
  derived and/or modified CDS sequence (opt5) from LASV(Lassa virus/H.sapiens-wt/NGA/2016/ISTH_0009;Clade II)__AVO03571__GPCmut4
augggccagaucauuaccuucuuucaagaggugccccacgucaucgaagagguuaugaacauugugcugaucgcccucagccugcuugcuauucugaaggggaucuacaauguggccacaugcggacuccugggccuugucuccuuccugcuccugugugggagaucuugcagcacgaccuauaaaggaguguacgaacugcagacacucgagcuggacauggcgucccuuaacauguguaugccucugucuugcaccaagaauaacagccaucacuauaucaugguuggcaaugaaacagggcucgagcugacccuuacaaacaccuccauuaucaaucauaaauuuuguaaccugucugaugcucacaagaaaaaucucuacgaccaugcccugaugagcauuaucuccacguuccaccugagcauuccgaacuuuaaucaguaugaggccaugucuugcgauuucaacggaggccggaucuccgugcaguacaaucucagccacucuuaugcugucgacgccgcuaaccauuguggcaccauugccaauggggugcugcaaacauuuaugcgcauggcguggggaggcuccuacaucgcccuugauagcgggaagggaucuugggacugcaucaugaccuccuaccaguaucugauuauccagaacacaaccugggaagaucacugucaguucagcagacccuccccuauuggcuaccucgggcugcuuucucaacggacgcgcgacaucuauauuagcagacggcgcagaggaacauuuaccuggacacuguccgauagcgagggcaacgaaacccccggcggguacugccucacccgguggaugcugaucgaggcugagcugaaguguuucggaaauacagccguugcuaaaugcaacgaaaagcaugacgaggaauuuugcgauaugcuccgccuguucgacuuuuguaaacaggccaucagacggcuuaagacgccugcgcagaugucuauucagcugaucaauaaagccgugaacgcucucauuaaugaucaacugaucaugaagaaccaccuucgcgacauuaugggcauccccuauugcaauuacuccaaguauuguuaccugaaccacaccgucacagggaaaaccagccucccuagaugcugucuggugucuaauggaagcuaccugaacgagacacauuucuccgacgauaucgaacagcaggccgacaauaugauuaccgagcuccugcaaaaggaguauaucgaucggcagggcaaaacgccgcuugggcugguggaccucuucgucuuuucuaccagcuucuaccugauuuccaucuuucugcaccuuguuaagauucccacacaucgccacaucaccggaaaaccuugccccaagccucauagacucaaccacaugggcauuuguagcugcggccuguauaaucaccccggggugccggugaaauggaagcgguga

SEQ ID NO: 26481 - RNA, 1473 nt, Artificial Sequence
  derived and/or modified CDS sequence (opt5) from LASV(Lassa virus/H.sapiens-wt/NGA/2016/ISTH_0017;Clade II)__AVO03567__GPCmut4
augggccagaucauuaccuucuuucaagaggugccccacgucaucgaagagguuaugaacauugugcugaucgcccucagccugcuugcuauucugaaggggaucuacaauguggccacaugcggacucuucggccuggucuccuuucuucugcucugugggagaucuugcagcacgaccuauaaaggaguguacgaacugcagacacuggagcucgacauggcgucccugaacauguguaugccucuuucuugcaccaagaauaacagccaucacuauaucaugguuggcaaugaaacagggcuggagcucacccugacaaacaccuccauuaucaaucauaaauucuguaaccuuucugaugcucacaagaaaaaucuguacgaccaugcccucaugagcauuaucuccacguuucaccugagcauuccgaacuucaaucaguaugaggccaugucuugcgauuuuaacggaggcaagaucuccgugcaguacaaucugagccacaccuaugcuauugacgccgcuaaccauuguggcacaaucgccaaugggguccuccaaaccuucaugcggauggcguggggaggcucuuacaucgcccuggauuccgggaagggaagcugggacugcauuaugacaucuuaccaguaucuuaucauucagaacaccacgugggaagaucacugucaguuuucccgccccagcccuaucggcuaccuggggcuccugucccaaagaacacgggacauuuauaucucucgcagacggcgcggaaccuucacauggacccuuagcgauuccgagggcaacgaaacccccggcggguacugccugacaagauggaugcucaucgaggcugagcugaaauguuuuggaaauacggccguggcuaagugcaacgaaaaacaugacgaggaguucugcgauaugcugcggcucuuugacuucuguaagcaggccauucgcagacugaaaaccccugcgcagaugagcauccagcuuauuaauaaggccguuaacgcucugaucaaugaucaacucauuaugaagaaccaucugcgggacaucaugggcauccccuauugcaauuacucuaaauauuguuaccuuaaccacacagugaccgggaagacaucccugccucgcugcugucucgucagcaauggaucuuaccugaacgaaacccacuucagcgacgauauugaacagcaggccgacaauaugaucacggagcugcuccaaaaagaguauauggauagacagggcaagacaccgcuggggcuuguggaccuguuuguguucuccaccucuuuuuaccucauuagcaucuuccugcaccugguccggauucccacccaucgccacguuaucggaaaaccuugccccaagccucauagacuuaaccacaugggcauuuguuccugcggccucuauaaacaccccggggugccggugaaguggaagcgguga

SEQ ID NO: 26482 - RNA, 1473 nt, Artificial Sequence
  derived and/or modified CDS sequence (opt5) from LASV(Lassa virus/H.sapiens-wt/NGA/2018/ISTH_0959;Clade II)__AVV65099__GPCmut4
augggccagaucauuaccuucuuucaagaggugccccacgucaucgaagagguuaugaacauugugcugaucgcccucagccugcuugcuauucugaaggggaucuacaauguggucacaugcggacucuucggccugguguccuuucuucugcucugugggagaucuugcagcacgaccuauaaaggaguuuacgaacugcagacacuggagcucgacauggccucccugaacauguguaugccucuuucuugcaccaagaauaacagccaucacuauaucauggugggcaaugaaacagggcuggagcucacccugacaaacaccuccauuaucaaucauaaauucuguaaccuuucugaugcgcacaagaaaaaucuguacgaccaugcucucaugagcauuaucuccacguuucaccugagcauuccgaacuucaaucaguaugaggccaugucuugcgauuuuaacggaggcaagaucuccguccaguacaaucugagccacgccuaugcuauugacgccgcuaaccauuguggcaccaucgccaauggggugcuccaaacauucaugcggauggcguggggaggcucuuacaucgcccuggauuccgggaagggaagcugggacugcauuaugaccucuuaccaguaucuuaucauucagaacacaaccugggaagaucacugucaguuuucccgccccagcccuaucggcuaccuggggcuccugucccaaagaacgcgggacauuuauaucucucgcagacggcgcggaacauucaccuggacacuuagcgauuccgagggcaacgaaacccccggcggguacugccugaccagauggaugcucaucgaggcugagcugaaauguuuuggaaauacagccguugcuaagugcaacgaaaaacaugacgaggaguucugcgauaugcugcggcucuuugacuucuguaagcaggccauucgcagacugaaaacgccugcgcagaugagcauccagcuuauuaauaaggccgugaacgcucugaucaaugaucaacucauuaugaagaaccaucugcgggacaucaugggcauccccuauugcaauuacucuaaauauuguuaccuuaaccacaccgucacagggaagaccucccugccucgcugcugucucgugagcaauggaucuuaccugaacgaaacacacuucagcgacgauauugaacagcaggccgacaauaugaucaccgagcugcuccaaaaagaguauauugauagacagggcaagacgccgcuggggcuuguggaccuguuugucuucuccacaucuuuuuaccucaucagcauuuuccugcaccugguuaaaauccccacccaucggcacgugauuggaaagccuugccccaaaccucaucgccuuaaccacaugggcaucuguuccugcggccucuauaagcaccccggggugccggucaaguggaaaagauga

SEQ ID NO: 26483 - RNA, 1473 nt, Artificial Sequence
  derived and/or modified CDS sequence (opt5) from LASV(LASV003-NIG-2008;Clade II)__AIT17580__GPCmut4
augggccagaucauuaccuucuuucaagaggugccccacgucaucgaagagguuaugaacauugugcugaucgcccucagccugcuugcuauucugaaggggaucuacaauguggccacaugcggacucuucggccuggucuccuuucuucugcucugugggagaucuugcagcacgaccuauaaaggaguguacgaacugcagacacuggagcucgacauggcgucccugaacauguguaugccucuuucuugcaccaagaauaacagccaucacuauaucaugguuggcaaugaaacagggcuggagcucacccugacaaacaccuccauuaucaaucauaaauucuguaaccuuucugaugcucacaagaaaaaucuguacgaccaugcccucaugagcauuaucuccacguuucaccugagcauuccgaacuucaaucaguaugaggccaugucuugcgauuuuaacggaggcaagaucuccgugcaguacaaucugagccacaccuaugcugucgacgccgcuaaccauuguggcacaauugccaauggggugcuccaaaccuucaugcggauggcguggggaggcucuuacaucgcccuggauuccgggaagggaagcugggacugcaucaugacaucuuaccaguaucuuauuauccagaacaccacgugggaagaucacugucaguuuucccgccccagcccuauuggcuaccuggggcuccugucccaaagaacacgggacaucuauauuucucgcagacggcgcggaaccuucacauggacccuuagcgauuccgagagcaacgaaacccccggcggcuacugccugacaagauggaugcucaucgaggcugagcugaaauguuuugggaauacggccguugcuaagugcaacgaaaaacaugacgaggaguucugcgauaugcugcggcucuuugacuucuguaagcaggccauccgcagacugaaagcgccugcccagaugucuauucagcuuaucaauaaggcugugaacgcccugauuaaugaucaacucaucaugaagaaccaucugcgggacauuaugggaauccccuauugcaauuacuccaaauauuguuaccuuaaccacaccgucacaggccgcaccagccugccuagaugcugucucgugucuaaugggagcuaccugaacgaaacacacuucuccgacgauaucgaacagcaggcugacaauaugauuaccgagcugcuccaaaaggaguauauggaucggcagggaaaaacgccgcugggccuuguggaccuguuugucuucucuaccagcuuuuaccucaucuccauuuuccugcaccugguuaagauccccacacaucgccacgugauugggaaaccuugccccaagccucauagacuuaaccacaugggaaucuguagcugcggccucuauaaacaccccggcgugccggucaaguggaagcgguga

SEQ ID NO: 26484 - RNA, 1473 nt, Artificial Sequence
  derived and/or modified CDS sequence (opt5) from LASV(LASV035-NIG-2009;Clade II)__AIT17588__GPCmut4
augggccagaucauuaccuucuuucaagaggugccccacgucaucgaagagguuaugaacauugugcugaucgcccucagccugcuugcuauucugaaggggaucuacaauguggccacaugcggacucuucggccuggucuccuuucuucugcucugugggagaucuugcagcacgaccuauaaaggaguguacgaacugcagacacuggagcucgacauggcgucccugaacauguguaugccucuuucuugcaccaagaauaacagccaucacuauaucaugguuggcaaugaaacagggcuggagcucacccugacaaacaccuccauuaucaaucauaaauucuguaaccuuucugaugcucacaagaaaaaucuguacgaccaugcccucaugagcauuaucuccacguuucaccugagcauuccgaacuucaaucaguaugaggccaugucuugcgauuuuaacggaggcaagaucuccgugcaguacaaucugagccacgcuuaugccgucgacgcugccaaccauuguggcaccauugcgaauggggugcuccaaacauucaugcggauggccuggggaggcucuuacaucgcucuggauuccgggaagggaagcugggacugcaucaugaccucuuaccaguaucuuauuauccagaacacaaccugggaagaucacugucaguuuucccgccccagcccuauuggcuaccuggggcuccugucccaaagaacgcgggacaucuauauuucucgcagacggcgcggaacauucaccuggacacuuagcgauuccgagggcaacgaaacccccggcggguacugccugaccagauggaugcucaucgaggccgagcugaaauguuuuggaaauacagcuguugccaagugcaacgaaaaacaugacgaggaguucugcgauaugcugcggcucuuugacuucuguaagcaggcgauccgcagacugaaagccccugcucagaugagcauucagcuuaucaauaaggccgugaacgcucugauuaaugaucaacucaucaugaagaaccaucugcgggacauuaugggcauccccuauugcaauuacucuaaauauuguuaccuuaaccacacggucaccgggaagacaucccugccucgcugcugucucgugagcaauggaucuuaccugaacgaaacccacuucagcgacgauaucgaacagcaggccgacaauaugauuacagagcugcuccaaaaagaguauaucgauagacagggcaagaccccgcuggggcuuguggaccuguuugucuucuccacgucuuuuuaccucauuagcaucuuccugcaccugguuaaaauucccacacaucggcacgugaucggaaagccuugccccaaaccucaucgccuuaaccacaugggcauuuguuccugcggccucuauaagcaccccggggugccggucaaguggaaaagauga

SEQ ID NO: 26485 - RNA, 1473 nt, Artificial Sequence
  derived and/or modified CDS sequence (opt5) from LASV(LASV1000-NIG-2009;Clade II)__AIT17782__GPCmut4
augggccagaucauuaccuucuuucaagaggugccccacgucaucgaagagguuaugaacauugugcugaucgcccucagccugcuugcuauucugaaggggaucuacaauguggccacaugcggacucuucggccuggucuccuuucuucugcucugugggagaucuugcagcacgaccuauaaaggaguguacgaacugcagacacuggagcucgacauggcgucccugaacauguguaugccucuuucuugcaccaagaauaacagccaucacuauaucaugguuggcaaugaaacagggcuggagcucacccugacaaacaccuccauuaucaaucauaaauucuguaaccuuucugaugcucacaagaaaaaucuguacgaccaugcccucaugagcauuaucuccacguuucaccugagcauuccgaacuucaaucaguaugaggccaugucuugcgauuuuaacggaggcaagaucuccgugcaguacaaucugagccacaccuaugcugucgacgccgcuaaccauuguggcacaauugccaauggggugcuccaaaccuucaugcggauggcguggggaggcucuuacaucgcccuggauuccgggaagggaagcugggacugcaucaugacaucuuaccaguaucuuauuauccagaacaccacgugggaagaucacugucaguuuucccgccccagcccuauuggcuaccuggggcuccugucccaaagaacacgggacaucuauauuucucgcagacggcgcggaaccuucacauggacccuuagcgauuccgagggcaacgaaacccccggcggguacugccugacaagauggaugcucaucgaggcugagcugaaauguuuuggaaauacggccguugcuaagugcaacgaaaaacaugacgaggaguucugcgauaugcugcggcucuuugacuucuguaagcaggccaucaaacgccugaagaccccugcgcagaugagcauucagcuuaucaauaaggccgugaacgcucugauuaaugaucaacucaucaugaaaaaccaccugagagacauuaugggcauccccuauugcaauuacucuaaguauuguuaccuuaaccacacagucaccgggaaaacaucccugccucggugcugucucgugagcaauggaucuuaccugaacgaaacccauuucagcgacgauaucgaacagcaggccgacaauaugauuacggagcugcuccaaaaggaguauaucgaucgccagggcaaaacaccgcuggggcuuguggaccuguuugucuucuccaccucuuuuuaccucauuagcaucuuccugcaccugguuaagauucccacccauagacacguggugggaaaaccuugccccaagccucaucggcuuaaccacaugggcaucuguuccugcggccucuauaagcaccccggggucccggugaaauggaagcgcuga

SEQ ID NO: 26486 - RNA, 1473 nt, Artificial Sequence
  derived and/or modified CDS sequence (opt5) from LASV(LASV221-NIG-2010;Clade II)__AIT17624__GPCmut4
augggccagaucauuaccuucuuucaagaggugccccacgucaucgaagagguuaugaacauugugcugaucgcccucagccugcuugcuauucugaaggggaucuacaauguggccacaugcggacucuucggccuggucuccuuucuucugcucugugggagaucuugcagcacgaccuauaaaggaguguacgaacugcagacacuggagcucgacauggcgucccugaacauguguaugccucuuucuugcaccaagaauaacagccaucacuauaucaugguuggcaaugaaacagggcuggagcucacccugacaaacaccuccauuaucaaucauaaauucuguaaccuuucugaugcucacaagaaaaaucuguacgaccaugcccucaugagcauuaucuccacguuucaccugagcauuccgaacuucaaucaguaugaggccaugucuugcgauuuuaacggaggcaagaucuccgugcaguacaaucugagccacaccuaugcuauugacgccgcuaaccauuguggcacaaucgccaaugggguccuccaaaccuucaugcggauggcguggggaggcucuuacaucgcccuggauuccgggaagggaagcugggacugcauuaugacaucuuaccaguaucuuaucauucagaacaccacgugggaagaucacugucaguuuucccgccccagcccuaucggcuaccuggggcuccugucccaaagaacacgggacauuuauaucucucgcagacggcgcggaaccuucacauggacccuuagcgauuccgagggcaacgaaacccccggcggguacugccugacaagauggaugcucaucgaggcugagcugaaauguuuuggaaauacggccguggcuaagugcaacgaaaaacaugacgaggaguucugcgauaugcugcggcucuuugacuucuguaagcaggccauucgcagacugaaaaccccugcgcagaugagcauccagcuuauuaauaaggccguuaacgcucugaucaaugaucaacucauuaugaagaaccaucugcgggacaucaugggcauccccuauugcaauuacucuaaauauuguuaccuuaaccacacagugaccgggaagacaucccugccucgcugcugucucgucagcaauggaucuuaccugaacgaaacccacuucagcgacgauauugaacagcaggccgacaauaugaucacggagaugcugcaaaaagaguauauggauagacagggcaagacaccgcucgggcugguggaccuuuuuguguucuccaccucuuuuuaccugauuagcaucuuccuccaccuggucaaaauucccacccaucggcacguuaucggaaagccuugccccaaaccucaucgccugaaccacaugggcauuuguuccugcggccuuuauaagcaccccggggugccggugaaguggaaaagauga

SEQ ID NO: 26487 - RNA, 1473 nt, Artificial Sequence
  derived and/or modified CDS sequence (opt5) from LASV(LASV237-NIG-2010;Clade II)__AIT17638__GPCmut4
augggccagaucauuaccuucuuucaagaggugccccacgucaucgaagagguuaugaacauugugcugaucgcccucagccugcuugcuauucugaaggggaucuacaauguggccacaugcggacucuucggccuggucuccuuucuucugcucugugggagaucuugcagcacgaccuauaaaggaguguacgaacugcagacacuggagcucgacauggcgucccugaacauguguaugccucuuucuugcaccaagaauaacagccaucacuauaucaugguuggcaaugaaacagggcuggagcucacccugacaaacaccuccauuaucaaucauaaauucuguaaccuuucugaugcucacaagaaagaccuguacgaucaugcccucaugagcauuaucuccacguuucaccugagcauuccgaauuucaaccaguaugaggccaugucuugcgacuuuaauggaggcaagaucuccgugcaguacaaccugagccacaccuaugcugucgaugccgcuaaucauuguggcacaauugccaacggggugcuccaaaccuucaugcggauggcguggggaggcucuuacaucgcccuggacuccgggaagggaagcugggauugcaucaugacaucuuaccaguaucuuauuauccagaauaccacgugggaagaccacugucaguuuucccgccccagcccuauuggcuaccuggggcuccugucccaaagaacacgggauaucuauauuucucgcagacggcgcggaaccuucacauggacccuuagcgacuccgagggcaacgaaacccccggcggguacugccugacaagauggaugcucaucgaggcugagcugaaauguuuuggaaacacggccguugcuaagugcaaugaaaaacaugaugaggaguucugcgacaugcugcggcucuuugauuucuguaagcaggccauccgcagacugaaaaccccugcgcagaugagcauucagcuuaucaacaaggccgugaaugcucugauuaacgaccaacucaucaugaagaaucaucugcgggacauuaugggcauccccuauugcaacuacucuaaauauuguuaccuuaaucacacagucaccgggaagacaucccugccucgcugcugucucgugagcaacggaucuuaccugaaugaaacccacuucagcgaugacaucgaacagcaggccgauaacaugauuacggagcugcuccaaaaagaguauauggacagacagggcaagacaccgcuggggcuuguggaucuguuugucuucuccaccucuuuuuaccucaucagcauuuuccugcaccugaucaaaauucccacccaucggcacaucacaggaaagccuugccccaaaccucaucgccuuaaucacaugggcauuuguuccugcggccucuauaagcaccccgggguuccggugaaguggaaaagauga

SEQ ID NO: 26488 - RNA, 1473 nt, Artificial Sequence
  derived and/or modified CDS sequence (opt5) from LASV(LASV253-NIG-2011;Clade II)__AIT17670__GPCmut4
augggccagaucauuaccuucuuucaagaggugccccacgucaucgaagagguuaugaacauugugcugaucgcccucagccugcuugcuauucugaaggggaucuacaauguggccacaugcggacucuucggccuggucuccuuucuucugcucugugggagaucuugcagcacgaccuauaaaggaguguacgaacugcagacacuggagcucgacauggcgucccugaacauguguaugccucuuucuugcaccaagaauaacagccaucacuauaucaugguuggcaaugaaacagggcuggagcucacccugacaaacaccuccauuaucaaucauaaauucuguaaccuuucugaugcucacaagaaaaaucuguacgaccaugcccucaugagcauuaucuccacguuucaccugagcauuccgaacuucaaucaguaugaggccaugucuugcgauuuuaacggaggcaagaucuccgugcaguacaaucugagccacaccuaugcugucgacgccgcuaaccauuguggcacaauugccaauggggugcuccaaaccuucaugcggauggcguggggaggcucuuacaucgcccuggauuccgggaagggaagcugggacugcaucaugacaucuuaccaguaucuuauuauccagaacaccacgugggaagaucacugucaguuuucccgccccagcccuauuggcuaccuggggcuccugucccaaagaacacgggacaucuauauuucucgcagacggcgcggaaccuucacauggacccuuagcgauuccgagggcaacgaaacccccggcggguacugccugacaagauggaugcucaucgaggcugagcugaaauguuuuggaaauacggccguugcuaagugcaacgaaaaacaugacgaggaguucugcgauaugcugcggcucuuugacuucuguaagcaggccauccgcagacugaaagcgccugcccagaugagcauucagcuuaucaauaaggcugugaacgcccugauuaaugaucaacucaucaugaagaaccaucugcgggacauuaugggcauccccuauugcaauuacucuaaauauuguuaccuuaaccacaccgucacagggcgcaccucccugccuagaugcugucucgugagcaauggaucuuaccugaacgaaacacacuucagcgacgauaucgaacagcaggcugacaauaugauuaccgagcugcuccaaaaggaguauaucgaucggcagggcaaaacgccgcuggggcuuguggaccuguuugucuucuccacaucuuuuuaccucauuagcaucuuccugcaccugguuaagauucccacccaucgccacaucauuggaaaaccuugccccaagccucauagacuuaaccacaugggcaucuguuccugcggccucuauaaacaccccggggugccggugaaguggaagcgguga

SEQ ID NO: 26489 - RNA, 1473 nt, Artificial Sequence
  derived and/or modified CDS sequence (opt5) from LASV(LASV254-NIG-2011;Clade II)__AIT17674__GPCmut4
augggccagaucauuaccuucuuucaagaggugccccacgucaucgaagagguuaugaacauugugcugaucgcccucagccugcuugcuauucugaaggggaucuacaauguggccacaugcggacucuucggccuggucuccuuucuucugcucugugggagaucuugcagcacgaccuauaaaggaguguacgaacugcagacacuggagcucgacaugaccaaccugaauauguguaugccucuuuccugcacaaagaacaauucucaucacuauaucaugguuggcaacgaaaccgggcuggagcucacacugaccaauacgagcauuaucaaccauaaauucuguaaucuuuccgaugcgcacaagaaaaaccuguacaaucaugcucucaugucuauuaucagcaccuuucaccuguccauuccgaacuucaaucaguaugaggccaugagcugcgacuuuaacggaggcaagaucucugugcaguacaaucugucccacagcuaugccgucgaugcugccaaccauuguggcacaauugcuaacggggugcuccaaaccuucaugcggauggccuggggaggcucuuacaucgcgcuggacuccgggaagggaaauugggauugcaucaugacaagcuaccaguaucuuauuauccagaacaccacgugggaagaccacugucaguuuucucgccccuccccuauuggcuaccuggggcuccugagccaaagaacacgggauaucuauauuucccgcagacggcgcggaaccuucacauggacccuuucugacagcgagggcaaugaaacccccggcggguacugccugacaagauggaugcucaucgaggccgagcugaaauguuuuggaaacacggcuguugccaagugcaaugaaaaacaugaugaggaguucugcgacaugcugcggcucuuugauuucuguaagcaggcuauccgcagacugaaaaccccugcccaggcgaacauucagcuuaucaauaaggccgugaacgcucugauuaaugaccaacucaucaugaagaaccaucugcgggauauuaugggcauccccuauugcaauuacuccaaauauuguuaccuuaaccacacagucaccgggaagacaagccugccucgcugcugucucgugucuaauggauccuaccugaacgaaacccacuucagcgacgacaucgaacagcaggccgauaauaugauuacggagcugcuccaaaaagaguauauggacagacagggcaagacaccgcuggggcuuguggaucuguuugucuucucuaccagcuuuuaccucaucuccauuuuccugcaccugguuaaaauccccacccaucggcacgugauuggaaagccuugccccaaaccucaucgccuuaaccacaugggcaucuguucuugcggccucuauaagcaccccggggugccggucaaguggaaaagauga

SEQ ID NO: 26490 - RNA, 1473 nt, Artificial Sequence
  derived and/or modified CDS sequence (opt5) from LASV(Nig08-A19;Clade III)__ADU56618__GPCmut4
augggccagaucgugaccuucuuucaagaggucccccacguuauugaagaggugaugaacaucgugcugauugcccucagcauccuggcuauucuuaaggggcuguacaauaucgccacaugcggacucaucggccuggucacguuccuucugcucuccgggagaucuuguagcaugaccuauaaaggaguguacgaacugcagacacuggagcucaacaugaauacccugaacaugugcaugccucuuuccuguacaaagaauaacucucaucacuauauuaugguuggcaaugaaaccgggcuggagcucacacugaccaacacgagccuucugcaucacaaauuuugcaaucucuccgacgcgcauaagaaaaaccuguacgaucacacccugaugucuaucauuagcacauuccaccucuccaucccgaauuuuaaccaguaugaggcuaugagcugugacuucaauggaggcaagauuaccgugcaguacaaccugucucauuccuaugccaucgaugccgcuaaucacugcggcacagucgccaacggggugcuucaaaccuuuaugcggauggcuuggggaggcagcuacauugcccuggacucugggcgcggaaagugggauuguaucaugacguccuaccaguaucucaucauucagaacacaaccugggaagaccauugccaguucagcagacccucuccuaucggcuaccuggggcuucugucccaacggacacgcgauauuuauaucagcagacggcgcagaggaaccuuuaccuggacacucuccgacucugagggcaaugaaacgcccggcggguacugucugacccgguggaugcugauugaggcggagcucaaaugcuucggaaacacagccguugcuaaguguaaugaaaaacacgaugaggaauuuugcgacaugcugcgccuuuucgauuuuugcaagcaggccaucagacggcugaaagcuccugcccagaugagcauccagcucauuaacaaggcggugaaugcccugaucaacgaccaacuuauuaugaagaaucaucugcgcgauaucaugggcauucccuauuguaacuacuccaaauauugcuaccucaaucacaccagcacagggagaaccucucugccucgguguugccuggucuccaacggaagcuaccucaaugagacgcacuucucugacgacaucgaacagcaggcugauaacaugaucacagagaugcugcaaaaggaguaucuugaccgccagggcaaaaccccgcuggggcucguggaucuguucguguuuagcaccuccuucuaccugauuucuaucuuucuucaucucgucaagauucccacacacagacauaucguuggaaaaccuugucccaagccucaccggcugaaucacaugggcauuugcagcuguggccuguauaaacagcccggggugccggugagauggaagcgcuga

SEQ ID NO: 26491 - RNA, 1476 nt, Artificial Sequence
  derived and/or modified CDS sequence (opt5) from LASV(G1180-SLE-2010;Clade IV)__AIT17168__GPCmut4
augggccagaucgugaccuucuuucaagaggucccccacguuauugaagaggugaugaacaucgugcugauugcccucagcauccuggcuguccuuaaggggcuguacaauuucgccacaugcggacucgugggccugcuuacguuucugcuccugugugggagauccugcaccgcgucucgguauaaaggaguuuacgaacugcagacacucgagcugaacauggaaacccuuaauauguguaugccucugagcugcacaaagaacaauucccaucacuauauuauggugggcaacgagaccgggcucgagcugacacuuaccaauacgucuaucaucaaccauaaauucuguaaucugagcgacgcucacaagaaaaaccucuacgaucaugcccugauguccauuaucucuaccuuucaccugagcauuccgaauuucaaccaguaugaagccauguccugcgacuuuaauggaggcaagaucagcguccaguacaaccucucucacuccuaugcuggcgaugccgcuaaucauugugggacaguggccaacggaguucugcaaaccuucaugcgcauggcguggggcgggagcuacauugcccuugacucuggacacggcuccugggauugcaucaugacaagcuaccaguaucugauuauccagaacaccacgugggaggaccauugucaguuuucuagacccuccccuaucggguaccucggacugcuuagccaacggacacgcgauauuuauaucuccagacggcgcagaggcaccuucacauggacccugucugacagcgaaggcaaggauacccccgggggauacugccucacacgguggaugcugauugaggcugagcugaaauguuuuggcaauacggccguggcuaagugcaacgaaaaacacgacgaggaguucugcgauaugcuccgccuguuugacuucuguaagcaggccauccagagacuuaaagcgccugcccagauguccauucaacugaucaauaaggcugucaacgcccucaucaaugaucagcugauuaugaagaaccaccuucgggacaucauggggauucccuauugcaauuacagcaaauauuguuaccugaaccauaccacaaccggaaagacaucucucccuaaaugcugucugguguccaauggcagcuaccugaacgaaacccacuucucugacgauaucgaacagcaagcugacaauaugauuacggagaugcuccagaaggaguauauggaacgccaggggaaaacaccgcugggacuuguggaucuguuugucuucagcaccuccuuuuaccucaucucuaucuuccugcaucugguuaagauucccacccacagacauaucgugggcaaaagcugcccuaagccccaccggcuuaaccacaugggcauuuguuccugcgggcucuauaagcagccuggagugcccgucaaauggaagcgcuga

SEQ ID NO: 26492 - RNA, 1476 nt, Artificial Sequence
  derived and/or modified CDS sequence (opt5) from LASV(G1442-SLE-2011;Clade IV)__AIT17180__GPCmut4
augggccagaucgugaccuucuuucaagaggucccccacguuauugaagaggugaugaacaucgugcugauugcccucagcauccuggcuguccuuaaggggcuguacaauguggccacaugcggacucauuggccugguuacguuccuucugcucugugggagauccugcaccacaacccuguauaaaggaguguacgaacugcagacacucgagcugaacauggaaacccuuaauauguguaugccucugucuugcacaaagaacaauagccaucacuauauccgggucggcaacgagaccgggcucgagcugacgcuuaccaauacauccaucauuaaccauaaauuuuguaaucugucugacgcgcacaagaaaaaccucuacgaucaugcucugaugagcaucauuuccaccuuccaccugucuaucccgaauuuuaaccaguaugaagccaugagcugcgacuucaauggaggcaagauuuccgugcaguacaaccucagccacucuuaugccggcgaugcugccaaucauugugggacaguugcuaacggagugcugcaaaccuuuaugcgcauggccuggggcggguccuacaucgcgcuugacagcggaagaggcaacugggauugcauuaugacgucuuaccaguaucugaucauccagaauacaaccugggacgaucacugucaguucucccggcccagcccuauuggguaccucggacugcuuucucaacgcacaagagacgucuauaucucccggcgcagacggggcaccuuuaccuggacacugagcgauuccgagggcaaggacacgcccgggggauacugccucacccgcuggaugcugauugaagccgagcugaaauguuucggcaacacagcuguggccaagugcaaugagaaacaugaugaagaguuuugcgacaugcucagacuguucgauuuuuguaagcaggcuauccagcggcuuaaagccccugcgcagaugucuauucaacugaucaacaaggccgugaaugcucucaucaacgaccagcugauuaugaagaaucaccuucgcgacaucauggggauucccuauugcaacuacagcaaauauuguuaccugaauaacaccgccacaggaaagaccucccucccuaaaugcugucugaucagcaauggcucuuaccugaacgaaacgcacuucuccgaugacauugagcaggaagcugauaauaugaucacagagaugcuccaaaaggaguauauggaaagacaggggaaaaccccgcugggacuugucgaccuguucguuuuuagcaccucuuucuaccucaucagcauuuuucugcaucuggugaagauccccacacaccggcauauugugggcaaauccugcccuaagccccaccgccuuaaccauaugggcaucuguucuugcgggcucuauaagcagccuggaguccccgugagauggaaacgguga

SEQ ID NO: 26493 - RNA, 1476 nt, Artificial Sequence
  derived and/or modified CDS sequence (opt5) from LASV(G3010-SLE-2013;Clade IV)__AIT17344__GPCmut4
augggccagaucgugaccuucuuucaagaggucccccacguuauugaagaggugaugaacaucgugcugauugcccucagcauccuggcuguccuuaaggggcuguacaauuucgccacaugcggacucgugggccugguuacguuucuucugcucugugggagauccugcaccacaucucuguauaaaggaguguacgaacugcagacccucgagcugaacauggaaacacuuaauauguguaugccucugagcugcaccaagaacaauucccaucacuauauuauggucggcaacgagacagggcucgagcugacccuuacgaauaccucuaucaucaaccauaaauucuguaaucugagcgacgcgcacaagaaaaaccucuacaaucaugcucugauguccauuaucucuacauuucaccugagcauuccgaacuucaaucaguaugaagccauguccugcgauuuuaacggaggcaagaucagcgugcaguacaaucucucucacuccuaugccggcgacgcugccagccauugugggaccguugcuaacggagugcugcaaacauucaugcggauggccuggggcgggucuuacauugcgcuugauuccggauacggcaagugggacugcaucaugaccagcuaucaguaccugauuauccagaacacgacaugggaggaucacugucaguuuucucgccccuccccuaucggguaucucggacugcuuagccaaagaacccgggacauuuacaucucccgcagacggcgcggcacauucaccuggacccugucugauagcgaaggcaaagacacacccgggggauauugccucacgagauggaugcugauugaggccgagcugaaguguuuuggcaauaccgcugucgccaaaugcaacgaaaagcaugaugaggaguucugcgacaugcuccggcuguuugauuucuguaaacaggcuauccagcgccuuaagaccccugcccagauguccauucaacugaucaauaaggcggugaacgcccucaucaaugaccagcugauuaugaaaaaccaccuuagagauaucauggggauucccuacugcaauuauagcaaguacuguuaccugaaccacacaacaaccggaaaaacgucucucccuaagugcugucugguguccaauggcagcuaucugaacgaaacacauuucucugacgacaucgaacagcaagcugauaauaugauuaccgagaugcuccagaaagaguacauggaacggcaggggaagaccccgcugggacuugucgaccuguuuguuuucagcacauccuuuuaucucaucucuaucuuccugcaccuggugaaaauucccacccaucgccacaucgugggcaagagcugcccuaagccccauagacuuaaccacaugggcauuuguuccugcgggcucuacaaacagccuggaguccccgugcgguggaagcgcuga

SEQ ID NO: 26494 - RNA, 1476 nt, Artificial Sequence
  derived and/or modified CDS sequence (opt5) from LASV(G502-SLE-2009;Clade IV)__AIT17126__GPCmut4
augggccagaucgugaccuucuuucaagaggucccccacguuauugaagaggugaugaacaucgugcugauugcccucagcauccuggcuguccuuaaggggcuguacaauuucgccacaugcggacucgugggccugcuuacguuucugcuccugugugggagauccugcaccacaggacuguauaaaggcguuuacgaacuccagacccuggagcuuaacauggaaacacugaauauguguaugccucucucuugcaccaagaacaauagccaucacuauauuaugguggggaacgagacaggacuggagcuuacccugacgaauaccuccaucaucaaccauaaauucuguaaucucucugacgcgcacaagaaaaaccuguacgaucaugcucugaugagcauuaucuccacauuucaccucucuauuccgaauuucaaccaguaugaagccaugagcugcgacuuuaauggcggcaagaucuccguccaguacaaccugagccacucuuaugccggggaugcugccgaccauuguggaaccguggcuaauggcguucuucaaacauucaugcggauggccuggggaggguccuacauugcgcuggauagcggccgcgggagaugggacugcaucaugaccucuuaccaguaucucauuauccagaacacgacaugggaggaucacugucaguuuucccggcccagcccuaucggauaccugggccuucugucucaacgcaccagagacauuuauaucucccggcgcagacggggcacauucaccuggacccucagcgauuccgaagggaaggacacacccggaggcuacugccugacgcgcuggaugcugauugaggccgagcucaaauguuuugggaacaccgcuguggccaagugcaaugaaaaacaugaugaggaguucugcgacaugcugagacuuuuugauuucuguaagcaggcuauccagcggcugaaagccccugcgcagaugucuauucaacucaucaacaaggccgucaaugcucugaucaacgaccagcuugugaugaagaaucaucugcgcgacauuaugggaauccccuauugcaacuacagcagauauuguuaccucaaucacacaaccacaggccggaccucccugccuaaaugcugucuggugagcaacgggucuuaccucaaugaaacgcacuucuccgaugacauugaacagcaagccgauaacaugaucacagagaugcugcagaaggaguauauggaacgccagggaaaaaccccgcuuggccuggucgaccucuuuguuuucagcaccucuuuuuaccugauuagcaucuuccugcaccuugugaagauccccacacauagacacauugugggcaaauccugcccuaagccccaucggcucaaucacauggggaucuguucuugcggacuguauaaacagccuggcguccccgugaaguggaagagauga

SEQ ID NO: 26495 - RNA, 1476 nt, Artificial Sequence
  derived and/or modified CDS sequence (opt5) from LASV(G733-SLE-2010;Clade IV)__AIT17154__GPCmut4
augggccagaucgugaccuucuuucaagaggucccccacguuauugaagaggugaugaacaucgugcugauugcccucagcauccuggcuguccuuaaggggcuguacaauuucgccacaugcggaauugugggccucguuuccuuucugcuucugugugggagaucuugcacgaccagccucuauaaaggaguguacgaacugcagacacuggagcucaacauggaaacccugaauauguguaugccucuuuccugcacaaagaacaauucucaucacuauaucauggucggcaacgagaccgggcuggagcucacacugaccaauacgagcaucauuaaccauaaauucuguaaucuuuccgacgcgcacaagaaaaaccuguacgaucaugcucucaugucuaucauuagcaccuuucaccuguccaucccgaauuucaaccaguaugaagccaugagcugcgacuuuaauggaggcaagauuucugugcaguacaaccugucccacagcuaugccggcgaugcugccaaucauugugggacaaucgcuaacggaguucuccaaaccuucaugcggauggccuggggcgggucuuacauugcgcuggacuccggacgcgauagaugggacugcaucaugacaagcuaccaguaucuuaucauucagaacaccacgugggaggaucacugucaguuuucucggcccuccccuaucggcuaccuggggcuccugagccaacgcacaagagacauuuauaucucccggcgcagacggggaaccuucacauggacccuuucugauagcgaaggcaaggacacccccggcggguacugccugacacgcuggaugcucauugaggccgagcugaaauguuuuggaaauacggcuguggccaagugcaacgaaaaacaugaugaggaguucugcgacaugcugagacucuuugauuucuguaagcaggcuauccagcggcugaaagccccugcgcagauguccauccaacuuauuaauaaggccgucaacgcucugaucaaugaccagcucauuaugaagaaccaucugcgcgacaucaugggcauucccuauugcaauuacagcaaauauuguuaccuuaaccacaccacaaccgggaagacaucucugccuaaaugcugucucguguccaauggaagcuaccugaacgaaacccacuucucugaugacaucgaacagcaagccgauaauaugaucacggagaugcugcagaaggaguauauggaaagacagggcaaaacaccgcucgggcugguggaccuuuuugucuucagcaccuccuuuuaccugauuucuaucuuccuccaccugguuaagauucccacccaucggcacguggugggaaaaagcugcccuaagccccaucgccugaaccacaugggcaucuguuccugcggccuuuaugggcagccuggaguccccgugaaguggaaaagauga

SEQ ID NO: 26496 - RNA, 1476 nt, Artificial Sequence
  derived and/or modified CDS sequence (opt5) from MOPV/LASV reassortant(IGS-1;Clade IV)__AFY05576__GPCmut4
augggccagaucgugaccuucuuucaagaggucccccacguuauugaagaggugaugaacaucgugcugauugcccucagcguccuggcugugcuuaaggggcuguacaauuucgccacaugcggacucguuggccuggugacguuucuucugcucugugggagauccugcaccacaucucuguauaaaggagucuacgaacugcagacccucgagcugaacauggaaacacuuaauauguguaugccucugagcugcaccaagaacaauucccaucacuauaucauggugggcaacgagacagggcucgagcugacccuuacgaauaccucuauuaucaaccauaaauucuguaaucugagcgacgcgcacaagaaaaaccucuacgaucaugcucugauguccaucauuucuacauuucaccugagcaucccgaauuucaaccaguaugaagccauguccugcgacuuuaauggaggcaagauuagcguucaguacaaccucucucacuccuaugccggcgaugcugccaaucauugugggaccguggcuaacggaguccugcaaacauucaugcggauggccuggggcgggagcuacaucgcgcuugacucuggacgcggcaacugggauugcauuaugaccuccuaccaguaucugaucauucagaauacgacaugggaggaccacugucaguuuagcagacccucuccuaucggguaccucggacugcuuucccaacggacccgcgauaucuauauuagcagacggcgcagaggcacauucaccuggacccuguccgacucugaaggcgaggauacacccgggggauacugccucacgcgguggaugcugaucgaggccgaacugaaguguuuuggcaacaccgcuguggccaaaugcaaugagaagcaugacgaagaguucugcgauaugcuccgccuguuugacuucuguaaacaggcuauucagagacuuaaggccccugcgcagaugagcauccaacugauuaacaaagccgugaaugcucucaucaacgaucagcugaucaugaagaaucaccuucgggacauuauggggauccccuauugcaacuacuccaaguauuguuaccugaaucacacaaccacaggacgcaccagccucccuaaaugcugucuggucucuaacggcuccuaccugaaugaaacgcauuucagcgacgauauugagcagcaagccgacaacaugaucacagagaugcuccagaaggaauauauggagagacaggggaaaaccccgcugggacuuguugaucuguuuguguucucuaccagcuuuuaccucauuuccaucuuccugcaccuggugaagauccccacacaucggcacauugucggcaaaucuugcccuaagccccaucgccuuaaucacaugggcaucuguagcugcgggcucuauaaacagccuggagugcccguuaaguggaagagauga

SEQ ID NO: 26497 - RNA, 1476 nt, Artificial Sequence
  derived and/or modified CDS sequence (opt5) from LASV(LM765-SLE-2012;Clade IV)__AIT17814__GPCmut4
augggccagaucgugaccuucuuucaagaggucccccacguuauugaagaggugaugaacaucgugcugauugcccucagcauccuggcuguccuuaaggggcuguacaauuucgccacaugcggacucgugggccugguuacguuucuucugcucugugggagauccugcaccacaucucuguauaaaggaguguacgaacugcagacccucgagcugaacauggaaacacuuaauauguguaugccucugagcugcaccaagaacaauucccaucacuauauuauggucggcaacgagacagggcucgagcugacccuuacgaauaccucuaucaucgaccauaaauucuguaaccugagcgaugcgcaccggaagaaucucuacgaccaugcucugauguccauuaucucuacauuucaccugagcauuccgaacuucaaucaguaugaagccauguccugcgauuuuaacggaggcaaaaucagcgugcaguacaaucucucucacuccuaugccaaggacgcugccgaucauuguggcaccguugcuaacggggugcugcaaacauucaugcgcauggccuggggaggcagcuacauugcgcuugacucugggagaggacggugggauugcaucaugaccuccuaccaguaucugauuauccagaauacgacaugggaggaccacugucaguuuagccgccccucuccuaucggcuaccucgggcugcuuucccaaagaacccgggauauuuauaucagccgcagacggcgcggaacauucaccuggacccuguccgacucugaaggcaaggauacacccggcggguacugccucacgagauggaugcugauugaggccgagcugaaauguuuuggaaacaccgcugucgccaagugcaacgaaaaacaugacgaggaguucugcgauaugcuccggcuguuugacuucuguaagcaggcuauccagcgccuuaaagccccugcgcagaugagcauucaacugaucaauaaggccgugaacgcucucaucaaugaccagcugauuaugaagaaccaccuuagagauaucaugggcauucccuauugcaauuacuccaaauauuguuaccugaaccacacaaccacagggaagaccagccucccuaaaugcugucuggugucuaauggauccuaccugaacgaaacgcauuucagcgacgauaucgaacagcaagccgacaauaugauuacagagaugcuccagaaggaguauauggaacggcagggcaaaaccccgcuggggcuugucgaucuguuuguuuucucuaccagcuuuuaccucaucuccaucuuccugcaccuggugaagauucccacacaucgccacaucgugggaaaaccuugccccaagccucauagacuuaaccacaugggcauuuguucuugcggccucuauaagcagcccggggucccggugaaauggaagcgguga

SEQ ID NO: 26498 - RNA, 1476 nt, Artificial Sequence
  derived and/or modified CDS sequence (opt5) from LASV(LM776-SLE-2012;Clade IV)__AIT17824__GPCmut4
augggccagaucgugaccuucuuucaagaggucccccacguuauugaagaggugaugaacaucgugcugauugcccucagcauccuggcuguccuuaaggggcuguacaauuucgccacaugcggacucgugggccugguuacguuucuucugcucugugggagauccugcaccacaucuguguauaaaggagucuacgaacugcagacccuggagcucaacauggaaacacugaauauguguaugccucuuagcugcaccaagaacaauucccaucacuauauuauggugggcaacgagacagggcuggagcucacccugacgaauaccucuaucaucaaccauaaauucuguaaucuuagcgacgcgcacaagaaaaaccuguacgaucaugcucucauguccauuaucucuacauuucaccugagcauuccgaauuucaaccaguaugaagccauguccugcgacuuuaauggaggcaagaucagcguucaguacaaccugucucacuccuaugccggcgaugcugccaaucauugugggaccguggcuaacggaguccuccaaacauucaugcggauggccuggggcgggagcuacauugcgcuggacucuggacacggcaagugggauugcaucaugaccuccuaccaguaucuuauuauccagaacacgacaugggaggaccauugucaguuuagccgccccucuccuaucggguaccugggacuccugucccaaagaacccgggauauuuauaucagccgcagacggcgcggcacauucaccuggacccuuuccgacucugaaggcaaagauacacccgggggauacugccugacgagauggaugcucauugaggccgagcugaaguguuuuggcaauaccgcuguggccaaaugcaacgaaaagcacgacgaggaguucugcgauaugcugcggcucuuugacuucuguaaacaggcuauccagcgccugaaggccccugcgcagaugagcauucaacuuaucaauaaggccgugaacgcucugaucaaugaucagcucauuaugaaaaaccaccugagagacaucauggggauucccuauugcaauuacuccaaguauuguuaccuuaaccauacaaccacaggaaaaaccagccugccuaagugcugucucgucucuaauggcuccuaccugaacgaaacgcacuucagcgacgauaucgaacagcaagccgacaauaugauuacagagaugcugcagaaagaguauauggaacggcaggggaagaccccgcucggacugguugaucuuuuuguguucucuaccagcuuuuaccugaucuccaucuuccuccaucuggugaaaauucccacacaccgccauaucgucggcaagucuugcccuaagccccacagacugaaccacaugggcauuuguagcugcgggcuuuauaaacagccuggagugcccguucgguggaagcgcuga

SEQ ID NO: 26499 - RNA, 1476 nt, Artificial Sequence
  derived and/or modified CDS sequence (opt5) from LASV(Mad39;Clade IV)__ANH09722__GPCmut4
augggccagaucgugaccuucuuucaagaggucccccacguuauugaagaggugaugaacaucgugcugauugcccucagcauccuggcuguccuuaaggggcuguacaauguggccacaugcggacucauuggccugguuacguuccuucugcucugugggagauccugcaccacaacccuguauaaaggaguguacgaacugcaggcgcucgagcugaacauggaaacacuuaauauguguaugccucugucuugcaccaagaacaauagccaucacuauauccgggucggcaacgagacagggcucgagcugacccuuacgaauaccucccugaucaaccauaaauuuuguaaucucucugacgcucacaagaaaaaccuguacgaucaugcccugaugagcauuaucuccacauuccaccucucuauuccgaauuuuaaccaguaugaagccaugagcugcgacuucaaugauggaaagaucuccgugcaguacaaccugagccacaccuaugcuggcgacacagccaaucauuguggcaccguugcuaacggggugcuucaaacguuuaugcgcauggccuggggaggcucuuacauugcgcuggauuccgggagaggaggcugggacugcaucaugacaagcuaccaguaucucauuauccagaacaccacaugggaggaucacugucaguucucucggcccuccccuaucggguaccugggacuucugagccaacgcaccagagacauuuauaucucucggcgcagacggggcaccuuuacauggacgcucuccgauagcgaaggcaaggacacccccgggggauacugccugacacgcuggaugcugauugaggccgagcucaaauguuucggcaauaccgcugucgccaagugcaacgaaaaacaugaugaggaauuuugcgacaugcugagacuuuucgauuuuuguaagcaggcuauccagcggcugaaagccccugcgcagauguccauucaacucaucaauaaggccgugaacgcucugaucaaugaccagcuuauuaugaagaaccaucugcgcgacaucauggggauucccuauugcaauuacucuaaauauuguuaccucaaccacacagugaccggaaagacgagccugccuaaaugcugucuggucuccaauggcagcuaccucaacgagacacacuucucugaugacaucgaacagcaagccgauaauaugauuaccgagaugcugcagaaggaguauauggaaagacaggggaaaaccccgcuuggacugguugaccucuucguguuuuccaccagcuucuaccugaucucuaucuuucugcaccuugugaagauucccacacaucggcacgucgugggcaaaccuugccccaagccucaucgccucaaccacaugggcaucuguagcugcggguucuauaagcagcccggaguuccggugagauggaaacgguga

SEQ ID NO: 26500 - RNA, 1476 nt, Artificial Sequence
  derived and/or modified CDS sequence (opt5) from LASV(Z0947-SLE-2011;Clade IV)__AIT17840__GPCmut4
augggccagaucgugaccuucuuucaagaggucccccacguuauugaagaggugaugaacaucgugcugauugcccucagcauccuggcuguccuuaaggggcuguacaauuucgccacaugcggacucgugggccugguuacguuucuucugcucugugggagauccugcaccauuucucuguauaaaggaguguacgaacugcagacacucgagcugaacauggaaacccuuaauauguguaugccucugagcugcacaaagaacaauucccaucacuauaucauggucggcaacgagaccgggcucgagcugacacuuaccaauacgucuaucauuaaccauaaauucuguaaucugagcgacgcgcacaagaaaaaccucuacgaucaugcucugauguccaucauuucuaccuuucaccugagcaucccgaauuucaaccaguaugaagccauguccugcgacuuuaauggaggcaagauuagcgugcaguacaaccucucucacuccuaugccggcgaugcugccaaucauugugggacaguugcuaacggagugcugcaaaccuucaugcggauggccuggggcgggagcuacaucgcgcuugacucuggacgcgauagaugggacugcauuaugacauccuaccaguaucugaucauccagaacaccacgugggaggaucacugucaguuuagccggcccucuccuauuggcuaccucgggcugcuuucccaacgcacaagagacaucuauauuagccggcgcagacggggaaccuucacauggacccuguccgauucugaaggcaaggacacccccggcggguacugccucacacgcuggaugcugaucgaggccgagcugaaauguuuuggaaauacggcugucgccaagugcaacgaaaaacaugaugaggaguucugcgacaugcucagacuguuugauuucuguaagcaggcuauucagcggcuuaaagccccugcgcagaugagcauccaacugaucaauaaggccgugaacgcucucauuaaugaccagcugaucaugaagaaccaccuucgcgacauuaugggcauccccuauugcaauuacuccaaauauuguuaccugaaccacaccacaaccgggaagacaagccucccuaaaugcugucuggugucuaauggauccuaccugaacgaaacccauuucagcgaugacauugaacagcaagccgauaauaugaucacggagaugcuccagaaggaguauauggaaagacagggcaaaacaccgcuggggcuugucgaccuguuuguuuucucuaccagcuuuuaccucaucuccauuuuccugcaccuggugaagauccccacccaucggcacauugugggaaaaccuugccccaagccucaucgccuuaaccacaugggcaucuguucuugcggccucuauaagcagcccggggucccggugaaauggaagagauga

SEQ ID NO: 26501 - RNA, 1717 nt, Artificial Sequence
  mRNA product Design a-1 (hSL-A64-N5) comprising derived and/or modified sequence from LASV(Josiah;Clade IV)__NP_694870__GPCmut4 (opt1)
aggagagucccgcagucggcguccagcggcucugcuuguucgugugugugucguugcaggccuuauucaagcuuaccaugggccagaucgugaccuucuuccaggaggucccccacgugaucgaggaggugaugaacaucguccugaucgcccucagcgugcuggccgugcugaaggggcucuacaacuucgcgaccugcggccuggucgggcuggugacguuccuccugcugugcggccgcuccugcaccaccagccucuacaaggggguguacgagcugcagacccuggagcucaacauggagacgcugaacaugugcaugccgcuguccugcaccaagaacaacagccaccacuacaucauggucggcaacgagaccggccucgagcugacgcugaccaacaccuccaucaucaaccacaaguucugcaaccucagcgacgcccacaagaagaaccuguacgaccacgcccugauguccaucaucagcaccuuccaccucuccauccccaacuucaaccaguacgaggccaugagcugcgacuucaacgggggcaagaucuccgugcaguacaaccugagccacuccuacgccggggacgcggccaaccacugcggcacgguggccaacgggguccugcagaccuucaugcggauggccuggggcggcagcuacaucgcgcucgacuccgggcgcggcaacugggacugcaucaugaccagcuaccaguaccugaucauccagaacaccacgugggaggaccacugccaguucucccggcccagccccaucggguaccugggccuccugucccagcgcacccgggacaucuacaucagccgccggcgccggggcaccuucaccuggacgcugagcgacuccgaggggaaggacaccccgggcggguacugccugacccgcuggaugcucaucgaggccgagcugaagugcuucggcaacaccgccguggccaagugcaacgagaagcacgacgaggaguucugcgacaugcugcggcuguucgacuucugcaagcaggccauccagcgccugaaggcgcccgcccagaugagcauccagcugaucaacaaggccgugaacgcccucaucaacgaccagcugaucaugaagaaccaccuccgggacaucauggggauccccuacugcaacuacuccaaguacugcuaccucaaccacacgaccaccggccgcaccagccugcccaagugcugccuggucuccaacggcagcuaccucaacgagacgcacuucuccgacgacaucgagcagcaggccgacaacaugaucaccgagaugcugcagaaggaguacauggagcggcaggggaagacgccccugggccucguggaccuguucguguucagcaccuccuucuaccugaucagcaucuuccugcaccucgucaagaucccgacccaccgccacaucguggggaaguccugccccaagccccaccggcugaaccacaugggcaucugcagcugcgggcuguacaagcagcccggcgugccggucaaguggaagcgcugaggacuagucccuguucccagagcccacuuuuuuuucuuuuuuugaaauaaaauagccugucuuucagaucucaaaggcucuuuucagagccaccaaaaaaaaaaaaaaaaaaaaaaaaaaaaaaaaaaaaaaaaaaaaaaaaaaaaaaaaaaaaaaaaagaauu

SEQ ID NO: 26502 - RNA, 1714 nt, Artificial Sequence
  mRNA product Design a-1 (hSL-A64-N5) comprising derived and/or modified sequence from LASV(LP;Clade I)__AAF86701__GPCmut4 (opt1)
aggagagucccgcagucggcguccagcggcucugcuuguucgugugugugucguugcaggccuuauucaagcuuaccaugggccagaucaucaccuucuuccaggaggugccccacgucaucgaggaggugaugaacaucgugcugaucgcccucagccugcuggccauccucaaggggcuguacaacaucgcgaccugcggcaucaucgggcuggucgccuuccucuuccugugcggcaaguccugcagccugacgcucaagggcggguacgagcugcagacccuggagcucaacauggagacccugaacaugugcaugccgcuguccugcacgaagaacagcucccaccacuacauccgcgugggcaacgagaccgggcucgagcugacccugaccaacacgagcaucaucaaccacaaguucugcaaccucuccgacgcccacaagaagaaccuguacgaccacgcccugaugagcaucaucuccaccuuccaccucagcauccccaacuucaaccaguacgaggccauguccugcgacuucaacggcgggaagaucagcgugcaguacaaccugucccacagcuacgcgggcgacgccgccgagcacugcgggaccgucgccaacggcgugcugcagaccuucaugcggauggcguggggcgggcgcuacaucgcccucgacuccggcaaggggaacugggacugcaucaugacgagcuaccaguaccugaucauccagaacaccaccugggaggaccacugccaguucucccggcccagccccaucggcuaccugggccuccugucccagcgcacccgggacaucuacaucagccgccggcgccgggggacguucaccuggacccugagcgacuccgagggcaacgagacccccgggggcuacugccugacgcgcuggaugcucaucgaggccgagcugaagugcuucgggaacaccgccguggccaagugcaacgagaagcacgacgaggaguucugcgacaugcugcggcuguucgacuucugcaagcaggcgauccgccggcugaaggcccccgcccagaugagcauccagcugaucaacaaggccgucaacgcccucaucaacgaccagcugaucaugaagaaccaccuccgcgacaucaugggcauccccuacugcaacuacuccaaguacugcuaccucaaccacaccagcuccggccggaccagccugcccaagugcugccugaucuccaacgggagcuaccucaacgagacgcaguucuccgacgacaucgagcagcaggcggacaacaugaucaccgagaugcugcagaaggaguacaucgagcgccagggcaagaccccgcuggggcucguggacaucuucaucuucagcaccuccuucuaccugaucagcaucuuccugcaccugaucaagaucccgacgcaccggcacaucgugggcaagcccugccccaagccccaccgccucaaccacaugggggucugcuccugcggccuguacaagcacccgggcgugcccaccaaguggaagcggugaggacuagucccuguucccagagcccacuuuuuuuucuuuuuuugaaauaaaauagccugucuuucagaucucaaaggcucuuuucagagccaccaaaaaaaaaaaaaaaaaaaaaaaaaaaaaaaaaaaaaaaaaaaaaaaaaaaaaaaaaaaaaaaaagaauu

SEQ ID NO: 26503 - RNA, 1714 nt, Artificial Sequence
  mRNA product Design a-1 (hSL-A64-N5) comprising derived and/or modified sequence from LASV(803213;Clade II)__AAF86703__GPCmut4 (opt1)
aggagagucccgcagucggcguccagcggcucugcuuguucgugugugugucguugcaggccuuauucaagcuuaccaugggccagaucaucaccuucuuccaggaggugccccacgucaucgaggaggugaugaacaucgugcugaucgcccucagccugcuggccauccucaaggggaucuacaacgucgcgaccugcggccuguucgggcugaucuccuuccuccugcugugcggccgcagcugcuccgugacguacaaggggguguacgagcuccagacccuggagcugaacauggccaaccucaacaugugcaugccgcugagcugcaccaagaacaacucccaccacuacaucauggucggcaacgagacgggccuggagcucacccugaccaacaccagcaucaucaaccacaaguucugcaaccuguccgacgcccacaagaagaaccucuacgaccacgcccugaugagcaucaucuccacguuccaccugagcauccccaacuucaaccaguacgaggccauguccugcgacuucaacgggggcaagaucagcgugcaguacaaccucucccacagcuucgcgguggacgccgccaaccacugcgggaccaucgccaacggcguccugcagaccuucaugcggauggcguggggcggguccuacaucgcccuggacagcggcaaggggaacugggacugcaucaugaccuccuaccaguaccucaucauccagaacacgaccugggaggaccacugccaguucagccgccccucccccaucggcuaccuggggcugcucagccagcggacccgcgacaucuacaucagccggcgccgccggggcaccuucacguggacccucuccgacagcgagggcaacgaggcccccgggggcuacugccugacccgguggaugcugaucgaggccgagcucaagugcuucgggaacaccgccguggcgaagugcaacgagaagcacgacgaggaguucugcgacaugcugcgccuguucgacuucugcaagcaggccaucaagcggcucaagacgcccgcccagauguccauccagcugaucaacaaggccgugaacgcccugaucaacgaccagcucaucaugaagaaccaccuccgcgacaucaugggcauccccuacugcaacuacagccgguacugcuaccugaaccacaccgucaccgggaagaccucccugccccgcugcugccuggugagcaacggcuccuaccugaacgagacgcacuucagcgacgacaucgagcagcaggcggacaacaugaucaccgagaugcuccagaaggaguacauggaccggcagggcaagaccccgcuggggcugguggaccucuucgucuucuccaccagcuucuaccugaucuccaucuuccugcaccuggugaagaucccgacgcaccgccacaucgugggcaagcccugccccaagccccaccggcucaaccacauggggaucugcagcugcggccuguacaagcacccggggguccccgugaaguggaagcgcugaggacuagucccuguucccagagcccacuuuuuuuucuuuuuuugaaauaaaauagccugucuuucagaucucaaaggcucuuuucagagccaccaaaaaaaaaaaaaaaaaaaaaaaaaaaaaaaaaaaaaaaaaaaaaaaaaaaaaaaaaaaaaaaaagaauu

SEQ ID NO: 26504 - RNA, 1714 nt, Artificial Sequence
  mRNA product Design a-1 (hSL-A64-N5) comprising derived and/or modified sequence from LASV(GA391;Clade III)__CAA36645__GPCmut4 (opt1)
aggagagucccgcagucggcguccagcggcucugcuuguucgugugugugucguugcaggccuuauucaagcuuaccaugggccagaucgugaccuucuuccaggaggucccccacgugaucgaggaggugaugaacaucguccugaucgcccucagcauccuggccauccugaaggggcucuacaacguggcgaccugcggccugaucgggcuggugacguuccuccugcuguccggccgcagcugcucccucaucuacaaggggaccuacgagcugcagacccuggagcucaacauggagacccugaacaugugcaugccgcugagcugcaccaagaacaacucccaccacuacauccgggucggcaacgagaccggccucgagcugacccugacgaacaccagcauccucaaccacaaguucugcaaccuguccgacgcccacaagcgcaaccuguacgaccacagccucauguccaucaucagcaccuuccaccuguccauccccaacuucaaccaguacgaggccaugagcugcgacuucaacgggggcaagaucaccgugcaguacaaccugucccacagcuucgccguggacgccgcggggcacugcggcacgcucgccaacgggguccugcagaccuucaugcggauggccuggggcggcuccuacaucgcccuggacagcgggcgcggcaacugggacugcaucaugaccuccuaccaguaccucaucauccagaacaccacgugggacgaccacugccaguucagccggcccucccccaucggguaccugggccugcucagccagcgcacccgggacaucuacaucagccgccggcgccggggcaccuucaccuggacgcucuccgacagcgaggggaacgagaccccgggcggguacugccugacccgcuggaugcugaucgaggcggagcucaagugcuucggcaacaccgccguggccaagugcaacgagaagcacgacgaggaguucugcgacaugcugcggcuguucgacuucugcaagcaggccauccgccggcucaagacgcccgcccagauguccauccagcugaucaacaaggcggugaacgcccugaucaacgaccagcucaucaugaagaaccaccuccgcgacaucauggggauccccuacugcaacuacagccgguacugcuaccugaaccacaccuccaccggcaagaccagccugccccgcugcugccugaucuccaacggcagcuaccugaacgagacgaaguucuccgacgacaucgagcagcaggccgacaacaugaucaccgagaugcuccagaaggaguacaucgaccggcaggggaagacgccccugggccuggucgaccuguucguguucagcaccuccuucuaccucaucagcaucuuccugcaccuggugaagaucccgacccaccgccacaucgucgggaagcccugccccaagccccaccggcucaaccacaugggcaucugcuccugcgggcuguacaagcagccgggcgugcccgugcgcuggaagcggugaggacuagucccuguucccagagcccacuuuuuuuucuuuuuuugaaauaaaauagccugucuuucagaucucaaaggcucuuuucagagccaccaaaaaaaaaaaaaaaaaaaaaaaaaaaaaaaaaaaaaaaaaaaaaaaaaaaaaaaaaaaaaaaaagaauu

SEQ ID NO: 26505 - RNA, 1717 nt, Artificial Sequence
  mRNA product Design a-1 (hSL-A64-N5) comprising derived and/or modified sequence from LASV(AV;Clade V)__CCA30314__GPCmut4 (opt1)
aggagagucccgcagucggcguccagcggcucugcuuguucgugugugugucguugcaggccuuauucaagcuuaccaugggccagaucgugaccuucuuccaggaggucccccacgugaucgaggaggugaugaacaucguccugaucgcccucagcauccuggccgugcugaaggggcucuacaacaucgcgaccugcggccugaucgggcugaucacguuccuccugcugugcggccgcuccugcagcuccaaccucuacaaggggguguacgagcugcagagccuggaccucaacauggagacccugaacaugugcaugccgcuguccugcaccaagaacaacagccaccacuacauccgggucggcaacgacacgggccucgagcugacccugaccaacaccuccauccucaaccacaaguucugcaaccugagcgacgcccacaagaaggaccuguacgaccacgcccucauguccaucaucagcacguuccaccuguccauccccaacuucaaccaguacgaggccaugagcugcgacuucaacgggggcaagaucuccgugcaguacaaccugagccacuccuacgccaucgacgcggccaaccacugcgggaccguggccaacggcauccuccagaccuucaugcgcauggccuggggcgggagcuacaucgcgcuggacuccggccgggggaacugggacugcaucaugaccagcuaccaguaccugaucauccagaacacgaccugggagaaccacugccaguucucccgccccagccccaucggcuaccucgggcugcugagccagcggacccgcgacaucuacaucucccggcgccgccggggcaccuucacguggacccugagcgacuccgagggcaacgccacccccgggggcuacugccucacccgguggaugcugaucgaggccgagcugaagugcuucgggaacacggccgucgccaagugcaacgagaagcacgacgaggaguucugcgacaugcuccgccuguucgacuucugcaagcaggcgaucagccggcugaagucccccgcccagaugagcauccagcucaucaacaaggccgugaacgcccugaucaacgaccagcugaucaugaagaaccaccuccgcgacaucaugggcauccccuacugcaacuacuccaaguacugcuaccugaaccacaccaucaccgggaagaccagccugcccaagugcugccucguguccaacggcagcuaccugaacgagacgcacuucuccgacgacaucgagcagcaggccgacaacaugaucaccgagaugcugcagaaggaguacauggagcggcagggcaagaccccgcucgggcuggucgaccuguucguguucagcaccuccuucuaccugaucagcaucuuccuccgccuggugaagaucccgacgcaccggcacaucgucggcaagcccugccccaagccccaccgccugaaccacauggggaucugcuccugcggccucuacaagcagccgggggugcccgugcgguggaagcgcugaggacuagucccuguucccagagcccacuuuuuuuucuuuuuuugaaauaaaauagccugucuuucagaucucaaaggcucuuuucagagccaccaaaaaaaaaaaaaaaaaaaaaaaaaaaaaaaaaaaaaaaaaaaaaaaaaaaaaaaaaaaaaaaaagaauu

SEQ ID NO: 26506 - RNA, 1714 nt, Artificial Sequence
  mRNA product Design a-1 (hSL-A64-N5) comprising derived and/or modified sequence from LASV(Togo/2016/7082;Clade VI)__AMR44577__GPCmut4 (opt1)
aggagagucccgcagucggcguccagcggcucugcuuguucgugugugugucguugcaggccuuauucaagcuuaccaugggccagaucaucaccuucuuccaggaggugccccacgucaucgaggaggugaugaacaucgugcugaucgcccucagccugcuggccauccucaagggggucuacaacguggcgaccugcggcaucaucgggcuggugacguuccuguuccucugcggccgcuccugcagccugaucuacaagggguccuacgagcugcagacccucgagcugaacauggagacccugaacaugugcaugccgcucagcugcacgaagaacuccagccaccacuacauccgggucggcaacgagaccggccuggagcugacccucaccaacacguccaucaucaaccacaaguucugcaaccugagcgacgcccacaagcgcaaccuguacgaccacgcccucauguccauccugagcaccuuccaccuguccauccccaacuucaaccaguacgaggccaugagcugcgacuucaacgggggcaagaucuccgugcaguacaaccucagccacgccuacgcgguggacgccgccgagcacugcgggaccgucgccaacggcgugcugcagaccuucaugcggauggcguggggcggguccuacaucgcccuggacagcggccgcgggaacugggacugcaucaugacguccuaccaguaccucaucauccagaacaccaccugggaggaccacugccaguucagccggcccucccccaucggcuaccuggggcugcucagccagcgcacccgggacaucuacaucagccgccggcgccggggcacguucaccuggacccucuccgacagcgagggcaacgagacccccgggggcuacugccugacgcgcuggaugcugaucgaggccgagcucaagugcuucgggaacaccgccguggccaagugcaacgagaagcacgacgaggaguucugcgacaugcugcggcuguucgacuucugcaagcaggcgauccagcgccucaagucccccgcccagaugagcauccagcugaucaacaaggccgucaacgcccugaucaacgaccagcucaucaugaagaaccaccuccgggacaugaugggcauccccuacugcaacuacuccaaguacugcuaccugaaccacaccagcuccgggcgcaccagccugcccaagugcugccugguguccaacggcagcuaccugaacgagacgcacuucuccgacgacaucgagcagcaggccgacaacaugaucaccgagaugcuccagaaggaguacaucgaccggcagggcaagaccccgcuggggcugguggaccucuucgucuucagcaccuccuucuaccugaucagcaucuuccugcaccugaucaagaucccgacgcaccgccacaucgugggcaagcccugccccaagccccaccggcucaaccacauggggaucugcuccugcggccuguacaagcagccgggggugcccacccgcuggaagcggugaggacuagucccuguucccagagcccacuuuuuuuucuuuuuuugaaauaaaauagccugucuuucagaucucaaaggcucuuuucagagccaccaaaaaaaaaaaaaaaaaaaaaaaaaaaaaaaaaaaaaaaaaaaaaaaaaaaaaaaaaaaaaaaaagaauu
